United States Patent Application Publication US 2005/0228172 A9 - sequence listing, part 40

SEQ ID NO: 147681 - DNA, 631 bp, Homo sapiens
tctcaccgctgccttgactgtgtccccatctgctgtgaagtgaatggtgtcttctaaattcgtgctgagccctaattgctgaaaactgtaagacatgcaatggggggattatgtgcatcttcccgacaccaacatgatgctcaggaaggagacttcttgttttctcttaggattcttttactaaccaagattttgcctctactgcatatttccctttgctgattgtccctcccttttgacagaagatggcccagggcattcactactaagtctcaacctcttacccaaagccctcagtctagtgttgctctttccttcgtgctatttttgtttctttcttttcttgtaatcatcttggcaataaaataatcagttttttctttctacctattaaagatgttaccttagttaattacaggggtttccttcagaatgataartggtctttcaaaatgatgtaaagagatctaaatccgtgtgctccagaacttgaatgaagctctgtctagcacgggtgccagtgactctcccagagtgctccatgcagctggacccacagagtccctctgtgctgtcatatcacccactgccttctgtgaatgagatattctgattagaatcctggtggatg

SEQ ID NO: 147682 - DNA, 458 bp, Homo sapiens
tccctcccttttgacagaagatggcccagggcattcactactaagtctcaacctcttacccaaagccctcagtctagtgttgctctttccttcgtgctatttttgtttctttcttttcttgtaatcatcttggcaataaaataatcagttttttctttctacctattaaagatgttaccttagttaattacaggggtttccttcagaatgataaatggtctttcaaaatgatgtaaagagatctaaatccgtgtgctccagaacttgaatgaagctctgtctagcacgggtgccagtgactctcccaragtgctccatgcagctggacccacagagtccctctgtgctgtcatatcacccactgccttctgtgaatgagatattctgattagaatcctggtggatgctatttgagccagtgcccccacaactcctacgaaagccgaggaccacaggcc

SEQ ID NO: 147683 - DNA, 253 bp, Homo sapiens
cgtgtgctccagaacttgaatgaagctctgtctagcacgggtgccagtgactctcccagagtgctccatgcagctggacccacagagtccctctgtgctgtcataycacccactgccttctgtgaatgagatattctgattagaatcctggtggatgctatttgagccagtgcccccacaactcctacgaaagccgaggaccacaggcccctgaagacaatcacaggtctctagactcacagctcatgaccgt

SEQ ID NO: 147684 - DNA, 576 bp, Homo sapiens
gtacaggactaacactgagacctggttatgtaatggtgtagtactgagtatcatccccaaatagtgaggtttcattccawgaagactatgcatgtatctcatttgggaaaacagcttttgcaggtgtaaattaaggagcttgaaacagggagatggtcttagattaatcaactgggacttaaatgcaaactcaagtgtcctaaaaaaaacaagaggtagagagacatttagcatagactgaagtggagaaggcagtgtgaacacagagacagagatgcagtcgatgtgtccacatcccgtgagagagaagccaccagaagctggaagagctaaatcagactgctccctagagcttcagaaggagccagaactgatgactccaagatcttagcccagtgaaactgatctggacttctgaactatgagagattccattcctgttgtttgaagctaccacatttttgagaacttgttacagtagcccgaggacactaacacaaatgggctccaggaaaatccagactaaaggtgttgtgttggtttgcaatctccttgcttaactttctgatactagac

SEQ ID NO: 147685 - DNA, 576 bp, Homo sapiens
gtacaggactaacactgagacctggttatgtaatggtgtagtactgagtatcatccccaaatagtgaggtttcattccatgaagactatgcatgtatctcatttgggaaaacagcttttgcaggtgtaaattaaggagcttgaaacagggagatggtcttagattaatcaactgggacttaaatgcaaactcaagtgtcctaawaaaaacaagaggtagagagacatttagcatagactgaagtggagaaggcagtgtgaacacagagacagagatgcagtcgatgtgtccacatcccgtgagagagaagccaccagaagctggaagagctaaatcagactgctccctagagcttcagaaggagccagaactgatgactccaagatcttagcccagtgaaactgatctggacttctgaactatgagagattccattcctgttgtttgaagctaccacatttttgagaacttgttacagtagcccgaggacactaacacaaatgggctccaggaaaatccagactaaaggtgttgtgttggtttgcaatctccttgcttaactttctgatactagac

SEQ ID NO: 147686 - DNA, 576 bp, Homo sapiens
gtacaggactaacactgagacctggttatgtaatggtgtagtactgagtatcatccccaaatagtgaggtttcattccatgaagactatgcatgtatctcatttgggaaaacagcttttgcaggtgtaaattaaggagcttgaaacagggagatggtcttagattaatcaactgggacttaaatgcaaactcaagtgtcctaaaaaaaacaagaggtagagagacatttagcatagactgaagtggagaaggcagtgtgaacacagagacagagatgcagtcgatgtgtccacatcccgtgagagagaagccaccagaagctggaagagctaaatcagactgctccctagagcttcagaaggagccagaactgatgactccaagwtcttagcccagtgaaactgatctggacttctgaactatgagagattccattcctgttgtttgaagctaccacatttttgagaacttgttacagtagcccgaggacactaacacaaatgggctccaggaaaatccagactaaaggtgttgtgttggtttgcaatctccttgcttaactttctgatactagac

SEQ ID NO: 147687 - DNA, 486 bp, Homo sapiens
catatgactgttaatatctcacataacattctgagttactcaagaatgcataaaagaggcactagatactcttctcatgtatgtgtgtgtgtctgtctatacatggatgtacacttcatggtgcatcagctggcggaaccctcaggacaccccttcacatcctcagtgccccatttcacacatgaggaaactgttcatgacagcacatggctgatttgcataaaagtcacttggtcagcagttgtcgaagctgaaattggaatctaggtctgtctgaccttaacttatgttccttccacagagccacgttcattccatagagggacccaccacctataaaaccagaaaagagacaaagccagaagtgcagggtggatttcttaacacaagctcactrcgacctctagtcctcatcacgctgacactaagcttaaacccagacccttctacagttttgtctacaaagcacaatttgcccaaagcctt

SEQ ID NO: 147688 - DNA, 319 bp, Homo sapiens
aaaacacaccccttccccttgcattggtttcctgttgctgctgtaacaaattaccacaacyttactgctccacatcacacaagtgtattatcttacatttctggaggtcagaagtctcaatgaagtaaaatcaaggagtaatagggctctattcattctaggcttcaagagagagaatccaatgtcgagcattccatctttctgatgttcccacattcctagcagcatggccccttcctccatcactccagtttccctgtccattgtcccaggtcctctctggctgttaccttcctccctccctattgtaaggaccctt

SEQ ID NO: 147689 - DNA, 540 bp, Homo sapiens
tttttgacttgttcataagtaatgatcatagattccagatattaggacaatgatgtctttagtgggtgtattattcattccacaaacaactctcatcatccacacaatggccttcccctaaggtagaataaaaatatcacaaggcagatttatgaggcgatcgacctagaaaaaacatgagactctaggactgtctgatgtgtggatgtcaaatcctgggagattctgagcctctgctctatgtggactctatrttgtgtagccatttgtggaaggcttctgtgattttgtgacctagagaaaacgaatctctgctaaaatcaaatctaagaaagattggcaaagggaatttaaagatttcctaaatttttggaatttccctaggcattaaaacatgagaagtggcaataattcaaaccaacgatgccctccaagaatgaggatttttccaatgcattaggttgggtcccctcagtgagaaggatgccaaagattcgcatgcaggcagtatatttacaaagtgcgggaaacaagcaagtg

SEQ ID NO: 147690 - DNA, 394 bp, Homo sapiens
ttagttgaaataatgagacctggtattactagtcagctctccatgctggagaaccataagaaattataccaaaggcagraaaggggatagaatatggggatcatcacaccaagaataaggtgcagcccatttagcccctgggtcttaaagagacccatagctctggataatggcagatctatgcgtgacacagttatcatctttgtgcatcttcagagaattgtttttccttttactcctagggacaatgtcttaagtttgttagtaaattctattgaatttattaaagatgcttctgataaattctttttatattcatttcaaacaagaagcaatttcacactgacattgttattatagcactaaatacttttacactcatcaaattcctttg

SEQ ID NO: 147691 - DNA, 394 bp, Homo sapiens
ttagttgaaataatgagacctggtattactagtcagctctccatgctggagaaccataagaaattataccaaaggcaggaaaggggatagaatatggggatcatcacaccaagaataaggtgcagcccatttagcccctgggtcttaaagagacccatagctctggataatggcagatctatgcgtgacacagttatcatctttgtgcatcttcagagaattgtttttccttttactcctagggacaatgtcttaagtttgttagtaaattctattgaatttattaaagatgcttctgataaattctttttatattcatttcaaacaagaagmaatttcacactgacattgttattatagcactaaatacttttacactcatcaaattcctttg

SEQ ID NO: 147692 - DNA, 469 bp, Homo sapiens
ccatgcatcttccctggaccagcactggcactggcatgggccctggccctgacccttcgctacttaaggccataccctggcccagccctggtcctgaccctgtcctggccctaatttggcctggctctaccctggcatgctattctggccctagccctgaccctgtccctgtccctgtcctggccccagccccattgctggtcctgccacggcccttgtcctgacattgccctttcctggttctggccctggccctgtcccagccctgctctggccctggtctgaaccctggccctgcaatagacctgccttggtcctgcccagaccctggctctggccctacctctgccctggccataccctkgccctggcctggaccccagtcctggtccttgtcctgccccagccgtggccctggccctgccctgcctgtgccctgttctatcctgggctggcctgccatggcctg

SEQ ID NO: 147693 - DNA, 278 bp, Homo sapiens
tgagatgagccagccctgcagctgtgctcagcctgccccatcccctgctgatttgcctgttcctagagcacagccccctgccctgaagactttttataggctggtcacacccggtgcaggagtcagccccagtcaggacacagcacrgacatgagggcccccactcagctcctggggctcctggtgctctggctgccaggtaaggaaggagaacactaggattatactcggtcagtgtgctcagtactgtctggaacttcagggaagtcctctgataa

SEQ ID NO: 147694 - DNA, 278 bp, Homo sapiens
tgagatgagccagccctgcagctgtgctcagcctgccccatcccctgctgatttgcctgttcctagagcacagccccctgccctgaagactttttataggctggtcacacccggtgcaggagtcagccccagtcaggacacagcacagacrtgagggcccccactcagctcctggggctcctggtgctctggctgccaggtaaggaaggagaacactaggattatactcggtcagtgtgctcagtactgtctggaacttcagggaagtcctctgataa

SEQ ID NO: 147695 - DNA, 383 bp, Homo sapiens
acagccccctgccctgaagactttttataggctggtcacacccggtgcaggagtcagccccagtcaggacacagcacagacatgagggcccccactcagctcytggggctcctggtgctctggctgccaggtaaggaaggagaacactaggattatactcggtcagtgtgctcagtactgtctggaacttcagggaagtcctctgataacatgattaattgcgacaatatttgtttttatgtttccaacttcaggtgccagatgtgacatccagatgacccagtctccatcctccctgtctgcatctgtaggagacagagtcaccatcacttgccgggcgagtcagggcattagcaataatttaaattggtatcagcagaaac

SEQ ID NO: 147696 - DNA, 383 bp, Homo sapiens
acagccccctgccctgaagactttttataggctggtcacacccggtgcaggagtcagccccagtcaggacacagcacagacatgagggcccccactcagctcctggggctcctggtgctctggctgccaggtaaggaaggagaacactaggattatactyggtcagtgtgctcagtactgtctggaacttcagggaagtcctctgataacatgattaattgcgacaatatttgtttttatgtttccaacttcaggtgccagatgtgacatccagatgacccagtctccatcctccctgtctgcatctgtaggagacagagtcaccatcacttgccgggcgagtcagggcattagcaataatttaaattggtatcagcagaaac

SEQ ID NO: 147697 - DNA, 383 bp, Homo sapiens
acagccccctgccctgaagactttttataggctggtcacacccggtgcaggagtcagccccagtcaggacacagcacagacatgagggcccccactcagctcctggggctcctggtgctctggctgccaggtaaggaaggagaacactaggattatactcggtcagtgtgctcagtactgtctggaacttcagggaagtcctctgataacatgattaattgcgacaatatttgtttttatgtttccaacttcaggtgccagatgtgacatccagatgacccagtctccatcctccctgtctgcatctgtaggagacagagtcaccatmacttgccgggcgagtcagggcattagcaataatttaaattggtatcagcagaaac

SEQ ID NO: 147698 - DNA, 538 bp, Homo sapiens
cgctacagggctcctcaaaacaccctttgtgtcactgtgcctttctctccacygcccttgacactaatttaatcaagatgtccttctagcttgtagatggggtggactcgtcagttccgcattcctcctggcattagggctttgcagccaaatatgtagacttgaaaccagcaagttgagatggggtcagggtctccaagccagagcatgcagaccttttgggtaaaccctaggcataaagagtggactagctctgtggtatgtttttataatttttagttaaccctaaatattctggaggagttgagaaatattttcttaggcaagtatgtagacatttagaagcatttttttttaaagcaagaaaaaagacaaaattttatctctatatttttggactcatcagtactgtttctagaatgcagaactagaaaaaatagctccttgtcacaactatgcctgtcctttttctcctagtctgcactctccataattttgcaaaatctgaaaacttcagttctttcccaagaaccagatt

SEQ ID NO: 147699 - DNA, 538 bp, Homo sapiens
cgctacagggctcctcaaaacaccctttgtgtcactgtgcctttctctccactscccttgacactaatttaatcaagatgtccttctagcttgtagatggggtggactcgtcagttccgcattcctcctggcattagggctttgcagccaaatatgtagacttgaaaccagcaagttgagatggggtcagggtctccaagccagagcatgcagaccttttgggtaaaccctaggcataaagagtggactagctctgtggtatgtttttataatttttagttaaccctaaatattctggaggagttgagaaatattttcttaggcaagtatgtagacatttagaagcatttttttttaaagcaagaaaaaagacaaaattttatctctatatttttggactcatcagtactgtttctagaatgcagaactagaaaaaatagctccttgtcacaactatgcctgtcctttttctcctagtctgcactctccataattttgcaaaatctgaaaacttcagttctttcccaagaaccagatt

SEQ ID NO: 147700 - DNA, 538 bp, Homo sapiens
cgctacagggctcctcaaaacaccctttgtgtcactgtgcctttctctccactgcccttgacactaatttaatcaagatgtccttctagcttgtagatggggtggactcrtcagttccgcattcctcctggcattagggctttgcagccaaatatgtagacttgaaaccagcaagttgagatggggtcagggtctccaagccagagcatgcagaccttttgggtaaaccctaggcataaagagtggactagctctgtggtatgtttttataatttttagttaaccctaaatattctggaggagttgagaaatattttcttaggcaagtatgtagacatttagaagcatttttttttaaagcaagaaaaaagacaaaattttatctctatatttttggactcatcagtactgtttctagaatgcagaactagaaaaaatagctccttgtcacaactatgcctgtcctttttctcctagtctgcactctccataattttgcaaaatctgaaaacttcagttctttcccaagaaccagatt

SEQ ID NO: 147701 - DNA, 538 bp, Homo sapiens
cgctacagggctcctcaaaacaccctttgtgtcactgtgcctttctctccactgcccttgacactaatttaatcaagatgtccttctagcttgtagatggggtggactcgtcagttccgcattcctcctggcattagggctttgcagccaaatatgtagacttgaaaccagcaagttgagatggggtcagggtctccaagccagagcatgcagaccttttgggtaaaccctaggcataaagagtggactagctctgtggtatgtttttataatttttagttaaccctaaatattctggaggagttgagaaatattttcttaggcaagtatgtagacatttagaagcatttttttttaaagcaagaaaaaagacaaaattttatctctatatttttggactcatcagtactgtttctagaatgcagaactagaaaaaakagctccttgtcacaactatgcctgtcctttttctcctagtctgcactctccataattttgcaaaatctgaaaacttcagttctttcccaagaaccagatt

SEQ ID NO: 147702 - DNA, 511 bp, Homo sapiens
gacagcacttttcaagaaaagacttttttctctcttacaaatatcatgttarcagtacttgttttctccagaaataatgaggaaataaaaacataagtatgtgggtaattagtgtagtttcttaaagaaatgagttaggcaacaggctaataatgtatacttagctggcttttgaatgccaacaatcatattctttacaaggcacagagaagatttttctgaagaataagtatgtgaacctgagaagtaatcaccacttggtagtgacaatatggatagggtgaagggtgtcatcaagaagcaatgaaaagatacatttgcagttcaatttgaaaaccatgatgtttaatacatatagtaataaagaatactttctcctatttcaaaattattttagaatttaagatagaagctaaaatacctagggataatgatatgactatcaaaaattaaaaattaaaggacattctgagtattataagaatgagaacttattacccaatgaacaggg

SEQ ID NO: 147703 - DNA, 511 bp, Homo sapiens
gacagcacttttcaagaaaagacttttttctctcttacaaatatcatgttagcagtacttgttttctccagaaataatgaggaaataaaaacataagtatgtgggtaattagtgtagtttcttaaagaaatgagttaggcaacaggctaataatgtatacttagctggcttttgaatgccaacaatcatattctttayaaggcacagagaagatttttctgaagaataagtatgtgaacctgagaagtaatcaccacttggtagtgacaatatggatagggtgaagggtgtcatcaagaagcaatgaaaagatacatttgcagttcaatttgaaaaccatgatgtttaatacatatagtaataaagaatactttctcctatttcaaaattattttagaatttaagatagaagctaaaatacctagggataatgatatgactatcaaaaattaaaaattaaaggacattctgagtattataagaatgagaacttattacccaatgaacaggg

SEQ ID NO: 147704 - DNA, 472 bp, Homo sapiens
atataaatcaacatacaaaaatcagtagcatttctatatattgatagtaaactagctgaaacaagaaattaagaaagcaattccttttacaatagctacaaaaatgtacttagaaataaatttaaccaaggaagtaaaagatttcgacaacaaaaatgacaaatattaatgaaagaaattaaagaaaacacaaaaaaggaaagacatccacgtttatagattgaaataactaatattcttaaaatgacccactatcctatgtgatttacaaatttggtacaatcactagcttgtatttttaaaagcacctttgttgcatattcttaagatattcaatgacaatgccyggatttaagtttgaggtattattatatctattttatactgggcacaatataatgttatcagaggtaacggttttgattggtcctaggtcatacagtaatatatacattgtgatttatagacatgc

SEQ ID NO: 147705 - DNA, 471 bp, Homo sapiens
taaaattaaaattaatgaattataatttttgttgcttgggaaaaagaatagacacacacgtgacagtgcatcacttcaccccatcatttcatctcatcatttcatcatttcatctcatcattttatctcatttcatctcatcccatctcatctcatcatttcatatcatctcatcatttcatcaaatctcatctcatttccatttcattttcattatttcatttcatcatttcatttcactatttcatttcatttcatctaatttcatttaattcattatgtcatttcatataatctcatttcatttcatctcatatttttgatatcatttttcatctcatttcatctcaattcatctcatcatttcatctcctcatctcatcatttcctcctttcwttacaacatttcatctcatttcttctcatctcatttcaatttcattatttcatctcatttcattatttcaccta

SEQ ID NO: 147706 - DNA, 498 bp, Homo sapiens
ggctgggcagcaggtggaatttgkgggttgggagatgttggtcaaagggtacaaaatttcatttaagtaagaagagtaagttcaagagatctattgtacagcttagtaattatagttaataacaatttatagcattttaaaaattgtgaagagtagattttaagaaatctcaccacaaaaaataagtatgcaaagtaatgcatatattaatgaactccatctagccattccacatgtacccttggacttcaaaacttggaaaaaatgaattgaaaatataaactttatgtctcaacataagctccatcaagttcaagacacttgtataagtcatgctacagccatttagcccatccttaaggaactgaaggtcctgagaatttaaccatatcaatgcagtcttttacacattaactgaaaagggtatcctttacagattaagattacgaaacaaaaagaagttaggaggagccaaatcaggactgtaatgatttccca

SEQ ID NO: 147707 - DNA, 498 bp, Homo sapiens
ggctgggcagcaggtggaatttgtgggttgggagatgttggtcaaagggtacaaaatttcatttaagtaagaagagtaagttcaagagatctattgtacagcttagtaattatagttaataacaatttatagcattttaaaaattgtgaagagtagattttaagaaatctcaccacaaaaaataagtatgcaaagtaatgcatatattaatgaactccatctagccattccacatgtacccttggacttcaaaacttggaaaaaatgaattgaaaatataaactttatgtctcaacataagctccatcaagttcaagacacttgtataagtcatgctacagccatttagcccatccttaaggaactgaaggtcctgagaatttaaccatatcaatgcagtcttttacacattaactgaaaagrgtatcctttacagattaagattacgaaacaaaaagaagttaggaggagccaaatcaggactgtaatgatttccca

SEQ ID NO: 147708 - DNA, 303 bp, Homo sapiens
  misc_feature (1)...(303): n = A,T,C or G
cctgcccttgctctggccctgtccctggcccagccttgaccctgrccctggccctgacaatccccaggtctgacacntgccatgcttggccctggcccctccttttagccctgccctagccctgccttggccctgtgctatcttagtcctgccctggccctgaactcaccctggccctaccctcaccctacactggccccgccctaccctggccttgccctgccctggccctgctttggcctgctctggctctggttctgccctggccttgcccttgccctggaccctccctggccgtgtttt

SEQ ID NO: 147709 - DNA, 303 bp, Homo sapiens
  misc_feature (1)...(303): n = A,T,C or G
cctgcccttgctctggccctgtccctggcccagccttgaccctgaccctggccctgacaatccccaggtctgacacntgccatgcttggccctggcccctccttttagccctgccctagccctgccttggccctgtgctatcttagtcctgccctggccctgaactcrccctggccctaccctcaccctacactggccccgccctaccctggccttgccctgccctggccctgctttggcctgctctggctctggttctgccctggccttgcccttgccctggaccctccctggccgtgtttt

SEQ ID NO: 147710 - DNA, 303 bp, Homo sapiens
  misc_feature (1)...(303): n = A,T,C or G
cctgcccttgctctggccctgtccctggcccagccttgaccctgaccctggccctgacaatccccaggtctgacacntgccatgcttggccctggcccctccttttagccctgccctagccctgccttggccctgtgctatcttagtcctgccctggccctgaactcaccctggccctaccctcaccctacactggcccygccctaccctggccttgccctgccctggccctgctttggcctgctctggctctggttctgccctggccttgcccttgccctggaccctccctggccgtgtttt

SEQ ID NO: 147711 - DNA, 303 bp, Homo sapiens
  misc_feature (1)...(303): n = A,T,C or G
cctgcccttgctctggccctgtccctggcccagccttgaccctgaccctggccctgacaatccccaggtctgacacntgccatgcttggccctggcccctccttttagccctgccctagccctgccttggccctgtgctatcttagtcctgccctggccctgaactcaccctggccctaccctcaccctacactggccccgccctaccctggccttgccctgccctggccctgctttggcctgcyctggctctggttctgccctggccttgcccttgccctggaccctccctggccgtgtttt

SEQ ID NO: 147712 - DNA, 551 bp, Homo sapiens
ggggctcaagcgatcctcccaccttagcttcccaaggagctggtattacaaacatgtgctaycacgcttggctaatttttaaaattttttttgtagaaacagagtctccttattttgcccaggctggcaggggttgggggctgagactctttcttttgtaaaagttggttctaagtgactactttttagagaaggtaccctgcctttcaaagacctcataaagacaggatttgtaccttccaatatagttaaattcacacattagaccattttatgttgaaattatattaatttgtgtcagcttatattcaatgactgttggctagatcattcttaagaaatgggaatacaggaagaatggacaattttacccaactgggaaaaaaaattctaccatcttctaattattctgacttcctcataaaaatgtgttggatgacacaatcagcttttgtttggtgttatttatagaatttctgcctccctacagatcaccccatcctgagatctgctgccttacacagtggaggctgttttctgagtgtcggata

SEQ ID NO: 147713 - DNA, 551 bp, Homo sapiens
ggggctcaagcgatcctcccaccttagcttcccaaggagctggtattacaaacatgtgctaccacgcttggctaatttttaaaawtttttttgtagaaacagagtctccttattttgcccaggctggcaggggttgggggctgagactctttcttttgtaaaagttggttctaagtgactactttttagagaaggtaccctgcctttcaaagacctcataaagacaggatttgtaccttccaatatagttaaattcacacattagaccattttatgttgaaattatattaatttgtgtcagcttatattcaatgactgttggctagatcattcttaagaaatgggaatacaggaagaatggacaattttacccaactgggaaaaaaaattctaccatcttctaattattctgacttcctcataaaaatgtgttggatgacacaatcagcttttgtttggtgttatttatagaatttctgcctccctacagatcaccccatcctgagatctgctgccttacacagtggaggctgttttctgagtgtcggata

SEQ ID NO: 147714 - DNA, 551 bp, Homo sapiens
ggggctcaagcgatcctcccaccttagcttcccaaggagctggtattacaaacatgtgctaccacgcttggctaatttttaaaattttttttgtagaaacagagtctccttatkttgcccaggctggcaggggttgggggctgagactctttcttttgtaaaagttggttctaagtgactactttttagagaaggtaccctgcctttcaaagacctcataaagacaggatttgtaccttccaatatagttaaattcacacattagaccattttatgttgaaattatattaatttgtgtcagcttatattcaatgactgttggctagatcattcttaagaaatgggaatacaggaagaatggacaattttacccaactgggaaaaaaaattctaccatcttctaattattctgacttcctcataaaaatgtgttggatgacacaatcagcttttgtttggtgttatttatagaatttctgcctccctacagatcaccccatcctgagatctgctgccttacacagtggaggctgttttctgagtgtcggata

SEQ ID NO: 147715 - DNA, 551 bp, Homo sapiens
ggggctcaagcgatcctcccaccttagcttcccaaggagctggtattacaaacatgtgctaccacgcttggctaatttttaaaattttttttgtagaaacagagtctccttattttgcccaggctggcaggggttgggggctgagactctttcttttgtaaaagttggttctaagtgactactttttagagaaggtaccctgcctttcaaagacctcataaagacaggatttgtaccttccaatatagttaaattcacacattagaccattttatgttgaaattatattaatttgtgtcmgcttatattcaatgactgttggctagatcattcttaagaaatgggaatacaggaagaatggacaattttacccaactgggaaaaaaaattctaccatcttctaattattctgacttcctcataaaaatgtgttggatgacacaatcagcttttgtttggtgttatttatagaatttctgcctccctacagatcaccccatcctgagatctgctgccttacacagtggaggctgttttctgagtgtcggata

SEQ ID NO: 147716 - DNA, 442 bp, Homo sapiens
cagctcatcactgtggctcacgcctgtaatcccaacattttgggacaccgaggtgggtggatggcttaggcccaggagttagagaccagcttgggcaacaaagtgagacctccatctctaccaaaacataaaaaataaaaaaaattagccaggcatggtggcttgcacatgtggtcccagctactcaggaggctgaggagggagaacttttgtagtcaaggaggcagaggttgcagtgagccaagatcttgccactgctctctagctctgacaacagagctagaccctgtgtaagaaaaaaaaaacagaaaacaaaaaaaraaaagaaagaaaaagaaaagaaaaaaagaaaatcaacaatatccagaagatataacagaactcagagcctcagaacaaaatattcagaatataaagaaccaggaaaatctgataagttcta

SEQ ID NO: 147717 - DNA, 415 bp, Homo sapiens
tatggaggttataaactctagtttcatatacatagcattttaaaacttttatgtcaccatttttattcctttaatgggctatgcatttgaacagagttgtagaaaatctaaatgattattactaactaaaatatggcttttaaaaacttgcaaaataaaaacagattaaaaatgtgatcaccccaatctaaattgtaatcaaatgtctgtaaagagaattcaatacattaaattgaaactatcttttgaatgtgtaaatcaaagttatgcttatcagtactaattagatgaagtctttaattaaatctagttattcatgatagaaattttaaatatcatccaaataacatgtcwtaagtaattactgaaaaaattctagttttgacaatcttgaaataattccatggaaaacata

SEQ ID NO: 147718 - DNA, 554 bp, Homo sapiens
ttttagcaaatatgattcaccatattattaacaggtaattacaagttggtaaatattcctggaatcaagtgtggcragatcaaattcttcaaaattcaaagacactttaatatcaacacaaacaagaagagaaagattaacttcaatatggtgaaaaatatctcaaggtggggaaactgtcttatgttgacacattagaggcatctctactataatcactaatgcagtaagaatcaatattaattttgttaaactaatatgagaaacaaccactacatccactggaaatggaggagttaagtatttgtttccatagaaaatctaattagaattcagtagaacaacaagaaagtttaataaactagcatataaaaagcaaaattttaaaaaatatatacttttatgtgttattttatcagttagaaatctgtcagaatataaatccactacatttatgggaatataatatttagtaattagaatttacgtaatcctggataagcagaaagagaatttctggaagggtctagggagttcagagatcagaggaacag

SEQ ID NO: 147719 - DNA, 535 bp, Homo sapiens
atcatgtgatttttatttttaattctgtttatgtgatgtatcacatttgttgacttgcatatgtaaaactatcactgcatccctggtatgaaacccacttgatcatgatgtataatcttcttgatatgctgttggatttgattagctagtattttgttgaggatttttgcatcaatgttcatcagtgatattggtctgtagttttgtttttgttgttatgtcctttcctggtttgggtattagagtaatcctggattcacagagtgatttagggaggattccttctttctctgtcttttgggatagttttagtaatatcggtaccaattytttgaatgcctgataaaattcagctgtgaatcctctgttcctgaactatttgctgacaatttttaaattactttttctatcttgctacttgttactggtctttccagagtttctatttcgggaatttatctgtctcctctagatttttctagtttgtatgagtaaaggtgtttatagtggcgttgaatgatcttttgtatttctg

SEQ ID NO: 147720 - DNA, 560 bp, Homo sapiens
atcaatgcagaaggcgggtgctttctacatttccaacagaggtaccaggctcatctcattgggactgcttagacagtgggtacagcccactgagggcaagcagaagtagggtgaggcgtcacctcactggggaagcagaagcagggtgggacgtcacctcactggggaagtgcagggggtagrggaactccctcctctagccaagggaagccatgagggactgtgccatgaggaatggtgcactctggcccagatactatgcttttccaatagtctttgcaatgctcaaacaggagattccctcaggtgcctacactaccagggccctgggtttcaagcacaaaactggttggccatttgggcaggcaccaagatagctgcaggagatttttttcatatcccagtggcacctggaacaccaacgagacagaactgtttactctcctgggaagggggcggaagccagggagccgagtggtctagctcagtggatcccacacccatggagccctttcagctaagatccactggcttgaaactctcacagccagcacagcagt

SEQ ID NO: 147721 - DNA, 600 bp, Homo sapiens
ggcccagaaaagatatatcacctcctcatgttcygtttagtaagatggctccaccaaagccatatagtgctgctgagtgcccaggaagaagagaaaatagatttaatgaggagatggataatagtttttgccatatttctccacgatccttaactgctcattacaacttttcactgacttcattttatgttctaaatattagttctggctctctagtcttaacactactacccatgatcatctctcttctgtactgaagcaatagtcttctaaatcaacacttcaatctagattctattctgactgatcctctccagaaagctttccctgaaccctctgacccagctaaatgtacccctttctctctccaaagcaccgtatgcattttagtttattatgttgcttttctattatttattacatcttaatatattttataatatttaaaatactgcttctgtcctcttactgcactgtgaaatcttcaaagagatgaatttttttatttcagttttttaatgccttatagaatttctgcattgataatatatagagctaattttaatggagaagaaattggtttctctgctgagaatgtta

SEQ ID NO: 147722 - DNA, 600 bp, Homo sapiens
ggcccagaaaagatatatcacctcctcatgttccgtttagtaagatggctccaccaaagccatatagtgctgctgagtgcccaggaagaagagaaaatagatttaatgaggagatggataatagtttttgccatatttctccacgatccttaactgctcattacaacttttcactgacttcattttatgttctaaatattagttctggctctctagtcttaacactactacccatgatcatctctcttctgtactgaagcaatagtcttctaaatcaacacttcaatctagattctattctgactgatcctctccagaaagctttccctgaaccctctgacccagctaaatgtacccctttctctctccaaagcaccgtatgcattttagtttattatgttgcttttctattatttattacatcttaatatattttataatatttaaaatactgcttctgtcctcttactgmactgtgaaatcttcaaagagatgaatttttttatttcagttttttaatgccttatagaatttctgcattgataatatatagagctaattttaatggagaagaaattggtttctctgctgagaatgtta

SEQ ID NO: 147723 - DNA, 580 bp, Homo sapiens
gccctcttaccactggttgaaaaacagaggcaataggccaagtagagcaaatcaagacactacagagaaataaaatcagaacacttattcaatctcatctgattccaaccccatccctgaatttttttcaactatataaacctgtaatttccctttatttttaaacttagtttgagttgggtttctaactatttaaaactgacattcaaagtgaaatgtgrgaacatttaatttttcaatatatttcccaacagtagttgaaataattttttcattggttagcagatatattttctgagacaaatataacaaggtttgtacctgagggaagcattgctgcatgtcaaatcgaaaaaggctggacttaggagcccacactgaggatagacgctctagctctagaaattaggcagggagcaggcacgccaactctagatgcacacggtactatgctttagaagaacccgtgcttagtttaatgtcttgctgtcatcatcctgaaattgttgccaattatgtagtcaaccctgaaatgggaggtaaattctgtttttctgagtgaagcacatagataagtctt

SEQ ID NO: 147724 - DNA, 583 bp, Homo sapiens
taccactggttgaaaaacagaggcaataggccaagtagagcaaatcaagacactacagagaaataaaatcagaacacttattcaatctcatctgattccaaccccatccctgaatttttttcaactatataaacctgtaatttccctttatttttaaacttagtttgagttgggtttctaactatttaaaactgacattcaaagtgaaatgtgggaacatttaatttttcaatatatttcccaacagtagttgaaataattttttcattggttagcagatatattttctgagacaaatataacaaggtttgtacctgagggaagcattgctgcatgtcaaatcgaaaaaggctggacttaggagcccacactgaggatagacgctctagctctagaaattaggcagggagcaggcacgccaactctagatgcacacggtrctatgctttagaagaacccgtgcttagtttaatgtcttgctgtcatcatcctgaaattgttgccaattatgtagtcaaccctgaaatgggaggtaaattctgtttttctgagtgaagcacatagataagtcttgaaaataagt

SEQ ID NO: 147725 - DNA, 620 bp, Homo sapiens
ttggcaggctacctacccgagtacagacaagttcacccacagaagagttttgttgctcttggaaatatttttattgttgtgtatawgggcaatggaattttttaaatcaaacatttgagactgtgacttcacatagacatagctcatctgaaatatttatcatttagtatccatccttataacctcaaaatagacataattaaatatttatattttactttattctatcatgaatttgggatggttaagatatataataaaattcaatagtttttaactgagtataaaaaggagaaactcataactgggaaaatgtaagatttattttcaacactgtgacagtttatgtaacatgaataccctagccatttaggtgatttttcacactttcttttgcaccttatcaaattgttcaattcattattatgtttattataaaactaaatatgtttctatttatattgctgaagttctatcagtcttcttaaaaataaatcaaaaaagtgagaaagatatttctgaaatgtcaggggaaataatgttcatgtagttgaatgggaaataagacaccagattcagataaatattcacccggtaattttctataagaaaaaaattaa

SEQ ID NO: 147726 - DNA, 620 bp, Homo sapiens
ttggcaggctacctacccgagtacagacaagttcacccacagaagagttttgttgctcttggaaatatttttattgttgtgtatatgggcaatggaattttttaaatcaaacatttgagactgtgacttcacatagacatagctcatctgaaatatttatcatttagtatccatccttataacctcaaaatagacataattaaatatttatattttactttattctatcatgaatttgggatggttaagatatataataaaattcaatagtttttaactgagtakaaaaaggagaaactcataactgggaaaatgtaagatttattttcaacactgtgacagtttatgtaacatgaataccctagccatttaggtgatttttcacactttcttttgcaccttatcaaattgttcaattcattattatgtttattataaaactaaatatgtttctatttatattgctgaagttctatcagtcttcttaaaaataaatcaaaaaagtgagaaagatatttctgaaatgtcaggggaaataatgttcatgtagttgaatgggaaataagacaccagattcagataaatattcacccggtaattttctataagaaaaaaattaa

SEQ ID NO: 147727 - DNA, 581 bp, Homo sapiens
actcacaatcatggcagagggcaaaggggcaggcatatcacatggccagagcaggagcaagtgagtgagagaaagcgagaatgaaagagagcaagcagtcgacggagtgagctacagtaagaggggaagtgccaaacttttaaacaaccagatctcgtgagaactcactatcatgagatcatcatctaggggatggtgccaaacctttcctgagaaacccactcccatgatccaatcacctcccaccaggccccacctccaaccttggggattacaattcaatatgagatttaggcaagaatacgtatccaaactatatcaactacttacagcctgctttaacttttcttaagagttataaacatttatgtctatgttaatacacatatattttcacagctataattaaaagcgaaggtaagacattcaaattcatcaaaactgagtctagtgacttgaccaaaagcacamagtcagactggagctcagccttctactctcacctttgagttctgccactgacccaggaaaggtaggcctcagttcacaggccagccctggcctctgctgttgtcatatct

SEQ ID NO: 147728 - DNA, 490 bp, Homo sapiens
gtaaaattaaataaatccaaaaatgtattttcaaatacacaaaacaattacatgcacaaattaacaaaggaaatcaacaattttttgagaaaaaatgaaaatagggattaataaaaggaaataatgagatatagaaaaatataagaattgtatttttacaatataatcccctagaaaaattggacacttataaaggaaaatactgatgacattcttcagctctgtgttcccactcgaatctcattttgatttgtaattcytataatccccacatgtcaaggtaaaagcaggctgcccaagccagcagcggcaacctgcttgggtccccttccacactgtggaagctttgttctttcgctcttcacaataaatcttgctgctgctcactctctgggtctgtgccacctttatgagctgtaacactcacagcgaaggtctgcagcttcactcctgaagccagcaagaccaccagcacactgggagggacaaa

SEQ ID NO: 147729 - DNA, 572 bp, Homo sapiens
actaagcatttcctaaggaaataccacaggcttatgcaaatgaaaatgtttcatttttggtagaaaataatggctaatggagcattttctttagagatcaagaaaaatgttattaatgtatttatatgaaccacatgaataaatatgttagtatattaattatatagtgcttcttggttctaaatagaaatattatcctattaatgtttaatgctcagtgaatgaaaataactcacaactaagctgtttaatgtctcattttctgcttgcaagtcttaagtaaatttttacatgttatagtaaaagatcttgtcagaacttcttatttcctggggagctagcaaatgataataaatgcacttacaaaaaagtttcaaactctagtaattgtctttaataaattgtccytctcctccctctttgtctatccaccatactcattaaagagaggcttccatattgagagcccagaaatcaatctaagtacattcgccataatcgattgcacccaacaggatattcttcatgtaacaaatacttacatggattgtatcataatggcattggggccc

SEQ ID NO: 147730 - DNA, 462 bp, Homo sapiens
tccaggcagcatctgcagcccactcactgcatcttaacaagggcccggcactgtgcctcacaggagcccaggcaaggtctggggaaggggactgaagactgctgagatgcagagcatctgagcactccatcccggaagtgccagagtgctacgcagggttgggccaccaaaggtttgtcctccaaggagggtccccaagacagaaataactcaggaagccctgtcctgagtgtccctgggtgctgctgcttgggcctgcactgccgcatggtgttggtgtcagccagcggcctgtgagagccctgccaggtcatcgggaggtgtgtgaggctctgggcaaagccctagctttgaagtcagatgggygtagggcccgaagctggccctgccagccacatgcaggcagcgaggcattatgcattcctgttccatggtgaggataacaagtatctttagagttgt

SEQ ID NO: 147731 - DNA, 543 bp, Homo sapiens
gatctgcaggtgcttccatcccaaagctcaagctgtagatgagagaatggaagcccagagtcggggaggccacagggccaaggtcacatagctgggcagggaaagattcagggctaggagccaagctgccagactccaaatccatgctggatttctccatagcccagtggctttccctcatttaaaattacatatatataaatatatatatatatatacacacacacatatataaatatacatatataaatatatatacaaaatacatagataaatatatataaatatacatatataaatatatatataattacaaaattagcattgtcagaatgtgaaagacacagaagcacaaaatacatttgtaataaaatctctagctgaagctaatcactgcttcttgcactccctgccccacctcataaaatgcacacatgcattcacacacatgcacacattcacacacacaaatacacacacacacacaaatacacacacacrcacacacacacacgtggtatccagctcctttggtagactttt

SEQ ID NO: 147732 - DNA, 613 bp, Homo sapiens
acttggctgcccctcagaattacccagggagtgttttaaaagattccaacttacttggtcggagtatggctgagcacgggcatttttaaagtctctccaagtgattccactgtactacggagtctgagagccactcatctaaaggacaccttgcccccaaagtgtccccttacacattcatgtcctgtttgtgttacagtcatgctggcaccagatgagctgctgcagactcatgaggaaagagtcaagacaggctctttgaaacctccctctccaggcatgccacgtgaacagaagttccaggagacagaagagaggggtgacaagaaattgccctgatcaaactgccacagtgacacaccatgaaaaacacacagagattggctctgtggcaatggcwtcatacccaggtcacaggtgcaaatttggtgcagcaaagcagcattaaatattttgcattaaattgatgttaatttgcttttgctggttttatggcttatttttatatctggaatgatgtttttgtttcccattatatataaactataagcaaaggaagtttattcctacctttggtttgtaaaaatttaagtagtgttcaaatacaatcttt

SEQ ID NO: 147733 - DNA, 619 bp, Homo sapiens
aaaaaccaagaaaaggaaacagaaaaacaagccatttcttctttcttattaactcaacaatcccatgatccactgtatgtgtttttagggaaaggatcacagaggtcaatccacgtatcagtgatcctgatgtttctatcaaatgaatcatttgaaatgggatcttcagtttatttgttcttaatcacatcagcgctgttcacaatgaaaagtgtctatgccatgtgtttggatgtgaagaagtttttatcacagcaaaagtataaaggcttgtattacaacctggtaatctcagtggcttccagtttttggcttagttggagtcaactttgcttaaagagaggaaamctatgtatagccaacctaataaatgaaagtagcccagcccagtttccaaggtggtaaagcaatacacccacaagccacaaaaccccactctgggaaaaaatgaggcagacttttggcctatcgtgctttttatccttttctttccacccctctttctttcccacacaccaggggggtgaaagacaccacgtcatttgtacggatcaagctctcttcttgtaagtttccagttaaaccattcttttgtagctgacacctattaataatttaa

SEQ ID NO: 147734 - DNA, 576 bp, Homo sapiens
cctgggttttctggtcatgaccaaccagcaccctactacccacttgctttagcctgagtctaaggacagtggcctaggccctgaggcctttgggcacaaaaatcagaagagtatagacatcccgtgagcttcaggacatgtgtatattgccagcaactgtgcctgcccatccactggggtctttttaggaaatccaggawtctcaaagaagataagcccttaataaaggaagacaggtggaatctcaatctctgaacagcctgtggaagcaagaaattgcccatgatgggaatagtcaagatacatcaaatgggggaaactttccaggttggtaaatcccacactttgcacaaactaaaatacagaatgttgattctttgaaacagaccaggtgttgagacggagagagagagagagagagaggagatccaaggtcaaaacaagtttgaacagattccctgctttctcagggtctttactatgctaacatgccatgactgttcaatgctgtggagctagggggtgggagggggtgtgtcagtgcagcaacccctttagggggccatctctccacac

SEQ ID NO: 147735 - DNA, 593 bp, Homo sapiens
aagctttcaagcagtttcctggaacaaaaaaaagagagagagaggagtgtctctgaaaattagacttagcatatcgcacaaggggcaaagaatagagagactggatttgttggaaagaatgccagctgcctgcctaatgcacctcgctgcatctcagtcttttcgcccataaaacagaggccatggcacccaccttgcaaagtgcttgtgaggaggaagcaagatttcacatgtgaactggtgtctcttcagaatggcctggcctcagggtcagctgcacctgggctccaaccctggtcccatcgcctattatagaagcagttcttaaacatctgtataaacttctctgggccacttatcaaataaggatagcaaaagtcaccacacaggggtgtgacaatgacaaaatgagtccagtccacaargtacctagcacaacatctacacataacaggagcacaatttgtgctagttgcttcctccaccttcctctgctggagacaatttgttaagaattcacaaagacccctgtttatccctcccgttatttttaacattgcataaattgcttgccattctctcttctctctctc

SEQ ID NO: 147736 - DNA, 593 bp, Homo sapiens
aagctttcaagcagtttcctggaacaaaaaaaagagagagagaggagtgtctctgaaaattagacttagcatatcgcacaaggggcaaagaatagagagactggatttgttggaaagaatgccagctgcctgcctaatgcacctcgctgcatctcagtcttttcgcccataaaacagaggccatggcacccaccttgcaaagtgcttgtgaggaggaagcaagatttcacatgtgaactggtgtctcttcagaatggcctggcctcagggtcagctgcacctgggctccaaccctggtcccatcgcctattatagaagcagttcttaaacatctgtataaacttctctgggccacttatcaaataaggatagcaaaagtcaccacacaggggtgtgacaatgacaaaatgagtccagtccacaaggtacctagcacaacatctacrcataacaggagcacaatttgtgctagttgcttcctccaccttcctctgctggagacaatttgttaagaattcacaaagacccctgtttatccctcccgttatttttaacattgcataaattgcttgccattctctcttctctctctc

SEQ ID NO: 147737 - DNA, 415 bp, Homo sapiens
tcagatgagatgcagcagtgttctcaactggcaggggcagctttcttgggggcagggactgggcatctgtgttatctatcctgggcccatctgtttctttccccttgacacccaccacaggggtctgtgtacaagagggttggttgataccagttttaatgagggaacctatcttcttggaaccatccagaagctgtggtctttttccctggaacaccccacccccgacatcccagtgctggattcaagctggtgaaccacaggtcaaaattttcagttgctgtcttccagggccttggttgttccattgtcccctctccctgtaccaggatcatcgtgatccaatggatttgatggagttgctacacccagcttggcgtgcagrggtgtttggcacatccctgcctgtggaatt

SEQ ID NO: 147738 - DNA, 448 bp, Homo sapiens
gaattctttagagcagagccattatgactgtttgctgctgaaccttaaatctttggccaaatattctctgtagctgctactgatmaatcagaatgaacccagaagatgaaagctgatgaaagatgatgaaagttcaccattgctagacttgatctcttctaatccttaaacactagagccagataagattgcatgtcatgtgtaatctcattatagacatccttaactaagtcctaccttggttttcttttctctttggccttctttccaagtcttagcagccaaggctgtgaaataagaactggtatgaaggctcttcattcaactccacatctgaagctctgaaagtgaccttgtgcacttttcttgagcctctttactttacgttcccccattctgccacaaagctcctggtggggctggtgtctcctctactctcctgctgatt

SEQ ID NO: 147739 - DNA, 449 bp, Homo sapiens
ggaattctttagagcagagccattatgactgtttgctgctgaaccttaaatctttggccaaatattctctgtagctgctactgatcaatcagaatgaacccagaagatgaaagctgatgaaagatgatgaaagttcaccattgctagacttgatmtcttctaatccttaaacactagagccagataagattgcatgtcatgtgtaatctcattatagacatccttaactaagtcctaccttggttttcttttctctttggccttctttccaagtcttagcagccaaggctgtgaaataagaactggtatgaaggctcttcattcaactccacatctgaagctctgaaagtgaccttgtgcacttttcttgagcctctttactttacgttcccccattctgccacaaagctcctggtggggctggtgtctcctctactctcctgctgatt

SEQ ID NO: 147740 - DNA, 568 bp, Homo sapiens
cttcattatctgttggggagacacaattcaaccaataatatttgagttcctcaaaggaaaaacagctttttaaaaagccaaactgaaattcctaacattactaatatactggaacagagtcccaagaagtaggctcaatgtgtgaaggagcttcccggttccagccccsacgttaccccagcccaggcctttgtggcctcccgcctgcactgctctgtgatgggccccttgccggctgccctgacttggcctgtctcccttctgctacctccgcatcaggctgccacaccttgcatctcaccaccaggtccacctcggtcacgacaccttcctggtctaaaggccccagtggcagtcaaccacccagagggctgactgtggctcactccttttgacttcagcacccttggtaatctgcaccaacagaaacatcggccaatgagtgccgtgatttctctgcccgttttctcattcatgaaagggagaaaaaacgaactctccatgcatctactcccaatacattcccctgagaagcctgcggggaagctccctgggagcccattgccaa

SEQ ID NO: 147741 - DNA, 568 bp, Homo sapiens
cttcattatctgttggggagacacaattcaaccaataatatttgagttcctcaaaggaaaaacagctttttaaaaagccaaactgaaattcctaacattactaatatactggaacagagtcccaagaagtaggctcaatgtgtgaaggagcttcccggttccagcccccacgttaccccagcccaggcctttgtggcctcccgcctgcactgctctgtgatgggccccttgccggctgccctgacttggcctgtctcccttctgctacctccgcatcaggctgccacaccttgcatctcaccaccaggtccacctcggtcacgacaccttcctggtctaaaggccccagtggcagtcaaccacccagagggctgactgtggctcactccttttgacttcagcacccttggtaatctgcaccaacagaaacatcggccaatgagtgccgtgatttctctgcccgttttctcattcatgaaagggagaaaaaacgaactctccatgcatctactcccaayacattcccctgagaagcctgcggggaagctccctgggagcccattgccaa

SEQ ID NO: 147742 - DNA, 472 bp, Homo sapiens
ttgccctctcatcctcccctaacacatccctacacattgcaggcccagggrggagtccacaaaatgggactccatgcatccatccttctgtggggccgcgtagcacacccacggcaagactccagtccctggtcccggctctgccacttatgaactgtgtgcccataagcaagtcgtctcttgctctgcagactggggcttatcacatttgtcccacctgtcccagagagctgttatgcaaagtaaggggaatcacagatgtgaacaggcttcagaatcagagctcaatataaatgtacctccttattattaggcacatggcacagtgccaggcagtgtggtatgttccttggggctaaagtccaagagatattggcaataaaagaaagtgaattataccgggcagaaaacaaggaacaaaaagagaagaacagagatgaggattcaccagcctccagagaagagtgaattc

SEQ ID NO: 147743 - DNA, 518 bp, Homo sapiens
ctccatttgatgtgcaccatcacctctcctggctcttggccttatagattcaccggtttttwaaaaaactcttacattgcagctgcttctcagaggctgagactcagtgactgtgtcagttttcatcttaattcatggctgtactgccacactgttggcaggacatgtttcacaccaaataactacactttaatcaagctctctgttggttgcattttttgatgatggaaagtccgtctccgaagcagttgtcttcactaatgttgactgagcagtgctcagcagatgtaatgctgagcgaataggggatcccaagggactccagggtgccagtgcgatgatccaacagggttccagacatggcaatttagttggacttcatcctcagtcatagaatccagtggcagaactctatgtcacagcatcacagttgtgtggacacacagagctgccagagactataaaggccatagccttttccaccagcgcctgcatttgcccctagggaaagccaactc

SEQ ID NO: 147744 - DNA, 644 bp, Homo sapiens
ccgggcaagtcacttcatctcagcaggttcctgcacataggggctggtgaggactcaaggataaggcacactaaagggcttggcacagtgaccagcaggtagcagcactctctaagtattagctgccattgttgtctttatcattaatgtaactacatcttaattaggaatgatgggatctcatttggcccccacaccaatccaggaattgagatgagaatagtgtttcctctaccatccatcagccaatatccagcagccaccccaggggaggccactggtcatcccacgccatataaagttcactgcccctggatggtaggctcaccccaagcctgctccctcatcctcattcccatcctcaacagrgaggaaagtccaccactgtctccattttaaagaggcagcctgtgacatccaagagaccttccagcctcagggaaaggcgtgaacaagagctccagctgggtctttacagatgaagccccactttggtacctcttctcctaacaaccccagcttttggaagacatcaaaattccaaaggctcagctgcagaaagatcttccaaatttctcattatagttattccctgaaaggccaagagctttattcttcatccatttactcaacactttcatgga

SEQ ID NO: 147745 - DNA, 420 bp, Homo sapiens
atgatcctagagagtctctcaatcaatggtagaactctcatgcacaatcttctttggttgggggcagaggaggggtaacttggagcaggtgatagtgtggctcccgacaggctagccactttacaaggattcaccttctgtcccttcactatgtatcagaagctacactttatggccacgttttgtttcctcttttcttcctcttcctctttactgtacctccatccatccttttatagtgccgctttcaccttggtgtgtgaacttgccrctgacttcccaaatgagttctgagaaccgatttcctgtgctttgtgctctgtgatggttcagcccactcatcacacctctcatggagatctctggcactttggtgggccctacttagaaaccatcttcctccttgatccttcactaaca

SEQ ID NO: 147746 - DNA, 381 bp, Homo sapiens
tatgatcctagagagtctctcaatcaatggtagaactctcatgcacaatcttctttggttgggggcagaggaggggtaacttggagcaggtgatagtgtggctcccgacaggctagccactttacaaggattcaccttctgtcccttcactatgtatcagaagctacactttatggccacgttttgtttcctcttttcttcctcttcctctttactgtacctccatccatccttttatagtgccgctttcaccttggtgtgtgaacttgccgctgacttcccaaatgagttctgagaaccgatttcctgtgctttgtsctctgtgatggttcagcccactcatcacacctctcatggagatctctggcactttggtgggcc

SEQ ID NO: 147747 - DNA, 468 bp, Homo sapiens
tctcaatcaatggtagaactctcatgcacaatcttctttggttgggggcagaggaggggtaacttggagcaggtgatagtgtggctcccgacaggctagccactttacaaggattcaccttctgtcccttcactatgtatcagaagctacactttatggccacgttttgtttcctcttttcttcctcttcctctttactgtacctccatccatccttttatagtgccgctttcaccttggtgtgtgaacttgccgctgacttcccaaatgagttctgagaaccgatttcctgtgctttgtgctctgtgatggttcagcccactcatcacacctctcatggagatctctggcactttggtgggccctacttagaaaccatcttcctccttgatccttcactaacaagttctataatyttaacctcccagggtctcagttatactacctgcaagatgggcagaagaattc

SEQ ID NO: 147748 - DNA, 418 bp, Homo sapiens
tgggtggtgaggagaggattaggcacaaagcagccaatcacttacctttttccttcctttgcagtaactctactagtacttttcctatatgggttctcaccaaggcctcagcctgcacaatgcacttaccaaggggcggggaatrggtttctgtggcttctttgagcccagctttttcatggcattgtagtacttcttctgttcttcggtcatgaagatgtcctgacctccgaagtaaaggagggaagaagaaaacagacaattacaactggctctcaacatgctatgggtttggacctaaggttcaatactgagaactgaggggagacctatccctttcctttgtagctaatagctgtcccagagtggggtagacccgcgataatcattcagctctaaagagatacctgcctttgtt

SEQ ID NO: 147749 - DNA, 562 bp, Homo sapiens
ctggtgcaagaaagcaatttggagggtgtcttggagtatgctgggatagacttgacttacaaaatgagcaacgagcaattttttcaatttgctttgtaaaacttgttaaccatctagaacaagtaaggaagtaaactttccaaaggtgggtctctcaaatcccaatttgcttgtgctcagagattgactagataatcacaagtctagacagtttctacttcttgcgatagctattcatctgtttctttccttttcatctctgttgctcractgcactctctgacctacctgcttctggtgggagaccaagaccagtaataggcctcaagaataaaagactgctagtaagtgtggtaaactacatgctgcaaaatccagccccgaacagaaagagtgggttggggctaacgtatgggggccagggtcacagtgagctaacaatatagattttagagaaagaaagagggacattttctttctagagatagggacaaaggtgcctcttatctgggctgacttccaaccactggcaatgaggggaggagacctatctttttctttt

SEQ ID NO: 147750 - DNA, 522 bp, Homo sapiens
cccggatgggttgagtttgtttgggtcacctaactgtgctccagcagccagggtcagggagagtaactgcctaggctttttgccttccctgaagcttcgtaacaagactccacaatccagtagatgttactgggtatttttccaataaattctacctaagtttactaaagtcagtttctgttgtctgtaagcaagaactctgagtaatacctgattataaaaatcattttggaaatttgttaaaatgcagatttttggagaccactccagatttactgtatcaaaaggaaaaagatctgttgttaatctcttcttctaaaaagcagcccagaccaggaatagagagacattacatgatgacacaagggtcaatccaccaagaagacgtagctatactgaaggttatacatcaaataaaagagcttcaaaatacattyagcaaaactgttagaaataaaaggaaaaatagacatccacaaatagttggagactttaatactcctacctcaacaattgatagga

SEQ ID NO: 147751 - DNA, 456 bp, Homo sapiens
aatgaagccctttgaaaaagatgtataatggcatcgatagcctggatgaccttgagtgagccattgtaggtcttatgtcagtttcttcgtggaagcttaaatgaaagtgctggactaaaggatttctaaggttcctcccatttacaaacttctgtgatgagattgaactcactacataaaaatttcaattttagctggattttgcaatgttaaatttaagcactgaasctttaatatctatccataggaaccttgagggaaatgatgggaaatgactttctattgatgtatccatttttagtgtctgttgacagaaaaataaaatttaccttgctccccatgtacttagtctctccctgcctcagtggtattatggaagcaacaggataagagttacaaaaggatataaaagtatagagaaagttctttcagtctactcacttatttattatgaca

SEQ ID NO: 147752 - DNA, 393 bp, Homo sapiens
agactggctaataagaaaataggtttaattggctcatggttctgtgggctgtacaggaagcatcgctggggaggtctccggaaacttacaatcatggcgaaaggtgaagaggaagcaaacacatcttcacatggccagcacagaagaaagagaatgaagggggaagtgctacacacttttaaacaagcacatatcttgagaactcactgactatcacgagaagaacaagggggacatctttccccatgatccaatcacctcccaccaggtccctgccctaacattgggaattacaattcaacatgagttttgggtgrggacacagagccaaaccatagcattccatcctggcccctcccacatttcatgtccttctcacatttcaaaacccaa

SEQ ID NO: 147753 - DNA, 374 bp, Homo sapiens
caaaccatatctttccccttcttctttgaatgtattcgtttcttgacatccacctgccaggggagaatggccttcaggagctcgaagcagccacaggtgtcaagtcggggctttcccaggcctccttcagcagcttctcaggttcattaacaaacatggcctggcctccaggtcagtctccgttaacgcctcaaggctgcctggactcttctctgcctctgttgcccctgcaaggaaacattccctcagcttccaacatccccctttgtgccaggagtcacctgggtcctgttaacacaaggatggaccagggagggtgcccagarctgacatggggtgacaaagggcaccaggactgcatgtcagagagatct

SEQ ID NO: 147754 - DNA, 528 bp, Homo sapiens
cctcccaaagttctgggattacagacatgagccaccacccccggccgatttttattctttaatgtagatgatttaatgctaatgtcgtggtagacgatttaatgctaatgtcgtggattgtattgattgagttttgattattcaaccagccttggattagtggaataaacaccatttgatcatggtatataattctctttatatgtctttgtatctgtctctttatatattttgcatccatattgatgagggatattggtcattttctttttttgtactatctttgcttttggtatcagggtaattctggcttcataaaatgaattgagaagtgtttctcctattttccaaaagacagtaaatagaattggtgttaactcttcttcaaataytttatagaattttccagcaaaatcatttgggcttagaggttagtttttcacaaggtttttatttattaattagatttccttattagccatagggcttttctaattatctgtttcatattgggtgagtaatggtagt

SEQ ID NO: 147755 - DNA, 563 bp, Homo sapiens
tgatcttttccctcagattgtattttcatttgagaatcttttgcaggataaagaggtttataattgagaaattgtcttttttcccaactctggaaatcctggttgaaaatgttttctctatattctaattgaaaattgaacaaagctctttatttcatctctttagatctgatttttatcataggagaaaaaaaataaaaatacttgtcactttttaccgttggtctggaaatcttagctaaatctacaagtttattagattttttttctgtctttcatgttacctcttgtcactaacatgagtcaacttttctcaggcctccaatatcaaagcactcattatcttttcaattctcattaatatatttcttaaaaaagcccttctatctccacctaatctctggtcctaaagccaatggcagatacatatatacttcttaaatcaaatgtatttgctttcaagttccattccaggtaacaaayatatgaccaataaactgatgtctttagtttggccactgggcaagaaaactctgcatttttcgtagttgagtgcagcactg

SEQ ID NO: 147756 - DNA, 549 bp, Homo sapiens
ctgaacttcagtgagcataagaatcacctgtgcagcagggcgcggtggctcacgcctgtaatcccagcactttgggaggccgaggcgggtggatcacaaggtcaggagtttgagaccagcctgaccaacatggtgaaaccccgtctctactaaaaatacaaaaattagccaggtgtggtggtgtgcacctgtaatcccaggtacaggtactcaggaggctgacgcacaggagaagtgcttgaacctgggaggcagaggttgcagtgagctgagatcacgccactgcactccagcctgtgtgacagagcaagattccatccgccccacttcaaaaaaaaaaaaaaaaaaaaaaagaatcacttgtgctacttgtaaaagatgcagatttctggattcaatttctggagattctgcaaaaagtaggtctgaggtagggtcgagggatctgcatttttaatacactccctaagtgagttttgtgcaagcgatgcatggatgactatttgagaaaggatgawctaaaggaatgagtaaagaatatgatctgag

SEQ ID NO: 147757 - DNA, 614 bp, Homo sapiens
accgtggactataagggggtatagggtgggggaagcaagtgttgaaaaactacctattgggtactatgcttgctacctgggtggtgggttcaatcgtgccctcaaactttggcatcatgcaatataccatcataacaaacctgcacaggtacccactgaatctaaaataaaggatttggagaaaagaagaaaatgtgtttgttggaaatgagcaaggggaagatgtagcccaaaataatattttagtcactttagcagataacttttgattgtaagagaaaaagatgtctcaaactaattgaagtaaaaaataaataaagacaggagtttattggttcatggtttgtccagggctagtcttaggcatatratgattcaagagctcagctgatgttaccagctcatagttatgctgtatccttttgttctgactttcatagtgataagtttcctaaagattcttctcttagccgtagcttccctacagctagatgctgtagcagctctagcctcccaaccttccagacctcaattcagtgggaagaaagactccgaaaaactcattgcatctcactgacacctggtgggtcacatgcccatcctgaagtaattac

SEQ ID NO: 147758 - DNA, 617 bp, Homo sapiens
ttccaaataacattctctgtattgccaatcaaaatctcaatgagctcgttaagaattgacaaaatgattctaatgttcatatagaaaaataaaaatgctggccgggcgtggtggctccagcctgtaatcccagcactttaggaggccgaggcaggcggatcacctgaggtcaggagttcgagaccagactggccaacatggtgaaaccccgtctctactaaaaatacaaaaattagccaggttttgtgatgggtgactgtaatcccagctactcgggaggctgagacaggagaatcgcttgaacccaggaggcagagtttgcggtgagccgagattgcaccactrccctccagcctgggctacagagtgggactccatctctaaataaataaacaaataaatatgctaaaagaatgaggaaaattttgaaaaagaatgagaacttgtccatgcatgttataaaggtagaactggtactgacccatgaatttctagactccagtgagtgcaacaataaggtctagaaatagtaccacatatacatgtgaatttggtatcccataacagctatttagtgggctcttattatatgtcatatattatttctaagcccttta

SEQ ID NO: 147759 - DNA, 642 bp, Homo sapiens
gtaagcttcttaaaaactatattctgtcctctatttctttggtatttgtaacagcaattatattacattgtacataatgtaataaaattatagattataactttaagatggaagaaattaacttctagagtctctcctacaattgtttccatttgatttagagaaaaataacatccatatgattgataagcaccagtaataacattcataggtatgaccagtaaaatctcatgtcagatttgcactgttctaagtataaacatttagaaagttgattgaatttttttttwaaaaaaaaaaagaggaaagaaaagttattccatttgccaagtttgtgtaggataaaagagaagttagctatcctataagttaacttcgtaacagtgagataaatcagcactaaaactgacaataaggtaagaaaaaaagtatgctttcaatttatcattcttaaaaaatacccagaacaaaaatacaaggcttacagcctcatttatcaccaccgatttaaagtgaatcctaacatgctcatttcattaaaagagaaagccaaattacttgctagtttgcttctgtcttctcctgcaacaacaacaatccaatccctttggattgtgattgcagtagcagtactggccaaat

SEQ ID NO: 147760 - DNA, 542 bp, Homo sapiens
gtctatgtaaatattgaccaagtgcccatccttccttatttccatttcttgccttcccaccaattctcactaaacttggatgacctatttatgtgtccatgtacccccacggactgagagctgaaggcaaacctaataactgtcaatgaatgatcatggtcctcaatccacttaatacttactaagtggctactatgtacccgacatttgcaagcactagagcttcagcagcgcacaaaaggttttcatgcagctcacattccagtgagcacagaccaaaagcaaatctagcacagggcacgtgctgctatgaggaaatataaagtaggatggagctggtggcaacaaaggcctccatgagcaaagtgagcctctgggaaacgagggctggagaaatgcagacatattggggtttaaatggagagagtttgtaagatcatgttatcagatataascaactggcccctctttttcactgtcttacactgtcatctttttgttattagatatcttttttaaagcccatactaaattgtattata

SEQ ID NO: 147761 - DNA, 614 bp, Homo sapiens
acatcacatatttcttggctttatggagcaatctttgttctgaccctcttccaagagttcaaggacaggttttaattctgtaacagttggtctaagctcctgccaagaatcgtttcccaattcctctccatctttatttctggtcttatatcaagaatgacttttattagaattttagaaaacactggatatagaccactgggctatgtgatcttccaacctgatcctctatctcccctttcagaggccacttccatcttgaacttcttagctgtgattttcactggtttctcttgacagaagttcccaatgtcaacagttctgggtggtagattttggtaacttctctggtttaccatggctttctttgatgaggactcttgcaggtgatagttctaataatgaccaatctttcaacagtgttcctcacttttgtacaaatctaccatgaccttacatcttaactgaggtctgtttgtgcaagtacagaccaatacaggaaaacccaaacattattactccgctcmttgcaaaaactccagacctctacctttttgcccataagctttttgatccccttcatcttattcccggattcctgcttgatttttgga

SEQ ID NO: 147762 - DNA, 560 bp, Homo sapiens
atcagtcacttttgttatgattctaccacacatttgaaattgagaggattttaataaacagtccaatttttcctcttaactttaaaacaatgtttttgagagtcagtggaaatgacaataaagatttgaatttgttttcctctggccaacgccaaacccatttttgcaaaatcaccaactgtggtatgctctgctattttcccccccacagaaatgtgtttatgtagctaaccaaaatagaaacaatccctgtagtcagttcccttggaaatgaagaaaacattggctcttccttcagaaagaggatgttggtccatgggaacaagtaccagcagtgagtcctgaccaaaatacagggagcactgaggtttttttaaaaaatcagatatttgtatcagaacaggattcagctacttcagaaggtttaatacctgttgagaagaaaaacatttaagtcttgagttcatcacatctaattaataggttcagttaatcaaatttttgaagatgtacyattttacccctaaatcttttagcaatgaaaaaaataatcattttaa

SEQ ID NO: 147763 - DNA, 618 bp, Homo sapiens
aagtggaaaataccctacaactgaaaataagcaaatattttacttataacctggaaagtttctcagtcaaattcaactcaaatttttctgtcaagaacaaagccagtcttaaagtattcagctataaactgtttgacacctgtagatggttgttggggttaagctggattccagtcaccagatttctgtgtccatgcagtatgtgtacacactcttctgtaactgtgctgtaaactttaacaaagtctccagagacacagaagatatacctggaaaaaaaagaaagaaaagtaagttttacatactgtattagcctgttttcacactgctgaaaaagacatttttcatcattgtttcagtggtcttgaactcctggcctcaagtgatacgcctgcctgggcctcccaaaatgctgagattacaggtgggagcctagcacctaggtgctttacatatctcattcaaaaccttaccatctccctcttcaaatttataaaggaaagaaatttaatggactcacagttccacgtggctggggaggcttcacaatcatrgtggaaggcaaaaggcatgtcttacatggtggcaggcaaaaacaacttgtgcaggagagctccc

SEQ ID NO: 147764 - DNA, 624 bp, Homo sapiens
gctaggcattgtccaacatcctatgaatccattgtcttactagctgcctagtgctagtttatattatttgaagtgaataaccctgaataatgcacattattcataagaacccccataatctgaatctcatacactcctttgactacatcttttcccagctccccagtgtgcactaagtttcagccaaggggtctaagtaatctttcttgaaaatgccattgctgtttctgtcatgctatattacatttactatttcaatttttttttttttatttaacagtgactcaaaagcttagtggcttaatataacaatgatttgttatgcttagtcatttagtggttggactgggctggaaggtccaaggtttgaacagtcttcacttacatatctattagttggcactctgccacatttccccatgtggatagcttgggcttcctcacagcatggtggactcaggtagacagataccttatatactggctgaccttgaagaatgaacatggaaggtactgtgctgctgaaaagcaatgccagagcttatccaccactgcatctactatrgcgtattggtcagagacagcctgaattcagggctctgccctttggtaggaagagtagca

SEQ ID NO: 147765 - DNA, 524 bp, Homo sapiens
tataataataaaaactgtacacatttaatgacaaggaaaggtctgaaaaatgaacagagcgtcactgagatagggaacccctcaagggctctagcagacatataattagagtgaagaagagggagagagatcatgaaaaataattttatttatttattttttgagacagggtctcattcctgttgcgcagagtgcagtgcagtacygtgactacagctcactgcagccttgacttcccgggtacaagcaatcctcccacctaagcctcctgcgttgctgggacttacaggctcgtaccaccacacccggctaatttctgcatttttagtagagacaaggtttcaccatgttagccaggctgatcttgaactcctgacctcagataatccactcgcctcagcctccctaagtgctgggattacaggtgtgagccactgtgcccagcctggtacattttttttttcaaatagtttaagtccgaaccccgggaaaaaacattgttaaaggactgaattttttttttt

SEQ ID NO: 147766 - DNA, 524 bp, Homo sapiens
tataataataaaaactgtacacatttaatgacaaggaaaggtctgaaaaatgaacagagcgtcactgagatagggaacccctcaagggctctagcagacatataattagagtgaagaagagggagagagatcatgaaaaataattttatttatttattttttgagacagggtctcattcctgttgcgcagagtgcagtgcagtactgtgactacagctcactgcagccttgacttcccgggtwcaagcaatcctcccacctaagcctcctgcgttgctgggacttacaggctcgtaccaccacacccggctaatttctgcatttttagtagagacaaggtttcaccatgttagccaggctgatcttgaactcctgacctcagataatccactcgcctcagcctccctaagtgctgggattacaggtgtgagccactgtgcccagcctggtacattttttttttcaaatagtttaagtccgaaccccgggaaaaaacattgttaaaggactgaattttttttttt

SEQ ID NO: 147767 - DNA, 524 bp, Homo sapiens
tataataataaaaactgtacacatttaatgacaaggaaaggtctgaaaaatgaacagagcgtcactgagatagggaacccctcaagggctctagcagacatataattagagtgaagaagagggagagagatcatgaaaaataattttatttatttattttttgagacagggtctcattcctgttgcgcagagtgcagtgcagtactgtgactacagctcactgcagccttgacttcccgggtacaagcaatcctcccacctaagcctcctgcgttgctgggacttacaggcwcgtaccaccacacccggctaatttctgcatttttagtagagacaaggtttcaccatgttagccaggctgatcttgaactcctgacctcagataatccactcgcctcagcctccctaagtgctgggattacaggtgtgagccactgtgcccagcctggtacattttttttttcaaatagtttaagtccgaaccccgggaaaaaacattgttaaaggactgaattttttttttt

SEQ ID NO: 147768 - DNA, 524 bp, Homo sapiens
tataataataaaaactgtacacatttaatgacaaggaaaggtctgaaaaatgaacagagcgtcactgagatagggaacccctcaagggctctagcagacatataattagagtgaagaagagggagagagatcatgaaaaataattttatttatttattttttgagacagggtctcattcctgttgcgcagagtgcagtgcagtactgtgactacagctcactgcagccttgacttcccgggtacaagcaatcctcccacctaagcctcctgcgttgctgggacttacaggctcgtaccaccacacccggctaatttctgcatttttagtagagacaaggtttcaccatgttagccaggctgatcttgaactcctgacctcagataatccactcgcctcagcctccctaagtgctgggattacaggtgtgagccactgtgcccagcctggtacattttttwtttcaaatagtttaagtccgaaccccgggaaaaaacattgttaaaggactgaattttttttttt

SEQ ID NO: 147769 - DNA, 653 bp, Homo sapiens
ctttgtacatgatttaattttctctaatgtattaactttattttttaaatttctattttaggttcaggggtacatgttccagtttgttatataggtaagttatgggtcatgagtttgcctgttgttcccctcttagtgttcatgtgtttttactgttgagctctcacttataaatgagaacatgtgatatttcattttctgttcctgcattagtttgctgaggataatggcctccagcttcatctttgttgtggcaaagaacatgcttgttcttgtttatggctgcatggtattccacggtgtatctgtaccacattttttatctagtgtactgttgaggggcatttagcttgattccatgtctttgctattctgaatagtgcttcaattcacatgtgtgagcatgtgtctttatggtagaacaatttagattattactttggatatatacacaataataggattgttgggtcgaatgataattacattttaagttctttgaggaatcaccacactgctttccacaatggctgaattaatttacacttctaccagcgttatataagcattaccttttctctgtaacgtcactagcatytgctgttttcttaataatagccattctgattagtctaagtttgagagcgctagaa

SEQ ID NO: 147770 - DNA, 477 bp, Homo sapiens
catctccaaaatcattattatctcattacctctcataagctcaccttgtgttatttccagtaggacatcttaagcttctgcattgcttaacctgccttccagcagagaggtagtcatgtgatgagacccatctgagtgcaccagagcaaaaaagataatgaatagcttaattgtcctggggccaytgagaactttgtaatttaggaaacacggccaggagattgctcataacatcctggcaagttgactcatttggaaaaaggtagagtctgagtgtgcacattctgttcctcctctttacatcactttagggttcacctgagaggacgttcaatcaaagagctgattgtatgtgcaaagaatgtgttgtattctcaggtggcacagaagacttcttgtgcatataccgcattataaagacagaggcctccaccattgttttgacagcaaagcccctatgtatttaagggcagatct

SEQ ID NO: 147771 - DNA, 417 bp, Homo sapiens
catctccaaaatcattattatctcattacctctcataagctcaccttgtgttatttccagtaggacatcttaagcttctgcattgcttaacctgccttccagcagagaggtagtcatgtgatgagacccatctgagtgcaccagagcaaaaaagataatgaatagcttaattgtcctggggccactgagarctttgtaatttaggaaacacggccaggagattgctcataacatcctggcaagttgactcatttggaaaaaggtagagtctgagtgtgcacattctgttcctcctctttacatcactttagggttcacctgagaggacgttcaatcaaagagctgattgtatgtgcaaagaatgtgttgtattctcaggtggcacagaagacttcttgtgcatataccgcattataa

SEQ ID NO: 147772 - DNA, 417 bp, Homo sapiens
catctccaaaatcattattatctcattacctctcataagctcaccttgtgttatttccagtaggacatcttaagcttctgcattgcttaacctgccttccagcagagaggtagtcatgtgatgagacccatctgagtgcaccagagcaaaaaagataatgaatagcttaattgtcctggggccactgagaactttgtaatttaggaaacacggccaggagattgctcataacatcctggsaagttgactcatttggaaaaaggtagagtctgagtgtgcacattctgttcctcctctttacatcactttagggttcacctgagaggacgttcaatcaaagagctgattgtatgtgcaaagaatgtgttgtattctcaggtggcacagaagacttcttgtgcatataccgcattataa

SEQ ID NO: 147773 - DNA, 417 bp, Homo sapiens
catctccaaaatcattattatctcattacctctcataagctcaccttgtgttatttccagtaggacatcttaagcttctgcattgcttaacctgccttccagcagagaggtagtcatgtgatgagacccatctgagtgcaccagagcaaaaaagataatgaatagcttaattgtcctggggccactgagaactttgtaatttaggaaacacggccaggagattgctcataacatcctggcaagttgactcatttggaaaaaggtagagtctgagtgtgcacattctgttcctcctctttacatcactttagggttcacctgagaggaygttcaatcaaagagctgattgtatgtgcaaagaatgtgttgtattctcaggtggcacagaagacttcttgtgcatataccgcattataa

SEQ ID NO: 147774 - DNA, 615 bp, Homo sapiens
ttacacctgtttaagcaccaccgcattttgtataatgaaatatttccatcacaaatgaaagtttcttttgtttcccttcctggtaaatcttttgctatcacattcaggcaatacatgaacttcttgctgtcattgtggagcagattttgcagattttcatatgaattgaattatattgtaggtattattttgtatcagactatttttgttctttccattctgacagtgcactcagaaagtctctctggaacaaaaccaggacaatgttgagattcactttacatgttctccttttttctgggatcacaaacctgtattgcctattgtccaatgtcagaaaatagttgtgtcttacatatttccarttttctaattctttgctggacagaagcaatcctgaaacatcttaagctttcctagtcagaaataagagttttttcatttttatttttcagtgataaaagttatgtattttcctctagcaaaatttgtataattagttggtattatttatcattattcttattattacagtgaatatatggatataaatttacatagataataattatttataacaaaagaaaaatgacattcatatgataaaatatcaac

SEQ ID NO: 147775 - DNA, 537 bp, Homo sapiens
gggtgtgatatgatcaatgtaattttaatatgtatttgcattttaaatttttagaaatgatcatatactgccattatctaaaatattagaaaaaatttaaaaattatcttgcaaagaaaatagayttctctcttcatggttgcctaagaagatgcagtatataactttttaaagatttgcactttatgaagatatcagtctaaattagagctaatatttctactcacttgatgaataaaaagtgaaaactgtggtcaaccccaaatgatgttctaattttttaaaatttgtgaagaatgtaacacattcacgtttctgtctataaatgtaacatattcacatttctgtctataaaataagtatgaataaaaatatctccatatcactttgaagtgacttatgtcagccagctctcacactagactttggaagttgaaattcaactgcttctcttattggtggtgaatctgtacatgcagcaacctcagttcttgcctcctcagagaaagggaaaataggtgcctcagaggcaacttt

SEQ ID NO: 147776 - DNA, 537 bp, Homo sapiens
gggtgtgatatgatcaatgtaattttaatatgtatttgcattttaaatttttagaaatgatcatatactgccattatctaaaatattagaaaaaatttaaaaattatcttgcaaagaaaatagacttctctcttcatggttgcctaagaagatgcagtatataactttttaaagatttgcactttatgaagatatcagtctaaattagagctaatatttctactcacttgatgaataaaaagtgaaaactgtggtcaaccccaaatgatgttctaattttttaaaatttgtgaagaatgtaacacattcacgtttctgtctataaatgtaacatattcacatttctgtctataaaataagtatgaataaaaatatctccatatcactttgaagtgacttatgtcagccagctctcacactagactttgsaagttgaaattcaactgcttctcttattggtggtgaatctgtacatgcagcaacctcagttcttgcctcctcagagaaagggaaaataggtgcctcagaggcaacttt

SEQ ID NO: 147777 - DNA, 537 bp, Homo sapiens
gggtgtgatatgatcaatgtaattttaatatgtatttgcattttaaatttttagaaatgatcatatactgccattatctaaaatattagaaaaaatttaaaaattatcttgcaaagaaaatagacttctctcttcatggttgcctaagaagatgcagtatataactttttaaagatttgcactttatgaagatatcagtctaaattagagctaatatttctactcacttgatgaataaaaagtgaaaactgtggtcaaccccaaatgatgttctaattttttaaaatttgtgaagaatgtaacacattcacgtttctgtctataaatgtaacatattcacatttctgtctataaaataagtatgaataaaaatatctccatatcactttgaagtgacttatgtcagccagctctcacactagactttggaagttgaaattcaacygcttctcttattggtggtgaatctgtacatgcagcaacctcagttcttgcctcctcagagaaagggaaaataggtgcctcagaggcaacttt

SEQ ID NO: 147778 - DNA, 538 bp, Homo sapiens
attgcagagggagaatttaggctgcaatagagtcacaacaaaggtctcagccaaccagaaagtgtgctctaaatctgggatgacccctcagaattgtcctaaattagaacaaggggtggagaaattatgccacctacgttaacaagtcattgagttcagaccttccccagaaagtgggataaagcttcagggaaacagatctctgcagctgagggctgccagccagcagcaaacccgggggtcgtgggaggagttccttgagtattgaatgtcgggtgctggcttcagccagcgtctgcagcctttcacttgtgtccatctgcttcatatccttctccctctgagctgctgaatgccttctgagtacacagatactaccacgrgagggaagttggaaatagggattacccagaattgacccaaagtatgagtgtatacctcaatagttaacaaaatattactttatactgattgctgattcattggtctttgaaaaaaacgggtaaatgaattaactaaaaaagtgttgcacataaaa

SEQ ID NO: 147779 - DNA, 538 bp, Homo sapiens
aagaacattatttcttaaggcaagggtccccgatgcccaggctgtggaccagtactggtccatggcctgttaggaaccaggctgcagagcaggagttgattggcaggcaagtgggcattatgtcctgagccctgtcttctgtcgatcagtggcagcatcagattctcataggactatgaaccctattgtgaactgtgcatgggagggacctaagttgcactccccgtgaaaatctaatgcctcctcaaccatcactcccccacggatctgtggaaagattatcttccactacactggtccctggtgccaaaaaggttggggaccrctggcttaaggtacatctgtgccctaaggtcctcatttaatcttcttatgggaactacgcatccaaaaagggctgctgtctacacaggcttctacaaatactttatttgcattgaccctttgcaggacttttgctatttaatatcaagaattggactgagattaaggacactttctttgccctcagtttctctcttaatatattgtcaggtca

SEQ ID NO: 147780 - DNA, 502 bp, Homo sapiens
taggtataaatgtgactagaaaattgccctgagctgctactctgtgctcatggagtatccctgctcttcaagagcagtcacagagcagtaacacygccccttcaacaaagctattttcttctatctatggctcgcctttgaattctttcctgcgcaaagccaagaaccctcactggctaagctcaactttcgggttcatctgccctgcatccattgttttcaagatggtagtggaataagacatatatgcaaacttaagtctcgttatttcccataagtaataatggatgacctataaatgtcatgatgttatagaagaattaatctctgcttgataaggtgtcttatgaaacacattcttcaaatctctaaaataaagaattgagatatagttacattaaggggagaaaactaagtgatcatacctcatcttagtaaacatcatcaatggtgttcatgtttaagatgattatccagattctttgttctgggtgttagtgga

SEQ ID NO: 147781 - DNA, 502 bp, Homo sapiens
taggtataaatgtgactagaaaattgccctgagctgctactctgtgctcatggagtatccctgctcttcaagagcagtcacagagcagtaacactgccccttcaacaaagctattttcttctatctatggctcgcctttgaattctttcctgcgcaaagccaagaaccctcactggctaagctyaactttcgggttcatctgccctgcatccattgttttcaagatggtagtggaataagacatatatgcaaacttaagtctcgttatttcccataagtaataatggatgacctataaatgtcatgatgttatagaagaattaatctctgcttgataaggtgtcttatgaaacacattcttcaaatctctaaaataaagaattgagatatagttacattaaggggagaaaactaagtgatcatacctcatcttagtaaacatcatcaatggtgttcatgtttaagatgattatccagattctttgttctgggtgttagtgga

SEQ ID NO: 147782 - DNA, 631 bp, Homo sapiens
aataaaaatacatttcatattgctttccaaacaatttgggtcaggggtcaatttcacagctgcaaactgttctctctgtacatatcctttgctagcatygctcttagaaagaatggtaatgccattaatacctaccgttgcaagtgtttatggtaaatactgccagtgttgcctgcctcccataaacacaagcagcagtttatagaaagcaagagtattttaaaaacttctaaacttagtgctatttcttttagcaagatcaatcagctgaagttcactccgataccccaatagcatggtgcagatttaaagagatgactgcctaaaacatgcttgactattttgactaacacatctagaaaggttcatttaaccccatattaaatgttcttttaaatactcatcaatttacatcaatatttcatagctacaatcccaaaatgagtatgtcattgctttttgaatttgaaggagagttatctcctttgctgtgtctggttagttcagtttggtacaaaaattgccaaggtcccagttttgatttgctccccagtcatagttggtcctccctcatagttccaattactggtcttcaaaatgtgacctactactcacaatgaagttagacagg

SEQ ID NO: 147783 - DNA, 299 bp, Homo sapiens
tacaggtgcagtcgtcttatatggatatattgcatagaagtctgggcttttagygtaagcatcagctgaatagtaaacgttgtattcactgggtaatttctcattcctcacccccttccatactcccattctgagtctccaaaatgttttattccactctccatgtccatttgtatgcatttagctcacacttacaagagacaacatgtagtatttgaccatttctgagttatttcacttaagataatagtctctgcttccatccgtgttgcatgatttcattctttttttatggttaa

SEQ ID NO: 147784 - DNA, 650 bp, Homo sapiens
gtgactgttttatacctagtttcttgtcacattcaaccggcaaaaccctgctcacacggctccacctacctagaagggaagctagaaaaggttatctctagctgggtggctgtgtaatcaggaaggaagaaacaactaatgacctataaaatagctgtgcaaactcttcttcctgtacataatacacttaccccaaggcaagaaacctgaactttcattagactgcatccagataaaagtccaggattttgaagaatgtagcgctttctctgcaagctgtgaacatagagccccactgtctcatgatctttagatgacataaatgacccgttcgctactaaccaaaatatatggcagatcaggaacaagagtatcacaataaaaatctccwctggaaaaaagtaaaaaatgtgagatacaaaatatcacaattcataaaatcagtaagtcctgtttgggaggagctctaaaccccaaaacccagcgttagtgtatgttccttggtgagaccctagttctactctctgggaagggcttccttgtccaaggtagtctgggtcactggctttgtcatctgtgagctcatcattctctgttaccccgcctggccctatttgaaagggatctcatacagtgctccctctatgaaa

SEQ ID NO: 147785 - DNA, 650 bp, Homo sapiens
gtgactgttttatacctagtttcttgtcacattcaaccggcaaaaccctgctcacacggctccacctacctagaagggaagctagaaaaggttatctctagctgggtggctgtgtaatcaggaaggaagaaacaactaatgacctataaaatagctgtgcaaactcttcttcctgtacataatacacttaccccaaggcaagaaacctgaactttcattagactgcatccagataaaagtccaggattttgaagaatgtagcgctttctctgcaagctgtgaacatagagccccactgtctcatgatctttagatgacataaatgacccgttcgctactaaccaaaatatatggcagatcaggaacaagagtatcacaataaaaatctccaytggaaaaaagtaaaaaatgtgagatacaaaatatcacaattcataaaatcagtaagtcctgtttgggaggagctctaaaccccaaaacccagcgttagtgtatgttccttggtgagaccctagttctactctctgggaagggcttccttgtccaaggtagtctgggtcactggctttgtcatctgtgagctcatcattctctgttaccccgcctggccctatttgaaagggatctcatacagtgctccctctatgaaa

SEQ ID NO: 147786 - DNA, 469 bp, Homo sapiens
gtcactggctttgtcatctgtgagctcatcattctctgttaccccgcctggccctatttgaaagggatctcatacagtgctccctctatgaaagacatacttcttttgtagattacttccttctatggtgagtttgggagtataaaagttgcttcaaagattgaagtgaatattcattaaatamtgcaaaaattgattgtgttttgctttatttattttggttgtactctgtgccagttagcaaccctcgacattcttacctggatttgcttttgaaaaacagattttcttatttatattctccaatgctgggctcattcttcttttcttcattttaatagtagctacttggaaatttttgagacacctatcaccacgtatttgacaaaaaaaaaaaaaaacctaaatgaaagaacttgacaagaagcattaactatacacatatttcctgctgtttgcgatagaaaag

SEQ ID NO: 147787 - DNA, 541 bp, Homo sapiens
aattgtccaaatatactagaagtcatttagtcattgaaggtttaccacccagaggccaaaatccattcaagcgtcaaacaactgtgtctcactccttcaattttaccctgatggaaaatggatcctgctgatggttatctgaggcaaactctatcatgactggttaataataatcatatttcttcttggtatacctttaccaaccaattaagcccttttctgtcagcgaagaaagctgaactgtgtctttcatttgaaccacatagcccaggaggtgcaaatcttctcctctgtcactagactctgagmtctctaagtgatatggacaatgaagacctatgcatgtgatctttccagtcaatctcaagagctagaatcaagttctgccatacctagccactttgtgtcagtatgaaaaaggtgtttcttccatgtgaaaggagcgctgttcagggtgtattagttagagggaagagcccaggctgggattgggcccactaagccccttatcagggcagcccattgcagtcaacacccgata

SEQ ID NO: 147788 - DNA, 607 bp, Homo sapiens
gctccttctgtttttataactacggtttgtctctattgctgtgtaatagtccattctaccagagatcagcaaaccatggcctgggagtcaagttcagctcaccacatgtttttgaaaacaaagtcttgttaggacacagacataattttttatttaaaaattatttatagcttttttttttttttgctaaaatgaccaagttgagtacttgtgacagaaaacatacggctcagaaagccaaaagtatttattatctagtcctttcagaaaaaaaattgtcactctcctctttatatgattatatggtaatattttatccattctaatgttgttaaagatgcagattattattaacttctgatagttcattaaatgctactaaaataattcatcttcacttctcttggatcacatatctgtgtctctgtagcggtatatttaggaaaggaatgaytgggtttttggtacacttaccatcaatattatgagacaacgcaaacagttttccaaagtcatcatatcatatatacatatatatatgtattgcatttccactatgagtgtgttagagtgaactttattctacatccttggtaacacttgatat

SEQ ID NO: 147789 - DNA, 634 bp, Homo sapiens
tctcttgcacagtggcttgtgcttggctggagtgagtgacctcaggctgctttcasactgagttctgctccactgtgcttatcctccttatattagcagccaccggtgctgctagtaaatgttctcttcttgtagcatgataggaacacaagggggtgaagggaaagtcatatggcttcttaggcttcaacaagaaattgcaaaattctatctgaggcccacagtctagtagacaattcatgccacgtggataagcccaagatcaattgggatgtgaggggtacagtcagttcatagtgggtggtactgcaatgtcatatggcaaaggcataaatgcgttattctattaagggaaggagtaaagaactgaagacaacagtgcaatctaccacacagggaaaggatgatgaggaatgtcagggtaagggggggtggcattttgtatacagtggtcagagaaagccttcaccatagatgacatatgaccagagaccttgaggaggtgagctgggtaagtaattggaaggagagtattacaacagagaaaagagctagtgcaggggtttgcttgagaggtcaatggggccgaagcagtatctgagctggaaagatggaggaggtaaagtccaaggta

SEQ ID NO: 147790 - DNA, 634 bp, Homo sapiens
tctcttgcacagtggcttgtgcttggctggagtgagtgacctcaggctgctttcacactgagttctgctccactgtgcttatcctccttatattagcagccaccggtgctgctagtaaatgttctcttcttgtagcatgataggaacacaagggggtgaagggaaagtcatatggcttcttaggcttcaacaagaaattgcaaaattctatctgaggcccacagtctagtagacaattcatgccaygtggataagcccaagatcaattgggatgtgaggggtacagtcagttcatagtgggtggtactgcaatgtcatatggcaaaggcataaatgcgttattctattaagggaaggagtaaagaactgaagacaacagtgcaatctaccacacagggaaaggatgatgaggaatgtcagggtaagggggggtggcattttgtatacagtggtcagagaaagccttcaccatagatgacatatgaccagagaccttgaggaggtgagctgggtaagtaattggaaggagagtattacaacagagaaaagagctagtgcaggggtttgcttgagaggtcaatggggccgaagcagtatctgagctggaaagatggaggaggtaaagtccaaggta

SEQ ID NO: 147791 - DNA, 634 bp, Homo sapiens
tctcttgcacagtggcttgtgcttggctggagtgagtgacctcaggctgctttcacactgagttctgctccactgtgcttatcctccttatattagcagccaccggtgctgctagtaaatgttctcttcttgtagcatgataggaacacaagggggtgaagggaaagtcatatggcttcttaggcttcaacaagaaattgcaaaattctatctgaggcccacagtctagtagacaattcatgccacgtggataagcccaagatcaattgggatgtgaggggtacagtcagttcatagtgggtggtactgcaatgtcatatggcaaagkcataaatgcgttattctattaagggaaggagtaaagaactgaagacaacagtgcaatctaccacacagggaaaggatgatgaggaatgtcagggtaagggggggtggcattttgtatacagtggtcagagaaagccttcaccatagatgacatatgaccagagaccttgaggaggtgagctgggtaagtaattggaaggagagtattacaacagagaaaagagctagtgcaggggtttgcttgagaggtcaatggggccgaagcagtatctgagctggaaagatggaggaggtaaagtccaaggta

SEQ ID NO: 147792 - DNA, 572 bp, Homo sapiens
atgcattcagtttcagaattcaaagaacagaagagcaaatttgagggacactctggcacagtagagggtatgtacaatcattgaatgcaaagtcttttacattttaccttacacgtcaatctcagctaatcaggctttatttttcaggaaagtgctgcagagcagagaagcaattctcaacaagacaaagctactataatagcgacttgtggagtcacrttaagaagaaaataggcagagaagtggactcttgacgggagtctcatccatcatttcctctctgtgcaacctcaggcagggtacataatcgatctaacttttagttttctcttatgtaatctggagataataacatatattttatataattattgtgagtattaaataccaaaacccctttatgtcacatgtttagcatagtgtctatatcacagtatgtgcgtcatatgaaactcagtgctttgtacccgctgattcctggtgaatgaaatacggtcacacatcacaatgactgtctgctgaaatgccaaaatcctgcctgtagttcaggaaccagagtaaaggaaaatgaa

SEQ ID NO: 147793 - DNA, 608 bp, Homo sapiens
cttgtgtaatgttcaaagcatctagcatttatttagcaaaaatgtgttaaagccaattcagtttctcaaacggtgttagccaataaacattaaaaaatgttgcaayaatgaataactgaatggcatctataaatccatctgggactgtcctttgaaaagcaacttctacaaccctagctgctctctagactgctacattgacgctccatgccctggttgctatatctttttgagcagcaggtgtgcccaatgccataagatcaacactgcgtaaaaattggcctctggggctgggggcagtgactcatgcctgtaatccctgtactttgataagccgagatgggtagatctcctgaggtcaggagttcaagaccaggcttgccaacagggtaaaaccccatttctactaaaaacacaaacattagctgggcgtggtggcgggcacctgtagtcccagctactcaggaggctgaggcaggagaaacgcttgaacctggaggcggaggttgcagtgagctgagattgcaccactgcactccagtgtgggtgacaagagtgaaactccatcgcaaaaaaaaaaaaaagaaaagaaaagaaattggtctcca

SEQ ID NO: 147794 - DNA, 492 bp, Homo sapiens
atgatttttcaattcagagtcaaggattgtggctaaggttctctctcttggttttgggaggatgatgtctgcaggacagagggaaaaagtcagaaagcggacataccagaactgtgtggcttcaagcttatggrtagaaccattgctgccagtgcatctaggtatctgctttttcaactgtgaccatatattttggtgttataattattttcttaagaaactatacgtttttattggggcttactatgaccccagtattttatctaggtaggttataacattaaatatagtattaggctcactttattttattttttattattttttaaatttggggggtatataatagctgttaaaatttgttttaagtagtgttcctcaacagagcctaaaacgcaagacaaagtaagtgaaatcttaaatctaattgcttcagatatgtaaacattttatagaaaataaaaacaacaataaaacaaataaacaacatca

SEQ ID NO: 147795 - DNA, 492 bp, Homo sapiens
atgatttttcaattcagagtcaaggattgtggctaaggttctctctcttggttttgggaggatgatgtctgcaggacagagggaaaaagtcagaaagcggacataccagaactgtgtggcttcaagcttatgggtagaaccattgctgccagtgcatctaggtatctgctttttcaactgtgaccatatattttggtgttataattattttcttaagaaactatacgtttttattggggcttactatgaccccagtattttatctaggtaggttataacattaaatatagtattagsctcactttattttattttttattattttttaaatttggggggtatataatagctgttaaaatttgttttaagtagtgttcctcaacagagcctaaaacgcaagacaaagtaagtgaaatcttaaatctaattgcttcagatatgtaaacattttatagaaaataaaaacaacaataaaacaaataaacaacatca

SEQ ID NO: 147796 - DNA, 417 bp, Homo sapiens
aactctcatttttctccaagatgagacttgttgcttatggtaatttaattagcttaggtttttttttttgcaacctcagtcctctgattcttttaagtctctgactttgcagattatcaggcaagtttttgtggttagaatgagaagcatatgttcatttgatttcctttatcttaattagtggtcaaagtttagccccctacatttttacttcccgtctggtttattttattttgacttatttttagataacaaacttttaaaaatttcmtgatatttcctattcttgaactatgtatttggtttccctgtattgaatctcaacaatccttagagaatttagtttctatttgcctttgcatctttgtatttttggcatactagtactggccccctgagtacctgccctgttagctc

SEQ ID NO: 147797 - DNA, 604 bp, Homo sapiens
cttggtgttttagttttttttttttttttttcaagtcctctgttgtccaggctggagtgcagtggcacgatcttggctcactgcgacctctgcctcccaggttcaagcaattctcctgcctcagcctcccgagtagctgggactacaggtgmatgccaccatgcccagctaattttttgtattttagtggagacagggtttcactgtgttgtccaggctggtttcaaaatcctgagctcaggcaatccacctgcctcagcctcccaaagtgccaggattacaggtatgagccactgtgcccagccccttctttctgttaatgtaacatatcacatttactaaattatatatattaattcatctttgcatccctgaagtgaattccacttgaccatagtgaatgatgtttttcatgtgctattaaattcagtttgctagcattttgttgaagagatttgcatctacgtccactagggatgctggactatttttttcacttttcattacttgtctggttttggtattagaataatactgacctcatagaatgaatttgtaagcattccttcttcaattttctgaaatggtttgagaatacttggga

SEQ ID NO: 147798 - DNA, 604 bp, Homo sapiens
cttggtgttttagttttttttttttttttttcaagtcctctgttgtccaggctggagtgcagtggcacgatcttggctcactgcgacctctgcctcccaggttcaagcaattctcctgcctcagcctcccgagtagctgggactacaggtgaatgccaccatgcccagctaattttttgtattttagtggagacagggtttcactgtgttgtccaggctggtttcaaaatcctgagctcaggcartccacctgcctcagcctcccaaagtgccaggattacaggtatgagccactgtgcccagccccttctttctgttaatgtaacatatcacatttactaaattatatatattaattcatctttgcatccctgaagtgaattccacttgaccatagtgaatgatgtttttcatgtgctattaaattcagtttgctagcattttgttgaagagatttgcatctacgtccactagggatgctggactatttttttcacttttcattacttgtctggttttggtattagaataatactgacctcatagaatgaatttgtaagcattccttcttcaattttctgaaatggtttgagaatacttggga

SEQ ID NO: 147799 - DNA, 608 bp, Homo sapiens
  misc_feature (1)...(608): n = A,T,C or G
gaaaatcattgccttttattcatgcaggtgatcatttgacattgtggaagtttagttcagtccctgttagaataggtctatttctgtttttccttagtcttaaaatccttcagttcttgggtagtatctgtaatcctgaagtatggactggagttttcattaaaaaattgaaatatttagtaaaccccttgaaatttgtgggagtcgaacttaaaatatgaatgtcattcaacctgtttctctttttcttaaagtccaaattccttgcagttttttcatgacatggagtattgtatattccatacatatgtaagtaaattcatatattgcaagacagtttctatgattagattttagaataaaattcacctcttggccttttaaaataccagtactttaaatatgatattcttgaaataaaatcaagtggaactactgaaaaattagaaacaatataattcaattagagaaaagayattttatatacttaaagaatgtattactatcagtaaaattaagtgcacatgtatctaaatgggtttgacacccaatgtactattcagtgctnnnnnnnnnnnnnnnnnnnnnnnnnnnnnnnnnnnnnnnnn

SEQ ID NO: 147800 - DNA, 567 bp, Homo sapiens
cccctttgctagttatttgttaaacaactaaatgaaattttagttacattctacaaaagcttaatcaacactacagttgtaaatcaccaggctgaagctaggacattagtatttcaaagcctcttctattactrtatttataactttatttctgaaatatatatacagatttcattacattgccagttatttatatttgtttcatgtccacagaaaatagagtatcattacaaaattttaggttcatcttttttttaattgaaaactagtgaaattatctgaatgttttaaggaatatgctattttaattactgtatttttattggttattgtcaatattttagttatgtttgttattgattagttaagaaaattcatttaaaaataatccaaaaccatttcccaatattgccaaaaaatggaataactatacatttactggaaacatttaagataaagttgtagatccattaaatgtaaaatttttcaaactacttctctagtcatatgtcctcttagaggataatatctagaatttatattcaatggtgcatacatttaaattta

SEQ ID NO: 147801 - DNA, 533 bp, Homo sapiens
acattgttctcactgtaaagaagtccttaaatggtgcaatcattataatgaaagagatactgaagaatgaactctttgctaagaggcaacacattgataaactggcacgctaagatactgaacacttttatattttgtcttaaatataaggattctattttttaaaatattaggccaaacagcaaatctctgattttggttttttgctttgcttttttgaattgaattatttccaataggtgatgcaatgaaagttcagacattttgcaaactattaaattagttaattggtgtttcagtgaatgcaatgcttgtataagaaccattaaatataaaaacataaagaaatacctatttcctcttgtataattttttagaagttgtctcagacaaagagggtatagtgaaataagtctagaaataacttctaacttctagtacagtcctttttttctttaacatgattcaaatcatgggttgcttgaaayttaatatttgttactatgtcgactcaccttgcctatccaaacacc

SEQ ID NO: 147802 - DNA, 608 bp, Homo sapiens
tctaactcaagcactagagtgttgttgaagataaaccaattgataaaactttctatttcatgaggagctctgtaaggcaatcttttttttttctaaaggataattttggatacaagaaaaatcttcctctaattatttctacaaatgtagttatttttggcagattttgatggatgtacattgatggatagccacgtggatccagaaaataaaggtaagtatgtaccagagtgaatcaagaaagtcctaagatttgatatgtcagtccaggattctccaactagcttttctgtttccaactgaagacttctactctgcatttgactaaagcagaagatatgcaaggaagctcagtctctcaattgagtggattctgaaatttatcctgttgtcttcagctactaaggctaatttgcaaatcacactgtgcacrggtaagcataaactgtaagcatatatattaatcttcatttttttaaattgtaatcattcacatataagcctggtccacacttaatttctttcttggcttcattattttttttctgtcaaacattttaaattgctgtgttccaggtacttaatatatatatgagagtaagatgtga

SEQ ID NO: 147803 - DNA, 600 bp, Homo sapiens
aatcagattttacaataatattttccttagcaataattaccaaggtggtaattataatatttggaaggttgaataagggagatttctcattatctaatatttttatattcaataataacatgtttctattctgaggaagattatttttggggagaatttctgaataataaagataaatattttcaagacaggtgccaatcaacccaactgaaatgtcacaaattttcaacagcagagggcaatcttctctagcaaaagtatatgtagggtaaaaatctctggctgtagattcttcactgataatatatttttgtctaatttctccctctaaagtaaataaataaatatataaatatatgkgtatatataatatatgtattttaaggctatagattatacactaatcttttgtgtttgaacatttattattgttactattattttgaatgaagtgttcaacagtaagcaataaggggcaggatgagatctgttatcaaatcttcttaagggtaatgcaccatttaatgaaggttttatggacgggaaacaatgtgcatcacctagaagaaaaacattacaaaggacttggtaccaccagta

SEQ ID NO: 147804 - DNA, 593 bp, Homo sapiens
actccatttactaaatcatgtggaagctactacttttattgtctttattagaattttatctaatgccttaacaatatagtaacactctctttctgacmgttaatgggctaatataccagacagatatataaaatatcaagtatcaaaatattttaatttgtattgattcatatttttctccaatgtttaaaattgatgttaggaaactgaaaaattgagtctctgtttataactcaggaaggaaaacactcaaaggaaagagcaaccctggtttgaagggaggcagaagggtgattgagtgtacatagcttcttaaacctgcagaaggatgttagagttaagggtctgtagtatttttgccacagtcatggattgccttttggtgtctcagggtagctcaacccagcactgaaagtagtagagatccacagcaactagctgtagtgatttccatgaatccctgaagttagcctctcatcacagaaaaaggcatttctcaggcactccttagaggttggttaatggagtctaaggataaaggaagacacttcttagaaactggcaagtgaggaaaaagacatcataatgggtac

SEQ ID NO: 147805 - DNA, 349 bp, Homo sapiens
ttgtttaaaacctcatatagcaattgattgcttttatgggttcttggcatacaaaataatgccaagatattattgctttttcaaaagaaaggctgatatttgagttttcatctatggcctgtattgggagagcagatacatattaatattcagcttaaaatatgaaacacaggttaagggaaatttattttwatggcaaaagaaaatgtagattatctgacccaaaatatctatcactgatactgtatgactgtcccatcattgtattttgggaagagctaacttgtattttgagtttcataggttcacaaattgggtcccaggatgggtcagatccaaaatctcactc

SEQ ID NO: 147806 - DNA, 565 bp, Homo sapiens
agtctgaccccatgattccatcacctcccaccacgcccctcctccaacactgggaattacaaatcaacatgagatttgggtggggacacagagccaaaccatatcatacctcctgactgtttactagtaagagtatttttgtatatggagtacctttaacagaagatactgggtctgtgtaggctctttattgtaaataaacctggaatttgtgaaagtatggctaagttccttgaaaaatgctaggtaagccatagaattaaaataatataaataagatccttaaataaattatttggctcattctattcaagcaatatgtcatatatgttgcttatatctatctttatcattctgactaaagctagagcaaaatgaatccttcagtggattttaaaaaagacattttataaagtaaagagtttgtgcctgattgtttctgacctttctaagagaaacttggcctgtctttccctcttgccagtaaccttcaaaatattaggaaaygtgatactgtttaaaatatgccatttgtgttaaggctaatttgacagtccaaatgttt

SEQ ID NO: 147807 - DNA, 536 bp, Homo sapiens
aacaattaaaatttttaattattccacataactaataaaggagagaaactggaactttaaaaatgcattaaatagaaaataacatgatatacagagacataaacatattgataattactttaaatcaaattgaactgaaaattctaagtagaattctacaaaactcaattgtatgcatcttatcagagagacacattatatacaaatcattaaacagttgagaggatataataataaatcatagaaaatgatacagcatgtacccaaaaatatagttttaaatatatagacttgaaaaaataggcaaatccataaacatagtggaagatattaacatacatgtcataaatgaatctcagagctatttccagctattgcttctggccaaacgatttaattagactgattctgcaaaagatctgctggtcttatcatgctaccatattgaaaaattaacctaaastatatgttcagaagtgcagaattttattatgatagaagtggaggcagaggaagtatgccagcattaatttagt

SEQ ID NO: 147808 - DNA, 460 bp, Homo sapiens
catttgtattagcagaactataattaataactgtctatttatacagtaagtaagtgacatgaaagcatggaccatgtctagtcttacttaaaatcttgtgaacattgtctaactcatagtagtcacacagaaaaaaaaattgtagaataaacrtataatctttgctctaactgaactagcatatatcacggctaagcctccaatcattatgaacaaacaatgtttagttaggctccggttctggatggtaacacagctcctgtgataaagctgcatagcaaccaatgccaaaaatctagtaccttccataaaagcaatcatttatttaatgcttatggatctgtaggtaagtttcaatttgattaaactcaggtaggattacctgggctctgttgaactgggataaactactggctttgagttatgtgtagatctgctacaggaaaatcttcattctggg

SEQ ID NO: 147809 - DNA, 530 bp, Homo sapiens
tatttatctctggaatatacctccagctatgttaatgtatactggatttgatacggaatggcatgatcctgtcttttgagccaatactaacgggtagttgccattgcatttcctgctgcctatccccaactctgctgatacattcagttgaactattggtaagaataaaacggtccaggaatcagaaaatacacttaaatgtgctccagctaaagtagtagtatattaatttgggtgttagaagagaaattttaaaaaatataataattatgccataggtttacataaaatttgaactgcatcccagtagtgttttcccagttcctgacagtgacgmgtttctagttagcctttactatagaaattctagcatcacagatattttggaagctatgcacaaactagtcctactagaaacaaaacaacatcaatcatcaattaatgttatttaaaaaaataatttgactgtcttaaaaatgaaacttgatttcatatatatatattatgtacatattatatatattttatat

SEQ ID NO: 147810 - DNA, 602 bp, Homo sapiens
tgaataccaccaaaaccaaaaatacatactatgtttttttctattacaaaataaattcagattgatttactgtttgcatgaataaataataaaaatattttatcctgtagactccatcaatttgtcattgttatgtccgtttgtctcatacttagcaattttagttcctgcttcatgtgattattcctcaattatttgaaaacatctagtagttttgcaccaagatacagtctattttccataataagcattgccattacttcttcttttcttctttaataatattttaaggactataatcctctataaatgcacacattggcaaacattacaaatttggtttttgaaataaaatatagtaatcaagatgtggtatggtcaggttggaatgtgcgtagggttgactttatgccgaaacagccgttaaaatcccttcagcatcattaatgcagttattctaaatctcctcatggttttccctgaggtaaaatttacatatactgaaatgctcgtatcttaaattttacaattcaatgagttctcataaaygtatacacccagattaccaccaccctgttcaagattggaaatttttctcacct

SEQ ID NO: 147811 - DNA, 562 bp, Homo sapiens
cacacagccctgaattcaaattctagctgtcatttttttagccaggtgattaaaaaatgactcgttattagcctcagaaactcatcttcttcatgtgaacactgagatcatgcagctcatgcagctattgtaaagattaagtgaaatactgttagtcaggacgctagcgcagaatagacactcaacaagaatttcctttgctcttcygtctgtcaaaaatgccaagctggcagaaggtgcatttattcatctgtgggattccccctttaccctgaacatttaaattcaatggtgagacacagggaggaaagcaagggtaactcttcaagacactctagtctgtggtgtgcgatgctgacgtctgtataccacgacgtggacttaaccaagtgtttcttctgatctcttttcttacgactaaattcatcattttcttcagatctcatgtcttttgtcattttgcctcatcgctggtgcctgtactcacagcacatcccaacagagggtgtgataattaagtgatattgcctccgcaccactgtgccatcaccccctccaccgg

SEQ ID NO: 147812 - DNA, 562 bp, Homo sapiens
cacacagccctgaattcaaattctagctgtcatttttttagccaggtgattaaaaaatgactcgttattagcctcagaaactcatcttcttcatgtgaacactgagatcatgcagctcatgcagctattgtaaagattaagtgaaatactgttagtcaggacgctagcgcagaatagacactcaacaagaatttcctttgctcttctgtctgtcaaaaatgccaagctggcagaaggtgcatttattcatctgtgggattcyccctttaccctgaacatttaaattcaatggtgagacacagggaggaaagcaagggtaactcttcaagacactctagtctgtggtgtgcgatgctgacgtctgtataccacgacgtggacttaaccaagtgtttcttctgatctcttttcttacgactaaattcatcattttcttcagatctcatgtcttttgtcattttgcctcatcgctggtgcctgtactcacagcacatcccaacagagggtgtgataattaagtgatattgcctccgcaccactgtgccatcaccccctccaccgg

SEQ ID NO: 147813 - DNA, 407 bp, Homo sapiens
agatacacaaatgacaagcctattaaaagatgctaactatcatatgtcatcagggaatcgcaaattaaaacactgacatatccttatgtaccgatcggagttgctaaaattgaaaacactacaacaccacatactggcaagaatgtcaaacaacaagagcttgtattcatttctgatgggaatgtaaaaggacacatccactttagaagacagtttggcaatttcttacaaagtaggytgttatcacgctgctgataaacacatacctgagactgggtagtttataaaggaaagaggtttaatggactcacagttccacatggctggggaggacgcacaaccatggaggaaggtgaagggagagcaaaagcacatcttacgtggtggcaggcaagtgggcatgtgta

SEQ ID NO: 147814 - DNA, 427 bp, Homo sapiens
taaaatattgatgattttcatgtattaaagccttctcgttgccttagaatatgtaaaatgcagtagtacataaaatgttacatcaattttattctattaattgtttccataaactcttacatagagtgttattgcagaacctttcttaatgaacctgttttatgctgagtagattgtgaatagtcattgcttattcattgcaatattcctgtctaattcagctttaagttggtgtcacattargacttaccttaggtaagagtatgaacttttaagttaagaataagtttggtgcactgctccctttctaactgcaatatctcaaattcctcccatttctcatgctatttaattatcagaaaacaactcaaataaactttataaataacttcattttaagtatttgcacttactaaaataaactgta

SEQ ID NO: 147815 - DNA, 385 bp, Homo sapiens
  misc_feature (1)...(385): n = A,T,C or G
atttttacaactggcactttcttttttattatatttyatttcaatagtttttggggaacaggtggtttttggttacatggataaattctttagtggtgatttctgagattttggtgcacccgtcacttgagcagtgtacactgtacccaatgtgtagccttttatttctcaccctcctctcacccttccctgccgagtccccaaagtctattatatcatttttatgtctttgcatcctcatagcttagctctcacttataagtgagaacatagggtatttggttttccattcctgagttacttcacttagaataatggtctccaattccatccaggtttctgcaaatgccattattttgttcctttttatggctgagtannnnnn

SEQ ID NO: 147816 - DNA, 394 bp, Homo sapiens
catgtctttattagcagtgtgagaacagacgaatacatggtccaagctagggctattgatttgaaaatcatcaaggtatagatggtatcaaaggcttgaggcaggaagagagcagagaccctagctgcattgcttagcattgcatccctagcacctggcatagtttccattaacagtaggcatgaagtatctactcagtgaataaatagaatgcatatgggctacagtaggagagagaaataaaatctttaatagaccaagttctatgagagcacaaaattaaagtcttttatttgaagatcttagcctgttttccaaattcagtgcagccagttagacactgawtctgtctggtgaaacaagcatttttgtattttgggggactgctgctgct

SEQ ID NO: 147817 - DNA, 680 bp, Homo sapiens
tcctcatagactgccagtaaaggaagatgcaaataaatccaaaattaatgtacatacataagtaaaatacaaagaaatataaaattaatcacactaccaaagaggcataattttccagttgatttaggactgaacacatgcatgtaactactcttttttctaaaacctcaccaaagaattytgaatggaatagaaaaaaaaattacaaagtctaaactgcagaggacaaaatagaatgccaaaggagatgataataatatctggggagttggctcgctgatagacaagtggtaattgcctttctcaaaaaaaaaaaaaaaaaaaaaaaagtaaaccaaatcctaatctcccaatggcaaaaaaataaaaagccagctgctttaccctgctaatcacctgaccatgaaaagagccaaattctgtaaaatatttgaagagtaaatttttctgtaaaatattctgagccaaatatgagtggtcatgacccaaggcacagtctcaagaggtcctaagaacatgtgcccaaggtggttgggttgacaaaagacatcaatctacacatgtgaagtatccataggtttgggggagaggaggggacaggcgcacaggtgggaagtgtagtagtttataggtcataggattatagatggagtcaaagattttctgattggcaatttatt

SEQ ID NO: 147818 - DNA, 609 bp, Homo sapiens
gccaggctggacaggctggagtgcagtggtgctatctcagctcgctgtaacctcygcctcccaggttcaagcaattcccctgcctcagcctccagaatagctgggacgacaggtatgctccaccatgcccggctaattttttttttttttttttgtattttagtagagactgggattcaccgtgttggccatgatggtctcgatctcctgacctcatgatctgtccgcctcggcctcccaaagtgctgggattaaaagcatgagccaccacgcccagccatgacattttttatgtgtatctttccttccttctcttttcctcattttgccattgacctatgaatatagaatagtgtagggatggtagcactgtttaaatatgttagttcttgccttctcccgcacagtataagtacctcaagagatacagagtaacttaggcacattgcaactttgtcttcttggctgtactatgtgtgtgtgtgtgtgtgtgtgtgtgtgtgagagagagagagagagagaagagagagtgtgtgtgtgtgtgcgcgcgtgtgtgtcagggtgaaggtctggggagtgggctgtgaagaaaaagaaaatattagatgt

SEQ ID NO: 147819 - DNA, 500 bp, Homo sapiens
agatctttcttccttcattgtcttgttaactgtccagatttattacctaggagtttttgaaaactcacatattaggcaatagagtgtattctggaattgagagcctattttaaacttttgactaaaaagtttacccattaaatgtcatagattcaaccatcagactgaaaatcctcagtgtatttgaaggagggtattgtctcaaaaatccagagctcaaagtgaagaagaaaggcaaaatttggaatttagctctargaccaactcatcagttcaggggtcagagatttatatagttaaaggacaagtgtgtgtttacctgagtttaaagagcaaagttgcctctggaaagaagccctcactggaggctctggcatttgaaatggtgggcaggagcacatgttgcttaaatttctgacagtggctggagattaccgattggttaggggagaggaagtaaagtaaaatatttataaattctccactgggtggagtctgag

SEQ ID NO: 147820 - DNA, 546 bp, Homo sapiens
aggcaaatattaaagacaaaggagatagccaattatatatggctgagaagccaagaagttgtagctggaaagtcatccatattaacactggctaaatacaggctaaayaagcagaacaggtgactcagaaggccgaggtcatatttcaactggggattctataaaaactcactgagaaatctattggtactggtctatctcatttgaaagcatcagaagtgttgtgaagtcacacatcttgctactgcgacctatgcttcctgttgtctcaaactttgcacaagaaggccttattctggtactagatagggacttgataagtagtaattcagaaggcatcattagaaaactaaaacaggatttaaattatagataagttttgggctatggcattctcaactgttgcctggaaaagcatatggaagtgaaatatataagtcagtgttcccctgaacaaatgtgcaaaagacgatctcttcatacaatgttaactgtacagttgggacaagcatggtataaagttataattttttaagtctttttgct

SEQ ID NO: 147821 - DNA, 546 bp, Homo sapiens
aggcaaatattaaagacaaaggagatagccaattatatatggctgagaagccaagaagttgtagctggaaagtcatccatattaacactggctaaatacaggctaaacaagcagaacaggtgmctcagaaggccgaggtcatatttcaactggggattctataaaaactcactgagaaatctattggtactggtctatctcatttgaaagcatcagaagtgttgtgaagtcacacatcttgctactgcgacctatgcttcctgttgtctcaaactttgcacaagaaggccttattctggtactagatagggacttgataagtagtaattcagaaggcatcattagaaaactaaaacaggatttaaattatagataagttttgggctatggcattctcaactgttgcctggaaaagcatatggaagtgaaatatataagtcagtgttcccctgaacaaatgtgcaaaagacgatctcttcatacaatgttaactgtacagttgggacaagcatggtataaagttataattttttaagtctttttgct

SEQ ID NO: 147822 - DNA, 546 bp, Homo sapiens
aggcaaatattaaagacaaaggagatagccaattatatatggctgagaagccaagaagttgtagctggaaagtcatccatattaacactggctaaatacaggctaaacaagcagaacaggtgactcagaaggccgaggtcatatttcaactggggattctataaaaactcactgagaaatctattggtactggtctatctcatttgaaagcatcagaagtgttgtgaagtcacacatcttgctactgcgacctatgcttcctgttgtctcaaactttgcacaagaaggccttattctggtactagatagggacttgataagtagtaattcagaaggcatcattagaaaactaaaacaggatttaaattatagataagttttgggctayggcattctcaactgttgcctggaaaagcatatggaagtgaaatatataagtcagtgttcccctgaacaaatgtgcaaaagacgatctcttcatacaatgttaactgtacagttgggacaagcatggtataaagttataattttttaagtctttttgct

SEQ ID NO: 147823 - DNA, 365 bp, Homo sapiens
atctctgggacacagccaaaacagtgttaaactcccacatcaaaaagttagaaagatctcaaattaacaacttaacatcataaccggaagaactagagaattaagagcaaactaatcccaaagctagcagaagacaagaaataaccaaaatcagagctgaactgaaggaaatgaagatgcaaaaaaacgtacaaaagatcaacaaatccaagagctagttccttgaaagaattaataagcaacacatgtcactagctagactaataaataaagagaagatccaaataaacacaatcaggaatracaaaggcgacattaccattcaccccacagaaatgcaaaaaaccctcgaagactattacaaa

SEQ ID NO: 147824 - DNA, 365 bp, Homo sapiens
atctctgggacacagccaaaacagtgttaaactcccacatcaaaaagttagaaagatctcaaattaacaacttaacatcataaccggaagaactagagaattaagagcaaactaatcccaaagctagcagaagacaagaaataaccaaaatcagagctgaactgaaggaaatgaagatgcaaaaaaacgtacaaaagatcaacaaatccaagagctagttccttgaaagaattaataagcaacacatgtcactagctagactaataaataaagagaagatccaaataaacacaatcaggaataacaaaggcgacattaccattcamcccacagaaatgcaaaaaaccctcgaagactattacaaa

SEQ ID NO: 147825 - DNA, 597 bp, Homo sapiens
cttgtatttattaaaatttagaaaaaataaaataaaataaaacttagaaggtaagacaaagagtttcctatataagttttgtcgactgtgaagaaaatacaatgactaatgaaaatgcacgcatggataagtttggatatgtctgttaaaaattgttattgtactatatgtatatgttaacatacaagataaatgtcacattttattgatatgtaagtattgtcctaaatgctaaaattttataataatttgccattatcataaacaatatcaataatcatttaaatgacttgggcagtaaaattaattttccattataaaatttatattcaacwggcagcatgaacattttatatactcccttgagctaatatatttctgctaggctttcatttaaagtagattttcatttatacaatactctattgctaaagcactgagggcttacttcagaaatatgcatttcgttttttaagtacataaaagtatattaaaaagctcccattattatctctacttgagaatatctgtttatacaagacttgaagttgaacaaaatgattttttatgaaaccattaagcaaagattcatttatc

SEQ ID NO: 147826 - DNA, 597 bp, Homo sapiens
cttgtatttattaaaatttagaaaaaataaaataaaataaaacttagaaggtaagacaaagagtttcctatataagttttgtcgactgtgaagaaaatacaatgactaatgaaaatgcacgcatggataagtttggatatgtctgttaaaaattgttattgtactatatgtatatgttaacatacaagataaatgtcacattttattgatatgtaagtattgtcctaaatgctaaaattttataataatttgccattatcataaacaatatcaataatcatttaaatgacttgggcagtaaaattaattttccattataaaatttatattcaacaggcagcatgaacattttatatactcccttgagctaatatatttctgctaggctttcatttaaagtagattttcatttatacaatactctrttgctaaagcactgagggcttacttcagaaatatgcatttcgttttttaagtacataaaagtatattaaaaagctcccattattatctctacttgagaatatctgtttatacaagacttgaagttgaacaaaatgattttttatgaaaccattaagcaaagattcatttatc

SEQ ID NO: 147827 - DNA, 520 bp, Homo sapiens
gaggaaaaaacaaacaaaacacagacaattcacttcccccttattcctcaagtcataaaatctctagctagtttgctttcttttctggacttttaaggtactctgatatttacttattttttctgagattttttgttgtaattcatagaaggaataagggactaacttttttgggggaggaaaacatcctatgttcagtcaatttttaaggccagacttttagttctagtctcattttctgtttttcagcattagctaaatatgttctgagtactctattagctcttgcrggcagttagaaaggagaagtagacttagttctagcccctccgtctattatgatcgagttcggataaaatatatctactgaaaaccttatgtgtaccagacactgttctaaactgggggtgaattatcgtggtctaattggggaacagaaattcaaacacacaaactcattatgaaaaattttttttaaaaattattgaaacaatgagaatttatctttttatatatgtac

SEQ ID NO: 147828 - DNA, 542 bp, Homo sapiens
gttgcagggaagtgccatactgaaaaggcagccccaaaaatagtaactgaaagaaagccgtttttagtgtcaaatgaataccagtatagattatctgtctttcatagttgttgccgtttttacctctgatcactaatgtttgcagctatgattggcagttctccaaaatggttcatgcttggttggatcactccaagtgacacaatttgtgtgaaaccttagtgcactgtaatcacgaacattaacaatctgtctttggctttgcccgtggattaactkttgtgctttgtattgagatactgcttgtgaaaaaaaacaaagacaatccaaataagaacaaacagaggccatttaatcagagcttgataaagcaagggagtcagccaccatcacttgcatttggtagactcaaaggcagacaagggagctttgtagtggataaaaggggagacttcagttataccttgataagaggttattggcacaaagaagctggaagtaaattaactagcagttgggcatagtatataattggtttggga

SEQ ID NO: 147829 - DNA, 542 bp, Homo sapiens
gttgcagggaagtgccatactgaaaaggcagccccaaaaatagtaactgaaagaaagccgtttttagtgtcaaatgaataccagtatagattatctgtctttcatagttgttgccgtttttacctctgatcactaatgtttgcagctatgattggcagttctccaaaatggttcatgcttggttggatcactccaagtgacacaatttgtgtgaaaccttagtgcactgtaatcacgaacattaacaatctgtctttggctttgcccgtggattaacttttgtgctttgtattgagatactgcttgtgaaaaaaaacaaagacaatccaaataagaacaaacagaggccatttaatcagagcttgataaagcaagggagtcagccaccatcacttgcatttggtagactcaaaggcagacaagggagctttrtagtggataaaaggggagacttcagttataccttgataagaggttattggcacaaagaagctggaagtaaattaactagcagttgggcatagtatataattggtttggga

SEQ ID NO: 147830 - DNA, 583 bp, Homo sapiens
cttttgtgctttgtattgagatactgcttgtgaaaaaaaacaaagacaatccaaataagaacaaacagaggccatttaatcagagcttgataaagcaagggagtcagccaccatcacttgcatttggtagactcaaaggcagacaagggagctttgtagtggataaaaggggagacttcagttataccttgataagaggttattggcacaaagaagctggaagtaaattaactagcagttgggcatagtatataattggtttgggaagtatatttggctctctctgattggtgctgaggtggaagtcagggcaaaaattaggaaagttggcagtgaatgactaagtcttgacmattctgggctgattcctgcggacgttttggattaaaattctattgtcttatatggtctgacccttttctatttgtacattgtccctcaagacagtttaattttaacattgtaaattttatgaccatattttccaagaacctagataatgaaaataaaagcaattacaataccaacaccagtattacccatatatccccctaaaagaaggcttaataactttgttacatta

SEQ ID NO: 147831 - DNA, 583 bp, Homo sapiens
cttttgtgctttgtattgagatactgcttgtgaaaaaaaacaaagacaatccaaataagaacaaacagaggccatttaatcagagcttgataaagcaagggagtcagccaccatcacttgcatttggtagactcaaaggcagacaagggagctttgtagtggataaaaggggagacttcagttataccttgataagaggttattggcacaaagaagctggaagtaaattaactagcagttgggcatagtatataattggtttgggaagtatatttggctctctctgattggtgctgaggtggaagtcagggcaaaaattaggaaagttggcagtgaatgactaagtcttgacaattctgggctgattcctgcggacgttttggattaaaattctrttgtcttatatggtctgacccttttctatttgtacattgtccctcaagacagtttaattttaacattgtaaattttatgaccatattttccaagaacctagataatgaaaataaaagcaattacaataccaacaccagtattacccatatatccccctaaaagaaggcttaataactttgttacatta

SEQ ID NO: 147832 - DNA, 605 bp, Homo sapiens
attatgttttctacagtgggtcaagggaggtgcatggaatcacagtagtaacaaaatgtttcttttagtacatagacactttaatttgaaaaattaagtttcaaatagtgttcttaatttgtatgaatattttaatgaaactttggaaaagacttgctcctatatccacatattcagtagacgatgaaaataaaaatgttggcraattccattcagtcagtaaactccttatcaaagaaagtaaaaagatcttgccagctaaatgtcctcgttaccttctacaacatgtagattaaaaggtgtgtgatctgcttgcgtgccatattagggctttcataatgaaagtttttggtcatttttagtgtcctcaaatatgaagaagcacataattatatttttgattgtataggtatagaaggaaatagcttcattaggcatgtgcctaaaagatggctatcattgttgcttgacatggaaaagatattaaaatggtggccttccataaaattataatttccaactgtggaacaagaaaaaaatccttctctaatttggagacatatgagagtaaaaatagataaaaggattacagtaaagcagaaatg

SEQ ID NO: 147833 - DNA, 604 bp, Homo sapiens
ctgctggcacacacatgcatacatgaatggagagtcgcactgctcctccagcacacatgtacatggggactcattgttgacatgcatgtgtgtgaggaccactaccaccttgctggtgcacacatgagtagggaaatggcgactcaccactgccctgctgaggagctttygtcagtagcccctgttggagtgttgctaggttaactttgacaagccagagatcaaagccatggacctggttccagcccccagggttagagcatatagcctaggagtgctaagctgagattctggtcccctgaatgtatccagaaacaaaaccaatggaccaaacccagcttatacgtacagtcaaaccctcaaaggcattaaagaatatacaagaaaaaaaaaaggccacatccgaaagacaacaacttcaaagattaaagtaacatcagcctacacagatgagaaagaaccagtgtaagagccctggcaactctaaaagtcagagtgtcttcttgcatccaggtgactgtactggctcccagcaatgtttcttaactggaccaaagtctggttatctggaagataaggaagctcatcaagatacagaagaagg

SEQ ID NO: 147834 - DNA, 604 bp, Homo sapiens
ctgctggcacacacatgcatacatgaatggagagtcgcactgctcctccagcacacatgtacatggggactcattgttgacatgcatgtgtgtgaggaccactaccaccttgctggtgcacacatgagtagggaaatggcgactcaccactgccctgctgaggagctttcgtcagtagcccctgttggagtgttgctaggttaactttgacaagccagagatcaaagccatggacctggttccagcccccagggttagagcatatagcctaggagtgctaagctgagattctggtcccctgaatgtatccagaaacaaaaccaatggaccaaacccagcttatacgtacagtcaaaccctcaaaggcattaaagaatatacaagaaaaaaaaaaggccacatccgaaagacaacaacttcaaagattaaagtaacatcagcctacacagatgagaaagaaccagtgtaagagccctggcaactctaaaagtcagagtgtcttcttgcmtccaggtgactgtactggctcccagcaatgtttcttaactggaccaaagtctggttatctggaagataaggaagctcatcaagatacagaagaagg

SEQ ID NO: 147835 - DNA, 453 bp, Homo sapiens
gggtatgtctttattagcagcatgagaacagactaatacaaagtccaagactccaaaagctgaagaaattggagtctgatgtttgagggcaggaagcatccagcacagaaaaagatgaaggccagaaggctcagcaagtctgctctttccaatttcttctgcctgctttatcctgctcacacaggyagctaattagatggtgcccacccagacagagggtgggtctgctcccccagtccactgactcaaatattaatctctttggcaacaccctcacagacacacccaggaacaatactttgcatccgtcagtccaatgaagttgacactcaatattaaccatcacagatggcttttcctccagttcccaatgtcttgttcctcatctctgtctgagaccttatcagaatggcctttactgtacatatttctatgaacattctgttcataatc

SEQ ID NO: 147836 - DNA, 546 bp, Homo sapiens
gaattctggttaattggcctggtgtgtctgagcaytgaacttttaaaaactcccctggtaatttcagtggtaaaagttaagaactgctctcctatgacctttcccacatcatctgattgaaaacattttcctatttgtacaagcccaggtcattctttcattttttttttcttttgaaacgaagtctttctctgtcgctgactgcggtggcacaatctcggctcactgcaacctccgcctcccaggttcaagcgattctcctgcctcagcctcccaagtagctgggattacaggcgcccacaacacctggctaatgttttgtacttttggtagagatggggtttcgccatgttggccaagctagtctcgaactcctgacctcaagtgatccacttgccttggcctcccaaagtgctgggattacaggtgtgagccaccgcgcccagccccactctcaaacttttaatacttaagtaatatgccatctagttattgggggaagagaggattttcaatgagagtacttttgtttgtcttcttttttgc

SEQ ID NO: 147837 - DNA, 427 bp, Homo sapiens
caactatagccataaccttctatagtgaacatcttgctcttagtttttccctttccaatctgcatcctctgctgtctttttatactgtatcatctgccagatcactttatccttctgtttgaaaactcccasttgctcccaacgatataactaatgataagagttacacagaaacatatatactctcaaattctctcttgtattaattataaagacacatgctgcctggaatgggatgagctgctctgtctacttctctctcatggtgtctctggctccccattgctctactgtgttctctcaattctttctctgccagccagattcctgagcctatttttattttctgcccatggccaccagggcctcttcagattcttctctataccatgacaattgagctgcaatctctgctgctcactggcct

SEQ ID NO: 147838 - DNA, 427 bp, Homo sapiens
caactatagccataaccttctatagtgaacatcttgctcttagtttttccctttccaatctgcatcctctgctgtctttttatactgtatcatctgccagatcactttatccttctgtttgaaaactcccagttgctcccaacgatataactaatgataagagttacacagaaacatatatactctcaaattctctcttgtattaattataaagacacatgctgcctggaatgggatgagctgctctgtctacttctctctcatggtgtctctggctccccattgctstactgtgttctctcaattctttctctgccagccagattcctgagcctatttttattttctgcccatggccaccagggcctcttcagattcttctctataccatgacaattgagctgcaatctctgctgctcactggcct

SEQ ID NO: 147839 - DNA, 465 bp, Homo sapiens
tagaaaggttttctgaaataggtgaaatgttagacactatttcaggaaggagaaagagactgagagagggaaaaagagactgagagagagagaaagataaagattcagggactctggttgtgtttacaggaacataaccccaggcatatgacattgttttggtatgggaaaaattcaaaatgagagtagagaaaaagtgacaataggtttcctggaaataggttcagaaaattgtttggaaatagaaagyaaaggggaagaaatacatatcatttggtagcaggactttgatcttaaaataagaagctggaactgaatgtatagtgaaatgggaagctagagataaacttccaggtgttagggtggttgtaatatgttaaaaataactcatgctagaatacttttgacagtagaaacgagggtatattgaaggggcatgtttaaaaagaacagtattgaaaaact

SEQ ID NO: 147840 - DNA, 540 bp, Homo sapiens
taatttaagataagcttatgctgaaacagggtgggcccttaatccaatatgactgatggttttataagaagaggagagacaattatgaagatatatgcatggatatgttcattgcaatactattcacaatagcaaagacatggaatcaacccaaatacccatcaatgatagactggataaagaaaatgtggcacatatacaccatggaatactatgcagccataaaaaggaacaaaatcatgtcctttgcctggacacgaatggagctggaagccatcatcctcagcaaactaacgcaggagaagaaaaccaaacactgcacattatcacttataaatgggagctgaacaatgtgaacacatggacacagggatgggaataacacacactggggcctgttggggtggcagtaggggagggagagcatcaggaaaaacagctaatatatgctgggcttaatacctaggtgatrggttgataggtgcagcaaaccaccatggcacacgtttacctatgtaacaaacctgtatatcctgtata

SEQ ID NO: 147841 - DNA, 590 bp, Homo sapiens
ctttctttactattcccttgcacccttcatcccagcctctcttcgctttcacttggactgaccctgacacccatcaggctcagcaaattacctgggctgtactgcccaaggctttacagacggcccccattacttcaatcaagcccaaatttcttcstcatctgttacctatctcggcataattctcataaaaacacatgtgctctccctgctgatcgtgtccagctaatctcccaaaccccaatcccttctacaaaacaacaactcctttccttcctaggcatggttagtaaggtcagaattcttacacaagagctgggaccatgccctgtagcctttctgtccaaacaactggaccttactgttttagcctagcccttatgtctgcatgcagcagctgccgctgctttaatacttttaaaggccctaaaaatcacaaagtatgctccactcactctctacagttctcataactttgaaaatctattttcctcatacctgacgcatatactttctgatccccagctgcttcagctatactcactctttgttgagtctcccacaattaccattttttcctggcacggact

SEQ ID NO: 147842 - DNA, 590 bp, Homo sapiens
ctttctttactattcccttgcacccttcatcccagcctctcttcgctttcacttggactgaccctgacacccatcaggctcagcaaattacctgggctgtactgcccaaggctttacagacggcccccattacttcaatcaagcccaaatttcttcgtcatctgttacctatctcggcataattctcataaaaacacatgtgctctccctgctgatcgtgtccagctaatctcccaaaccccaatcccttctacaaaacaacaactcctttccttcctaggcatggttagtaaggtcagaattcttacacaagagctgggaccatgccctgtagcctttctgtccaaacaactggaccttactgttttagcctagccctyatgtctgcatgcagcagctgccgctgctttaatacttttaaaggccctaaaaatcacaaagtatgctccactcactctctacagttctcataactttgaaaatctattttcctcatacctgacgcatatactttctgatccccagctgcttcagctatactcactctttgttgagtctcccacaattaccattttttcctggcacggact

SEQ ID NO: 147843 - DNA, 599 bp, Homo sapiens
tgaacttagcaaggtcacagaatataagaccatgacataaaaattaagtatatttctatagagtagtaatgagctattgttattaacatttyaaagttactaaataactctccaaaatggaaaacttcagtataagtctaacaaaacttgtacagtacatgtataccttaaactataaagcactgatgaaataattcaacaatgacctaaattgatgtagggatacaccatgatcattgattggaagatgcaacatgatcaataatacaattctctcaaaactaacctatagtattctatcaatttgtatcaaaaacttaggatatttttgtagatatatacaaagtaattctgaaatttatataaaaagcaaaggaactatagaagagttaaaacaatttgaaaatgaataataaggtttgagaaatcacattactggattttaagactttctacatactttacagtaagtgtaaaagaagcatgagtagggggactgacacaaataccagtggagcaaaataggaagttcagtaataggcaaaccaaagtactcacaactgatttttgacaatgattcaaaagcaattcaatgtaaa

SEQ ID NO: 147844 - DNA, 518 bp, Homo sapiens
ttgcacccttcatcccagcctctcttcgctttcacttggactgaccctgacacccatcaggctcagcaaattacctgggctgtactgcccaaggctttacagacggcccccattacttcaatcaagcccaaatttcttcgtcatctgttacctatctcggcataattctcataaaaacacatgtgctctccctgctgatcgtgtccagctaatctcccaaaccccaatcccttctacaaaacaacaactcctttccttcctaggcatggttagtaaggtcagaattcttacacaagagctgggaccatgccctgtagcctttctgtccaaacaactggaccttactgttttagcctagcccttatgtctgcatgcagcagctgccgctgctttaatacttttaaaggccctaaaaatcacaaagtatgctccactcactctctacagttctcataacttygaaaatctattttcctcatacctgacgcatatactttctgatccccagctgcttcagc

SEQ ID NO: 147845 - DNA, 599 bp, Homo sapiens
tgaacttagcaaggtcacagaatataagaccatgacataaaaattaagtatatttctatagagtagtaatgagctattgttattaacattttaaagttactaaataactctccaaaatggaaaacttcagtataagtctaacaaaacttgtacagtacatgtataccttaaactataaagcactgatgaaataattcaacaatgacctaaattratgtagggatacaccatgatcattgattggaagatgcaacatgatcaataatacaattctctcaaaactaacctatagtattctatcaatttgtatcaaaaacttaggatatttttgtagatatatacaaagtaattctgaaatttatataaaaagcaaaggaactatagaagagttaaaacaatttgaaaatgaataataaggtttgagaaatcacattactggattttaagactttctacatactttacagtaagtgtaaaagaagcatgagtagggggactgacacaaataccagtggagcaaaataggaagttcagtaataggcaaaccaaagtactcacaactgatttttgacaatgattcaaaagcaattcaatgtaaa

SEQ ID NO: 147846 - DNA, 591 bp, Homo sapiens
caaagtactcacaactgatttttgacaatgattcaaaagcaattcaatgtaaaaaggatagttttctaacaaatgaaataattggacatccctaggcagaaaataagcctcagtctaaacttacaaattgtataaaatattaactcaaaataaattagagatataaataacctaacactaaaatttttagacaaaaacacaggagaaaatctttgttactttgggctaggtgacacattcttagacatgatgccaaatgtacaatttacaaaagaaaatatttattaattaaacttcactaaaattgaaacactttgttctgtaaaatatcctgttaataggttgaaaagactagccacagactggcagaaaatatattgyaaattgcttatgttacaaagggcttgtttctggaatatgtaaggaatatgtaaggaactcatattcaatcagaaaatgggcagaagtcttaaacagacatttaatcatagaagatacataaaaggcaaaaaaaatcgcatgagaagacaaatactagccattaaggaaatgcagattaaagctatgatgaaataacaccataaatgtatt

SEQ ID NO: 147847 - DNA, 601 bp, Homo sapiens
aagaatcctcctattagtgaaaaagacttgagtatcaggatattaacattaagacctttcattatattcttaggaggttgtcaaaagacaagtgcttcatgtacagatactaagattgaaggaaatttcccagtgaccattcaaaagtgctcagacccatccaagggaaattgttccacattattaagtagataaaggagggttatagaaaacccaaaaggacaaattaccctttgtggaacaaaatgaartagttgtaaatattggctgagtgagacactctccttggcagcattagaaactagatcagcatttcagaaaaaattcgcaattcagaaaggcaataaattgtaggacaaaatcagaaacagtagtcagaatgattttacaacccttcctaagagctattcttgactattcctgagtgttttaagaggtttggaaactgttttgtggtgaaaaagttcttttttctgtttattttttaaatttaattcactttttgttagaatttcataaagtacaatactaatcaatacaaaatattgctaggcaaaataatttttcagataaagaaaattgatttttactactattacgg

SEQ ID NO: 147848 - DNA, 597 bp, Homo sapiens
cttgtatttattaaaatttagaaaaaataaaataaaataaaacttagaaggtaagacaaagagtttccyatataagttttgtcgactgtgaagaaaatacaatgactaatgaaaatgcacgcatggataagtttggatatgtctgttaaaaattgttattgtactatatgtatatgttaacatacaagataaatgtcacattttattgatatgtaagtattgtcctaaatgctaaaattttataataatttgccattatcataaacaatatcaataatcatttaaatgacttgggcagtaaaattaattttccattataaaatttatattcaacaggcagcatgaacattttatatactcccttgagctaatatatttctgctaggctttcatttaaagtagattttcatttatacaatactctattgctaaagcactgagggcttacttcagaaatatgcatttcgttttttaagtacataaaagtatattaaaaagctcccattattatctctacttgagaatatctgtttatacaagacttgaagttgaacaaaatgattttttatgaaaccattaagcaaagattcatttatc

SEQ ID NO: 147849 - DNA, 597 bp, Homo sapiens
cttgtatttattaaaatttagaaaaaataaaataaaataaaacttagaaggtaagacaaagagtttcctatataagttttgtcgactgtgaagaaaatacaatgactaatgaaaatgcacgcatggataagtttggatatgtctgttaaaaattgttattgtactatatgtatatgttaacatacaagataaatgtcacattttattgatatgtaagtattgtcctaaatgctamaattttataataatttgccattatcataaacaatatcaataatcatttaaatgacttgggcagtaaaattaattttccattataaaatttatattcaacaggcagcatgaacattttatatactcccttgagctaatatatttctgctaggctttcatttaaagtagattttcatttatacaatactctattgctaaagcactgagggcttacttcagaaatatgcatttcgttttttaagtacataaaagtatattaaaaagctcccattattatctctacttgagaatatctgtttatacaagacttgaagttgaacaaaatgattttttatgaaaccattaagcaaagattcatttatc

SEQ ID NO: 147850 - DNA, 630 bp, Homo sapiens
tcatccccttggggatgcagtgaacagcctgcacaactgtacacagccgccccagtcaaatcctagcaaaagactaatctacagtaaatttatgttagcaaacttagatacaagaattttgactcaccattgagtcattgtaaaagtagtgttggttttagttatcattaaaaagactcaacaatttagaaataatgttgagaaggataaaaaaaaattaacatgctgctctaaagatagaaagaatctaattctattggagagctgtaactcttagaataaatgaaaaggaaacgtgaattgagcaaaccagtgttgataaacacaagaaagggacgtcataaaatgacatcgccccaaatccagcagagtcaatatcatcaaactataattagcacaagtctccaaggagcatgaatcatattgagaaataggtttttgatcttgaaaagtartatgagaactagagatgaaaactaagctgtagatggcacactgcaaaaaattgaggctaccgagggaatggaatgagacaggctgccgctcacctgcctgccctgtctccaaaagcacaggcaaaagaagcaaatgaggcgttaagcagcattaaggagacaagacggaaaggag

SEQ ID NO: 147851 - DNA, 458 bp, Homo sapiens
ggacttatataatgagaacagcatggaaaaaacctgaccccatgattcagttacctgccacaacccatggggattattacaattcaaggtgagatttgggtggggacacagagtcaaactgtatcaccgaccaagagctgggctctggagtcaggctgcatgtgttcaaagcttgggtcttccaatttcacttaataggtgagacatcttgggtctgtcttctgagcctctgtttctcccatctatgagctgagggacaatgctaataagagcaggcacaccacaggattgtcaggaggccgtgcttagcacaatacctgacccgttggtaaggacttaaaggaagtcaatccactgctctcctctaactcatctcwtcatacaagaggcacttaattatccatttagtagttactgctaagcccaactcttagcgatgtattctactcagtcaggta

SEQ ID NO: 147852 - DNA, 437 bp, Homo sapiens
tgagccacttccatctcttgattccgagacctatatgtcctggctgtggggtggatagtaccgtatatgtatgttctgtttcaaagcacacacagtaagtacactttaagatggactccatcatttcagtgtggtgactcccaactgacactataattaagtcttaactgttacatccttcaaaatttgtccagttgcttccaggtgatgggacatgtggtaaaaccagttaattctatggccttgagaccactgctgcacttcattgctgtraaagaagcaatgctgtgggaatcattgatcagaaacatcactatgggaaattccatgatggtggataaggtgccccatgagtccatagatggtgctactggcagaagcattatggcagggaaggcatatccgtgtccagaatgtgtctatttcagtgaggacaa

SEQ ID NO: 147853 - DNA, 387 bp, Homo sapiens
ccgggactacaggcgtgagccactgcacccagcctctactaacagttattataaaatataaagaaagatttcttctcktgcagcttaaaagcttcaggtctgatggactggacagaagttggaacacgggagtaggaatttaccttactcagaaggacaccttgtccactggcctggaaacactagatttataaagtaggaagcaaggtcattgataagggcgaatgcggaagtgataggaaagcgttaaaggctaaaagtcactgttgtaaagactgggaaagagagctgacttgaggccacgtaaaaggctgggcaaaattaagcctgcaaattctcaatttgtagtgaacccaggggggggggcacacataggaggagagaaga

SEQ ID NO: 147854 - DNA, 571 bp, Homo sapiens
ctccacatccaactctttcaacaaacagatgctgtcttattttaaagaatctaatgagaaagtgattcagtaactccctttagaaatggttcccatctgtcatatttatcaggaatttctacacatcccataataatatgaagtcttcccctgtctctttctctctgacgtctcattgcactaagacactgattaagaggctaatcattaacttattaatagctatcattcactgagcaaccgccatatgtcatattatgtatcaaccatccacgcccagggcacagtggctcatgcctctaatcacagcacttttggaggctgaggcgggaggattgcttgagcttgggagtttgaggctgcagtgagatgtgatcacaccactgcactgtagcctgggtgatagagtgagactccaattcaaaaaaaattaaaaaaaaaaaaacaaaaaaaaactactcagtactttccrcacctgagctcatttaatcaatacgaccttacaaggtgactactattagcaccattttatggataatgaactaaaacaatagttgagagaggttatatt

SEQ ID NO: 147855 - DNA, 566 bp, Homo sapiens
aaagcaccaagcccagatggattcactggtaaatgctactgaacacgtaagaaagaaattgtaccagctccctacaattcctagaaggtagaagtagagggaatctctcctaactcattctacaagccagcactcccctactacctaaaccagacaaagacattacaagaaaacaatagacccatatctcatgaaccaagatgaaaaaaaatcaacatgatgctgtttgcaaatcaaatccaacagtatataaaaagaatgatgcctcatggccaagggatatttaaactgggtatgcaaagctggttcaacatccaaaaawcaattaatgcaattcatcatgacaagctagagaagaaaaatcacatgatcatatcagtagatggagaaaaagcatttagcaaaatctaaaacctgttaatgagaaaactatcagcaaactcggagtagaggggaactgtcttaacttcataaagaacatctacaaaaaaactaaagctaacattataattaatagtgagaagcccaaagctttcccgctaagatcaggaacaaggcaaggatgt

SEQ ID NO: 147856 - DNA, 566 bp, Homo sapiens
aaagcaccaagcccagatggattcactggtaaatgctactgaacacgtaagaaagaaattgtaccagctccctacaattcctagaaggtagaagtagagggaatctctcctaactcattctacaagccagcactcccctactacctaaaccagacaaagacattacaagaaaacaatagacccatatctcatgaaccaagatgaaaaaaaatcaacatgatgctgtttgcaaatcaaatccaacagtatataaaaagaatgatgcctcatggccaagggatatttaaactgggtatgcaaagctggttcaacatccaaaaaacaattaatgcaattcatcatgacaagctagagaagaaaaatcacatgatcatatcartagatggagaaaaagcatttagcaaaatctaaaacctgttaatgagaaaactatcagcaaactcggagtagaggggaactgtcttaacttcataaagaacatctacaaaaaaactaaagctaacattataattaatagtgagaagcccaaagctttcccgctaagatcaggaacaaggcaaggatgt

SEQ ID NO: 147857 - DNA, 566 bp, Homo sapiens
aaagcaccaagcccagatggattcactggtaaatgctactgaacacgtaagaaagaaattgtaccagctccctacaattcctagaaggtagaagtagagggaatctctcctaactcattctacaagccagcactcccctactacctaaaccagacaaagacattacaagaaaacaatagacccatatctcatgaaccaagatgaaaaaaaatcaacatgatgctgtttgcaaatcaaatccaacagtatataaaaagaatgatgcctcatggccaagggatatttaaactgggtatgcaaagctggttcaacatccaaaaaacaattaatgcaattcatcatgacaagctagagaagaaaaatcacatgatcatatcagtagatggagaaaaagcatttagcaaaatctaaaacctgttaatgagaaaactatcagcaaactcggagtagaggggaactgtctyaacttcataaagaacatctacaaaaaaactaaagctaacattataattaatagtgagaagcccaaagctttcccgctaagatcaggaacaaggcaaggatgt

SEQ ID NO: 147858 - DNA, 553 bp, Homo sapiens
tgaaatactgttaatacatttatttttgcttaaactattcagagtagattctgtctctgaaactaaaagctaatacatccccaaccaaatatatcctcagctcagtctaaccctgctaaaaaccaacccatcctaaaatcattccaacccacccaagcatgttaaatccagcctgattcaaattagcctagctcagccaaacccagccccaaccaagctatgcctgactcacctctttctacctcagcccatctaaactcaatgcaatccatcacatctcagcctaggtcaattaccttaatttaaacaagccatttaatctscacctcagcttatatgacccatccaactcatctcaactcagtctctcccagccctaatcccaacctacccaatgaatctcaacccaacccattccatgggagttgagtgacacagcccatttaatttcacacgtatttactgagtatcttttggggcccctgtgagagaacaaagggaacttgaacttctttacagatgtaaggctgcattctttttttttatgcatttc

SEQ ID NO: 147859 - DNA, 574 bp, Homo sapiens
aagttgtcaaaatcaaaagaaagccacatgctaaaaattctcacaaatggaatcaggggaggccatgaaggaagggttgtcatgtacaaatacctgataacaggagctatcacaaaagactgtgtaaaaaccacaaccttgaacaaaggtgatcatactctaacacacacacacacacacacacacacacacacacacacamatacttgtatgaggcccagtaactgcctgtccaaccttggactggcaacacccttgttattgatccttgtagccaaagacaattacctcaaaacaattaagtaatcctcctcatttctttctttcaaaacctttgtctttctttacctacctgataagcacatagttgactttggcacacatattcccattaaagtgcccatttccaaataaatataattttcctttagagagctgatatggttaggctgtgtccccacccaaatctcatcttgaattttacctcccataattcccacttgttgtgggagggaacagtgggagataattaaatcacagggatggtttagcccatactgctctcatggtggtg

SEQ ID NO: 147860 - DNA, 289 bp, Homo sapiens
gtatgaggcccagtaactgcctgtccaaccttggactggcaacacccttgttattgatcyttgtagccaaagacaattacctcaaaacaattaagtaatcctcctcatttctttctttcaaaacctttgtctttctttacctacctgataagcacatagttgactttggcacacatattcccattaaagtgcccatttccaaataaatataattttcctttagagagctgatatggttaggctgtgtccccacccaaatctcatcttgaattttacctcccataattcc

SEQ ID NO: 147861 - DNA, 501 bp, Homo sapiens
tctgccatgattgtgaggcttccccagccatgtggaactgtgagttcattaaacctctttttctttataaattacccactcttgggtatgtctttatcaacagcgtgaaaacagactaatataatgatgtaatagccacagtggtatctcctgctgctccagttcgtacttatatcttgcttttggttcctccctcctttatctgctattaatattttagtcatcctttgaggtttagtgcacacactgctacctcccctgagagtactccttggcttgcccagtatttttaaaaaatttctttgtaatatttatttttcttggtctcgtacgcagctgtggctaggcaggttgacctgtctgtctcacctattaaattagaagctctttgaagtcagggaccagttctcaatatcctttcagtaacctgtacaatgtccagcactgtgcttctttcatgtgagctgctcaaaactcaygtgttgaataaataagcaggta

SEQ ID NO: 147862 - DNA, 591 bp, Homo sapiens
tcttcatgttgagggaaaaaagaaatgagttgttgctaagaaatactaatagctaccaactggtttcctgatgcttgagcaagcttagaaacctgtcaatagtacattacgaattaaagccagttcagataatttcacagccacatcaatcattgaatattattgaaatttaaaaaatttgattctaacaaaataattctaactacagaaaattcacacctctacattgataataccaaaaacttggcagccaccaagctatccaatcacaggttaatcactgagtaaactgtgtctatcttcttaattaaatcctacaaatactttgaaaatgatgtttcaaagaatatataataaaaatgtttatgatataargttgagttaaagaagcaaaacaaaactgaatacataaaataattgttattagaaaaatgcgtgaacacgttgattgggggcaagtcagactgctttaagtaagtgtgttttggtgatggaggttataggaaattaaccccttccccactccatctattatttcttttgacaatgtatttccaaatgctctttaataagccagtactgtttttgtaa

SEQ ID NO: 147863 - DNA, 591 bp, Homo sapiens
tcttcatgttgagggaaaaaagaaatgagttgttgctaagaaatactaatagctaccaactggtttcctgatgcttgagcaagcttagaaacctgtcaatagtacattacgaattaaagccagttcagataatttcacagccacatcaatcattgaatattattgaaatttaaaaaatttgattctaacaaaataattctaactacagaaaattcacacctctacattgataataccaaaaacttggcagccaccaagctatccaatcacaggttaatcactgagtaaactgtgtctatcttcttaattaaatcctacaaatactttgaaaatgatgtttcaaagaatatataataaaaatgtttatgatataaggttgagttaaagaagcaaaacaaaactgaatacataaaataattgttattagaaaaatgcgtgaacacgttgattgggggcaagtcagactgytttaagtaagtgtgttttggtgatggaggttataggaaattaaccccttccccactccatctattatttcttttgacaatgtatttccaaatgctctttaataagccagtactgtttttgtaa

SEQ ID NO: 147864 - DNA, 548 bp, Homo sapiens
ttacttttgcaccgacctaattatgttagtccgtgttcacactgctgatagacatatccaaggccgggtcatttataaagaaaaggaggtttaatggactcacagttccatgtggctggggaggtctcacaatcatggcagaaggcaaaaggcacacatggcagcaggcaagagagaacttgcgtagggaaactcctccttataaaaccatcagatcttgtgagacttattcactatcaygagaacagcatgggaaagacctgcccccatgattctattacctcccaccgggtccctcccacaacatgtgggaattatgggagctacaattcaagatgagatttgactgggaaaacaaccaaaccatatcactaatatattcctttctggaggctgtggggacaaatctgcttccaagaaccttcaagttgttatgaggatcactccaaaatagtatttttatgtggctgccggactgaggtcttcagttcgatgctggctgtcaggcaggggttgcttatagctcctagaggccacccatttattgc

SEQ ID NO: 147865 - DNA, 657 bp, Homo sapiens
cccatcccaaaaaagtgttatgagattggcatttgggaggcccagacaagagcccctgacttggtggccactaggccagaatcagtatgcctactgtaagcaaaaggaccattgacaatgagaatgtcctaactgttccctgtgattgagagaaaaagactccccattaatactatagctaaccttcttacattagccccartgagctaccttgctcaagtaagtttaaagaggtcttggacccttgactagacagatagcttctcacaatggcagagaagtggccacctgaacgtttttcttcagtgtcttcactgctgggtaagctctatggcagcttggggactccagggtgtccttttgagcaacatggtttaccctgtcccttccttacttgatgctacaggatcctcttccctgcttcttcctgtcttccgtacctactggggcaagcaaagtttctggatttgtcatcaacattccgtcttttgatctatccagaaaatctcacagccaactccccagaccttctaactaaccatagtgatcccaaagtacccaagtccctacttgttatgtggaactctccaccacttaatggattccacatgaacaccccctgccgctattacctggacttgggaaggtgggtatcta

SEQ ID NO: 147866 - DNA, 382 bp, Homo sapiens
aacagttccatgtaaagaaaatgctggcacaaagtttccaatccatcccatctactgatctaaagaatgaaaatgtcctgattctggaccccttagatcaggtgttcagagagttttgctcctccagtgctaggcagggccactcttttgcacctcttaaggttaaggaggaggagtatctaatcctttagggggaaayaaggtcagaggcaaactcaactctggaggtagggcttgggctctggaccagattgaagactagccacaacagggaagaggtgaaagcaactctgcatgagacatgctcaccagttccatgtcagtttaccattgccatgggcatgcccagaagttactgcccctttccatggcaacaacctga

SEQ ID NO: 147867 - DNA, 562 bp, Homo sapiens
tcttggtgggaaaaactgcaaagtcacattgcaaagaagcatgaaagaaaatcatcgtggccatttttgttaatgattttccacaaggatcatgatttgtcagtacctggtaactcttccttcttctattggaaggtgttactaaatagaatgagaggaagacagaaaccaaaggaacctgtcctgactcaggtttgggtctctaggaggattccccagcattgtcaytgggagaacaaagggtatgacctgctggttcagagggaaactttgagtctaaactcctgagttttctcctgattccttggtgataacagtggaaggtgtccaaaagtgtcagcctgctctgtagagggcagctggtgatgctggacagtgacctctcagataggtcattgtgctggggtcaaaatgagtctgtgccaaagattgcagggagagcacctaggccaggaatcaactgagcatcacaagcagaccccaggtgatgccatggtacctggccatactgaaagaggataaaccacaaaccctctgtctatagaccttagcaacaaattcc

SEQ ID NO: 147868 - DNA, 562 bp, Homo sapiens
tcttggtgggaaaaactgcaaagtcacattgcaaagaagcatgaaagaaaatcatcgtggccatttttgttaatgattttccacaaggatcatgatttgtcagtacctggtaactcttccttcttctattggaaggtgttactaaatagaatgagaggaagacagaaaccaaaggaacctgtcctgactcaggtttgggtctctaggaggattccccagcattgtcattgggagaacaaagggtatgacctgctggttcagagggaaactttgagtctaaactcctgagttttctcctgattccttggtgataacagtggaaggtgtccaaaagtgtcagcctkctctgtagagggcagctggtgatgctggacagtgacctctcagataggtcattgtgctggggtcaaaatgagtctgtgccaaagattgcagggagagcacctaggccaggaatcaactgagcatcacaagcagaccccaggtgatgccatggtacctggccatactgaaagaggataaaccacaaaccctctgtctatagaccttagcaacaaattcc

SEQ ID NO: 147869 - DNA, 593 bp, Homo sapiens
tcagtgagtctgctatacctgtaaatatttgaatactataaatgactagtgctgaggagaaggatatagtgtttcattaagtatttgctccatttttaaagagcccgtgaccatggcaaccaggtgctgccaactgaccccaatggcagccacacttgctgctttatctcaattgctactgggagcacacaagctttatagatttattgaatcacattagattataggcaatttttaartggttcaaaaggagaggaatagcttgtttttaatctaaagaagtagaattgttatgcatgcattatttcctgcaggtaatattcatacacaatttaaggattttaagaaacaaacgaaagagatttgtggacgaatacggcagacagatcatatgtgcttattctttgctccaccccagcacctctttcaataccagttaaaggacataaggtaataattttatgcctgtctacaaagacaagagtgcaggagaagagaagagggaaggccagattgtcaacagaattttggaagttggaaaatagatggatgagtcataactcatttacagagcagaaatgttgaaaccaaac

SEQ ID NO: 147870 - DNA, 523 bp, Homo sapiens
tatggaggacctctactagggcagcacagaggggaaatgaggggttggagcccccatacagagtctccaatggggcactgccatttggagctgtgaaaagagggccaccatcctccagaccccacaacggggtctgtcacaatctactgacagcttgccccctgcacctggacaagcctcaggcactcaacaccagcccttgygattaaccacaggagctgaatcctgcaaagcctcatggacagagatgcccaagaccttgggagcccaccccttacaccagtgtgccctgtatgtgagatatggagtcaagggagactattgtggagctttgagatataataatggccctgctgggtttcaggcttgcatggggcctgtagccactttcttttggtgaatttctcccttttggaatgggattatttcttaatgcctgtactcccattatgtcttgggagtaactaacttgtttttggttttacaggctcataggtggaacagacttgccttgtctcagatg

SEQ ID NO: 147871 - DNA, 523 bp, Homo sapiens
tatggaggacctctactagggcagcacagaggggaaatgaggggttggagcccccatacagagtctccaatggggcactgccatttggagctgtgaaaagagggccaccatcctccagaccccacaacggggtctgtcacaatctactgacagcttgccccctgcacctggacaagcctcaggcactcaacaccagcccttgcgattaaccacaggagctgaatcctgcaaagcctcatggacagagatgcccaagaccttgggagcccaccccttacaccagtgtgccctgkatgtgagatatggagtcaagggagactattgtggagctttgagatataataatggccctgctgggtttcaggcttgcatggggcctgtagccactttcttttggtgaatttctcccttttggaatgggattatttcttaatgcctgtactcccattatgtcttgggagtaactaacttgtttttggttttacaggctcataggtggaacagacttgccttgtctcagatg

SEQ ID NO: 147872 - DNA, 523 bp, Homo sapiens
tatggaggacctctactagggcagcacagaggggaaatgaggggttggagcccccatacagagtctccaatggggcactgccatttggagctgtgaaaagagggccaccatcctccagaccccacaacggggtctgtcacaatctactgacagcttgccccctgcacctggacaagcctcaggcactcaacaccagcccttgcgattaaccacaggagctgaatcctgcaaagcctcatggacagagatgcccaagaccttgggagcccaccccttacaccagtgtgccctgtatgtgagatatggagtcaagggagactattgtggagctttgagatataataatggccctgctgggtttcaggcttgcatggggcctgtagccactttcttttggtgaatttctcccttttggaatgggaktatttcttaatgcctgtactcccattatgtcttgggagtaactaacttgtttttggttttacaggctcataggtggaacagacttgccttgtctcagatg

SEQ ID NO: 147873 - DNA, 555 bp, Homo sapiens
cagttctggaggtcagaagtctaagatgggtccactgggttgaaatcaaggtgttggcagagctgcattgcattctggaggctctaggggaatatctatttacttgccttttccagcttctacaagctgcccacattccctggtccatgggccctttcttcaccttcagaacctgcaacagccagtcaagtctttctcacattccactgctctgacactagttaccctgcctccctcttccacatttaaggacctttgtgattacactaggtctgccagataatccaggatactctccttattttaaggtcagctgagtagcaaccttaattcctacttaccacgtgatataacayattcaaaggttctgtagattaggatatggatgtctttgtaaggaggaaggaaagaattattctctctaccacagaaaagctggaagaaacagctctccattcataagtatccattcataaatatccattcataagtatctggagtgccattctttatccattcatcaatatttgcagtgcctatagaaggggtagcatc

SEQ ID NO: 147874 - DNA, 565 bp, Homo sapiens
gaatataagtctcttatatttcctttccttctatacttgacctttcattttcttgatactatcatttacagcaaaaaaaaaaagtgttaaatttgaagtccagtgtatctattttcacttttttcacacatgcttttggtgtcatatctaagtaaccatcacccaacctaagatcataaagatttaatccaatgtttctccttagacctttataattttaaatgtttttaatttttattttattgttattattwtttttttttttttgagacagcatctggctctgtcacgcagcctggagtacagtagcaccatcttggctcattgcaacctccacgttctggcctcaagcaatcctcccacctcagcctcctgagtagcagggactaccggtgtgcaccaccacgcccgggtaatctttgtttgtttttctgtagagacggggtttcgccatgctgcccaggctggtctcaaactcctgggctcaagccgtacacccgccatagcctcccaaactgctaggattacaggcgtgagtcattgctataattttaaattttacatt

SEQ ID NO: 147875 - DNA, 551 bp, Homo sapiens
aaattgattggccataaatgtaaagatttatttctggacttccaattttattacattaacctattagtctgttcttatgccaataacacactgtcttgattactgcaggtttgtagtacgtttttatatcaggaactgtgcgtcttccaactttgttctttttcaagactgttttgactatcctgggttcctagcattttcaaataaatttcaggattagatygacaagttctgcaaagagctagatatcattttaatagggattttgttaaatctgtggatcaatttgggtcatattgtcatcttaataacattaaatcttttgattcatgaaaatgaggtgtcagaagactacatagagatatttagatattcttttttctgtcaacaatatttttaattttcagtgtataagatttgcccttcttataaggataaaatctatccttagtattttattcctttcaatgctgctgtaaacgaaattgttttcttaacttcatcttcaaattgttcatttatatcgtatggaaatacaattaatttttgta

SEQ ID NO: 147876 - DNA, 512 bp, Homo sapiens
gttgaaatgctagtgtgttcttagagtgactgaactgtgcttgtcaaggagggaagggttgtggagacccattcacccattgacccatccacctgaccttctctgacacctcaggaggtatatctgggccctgtcccccagtgaaaattctgcttaatcccaaagtcttgagatgtgaggattcctacccactgatgtttggtgtctgtcataaggtaggcactgaaggcatcccctcaacacacayccagagtgcaggtattcccctcccctaactttcctgccaagagtctcaatttaccagcaaagaagttcaacctgggccacatggctgattcatgataagaagtgttcttcaggaagaagcctctccctactgttattcagtgatgtgaaattataaaactggaatccaagaaatcatgagtggcaagacccagtgtataaatcagtccctgacttccatatctgtgctttccataagatgtcaccagctctcttgttgcctgaca

SEQ ID NO: 147877 - DNA, 512 bp, Homo sapiens
gttgaaatgctagtgtgttcttagagtgactgaactgtgcttgtcaaggagggaagggttgtggagacccattcacccattgacccatccacctgaccttctctgacacctcaggaggtatatctgggccctgtcccccagtgaaaattctgcttaatcccaaagtcttgagatgtgaggattcctacccactgatgtttggtgtctgtcataaggtaggcactgaaggcatcccctcaacacacatccagagtgcaggtattcccctcccctaactttcctgccaagagtctcaatttaccagcaaagaagttcaacctgggccacatggctgattcatgataagaagtgttcttcaggaagaagcctctccctactgttattcagtgatgtgaaattataaaactggartccaagaaatcatgagtggcaagacccagtgtataaatcagtccctgacttccatatctgtgctttccataagatgtcaccagctctcttgttgcctgaca

SEQ ID NO: 147878 - DNA, 581 bp, Homo sapiens
tgtgatcatctggatattcactgggaaggtaggatgttccctgcaggttgccagtgcattgttccatgccttgggagtggtagtttatctgaaatgaggtaaatattctttccaaaatacatcttattgacttgtgagctgttcacatgagccgatcctaatttatacccgttttcctgggtggaacttggaagagagaaaaaaatctggaagtgccacactttctagatgttattgatcagggaagccaaaccctagaggcagcatttcccaatcaacagcttgtcccttggtcagtcatcctgaccatagcacaaggcttgtggtctcataacttgtgctgtttaaatcttctcctattctcttccctttggactcagagtattttactttaaacattcccaaaagcattctcattcattcctgggtcaatgcttaattctctaatgctttccctttggccctggtgtcaaatactaaaacaactctgrgtcttttatgaggttcagaaattcctactagttgaaagtgtcccatactagtttttgtctctctcttcttgaaaaacttgtgttttatcc

SEQ ID NO: 147879 - DNA, 271 bp, Homo sapiens
caacaaataaaaatactcaataaatagcactccatgaaacctgataacttaatacagtatggcttctctaaaacaagagatcatagaaaggcttaaagaagaaatgataatgaaaggagataaagtgtaacctgtgtagatctcagaaacagttcgwatgaaacagagattatcagttctagaaggtttggtaaaacatggccataaaaatttctaacaatttgatgccttttccgagtgaagcaggagtttgtccacggcctgcaaagtc

SEQ ID NO: 147880 - DNA, 647 bp, Homo sapiens
atgacctcatctgaatgtcctactgtatgtcaggctgctccaagtttcaagatttcactcttgcacccctaaaatatcaccatgttcctgacaaaagcaaaaattgtcttatatataccaccttggtctcttttataccattcctgctcatctttttctgcttgatccgctctaatctacagaaattctccaggtatcgaatgcaggttaattaattcttaacagcaacaacaaaattagcaaagacttatagcccataccacatgccagatactgttttaaggattttacatatatggactcaatccagcacaatccacatgagggaggcatgatttttattcccattttcaagggtaggaaacaggaaaaaaaagtttcctttagtattttgcctaagatcataattagtaaattgtgtaattcacagtcataactaatagctccagaacctgggctttcagccactgttgaaggtatattayactgtattgtactatactatactatactatactatactatactatactatactatactcttctatacactatagaacaagtgtgaataattcctaatttatcctatctattcaccagatcattcttgttcattaacattacctaaacttctggtgtaggcaa

SEQ ID NO: 147881 - DNA, 557 bp, Homo sapiens
gcagaaaaggtgggtaaattcaacctgctgatattttgcgtttgtctgacatgaatttttttgtccttttgatttaattttactttttgaatatgtgattcaaaaggtgtactcatagaattctcatttctatccctattcccctgaccctgttgctactcagccctgtaagtaacaattttcatttgttttatcagtttttaaaatatatatacacaaaagtatcatattatgccatgtgcactgttttgcatcttatgcttataactttgcaatatatayggaattttgaaattcattccatacccattcatgaagctctttctcattcttttttatagctgcaaagtaccccattgtgaggatgaaccatagtttattcaataggtctctagttgttgaatatttggatggttttcaatcttttacagctatcaatgatgcctacgtgaataactttgtgcctatgttgtttccttttgtgggaaatagtttcaggtaggtttctagaaatgggattgctaggtcataggataaaaatgcatataattttgtaa

SEQ ID NO: 147882 - DNA, 546 bp, Homo sapiens
gtggagggaaagaagacctgttaagtgatgacgattcctaagaggatgtgggtgaagtagaacattcaatgtccctgggagagaagcaggggctgcccttctctgaggctaagcccaaacctccaactccttctgtcacatcctaaatcggagggctgagctggagacaaccaggggaacagagccaagtccagctctgagcatgttgcttgcccatcaaatttcactgaattcccactttgaagctcacaaagtactgacggtagggcacaggctgaatattggttagaagattactttccagggaaaatcaggctccaagtgaaaactttcatgaaaaaaattatttattctttgaagccagactaaatgctgatgttctgttgagagttttattttgaccttttttttaaaaaaaaaacaaaaacgaaaaactatccatcagcaatgaagagctttcttttttcatagcaaaagcagtctgataaamaggactttaaatgaagaaggaaaagatcagttgaatgcgtatcacttgcagaaaca

SEQ ID NO: 147883 - DNA, 249 bp, Homo sapiens
cccaagagtcatataactattttaggagaatgagagataattggagaactaggaagagggcaagagagaatttaataggtaacatataaaactggaaaaatagctgtgtgattgtgttatttgaaagttttgagatacagatttttaaaaaatagctaaaggagatgatagtgaatgtcaacaaagaggagtggggaaaaaagaggtgatttttttttcctctgccrtaaacccggtataatttaactt

SEQ ID NO: 147884 - DNA, 558 bp, Homo sapiens
acctctggttgtggaggaggaaggcaaaggtagagtagaagaaactcgagcctttcagtttatatagctgatgagcagatgatgctcctttcccaaagaaagcatttttaggaaaaattggggggataggtagggagatgttaagaaataaataggaggctggacaagcggtgcccagggagtgaaccaatggatggagtaaaaagtaaagatttttttgttttgttttttagaaaaacatttaaaaaatatttctggggaaggagaagtgatggaaagagtacackgctctttaaaaatataaccaaataaatcaaatttgattaagatgacaagtataaattggtcaaccaagaaatactaagaagtaacaaaaaaaaagtcatttggaaagaataggttagaaatggcacaactttaacaaagagatttattttggcccatgaaatttagttcatattttaccacattccactggataaactgcatggccaaaatgaaaaaaaaagttaaagtcaaatctgatctttagagactttatgggtttagaggtccaga

SEQ ID NO: 147885 - DNA, 619 bp, Homo sapiens
tggcttctcctgacccagctcgctaccgttttcactggtgcagggacaaagtaaaagggttggatctcaggcctgtctccacatctaagctctgaggctaagccttcctccctaggactcctccatgttgccatggtatctttgagtcaccaataccacatctctawcctttatggcacaggatagtttgagttagaaggagttggagatgaaattcctgtttttatgcaggatactgtgtccccttccaatcaggtgagctcattcatgcattaaaggccaaccccaaagaagtgtgggagaaccatgtgacttcaaaccattgctctatgcactgaagcctatgtttaaagtcatattaatagttatcagtatttggatatccactaggtgccaaattgaatataaaaaaccaaagcttagttattcagatggaataagccacatggctggtaaaaggtagaatcaggattgggcatagggccacccatacctaaatcacacttttttttttttcactgcattaggtattttcccaatccccatcattaatagcaaacattatcagtttcccctgtgcattttttcctgaacattatcccaaggcttggatatcata

SEQ ID NO: 147886 - DNA, 439 bp, Homo sapiens
gctgctttgtaggctttctgtgatgactcatcttagacttaatgacagagacacagaaggtaaaaatctggtctcactttacctgcttccagtcctactgctggaccaacctatcagcagtacttgggttaaaaatccaaccaaccayaaaattccacagaaactgaagtacttggcaaataccgttcatgtgtcctggtctgcaagcgtttgtgaatttggaacatattctaagattaaaacaaagctgtaagtgataccagtgtttagagagctagtagcattatatagctctgcgtaaacaccaccagcttcctaactattgtactaagccaacctgcaggactagcactgctttagtagatttatattctactaaattcctcagttaggatgggctgattcaattgcattcacttctgatttgagccatcacgtt

SEQ ID NO: 147887 - DNA, 601 bp, Homo sapiens
tattgtgtgatcaagatttaaaaattgttgagggcaggctcagtggctcacacctgtaatcccagcactttggcaggcctaggtgggaggattgcttgggcccaagagttcaagaccagcctgggcaacatagtgagaccctgtctgtatgaaaaaaaaattaaaattgttgagatatttcacattctttttctctggtttgtaagctatgcttacaactcatctcagattaggcgtatttctacatggatgtatattatgtaatgaaaaaataaattttaaagaggcatatttcaagtgattaatagctacatgtggcttgtagctaccatactggatggtatgtgtctaaacaatgtaaagtagccagttggtcaacrtgcagatgactagaaatactttgaatgtagactactttcaggaatgtgttaaatgttattaagtgatgagggtttcttgttgttgtttaaaagattaaatctcactctgtcacccaacttggagtgcagtggtgcaatcatagctcactgtagcctcgaactcctgggcttaagcaatcctccttcctcggcctctcacgtagctgggactacaggcgagc

SEQ ID NO: 147888 - DNA, 293 bp, Homo sapiens
cacagtggtgctattaattagaaactgatggaaagtcagaaataaatccttatgtcaagcaggatgtcttacatggaggagattcaaaagtcatgcaactttctgaaattgaaatgttcagggtaacagcaaggataacagactccctgctaccaagtcaatattttccaactgctaaatgttaatttctttaatacctagtttctctcttaaatgcrtaatattaaaatggactttcctagcctctaaaaaattagtgatgcaaaaaaagctattaacttctaactggatct

SEQ ID NO: 147889 - DNA, 620 bp, Homo sapiens
catcatttgaagctcttcaaaataattgtgtaattttcagaatatctacgctttctgaaaagataaaataattttaggtattaagattctttatcttttaaagcaytattatttgaggtaaaaatgtataagtagctatatagagggttgatattttagaatacattatatgtaaggtgtggctctaaggattctgtgagtttaatctttaggacaaccctaatgaagtaggtttattatattatcccaattatatgtttttaaaaacataggtttctaaattgttaagtctttgtcaaaggctgcacaactagtaagtcatgaaaccggaatgcacgcttagggagtctgactctagggtccaagctctttttaactatcctttctctctctctctctctctctctctctctctctctctctctctctctcatttgtctgcctatcatctatctttatctgtcttctatccatctattatatatttatgatccttctacttatttttcagtttctttgcaaaccagcttgaatagagaagaatgggagaacagttcactgaaattcacaagatctgaatctaaactacacctttctggatctcctgtctcaatctgata

SEQ ID NO: 147890 - DNA, 570 bp, Homo sapiens
tcctatgaattatgaatgctctttattgtttttattctatttttctattttttttttattgagacaatgtttcactctgtttcctaggctggagtgcagtggtgcaatctcagctcactacaaactccaactcctgggttcaagtgattctggttcaatgtttcttttatatacacatttcaacagaatctggtggaagtaaaccagtattacaacccatcagaatggctgacagcaatcaaactccaaatggtaytacagacagaaccacgcatggacatgcctttcttctgaggacccttagatctaccccaggaggaagcctagttgctgttccacatatgactccccttttcagcaggaagtggccagaaagagtcatagtccaacatcccctaacagcagttaggattaccactcctgagggagaagttatatagaatttgaaaagatattatttaggcagatagtgagggtaaggagtgcttcagcctcctgacagctgggactacaggtgtataccaccgtacttggttcattttttgtattttagtagagatggggttcacc

SEQ ID NO: 147891 - DNA, 493 bp, Homo sapiens
tcaatttccctctctcttcttttactgattaatcgattcattgattattgtttgtattgcttttaaattatcaaatttattaatattttgaaaatggtaatttttcaaattgccaattttattttttatgtctttttacaatttattgattctgccattttattagtttatttctagtgttttctctgattgtgctatgctgttcttttaagttgttgaaataaatgctgatataattggttacagcccctcttctatttactgcatcccagaagtttygatatgccatattttgcttgtatacagtttaaaatatatttccattatattttatttttaataaattggttatttcaaaatatagttcttaattttcatatatggggcattttcttgttatctttcaaaagttgatatctagctacattccattgtgctagaaaaattattcatatacattatttgaaatttgttgattttgcttaacaacaca

SEQ ID NO: 147892 - DNA, 534 bp, Homo sapiens
tgctgtttattttccaaatttatttatttaaaatcatatataaaattgtatgtatttaccatatacatggcgttttaaagtatatatacattgtggaatggttaaatctagttaattaaaaatgtattacctcacatttttatttggtaaggcaccaaaatacataaggaactcaaacaacttaatagcaatagcaagaaaacagataacccaatttaaaaagtggacaaaagacctgaatagacatttctcmaaagaagataaataataactgtcaaatgtatgacaaatcaacagggaaatgcagatcaaaatcacaatgagatatcacctcactatggttagaatggtaaatatatatatatatagtcatatatatcttttatatatatttatatatatcttttataagttgttttattatcctctggtttttgaagatcacatatcatatgtacttgctcatttaaaggtcatacatctcccaccatccttagccttctggctgcttttaagatgttctgtgtgaagttt

SEQ ID NO: 147893 - DNA, 566 bp, Homo sapiens
cattaactgcatgccattgtcccaaagaagtccatttcaggcctttctcattacacwtactccctactactcttaaattttacttactcatcacttatgcaacgttgcttagggttgaaaaaaaactgcattattcatgttgttaaaataatcatgttgttaaaaaaatactctatatcatgcctcccaagataaccttgattactaaattttctcaggtgaaagacacgtaaccagttgtttttatttaataaaacaaaagtaaatttaaaacattaattttattgtgcctactgttgcctttgcaaatatgttgaacctgtttgaaactgcttctcctaccctgatgaaatcttgagaaggtcccatagctttgctggctacttcatttaagccctgaccagacattaaaaacaaaatagacttgcttcttcctaaggtcaattgatatgcataacctaacaaaattgaaccaagaagaaacagaaaacctcaatataccaaaatgactagtgagattgaatcagtaatacaaatttcataacaaagaaaagcttaagaccagg

SEQ ID NO: 147894 - DNA, 566 bp, Homo sapiens
cattaactgcatgccattgtcccaaagaagtccatttcaggcctttctcattacacttacyccctactactcttaaattttacttactcatcacttatgcaacgttgcttagggttgaaaaaaaactgcattattcatgttgttaaaataatcatgttgttaaaaaaatactctatatcatgcctcccaagataaccttgattactaaattttctcaggtgaaagacacgtaaccagttgtttttatttaataaaacaaaagtaaatttaaaacattaattttattgtgcctactgttgcctttgcaaatatgttgaacctgtttgaaactgcttctcctaccctgatgaaatcttgagaaggtcccatagctttgctggctacttcatttaagccctgaccagacattaaaaacaaaatagacttgcttcttcctaaggtcaattgatatgcataacctaacaaaattgaaccaagaagaaacagaaaacctcaatataccaaaatgactagtgagattgaatcagtaatacaaatttcataacaaagaaaagcttaagaccagg

SEQ ID NO: 147895 - DNA, 173 bp, Homo sapiens
aaactattcaaaaaattgaagcagaagaaattcttcctaactcattctataaggccaaaattacactgataccaaaaccagacaaagacacaacaaaaaataaaactacaggcccatatccctgattaacatagatgcaaaaatcktcaatcaaacaagagcaaactgaattc

SEQ ID NO: 147896 - DNA, 550 bp, Homo sapiens
cataggttattgatatttcttttgcttcgtttataggaccaaacaaaattttcatatttatggtcattaatgctgttgacaagaaattatattaaatgaatgggttgcagtaaaaatgaaaatartttgggagttaaaaattaaattaatttagatgatatatttgttctctaattgtaacctcaaattggtagcagtgacagtgtgagattaaaaatcataggaatttaattaattttttatttaattaatatattaggtaaaaatctctgtcaaattctgtgtcctcctccaaggcatgtgcgcgcgtgcacacacgcacacacacgacacacacaaactattagtgtctgtagacctacccaagactttattttctgccagatactgccatttaacatatgcagtaactttttcaaaatagcagtgttttcaacatatttatggcaggcagaatagtgttcctccctgaagatgtcagcatcctaatccttgaaacttatgaatatgttaccttacacagcaagagattgtgcagatgtgattaagg

SEQ ID NO: 147897 - DNA, 550 bp, Homo sapiens
cataggttattgatatttcttttgcttcgtttataggaccaaacaaaattttcatatttatggtcattaatgctgttgacaagaaattatattaaatgaatgggttgcagtaaaaatgaaaataatttgggagttaaaaattaaattaatttagatgatatatttgttctctaattgtaacctcaaattggtagcagtgacagtgtgagattaaaaatcataggaatttaattaattttttatttaattaatatattaggtaaaaatctctgtcaaattctgtgtcctcctccaaggcatgtgcgcgcgtgcacacacgcacacacacgacacacacaaactattagtgtctgtagacctacccaagactttattttctgccagatactgccatttaacatatgcagtaactttttcaaaatagcagtgttttcaacatatttatggcaggcagaatartgttcctccctgaagatgtcagcatcctaatccttgaaacttatgaatatgttaccttacacagcaagagattgtgcagatgtgattaagg

SEQ ID NO: 147898 - DNA, 489 bp, Homo sapiens
cttttttggcttggggaaaaaataaagctagaaataaattgtgactattaactatggttatcaataaaaataatattcatatatacaacaatcacatggtataagaaacttatgtatttataaaccaataatattttgattcatctattattgcagcaaaatctggctgatcatcgctgttacaccatgttataatgtactgatattaaccaagaattccacattctaaactcaataatataagtgtgtcttttcagaaatctgttctttcttctctacatcctgaaaattccatccactcataatattatttctttacaatattggaattaactagtaattttggaggggatgttagcgtatgccacagcctagaatcatactggtcataagacattcaaatactttccaattttagaagcttatcttagaatgtggaggctcawcttagatagaagatatggatcatctcttatggagtatcttcat

SEQ ID NO: 147899 - DNA, 481 bp, Homo sapiens
accagccagttatatgaggagacgggaggaggcggtgtttgatgggttggttttttaccaatgggtttgtaaaaaaaaccaaaatgaagctttttattgcttcagtttcttcatctgtaaactaagaataataatagtgccaaggaccttggacataaaaattacataagctaatgcacgcaaaacactgagattastgtaggctcatataaatattaaataattgttagctggcattattatttcaaaagaccttagtaagtttagactgagtccaaatagtacagcagtcataaatgatgtccataaaatctgtgtacagtttgaatatttcatgagttcacttctgtgtaatatgtgacaatctgcaaaatacaacagagaaaaaatctactcaaaaaataaattgttaatgatttctttgttctaattatgtttatttttccaaataatatattgactataataaatagctgaattc

SEQ ID NO: 147900 - DNA, 575 bp, Homo sapiens
aatcaggtaatgtgatgcctccagatttgttcttcttgctgagtcttgctttggctatgcgggctcttttttggttccatatgaattttaggattgttttttctagttctgtgaagaatgttggtggcaatattttaatgggaattgcgtcaaatttgtagattgcttttggcagtatagtcattttcacaatattgagtctacccatccatgagcatgtgatgtgtttctatttttttgtgtcrtctatgatttctttcaccagtgttttgttgttttcattgtagaggtctttcacctccttggttaggtatattcctaagtattctattttttattttttgcagctattgtaaaaggggttgagttctttattggattctcagcttggtcactgtttttgtatagaagagctactgatttgtgtacattaatcttgtatctggaaactttgctaaattattttatcagttctgggagctttctggagagtatttagggttttctcagtaaacaatcatatcatcagcaaatggtgacagtttgacttactctttaccaacttggatgccctt

SEQ ID NO: 147901 - DNA, 582 bp, Homo sapiens
agcatgttgtcagtcaacaaaataaataggtaacacttatgcaggcacaattataagaactttatgaatatcatctcacataatcttcacaggaactaatgataaagttgttagtctttgaacctgggcagtttgactccagagtctatattcttcaccagtcattcaacagatcgtcatttgaaagaattttaaatgaccatgctcatttaaaatcaaagcaatagccacagggatatgtgaatcatatgtacctcagaattcrttagagatgtcatagcttatggtgtgatgtgggtgaaattagtataggcagggtgtttggaattatgtaactagataatgctatttaccacacatcatttaggcagatagtgaatacagaataaaaatcatgtaaatatcttcagttaatttttgaatcaccttaagataaggatgataattttaaattgcttttgaattttccttctttgaaaaatattatttgcagaacagataataaattgtggtttagaggaaattcttcttgtgaaagaagaatttcgagccttactaccgaggatttcttcaaagatatgt

SEQ ID NO: 147902 - DNA, 273 bp, Homo sapiens
tcccaaaatttaaaaaaataataaaaataaatttgaatttaaaaaataacaaattaaaaaaaatacctgtagtgacttttaamtattatagaattttagagctggaaaaactttactacttatagagtcgatctttctattttccaaaattaatattaagagtctgtagtagaagtaagatctgaggtcaatctaactttcataatacaatatttcatttattcatcaaatcacttagaccaaatatattagttttttttaggttgctgtaat

SEQ ID NO: 147903 - DNA, 526 bp, Homo sapiens
tctgcccagccatcttattaatataaatgggttcacggggcccggtcagagaatggggggcccagagctgtccctccccagggacaaacccaaacatcagttttccattccactctgctcccatccacccttaatttagaaactccaacttgcaaattccgcaaggggttgaggctgctgggatgtgaagatgcgaagacattaagacctttactagacaaagggcagatgagaggatttacaagggagtgkggagtaaacaaagcaggtctctaagccgccaggctgctgaggcagaaagaaaacaccaccagttacaagaaaggaaacttgttaggaggtagaatcctccagaaattgattttgggaaggaatttaatagaagggaccccaaagagcctattgatctgtgtccagcagggggttttctgaggagggtttaagcggggaggataggcagaccagaagaaggaaggtttatggtgcagtcagaggtgtgcacatgcattcacaccacacacactca

SEQ ID NO: 147904 - DNA, 637 bp, Homo sapiens
taaaattagccctctttcatgggttcagtagccagctgtggctattggctaccatactagacagcactaataggaaacattcccttcatcacattggaatgtgtatggcactgctcagagcgtaggaaaggaggcaacaaatttccctggcatgagaaaatgctgaagatggacgtaacagacaccctgaggtcatacctcagttcactckgaagatgtgctagcatgtcttacaatgtcccaaacctcctattggactccagtgggcagaggggtcaggctgttctattaaatggggagctgtcctaaatgtcaatatcaactcaggatggtccctgaaacctcaggcagtttcctgtcttatggagctctccataagatggaagtgggggattggtgggagatggcaactggccatttttttttaacattatctgcatgccaggagttctgctagatgtttcacatgtttatttagtccttacaaccaatcagtgagatgaggtaagttgccgtcctccctaatggctccttgagatcagggactgctgagttaatatttgccaagttcttagattattgcctgcaacaccgttaagtgccatacaagtgtttgtgaagaaagaatccacagaat

SEQ ID NO: 147905 - DNA, 497 bp, Homo sapiens
gaggcaacaaatttccctggcatgagaaaatgctgaagatggacgtaacagacaccctgaggtcatacctcagttcactctgaagatgtgctagcatgtcttacaatgtcccaaacctcctattggactccagtgggcagaggggtcaggctgttctattaaatggggagctgtcctaaatgtcaatatcaactcaggatggtccctgaaacctcaggcagtttcctgtcttatggagctctccataagatgraagtgggggattggtgggagatggcaactggccatttttttttaacattatctgcatgccaggagttctgctagatgtttcacatgtttatttagtccttacaaccaatcagtgagatgaggtaagttgccgtcctccctaatggctccttgagatcagggactgctgagttaatatttgccaagttcttagattattgcctgcaacaccgttaagtgccatacaagtgtttgtgaagaaagaa

SEQ ID NO: 147906 - DNA, 471 bp, Homo sapiens
gctctcccttcttcctcacctcttcagagctctctctccccttttctaattcactggagagaaggctggtgtcatgcctgagtcctccccagcttcagaattatcaaaatcatagawtggagcaataaatgccttttagcaaaattgcatcccaataagcctttttgaaagcctaaaatgttgtgttgaggtgagatattcctctttagacctttgccccactctacccacccccaggggagtggagttgagcacggacacccagctgatggtgggaccttggcagcctaccagtagtaccctgcattgcatggctggcaaggtccaggcagtccacccctaaaccaaagaagtcacagagccctaccccagtgaggagcctctgtcaattgatatgcaccaggcaccagcaagagaggagggagcgacagaggactcagaaggggacaggctaggatgagctctgaattc

SEQ ID NO: 147907 - DNA, 471 bp, Homo sapiens
gctctcccttcttcctcacctcttcagagctctctctccccttttctaattcactggagagaaggctggtgtcatgcctgagtcctccccagcttcagaattatcaaaatcatagattggagcaataaatgccttttagcaaaattgcatcccaataagcctttttgaaagcctaaaakgttgtgttgaggtgagatattcctctttagacctttgccccactctacccacccccaggggagtggagttgagcacggacacccagctgatggtgggaccttggcagcctaccagtagtaccctgcattgcatggctggcaaggtccaggcagtccacccctaaaccaaagaagtcacagagccctaccccagtgaggagcctctgtcaattgatatgcaccaggcaccagcaagagaggagggagcgacagaggactcagaaggggacaggctaggatgagctctgaattc

SEQ ID NO: 147908 - DNA, 648 bp, Homo sapiens
  misc_feature (1)...(648): n = A,T,C or G
gagagaaagagacagagagataaagaggtagtaaaagagagagagagacagagtcaaggaagagagagaaagagagagatggaagtagtaaagagaaaactgtaccctagtcatttaaaagccagggtaaatttaaaacttgtaattgataattgaaagtcttcttcatgaccctataacactccaataccaccttgttgtcagtgtaaacaggggcgtcgaanagcactgaggccactgacaacctgaagcctttctaataaaaaatccttaacccagtaacccgtagatggcccaaatgcattcaatctgtagcagcaactgctttgctaagagagcaaagtagaaaaataacttttagaggaaacctcattgtgagcacacctcatcaggccagaactaacctaagtcaaacaaacaaacaacaaaacccaaaagctaaaaggtagctcactgactcaagaaccttaaggtatgcggctattctgttagaaaaagtgatttaacgttagccactgaaaattcccttaactcagtaggtttcctaacggggatctaaatcttagttaccatagaaaggtccyaccagacctaggaggaactcccttcaggacaggatgattgacggttcctccttggtgacaggat

SEQ ID NO: 147909 - DNA, 493 bp, Homo sapiens
ttttacttgttctattattctctttcttttttgaaattctagtttactatatcatttcctttctgttaggggacctcctctagtcattctttaaagttagttctgccagtaaaagattctcttcatttctcttcctctgagagtgtctttatttcttgtccattcccacagtgtatttttattggcaatataattcctggttgacaattcttctttttcagaacacaaaataagctgtaccacttacatctgttctccatagtttctgatgagaaactttctgtcattcaaattggtattcctggccaggcacagtggctcatgcctgtaatcccagcattttgggaggctgaggtgggyggatctcttgaggtcaggaattcaagaccagcctggacatcatagtgaaaccctgtctctactaaaaatataaaaattagccgggcatggtggcgtgcacctgtaatcacaactacttgggaggctgaggcac

SEQ ID NO: 147910 - DNA, 464 bp, Homo sapiens
gaagagagctgacaggccagcagaaggctggtggtatttctggcaaagggaagaccaaacactcttccatcagcatataaccacgtcgcacatacagaattatagatrtctccaagaaatgtctccaagaaggaaatgagatgaactgaagcagaagcaataatctacattataaatgaatcattaaaacattatttatatagcagggaactgaaattcaaacccttactatgtcctaagacaaaaaaaaaaaaaaaaaaatcaatgaaaagagactaccatgtagcctagcaaatttttgatttataagataaataaaaaatctgagaggcatcgagatagaaaaaataacaaataacaggttggtttcaggtctctgctcatcagatgacaatggagcaatgtgattaaattttagaggaaaatgttaaaaatcagaagtcatactcaacttattttccatt

SEQ ID NO: 147911 - DNA, 464 bp, Homo sapiens
gaagagagctgacaggccagcagaaggctggtggtatttctggcaaagggaagaccaaacactcttccatcagcatataaccacgtcgcacatacagaattatagatatctccaagaaatgtctccaagaaggaaatgagatgaactgaagcagaagcaataatctacattataaatgaatcattaaaacattatttatatagcagggaactgaaattcaaaccmttactatgtcctaagacaaaaaaaaaaaaaaaaaaatcaatgaaaagagactaccatgtagcctagcaaatttttgatttataagataaataaaaaatctgagaggcatcgagatagaaaaaataacaaataacaggttggtttcaggtctctgctcatcagatgacaatggagcaatgtgattaaattttagaggaaaatgttaaaaatcagaagtcatactcaacttattttccatt

SEQ ID NO: 147912 - DNA, 478 bp, Homo sapiens
gctgtacaagtttgtagcctaggagcaatgggctataccatataccctacatacatagtaarctgtatcatctaggatgtgtaggtacactctgatgtgcgcataatgatgaaatcacctaatgatgcatttctcagaatgatccctatttctaacttatatgtacgtatatactacatatatatacaggccacatatatgtgcgtacatcacacacatgtacatacatcacatatattacatatatgcacacaccacatgcattacatatatgtacacacatcatacacatgtacatacattacacatatgcatatgcatcacctatattacctatatgtacatgcattatatatatattacatatatgtacatatattacatatatataacacacatataatggaatatttttcagccttaaaaaagaaggaaatcctaccattcgcaacagtatggatgaaaccagagaacatta

SEQ ID NO: 147913 - DNA, 478 bp, Homo sapiens
gctgtacaagtttgtagcctaggagcaatgggctataccatataccctacatacatagtaagctgtatcatctaggatgtgtaggtacactctgatgtgcgcataatgatgaaatcacctaatgatgcatttctcagaatgatccctatttctaacttatatgtacrtatatactacatatatatacaggccacatatatgtgcgtacatcacacacatgtacatacatcacatatattacatatatgcacacaccacatgcattacatatatgtacacacatcatacacatgtacatacattacacatatgcatatgcatcacctatattacctatatgtacatgcattatatatatattacatatatgtacatatattacatatatataacacacatataatggaatatttttcagccttaaaaaagaaggaaatcctaccattcgcaacagtatggatgaaaccagagaacatta

SEQ ID NO: 147914 - DNA, 522 bp, Homo sapiens
acacaatacaattaactggagagaaataaaaatcagacacactgggtagaggcctatttgtcaggctaatgaattctgattgctcttgaaggtaaaggtaagctaatgtggagtgtcaattaccattttaaaaagcaatagagaagaagactaataaggggagctaactacaaacaggaagactaggtacaccaaagagtaagcagttagaaaagctgcagtgacagattatgagtttaactcyggcagtggcactgcaggtagagagaagccaggcgcaaatgactgtctccgggttacagctcagtcaagaacacggtgagcacattgtcggcttttgtgtgtgtgttcctgtggccaaaaatctttcaagatccacctggtatgagctacatgtttataaagcactattatttagacaatataaaattgccatctgtctatactctcctacaaacattcttctaatttctgcattttccactgggtatgctacagaaccagcagctctaatagacgaca

SEQ ID NO: 147915 - DNA, 554 bp, Homo sapiens
tgctgttctgcaatatttgctgttctgcagcctccgctggtgatacccaggcaaacagcrtctggagtggacctctagcaaactccaaaactcctgcagctgagggacgtgactgttagaagaaaaactaacaaaaggaatagcatcaacatcaacaaaaaggacccacctgtaggtcaccaacatcaaagactaaagatagataaaaccacaaagatggggagaaaccaaagcagaaaagctgaaaattctaaataccagagcacctttcctcccccagaggattgcagctccttgacagcaatggaacaaaactggatggagaatgacattgacaagttgacagaaataggcttcagaaggacagtaataacaaacttctctgagctaaaggagcaggttctaacccatcacaaggaagctaaaaaccttgaaaaaacattagacgaatggctgactagaataaacagtacagagaagaccttaaatgacctgatggagctgaaaaccatgaaacgaaaaccttgtgactcatgcacaagcttcagtagcta

SEQ ID NO: 147916 - DNA, 444 bp, Homo sapiens
agagaagtaaaatcagaagagtgaaataaatggtaaggtagatacaactggctctccttagaaatttcctgaataggaccayagatcactgagccaagacttgtagccattgcacaccattcacaggattatctcacatttcctgggtgttgaagtaaagttagtttttcattctacactggtgggtgtacgtctcccattctagcatgaggacactagttgtgtccaagagtttgagattctaatccaaattccctctttgtgaacatctgctcccttctttcagtgggtttaatacacaaagaatattacatggaaaagaaagtcaaacacctgttttaggtagaaccccgaagttgtgaaatcacactatataaggttgacgcttagaatattttgaaaagttaatattttcaaatgatgttcataggaccttaataatat

SEQ ID NO: 147917 - DNA, 602 bp, Homo sapiens
attttggaatacaaataaaccctttcagctgctttccctatcccactatcaccaccttattctcatagtgttctgatcttactggcattcttaactcagggatctctttactccaacttagtccaggtgtggggtagaatatgaaaacgatgaaaataagggaggattttgatagaaataaacacataataacaaaataaaaattggagaaaaggggsaataaagacccttctgctataaagggctttatgtttgcttcaaaagtataattgatgaatactatttagagttaatatctgaaaaccaaccttaatgcatacattgctgacatttgggctagtaagtaaatgaaatggagcccagacatcagttaagatatctgtgctatcactgaattaaaaaaaaaattcctgaactttggctgaaattgttttgttttcatcaatctcctgcatttcacatttatctttgtaattaactagttttgacataatctaatttcttaccagagcctaagaaactgttgcacaaggaaagtttggaacatttcatttccaacctgccaaacaaaaattgtctccttaacagttctttttattata

SEQ ID NO: 147918 - DNA, 602 bp, Homo sapiens
attttggaatacaaataaaccctttcagctgctttccctatcccactatcaccaccttattctcatagtgttctgatcttactggcattcttaactcagggatctctttactccaacttagtccaggtgtggggtagaatatgaaaacgatgaaaataagggaggattttgatagaaataaacacataataacaaaataaaaattggagaaaaggggcaataaagacccttctgctataaagggctttatgtttgcttcaaragtataattgatgaatactatttagagttaatatctgaaaaccaaccttaatgcatacattgctgacatttgggctagtaagtaaatgaaatggagcccagacatcagttaagatatctgtgctatcactgaattaaaaaaaaaattcctgaactttggctgaaattgttttgttttcatcaatctcctgcatttcacatttatctttgtaattaactagttttgacataatctaatttcttaccagagcctaagaaactgttgcacaaggaaagtttggaacatttcatttccaacctgccaaacaaaaattgtctccttaacagttctttttattata

SEQ ID NO: 147919 - DNA, 592 bp, Homo sapiens
ctccaggctcgagaaagaaaagtgactatttatcttactcagctcagagagctgtcagagagagacaataacctgagtactcataatcacaagtaagtgtccagatgctgggaggaaggttgagatcaagatgcaatctagaagtgtgtcaaaaattaatgctcttgttttatctgtgtataaaatcagtccttaaaggaaaagctaagaataaatatcttttacatttaattttttgtttgrggaaattttttaaatatataaaagaatataggcgaagacactatatcatacaacagaatgtaattgataatattttatcatattattattttgttaatatgttatcatatttgcataatcctgtttaaaagtaatacaatattaacaattgatttgtctgcagtattttaatctatttttaataattatgtgtgtattttatatatatacacacacaggtatctgagcaatatagaatattacatttacataatttatgtaatactgtatatattttctatagtatactttttcaacatggattttgaggtttaaatatgcatagatatattcagtcccattaactttt

SEQ ID NO: 147920 - DNA, 346 bp, Homo sapiens
tattgatttattgccgatcagctccaaatatatcccttttgtctgctttgtggaaatgaatctgggcctttcatttatttatcttttctttgctggctgccatgacattaaactttgtcagtagagggtggtagagacattgcaggaagcatggattttgtattctggttctggtgcttgcctggcaggcagcctgcagggtgctcatcytctctagggcgtggctcctgcagtgtgccgtggctagctgcctatcctggcgttgcccatgggcatgcttttagcattgagcctctagtgagcacctcactatgaatggctttcccctgcaattgagggggtccat

SEQ ID NO: 147921 - DNA, 440 bp, Homo sapiens
ctatttctagatctagtttggttttctgggttagaactggctcccagtagagcacttcattaaaagcactgaagaacttcagttataagcatataataggaaaaatatttaacacaatgtgggtmaatgtgagctgattttaggacagagaacaaactaacatatagggaatgatgaaaaagaaactttggagaaagaatagaagaaaagtatttttaatatcaaatattatgccttgatctctgggatatttttctttctcaaatataatcggactattgagtctagaatatattttaccattatagttatagaaatactttccagttgtttaacaattcaaatcagcaatggtcatatgaatttgaaaaataagaaaaaaagattaaatatgaaaaataaaaaggaaaggcatttgtgctagggatccaccaatttga

SEQ ID NO: 147922 - DNA, 538 bp, Homo sapiens
ccatcagcatcatggcctgcagacttgggttcatgccatggccctccccgttacttgttgctgtgatctgacatgacatctctgcactgtttgactcctctgttttagattcaaagtaagactcctcagacattcttgcagcaagaggcaagagaagctatcaaaagggaagaaaggacagaagtaaaaagagaaattaggaccaatttaaatcaggaaaatagataccacaaaattagttggcactacacaggaggtaaatgattagtgaaataaatgaatgtaggraattatgtgagaatttatttaatggcagatttggctccagcatatttgccataatttatgaatgacaggataaatcacaaccaaaagtttgcaaagcaccacagcaagccaaatttcaaatggaaaagaagttgcaagttttaagccctcattttgcttaaaacaaaatagtttctaggatttatcttgacttttcccaatttcactttcataaggaaacatttagttgaccattatatttttaaaaaaa

SEQ ID NO: 147923 - DNA, 521 bp, Homo sapiens
catttgaaaagaaatttttgaaaaatcactgagttctaacagctatttttagtctttgctctgaggctgagtggcttccaggccacttaaataaaattccagagttgagggctccccagagaatcacagggactgagtctggcctcccatccttctctcctcaccaaggtactgtgagaggccaccagtaaacccagaccctgtgatatacagggactaagggtcactgggtccaatctcctcattctacataggaagctccacactttgacttggctggggccacgtggctacttcatgacctggcctagaacaaaagwttccttctgtctgttgctctgtccactgctgtgtggtccctggaactcatacaattcctgagtaaactggtgcccctcagcaatccaggggaccactggcacataaatggaaaaatcactataagtaagaaccctcttgaaaggatttaaaaatatctcccaaagaaggaggaaaaccaaggggcttttaactgtccaaga

SEQ ID NO: 147924 - DNA, 590 bp, Homo sapiens
gatttctcaaaagaagacatacaaatggccaacaggtatatggaaaatggctcagcgtcactaattatcagggaaatgcaaatcaaaaccacaatgagatatcatctcaccccacttagaatggcttatatccaaaagacaggcaataatgaatgctggtgaggatgtggagaaaggagaaccttcgtacactgttggtgggaatgtaaatgatccagcaatcccactctaggtatataaccaaaagaatggaaatcaatatattgaagagatatctgtactcctatgtttattgcagcactgygcacaaaatccaacatttggaagcaaacctaagtgcccatcaacagatgaatagataaagaaaacatggtacatatacacaatggcataccgttcccaaacagaatgaaatcttgtcatttgcaacaatatggatggaaccggaggatattatgttaagtgaaataagccagtcgcagaaagacggaagctaaaaattaaaacacttgaactcatggagatagtagaatgatgattaccagaggcttggaagcatagcaggggagggcaagaggatgctgggatgg

SEQ ID NO: 147925 - DNA, 398 bp, Homo sapiens
atgttgactagaattgtttcagtgggttgaagatgtcaattatttttagaaattttattgaaaagaggagcagagaaggggttaaaaaggtcaaaatggtttttaaaatgttaaaaaaaatacgtaatacatgtctgtatgttcttgaaagtgatccaagaaaaggaaaaatgcattaatgcaaacagaaaagataattctagaaacaatgttattattattattattattagaagagatgagattccattatacaggtaaaatttggtggtttgcttagagaggagcaagaatagctattctactttaataagaataaaagcagaaaatgtgagtataaatttagattgattggtagactgtatattgaragtggaagatttggcatttacttcatc

SEQ ID NO: 147926 - DNA, 487 bp, Homo sapiens
agttctttagaagcagtaaagcccaaaattgacaaaaygacatcttgatttagtgataaagagaacattttttagaaaacataagaaaacttcagaaaaagaaaacaataaataggctaggagatgattgaaattgaggatattcattggagttattatataggtgttttccagtttggggagctaatttttctgcatattgaatttgataactcagattttagttcatttccttatatggttcatagatttagattgtgatctttagtatagatgattgcatgctcatacatgtaggtttgtattttttgtgagagctcccagctgcaaatagaagttttaatttacttattcttaggcctaaagactttgtacttattctagtcaacttttaaattaatttcttggcttgctaagaacaaccgatgtagaaagatagtgtaaattctgacttcatctcataccttttcatagcacagaccagggc

SEQ ID NO: 147927 - DNA, 486 bp, Homo sapiens
agaaagatgcatatgctattcctggtgtgggagggaggctgaccaatgcagttggaactgcattgtgagaatagggaggtttgttaggagaatgacaaaaccatggggggcaaattcatgcagtgccttgtatgatctgacaaagtcttaatttataccttgagaaaaatgggcagcaatttagggaagtagtattatcaaaaatgaatgtaaaaagcactctatttttatgaaatgcattggaggggagaaaactggatggatgctagatgaccagatatgggagaggaaaaatggggatttagtatatcagatatttctataccaaaaagcaatttaaggttcagccactgtggaacggctgtgtcagtcttgctgtgtcaagtctccggtatttttgtatactctaaaaataattcttaataatatttgaawaaattggataacagaaacatttttacaatgccatactatgtaagagagacc

SEQ ID NO: 147928 - DNA, 598 bp, Homo sapiens
atttttttaaagaagagttatttaagagctagctaatgcaaccattcttaattggtacaaaaacttgtattgattgctcactgccctaatattttcattttgtacattacaacttccatgttaagtagtctgtggatgaacactgaggcctctgacccatcatctaaatctgttctttccaaagataaattactaccttcgaacatgccctggcaaactggcctacacctgccctcgctgctaaattctaattttacaaacctttcaggactttgagcttttctgtttgagtagtcaactgatatatttaagttttaccttggtatgtcttcaaatttttattcccattccaaatgtatagatctttaaattttgctcagcaaatgatagaaactggtattaattcaaatatttatctcatcacaaagcccacatgcatcrcattatattggactgttttaacctgaaggcagaattcagattttacagctaactgcagttcctggccagtcacataaaatttactcaataaatgctttgcccaaatctgatttgattctctgtttcatatttaaatttgcatattaataaacacaag

SEQ ID NO: 147929 - DNA, 601 bp, Homo sapiens
tgtatattactacaattatacctattggaaaatgacgsggctggctgggctgttgatatagtaaggccattggtctaaatcctatctcttgagggacagggaaaatgtgctatgttgttagaggttgtcatagggacaagaaaggggacatattgaagagagaaacagagatgctatataactgttggtgtatagtacagttctggacagcaaaatattgactgacccaaaatgccaatatactcccagggagaaataatatagtctagactacattttaaacaatttatttatagtaatttttgccatttagaatatgtatatgaatgacatataacctactaaggtatttttccttcaaagtaaaacttatgaaaattggcttgagaaattttatttcagggaaaaaagttatacaaaagaagtatcctttatatatctcaaaataaaagagacaacaaagactaataggttgttactgctcttccgagaaggacaaaagagaacaagatggggaaaatatcatccctatcaaatttttaaaattgtcttcattgaatttcacttgcctttttatacattctaattgagtcctcgcatc

SEQ ID NO: 147930 - DNA, 601 bp, Homo sapiens
tgtatattactacaattatacctattggaaaatgacggggctggctgggctgttgatatagtaaggccattggtctaaatcctatctcttgagggacagkgaaaatgtgctatgttgttagaggttgtcatagggacaagaaaggggacatattgaagagagaaacagagatgctatataactgttggtgtatagtacagttctggacagcaaaatattgactgacccaaaatgccaatatactcccagggagaaataatatagtctagactacattttaaacaatttatttatagtaatttttgccatttagaatatgtatatgaatgacatataacctactaaggtatttttccttcaaagtaaaacttatgaaaattggcttgagaaattttatttcagggaaaaaagttatacaaaagaagtatcctttatatatctcaaaataaaagagacaacaaagactaataggttgttactgctcttccgagaaggacaaaagagaacaagatggggaaaatatcatccctatcaaatttttaaaattgtcttcattgaatttcacttgcctttttatacattctaattgagtcctcgcatc

SEQ ID NO: 147931 - DNA, 440 bp, Homo sapiens
aaatttttaaaattgtcttcattgaatttcacttgcctttttatacattctaattgagtcctcgcatcacctttgggtacctctggagtgtatacatcagtgtctttacttcaagtagaaaaccaggtaagcatctaatgaaattaagcctggtttttcagactcgggctactgcctcagtttggattgtgtgatgcrtggtatgatcattgtttttggtggtgaagagttgaacttatctgacacttaaagtataacatatcattattcctgacttgctgctgcaaatggacgtatagatagcactcaggttcatagaaatggctagatatgtaaaagaaactatgcaagctacctaaatgaataaatctaggccttcattttaaatataactgagcaacaattaccagatttttagaaaaatcagtaggaaaagaaaa

SEQ ID NO: 147932 - DNA, 296 bp, Homo sapiens
cttaacctacgtggactttctcccacatacccataacctccatctaatcaggaaaaaagaaaaaaatcaaataaatgctcacagagggacagtctacaaaatacttgatgagtagtactcctctatgctgccagggtcatcaaaaacaaaggaaatttaagaaayaattacaaccaagaggagactaagggaacatgacaactaaatgtaatgtggtatcttggttgggatctggaagcagaaaaaaaatattaggtgaaaactaagaaaatcttaataaagtatgaattttatct

SEQ ID NO: 147933 - DNA, 296 bp, Homo sapiens
cttaacctacgtggactttctcccacatacccataacctccatctaatcaggaaaaaagaaaaaaatcaaataaatgctcacagagggacagtctacaaaatacttgatgagtagtactcctctatgctgccagggtcatcaaaaacaaaggaaatttaagaaacaattacmaccaagaggagactaagggaacatgacaactaaatgtaatgtggtatcttggttgggatctggaagcagaaaaaaaatattaggtgaaaactaagaaaatcttaataaagtatgaattttatct

SEQ ID NO: 147934 - DNA, 538 bp, Homo sapiens
attcctcaccccacactgtgcacactaataaatgtgtatgccatttctcctattaatctgccttttgtcagttgatttttcagtgaaccacctgagaatgaagagaaagttttcctttcgcccccacattaaatatttacaataatcaataaaataaataggtcagttgattccatttttattttttagaaaaaaattaaaattctacatgactaaataattgcctaattcagaagccttataaactgacaaaggagaaaccagaaaccagtctactgacactaaattctaaattcagtgctttaaatatagcttgtagtaaaaatttaatgatatctcaactgtgtcttcctgttgattcagaaattatatatgaaaatgaacactcattcaaatgtataaaaataagaatatattctctttttctttgagtagtttttgaatattctaattgttcatttgaawacaaagtaccttttgtacaaaaaagacttcatttttaacttttatgtgttgaaaacagacaaacacaggtcaa

SEQ ID NO: 147935 - DNA, 629 bp, Homo sapiens
gaaagctatattgtagttggttacaaactgtccagtccctggcgtataataaactgttctctaccagatagaatgcatgtttacaatactcaattaatacatctggcagactttaattgcattagctttgtcgcaccagaggtggcataactttcatgtgacataattaggtttgctcaatttaaacagacacattaatgcagcwcagcaaggctcaattaaatctgtttcaaagcaaaatcacaatgtgaggcattgtgggtaatgttatgcaaattatcatattggcagagaaactgagtaaggtttcaacagtgcctattggcataaaatgaatttttccatttggaatatcaaggcaaaaacagtaagatgtctgtgttgtaatttccctttttcagggcttatcaaagtggtgcagctgttgacctagtcaaataaattgttttgtcactttggttttctttaagtaatattttaaagttttcatgataaccaaagtatatattgtttcaaaatctaaacacaatttgtcttcttctaggcaccagacataatcaaagattaatctttattagtcctccatttccaataggggtgttgattagtaagtgaggtaatacagatct

SEQ ID NO: 147936 - DNA, 629 bp, Homo sapiens
gaaagctatattgtagttggttacaaactgtccagtccctggcgtataataaactgttctctaccagatagaatgcatgtttacaatactcaattaatacatctggcagactttaattgcattagctttgtcgcaccagaggtggcataactttcatgtgacataattaggtttgctcaatttaaacagacacattaatgcagctcagcaaggctcaattaaatctgtttcaaagcaaaatcacaatgtgaggcattgtgggtaatgttatgcaaattatcatattggcagagaaactgagtaaggtttcaacagtgcctattggcataaaatgaatttttccatttggaatatcaaggcaaaaacagyaagatgtctgtgttgtaatttccctttttcagggcttatcaaagtggtgcagctgttgacctagtcaaataaattgttttgtcactttggttttctttaagtaatattttaaagttttcatgataaccaaagtatatattgtttcaaaatctaaacacaatttgtcttcttctaggcaccagacataatcaaagattaatctttattagtcctccatttccaataggggtgttgattagtaagtgaggtaatacagatct

SEQ ID NO: 147937 - DNA, 613 bp, Homo sapiens
tttttttaaatcccattatactatctaacttctagacacaagtatcataatgataacactctaaaagcatagatactttattttgtaatctgtttcagacttcctaaatgatacattggaaagaacgttgatttggcagtgatctcactaaataatttgcatgcaatagtagcagcatcatctatcacagctgactataagaatcaccctgacatttattaagtgaagttttattggtaacatagatacrtatttgtcactaagtataaaactgttagtttatacatagacaatttataaaatattgtattccaaagtttgttttgttttgttttaatcagttatggagaaatatgatacagtaaagaaagcaaaagggaggacatggttagaatgtaaagaagagtagtaaattccaggaacttttcaaatataattgagtaatttaggaaaagatattttacattttgatccattaactcttgatttgtaaaatgataaaaatatgcacgttatacagtgttcccttgaggatcaaatgggataatacagataactatattgggctgttgtattagcccattttcacactgctataaagatactacctgag

SEQ ID NO: 147938 - DNA, 579 bp, Homo sapiens
gtgtccaggagggtgtctaagggagtgcatgggggagggtgccagtcatttgaagacctgggagaagagaggagaagaagcagaagcgcttgaagtgggaatgagccaaggagataaaagagatagaaagaaactggcgtacttgtatgtgatgaaacatgagtgagagtggtagaaaccgaactcaaaaagtacacagtggccatggcaagaagttcgtattttattgtaatttactatacatcatatatgttaacattatgtaatctatcatatattagttataatgaccatgagaagccccagcagcaggataagcagggatstgacctactgttacaaaatgatcatatctggctatggagagggggaggcaaagagtaaaagcagaaagatcaattaggaggttgttttaataatgcaagaaagtggagattttagaccaaggtgatgagacttactgataggcttgatatgtggagtgaagaaaagagaggattcaacaaatggattttctttcaccgtgaacaaatgggtagaggatagaaccattaactgggatggggaatatcagaaaaa

SEQ ID NO: 147939 - DNA, 569 bp, Homo sapiens
cacttcaaactccccataaacttgtagatactggcagagctgccaagttaatacagagagctgaagaaatgaagagtggactgaaagatttcaaaacatttttgacaaatgatcaaacaaaagtcactgaggaagaaaataagggttcaggtacaggtgcggccggtgcctcagacacaacaataaaacccaatsctgaaaacactgggcccacattagaatgggataactgtgatttaagggaagatgctttggatgatagtgtcagtagtagctcagtacatgcttctccattggcaagtagccctgtgagaaaaaatcttttccattttggtgagtcaacaacaggatctaacttcagttttaaatctgctttgagtccatctaagtctcctgccaagttgaatcagagtgggacttcagttggcactgatgaagaatctgatgttactcaagaagaagagagagatggacagtactttgaacctgttgttcctttacctgatctagttgaagtatccagtggtgaggaaaatgaaaaagttgtttttagtcacagggcagaactc

SEQ ID NO: 147940 - DNA, 569 bp, Homo sapiens
cacttcaaactccccataaacttgtagatactggcagagctgccaagttaatacagagagctgaagaaatgaagagtggactgaaagatttcaaaacatttttgacaaatgatcaaacaaaagtcactgaggaagaaaataagggttcaggtacaggtgcggccggtgcctcagacacaacaataaaacccaatcctgaaaacactgggcccacattagaatgggataactrtgatttaagggaagatgctttggatgatagtgtcagtagtagctcagtacatgcttctccattggcaagtagccctgtgagaaaaaatcttttccattttggtgagtcaacaacaggatctaacttcagttttaaatctgctttgagtccatctaagtctcctgccaagttgaatcagagtgggacttcagttggcactgatgaagaatctgatgttactcaagaagaagagagagatggacagtactttgaacctgttgttcctttacctgatctagttgaagtatccagtggtgaggaaaatgaaaaagttgtttttagtcacagggcagaactc

SEQ ID NO: 147941 - DNA, 569 bp, Homo sapiens
cacttcaaactccccataaacttgtagatactggcagagctgccaagttaatacagagagctgaagaaatgaagagtggactgaaagatttcaaaacatttttgacaaatgatcaaacaaaagtcactgaggaagaaaataagggttcaggtacaggtgcggccggtgcctcagacacaacaataaaacccaatcctgaaaacactgggcccacattagaatgggataactgtgatttaagggaagatgctttggatgatagtgtcagtagtagctcagtacatgcttctccattggcaagtagccctgtgagaaaaaatcttttccattttgrtgagtcaacaacaggatctaacttcagttttaaatctgctttgagtccatctaagtctcctgccaagttgaatcagagtgggacttcagttggcactgatgaagaatctgatgttactcaagaagaagagagagatggacagtactttgaacctgttgttcctttacctgatctagttgaagtatccagtggtgaggaaaatgaaaaagttgtttttagtcacagggcagaactc

SEQ ID NO: 147942 - DNA, 604 bp, Homo sapiens
tgatgcagggctgaaaacaggaacagtaagacccyaagagatgccacatcatcactatcttgcacagtaagatagagatgtaattgtaattgtccaaaacttaacatttgtggcctactttttcattatgcagttctaaatttctctcttttttttttaaattcaaacggagtctcgctctgtcacccatcttgcacagtcaaatgaatctccctccccctaaaatcctccaaaaaagctgctgttctcaacaaacccatctgatcagctccaaatctgtggagtcccaacaagggtgaaggccgcgattatacaggacaatgaggaaaagtctagatactgaaccatgagttccccaatcttcttcccctggaacataagggtaaggaaatctctcaagaggcagaacaaacaaaagaggagaataagagaaaaattagagaaactccagctttcaggtaaacatcattaaaaaaaagggtaagaaatggtcaaagaaataatacaagaaatgctacagaactgaaagaaatgagtttcccaattgaaaggacacttccagaaaacctttgttaccaagaacaagaatctcatcagactccta

SEQ ID NO: 147943 - DNA, 596 bp, Homo sapiens
gtgagttattgcccctctctggtgtctgacagtatttcatctcttcctaccagggtaaattgcactgtttatgaatcagtttttaaagctgttttttgggatgaagacttaaacactcaaacacataggacctattatggataaacatacaatagaataatattccaaagtaaaaaaggaaggaaatgctgacacatgctacaacatggatggaccttgtggacattgtgctaagtggagtaagcccgtcacaaaaggacaaatattgtatattccacttacatgagatgcctagagtagtcagattcatagaaatagaaagtgaagtgttggttccaggggctgggaggtgggggaaattgagagtgttgtttaatgaggacagttttagtttgggatgatgaaagagttctggagatggagggtgtgattgtcrcacagcaacgtgaatgtacttaatgccactgagtcatacacttaaaaatgggaaaatgatacattttattttattttattttttctgcatatagttgtgcttttactttttatttttttatttttatttttttaattatactttaagttttagggtacat

SEQ ID NO: 147944 - DNA, 596 bp, Homo sapiens
gtgagttattgcccctctctggtgtctgacagtatttcatctcttcctaccagggtaaattgcactgtttatgaatcagtttttaaagctgttttttgggatgaagacttaaacactcaaacacataggacctattatggataaacatacaatagaataatattccaaagtaaaaaaggaaggaaatgctgacacatgctacaacatggatggaccttgtggacattgtgctaagtggagtaagcccgtcacaaaaggacaaatattgtatattccacttacatgagatgcctagagtagtcagattcatagaaatagaaagtgaagtgttggttccaggggctgggaggtgggggaaattgagagtgttgtttaatgaggacagttttagtttgggatgatgaaagagttctggagatggagggtgtgattgtcgcacagcaacgtgaatgtacttaatgccactgagtcatrcacttaaaaatgggaaaatgatacattttattttattttattttttctgcatatagttgtgcttttactttttatttttttatttttatttttttaattatactttaagttttagggtacat

SEQ ID NO: 147945 - DNA, 500 bp, Homo sapiens
tgtaaaataaatttccaaaggaacctttgtgaaccttcgaatgcattttggtatttaatgatatatgatggtaaaattcatgtayaatttgtcattttagccattttaagtggaaaattcaggagcattaatgacatttataatgttgtacatccattaccactattcccaaaactttttcatcatctccaacaaaatctctgtatatattacatgaaaatttctatatttttactaacaatgtcatttttcatatataatttcctgatcttttcttatttgtccatgttttcaattagctctttaatgatatttagtaagtctcatgtctgggcttcctcagggatggtttctgtaatttattggaatcataaataacaatttattgtgttcctttgaaggaactatggctttgtttctttgtatgtttcctgatattttgttgaaagctggacttttgaatattataatgtagtaaccttgtaaatcatatactctcc

SEQ ID NO: 147946 - DNA, 396 bp, Homo sapiens
ctaatgagattagacatgatctatttttttctagacactggcaccttttgcacttcaattagatatccagacacgcccataacttagcagtcataggtaatgttgtcggaaaaagagtatgaggtgggttggttgtacaagaagaacaggttagaatttgctttcttctgagcttargtactaaagtaaaaagcaggtagattcatcatcaggaagaatgtaggcagctaatctgagaagtaaaagactataaaaataagagaaacaaatgaaaatttagctttaactgagagctgatgaacttaggagactcaacattgctttgctaaatagtgatattaaaatattgctagacaaatttttcttaagtgtaggatttaatttggaactgagtag

SEQ ID NO: 147947 - DNA, 471 bp, Homo sapiens
tatattgcacttttttttttttgagagtgtgcccaggctggagtgcaatggcatgatctcagctcactccarcctccacccccccaggttcaagggattctcctgcctcagcctccctagtagctgggattacaggtgggcaccaccacgtctggctaattgttgtatttttagtagagatggggtttcatcatgttggccaggctggtctcaaactcctgatctcaggtgctccaccctcctcagcctcccaaagtgttaggattacaggtgtgatccaccacgcccagtcttatatttcactctttgggaattgcatcttactgtaatcttaaactacactaaaataaataatgtaaaccttttgtcaaattgctcagagtaggtttctactttggttataaggaataaaattcatgcttttgtgtacacactagacatctaaagcaaccaaccatagttaacatgcag

SEQ ID NO: 147948 - DNA, 471 bp, Homo sapiens
tatattgcacttttttttttttgagagtgtgcccaggctggagtgcaatggcatgatctcagctcactccaacctccacccccccaggttcaagggattctcctgcctcagcctccctagtagctgggattacaggtgggcaccaccacgtctggctaattgttgtatttttagtagagatggggtttcatcatgttggccaggctggtctcraactcctgatctcaggtgctccaccctcctcagcctcccaaagtgttaggattacaggtgtgatccaccacgcccagtcttatatttcactctttgggaattgcatcttactgtaatcttaaactacactaaaataaataatgtaaaccttttgtcaaattgctcagagtaggtttctactttggttataaggaataaaattcatgcttttgtgtacacactagacatctaaagcaaccaaccatagttaacatgcag

SEQ ID NO: 147949 - DNA, 471 bp, Homo sapiens
tatattgcacttttttttttttgagagtgtgcccaggctggagtgcaatggcatgatctcagctcactccaacctccacccccccaggttcaagggattctcctgcctcagcctccctagtagctgggattacaggtgggcaccaccacgtctggctaattgttgtatttttagtagagatggggtttcatcatgttggccaggctggtctcaaactcctgatctcaggtgctccaccckcctcagcctcccaaagtgttaggattacaggtgtgatccaccacgcccagtcttatatttcactctttgggaattgcatcttactgtaatcttaaactacactaaaataaataatgtaaaccttttgtcaaattgctcagagtaggtttctactttggttataaggaataaaattcatgcttttgtgtacacactagacatctaaagcaaccaaccatagttaacatgcag

SEQ ID NO: 147950 - DNA, 471 bp, Homo sapiens
tatattgcacttttttttttttgagagtgtgcccaggctggagtgcaatggcatgatctcagctcactccaacctccacccccccaggttcaagggattctcctgcctcagcctccctagtagctgggattacaggtgggcaccaccacgtctggctaattgttgtatttttagtagagatggggtttcatcatgttggccaggctggtctcaaactcctgatctcaggtgctccaccctcctcagcctcccaaagtgttaggattacaggtgtgatccaccacgcccagycttatatttcactctttgggaattgcatcttactgtaatcttaaactacactaaaataaataatgtaaaccttttgtcaaattgctcagagtaggtttctactttggttataaggaataaaattcatgcttttgtgtacacactagacatctaaagcaaccaaccatagttaacatgcag

SEQ ID NO: 147951 - DNA, 616 bp, Homo sapiens
attctggtttctaactcagttatgagaccttgggcaaagtcattaaatttctctgaacttcagatttttgggagtcaataaaccaatacatgtcaaagggcctggtaaactttacagtttagaccaggygtggtgtctcacccctgcaatctcagcactttgggaggccaaggcgggtggatcacatgaggccaggagtttgagaccagtctgaacaacatggtgaaatcccatctctattaaaagtacaaaaattatctgggcgggatggcatgcacctggaagtcccagctacttgtggggctgaggtgggaggatggcttgagcctgggaggcagaggttgctgtgagccaagatcgtgccactgcactccaacctgtgtgacagagtgagaccctgtctcagaaaaaataacactttacagtttatcagcaaacaggaaagtcttgctaggcaatgtaattgattagttccgtgccctggattctgggctcttaactgtatgagcactgtaggtgtgagcagcaacaattaagaagctgcagaggtaaaggtataagggcagtgattgaggatgtctaccaagcagatttcagcaagtgtgtttcaagaagt

SEQ ID NO: 147952 - DNA, 616 bp, Homo sapiens
attctggtttctaactcagttatgagaccttgggcaaagtcattaaatttctctgaacttcagatttttgggagtcaataaaccaatacatgtcaaagggcctggtaaactttacagtttagaccaggtgtggtgtctcacccctgcaatctsagcactttgggaggccaaggcgggtggatcacatgaggccaggagtttgagaccagtctgaacaacatggtgaaatcccatctctattaaaagtacaaaaattatctgggcgggatggcatgcacctggaagtcccagctacttgtggggctgaggtgggaggatggcttgagcctgggaggcagaggttgctgtgagccaagatcgtgccactgcactccaacctgtgtgacagagtgagaccctgtctcagaaaaaataacactttacagtttatcagcaaacaggaaagtcttgctaggcaatgtaattgattagttccgtgccctggattctgggctcttaactgtatgagcactgtaggtgtgagcagcaacaattaagaagctgcagaggtaaaggtataagggcagtgattgaggatgtctaccaagcagatttcagcaagtgtgtttcaagaagt

SEQ ID NO: 147953 - DNA, 535 bp, Homo sapiens
gttatgagaccttgggcaaagtcattaaatttctctgaacttcagatttttgggagtcaataaaccaatacatgtcaaagggcctggtaaactttacagtttagaccaggtgtggtgtctcacccctgcaatctcagcactttgggaggccaaggcgggtggatcacatgaggccaggagtttgagaccagtctgaacaacatggtgaaatcccatctctattaaaagtacaaaaattatctgggcgggatggcatgcacctggaagtcccagctacttgtggggctgaggtgggaggatggcytgagcctgggaggcagaggttgctgtgagccaagatcgtgccactgcactccaacctgtgtgacagagtgagaccctgtctcagaaaaaataacactttacagtttatcagcaaacaggaaagtcttgctaggcaatgtaattgattagttccgtgccctggattctgggctcttaactgtatgagcactgtaggtgtgagcagcaacaattaagaagctgcagaggtaaa

SEQ ID NO: 147954 - DNA, 406 bp, Homo sapiens
tactgaactactaaacagtttycaggtggagatggcaaagtggcatgggaagattttcctgtttaaagtagacaccagaaacatctaggaatgttgcagaacagttgaggattactcaaatgaggtatttccaccctggctcactgataaatcacccctcagaatatagtcatactgcttgttgaggagttcttatgacccaggccctgggctctacatacattatttaatctcatcactggttaagagaaaaattgaagctggtaaatggtggaacaaaattcaaactcatagctgtctgaaaagtacatgcttttcccctgtactttgctgctcctaatagatctgtcctgccactgtgcaaggccactagctatccttgtcagattattttaaagccgaattc

SEQ ID NO: 147955 - DNA, 441 bp, Homo sapiens
gaattctaaagataaccagtgaatttaaattattcaactgatatttatagtactgaactactaaacagttttcaggtggagatggcaaagtggcatgggaagwttttcctgtttaaagtagacaccagaaacatctaggaatgttgcagaacagttgaggattactcaaatgaggtatttccaccctggctcactgataaatcacccctcagaatatagtcatactgcttgttgaggagttcttatgacccaggccctgggctctacatacattatttaatctcatcactggttaagagaaaaattgaagctggtaaatggtggaacaaaattcaaactcatagctgtctgaaaagtacatgcttttcccctgtactttgctgctcctaatagatctgtcctgccactgtgcaaggccactagctatccttgtcagattat

SEQ ID NO: 147956 - DNA, 441 bp, Homo sapiens
gaattctaaagataaccagtgaatttaaattattcaactgatatttatagtactgaactactaaacagttttcaggtggagatggcaaagtggcatgggaagattttcctgtttaaagtagacaccagaaacatctaggaatgttgcagaacagttgaggattactcaaatgaggtwtttccaccctggctcactgataaatcacccctcagaatatagtcatactgcttgttgaggagttcttatgacccaggccctgggctctacatacattatttaatctcatcactggttaagagaaaaattgaagctggtaaatggtggaacaaaattcaaactcatagctgtctgaaaagtacatgcttttcccctgtactttgctgctcctaatagatctgtcctgccactgtgcaaggccactagctatccttgtcagattat

SEQ ID NO: 147957 - DNA, 441 bp, Homo sapiens
gaattctaaagataaccagtgaatttaaattattcaactgatatttatagtactgaactactaaacagttttcaggtggagatggcaaagtggcatgggaagattttcctgtttaaagtagacaccagaaacatctaggaatgttgcagaacagttgaggattactcaaatgaggtatttccaccctggctcactgataaatcacccctcagaatatagtcatactgcttrttgaggagttcttatgacccaggccctgggctctacatacattatttaatctcatcactggttaagagaaaaattgaagctggtaaatggtggaacaaaattcaaactcatagctgtctgaaaagtacatgcttttcccctgtactttgctgctcctaatagatctgtcctgccactgtgcaaggccactagctatccttgtcagattat

SEQ ID NO: 147958 - DNA, 441 bp, Homo sapiens
gaattctaaagataaccagtgaatttaaattattcaactgatatttatagtactgaactactaaacagttttcaggtggagatggcaaagtggcatgggaagattttcctgtttaaagtagacaccagaaacatctaggaatgttgcagaacagttgaggattactcaaatgaggtatttccaccctggctcactgataaatcacccctcagaatatagtcatactgcttgttgasgagttcttatgacccaggccctgggctctacatacattatttaatctcatcactggttaagagaaaaattgaagctggtaaatggtggaacaaaattcaaactcatagctgtctgaaaagtacatgcttttcccctgtactttgctgctcctaatagatctgtcctgccactgtgcaaggccactagctatccttgtcagattat

SEQ ID NO: 147959 - DNA, 441 bp, Homo sapiens
gaattctaaagataaccagtgaatttaaattattcaactgatatttatagtactgaactactaaacagttttcaggtggagatggcaaagtggcatgggaagattttcctgtttaaagtagacaccagaaacatctaggaatgttgcagaacagttgaggattactcaaatgaggtatttccaccctggctcactgataaatcacccctcagaatatagtcatactgcttgttgaggagttcttatgacccaggccctgggctytacatacattatttaatctcatcactggttaagagaaaaattgaagctggtaaatggtggaacaaaattcaaactcatagctgtctgaaaagtacatgcttttcccctgtactttgctgctcctaatagatctgtcctgccactgtgcaaggccactagctatccttgtcagattat

SEQ ID NO: 147960 - DNA, 441 bp, Homo sapiens
gaattctaaagataaccagtgaatttaaattattcaactgatatttatagtactgaactactaaacagttttcaggtggagatggcaaagtggcatgggaagattttcctgtttaaagtagacaccagaaacatctaggaatgttgcagaacagttgaggattactcaaatgaggtatttccaccctggctcactgataaatcacccctcagaatatagtcatactgcttgttgaggagttcttatgacccaggccctgggctctacrtacattatttaatctcatcactggttaagagaaaaattgaagctggtaaatggtggaacaaaattcaaactcatagctgtctgaaaagtacatgcttttcccctgtactttgctgctcctaatagatctgtcctgccactgtgcaaggccactagctatccttgtcagattat

SEQ ID NO: 147961 - DNA, 441 bp, Homo sapiens
gaattctaaagataaccagtgaatttaaattattcaactgatatttatagtactgaactactaaacagttttcaggtggagatggcaaagtggcatgggaagattttcctgtttaaagtagacaccagaaacatctaggaatgttgcagaacagttgaggattactcaaatgaggtatttccaccctggctcactgataaatcacccctcagaatatagtcatactgcttgttgaggagttcttatgacccaggccctgggctctacatayattatttaatctcatcactggttaagagaaaaattgaagctggtaaatggtggaacaaaattcaaactcatagctgtctgaaaagtacatgcttttcccctgtactttgctgctcctaatagatctgtcctgccactgtgcaaggccactagctatccttgtcagattat

SEQ ID NO: 147962 - DNA, 441 bp, Homo sapiens
gaattctaaagataaccagtgaatttaaattattcaactgatatttatagtactgaactactaaacagttttcaggtggagatggcaaagtggcatgggaagattttcctgtttaaagtagacaccagaaacatctaggaatgttgcagaacagttgaggattactcaaatgaggtatttccaccctggctcactgataaatcacccctcagaatatagtcatactgcttgttgaggagttcttatgacccaggccctgggctctacatacattatttaatctcatcactggttragagaaaaattgaagctggtaaatggtggaacaaaattcaaactcatagctgtctgaaaagtacatgcttttcccctgtactttgctgctcctaatagatctgtcctgccactgtgcaaggccactagctatccttgtcagattat

SEQ ID NO: 147963 - DNA, 402 bp, Homo sapiens
gaattctaaagataaccagtgaatttaaattattcaactgatatttatagtactgaactactaaacagttttcaggtggagatggcaaagtggcatgggaagattttcctgtttaaagtagacaccagaaacatctaggaatgttgcagaacagttgaggattactcaaatgaggtatttccaccctggctcactgataaatcacccctcagaatatagtcatactgcttgttgaggagttcttatgacccaggccctgggctctacatacattatttaatctcatcactggttaagagaaaaattgaagctggtaaatggtggaacaaaattyaaactcatagctgtctgaaaagtacatgcttttcccctgtactttgctgctcctaatagatctgtcct

SEQ ID NO: 147964 - DNA, 429 bp, Homo sapiens
tgaattctaaagataaccagtgaatttaaattattcaactgatatttatagtactgaactactaaacagttttcaggtggagatggcaaagtggcatgggaagattttcctgtttaaagtagacaccagaaacatctaggaatgttgcagaacagttgaggattactcaaatgaggtatttccaccctggctcactgataaatcacccctcagaatatagtcatactgcttgttgaggagttcttatgacccaggccctgggctctacatacattatttaatctcatcactggttaagagaaaaattgaagctggtaaatggtggaacaaaattcaaactcatagctgtctgaaaagtacatgcttttcccctgtactttgctgytcctaatagatctgtcctgccactgtgcaaggccactagctatc

SEQ ID NO: 147965 - DNA, 429 bp, Homo sapiens
tgaattctaaagataaccagtgaatttaaattattcaactgatatttatagtactgaactactaaacagttttcaggtggagatggcaaagtggcatgggaagattttcctgtttaaagtagacaccagaaacatctaggaatgttgcagaacagttgaggattactcaaatgaggtatttccaccctggctcactgataaatcacccctcagaatatagtcatactgcttgttgaggagttcttatgacccaggccctgggctctacatacattatttaatctcatcactggttaagagaaaaattgaagctggtaaatggtggaacaaaattcaaactcatagctgtctgaaaagtacatgcttttcccctgtactttgctgctcctartagatctgtcctgccactgtgcaaggccactagctatc

SEQ ID NO: 147966 - DNA, 485 bp, Homo sapiens
ccgaattcagttattttcagtaaattgtatatatcatgacattccaccattaaatacttcagtatgcatctctataaaataacattttcccactaataaaaacattatcatagctaacaaatcactaactagcccagtaaacctaaatgacttatttaaatgttatattttctttttttttttgagatagtctcgctctgtcactaggtttggagtgcagtggtgcaatctcagctcactgcaatctccgcctcccaggttcaagcgattcccctgcctcagcctccygagtagctgagactgcaggcacgcaccaccatgcccggctaattttttttattttactagaggcatggtttcaccatgttggccaggatggtctgaatctcctgacctcgtgatctgcctgcctcagcctcccaaagtgttgggattacaggcatgagccaccacgcctggccaaatgttatattttcataaattta

SEQ ID NO: 147967 - DNA, 571 bp, Homo sapiens
caaaaacccaataaaatctcaagcagtattaaaaaaaaaaaagaagaaatctacttctagtcacataagagtaaaactgcccctaaaaaagacagagagaaatctcaaaagcagccagagaaagaagacacattgcctcacaatagacttctcaacagcattggtgtaatactatctcatgtactaaaagaaataactgccaaccttttatattttccaagatctcttctggaaaacaaaaactttaagaatctgccttcactgraaattcttaatgatgtacttcaagcaaaaagaaaatttcctaggtaaaaggtctaagatgccagaaagaaagacatgcaaaggaaacttaccaccatattacagatatggactgtcagtctgactggtcacactaggggggcattttgttaccaaggccttgaaaataataaccaacactgcatacatgagggatgctagaagaaaggtctgagagccactcttcctggcactgaaggaaacagggcccatcagagcaaacaagtaccttttacctctctcatctccttggaagcaaatgtttata

SEQ ID NO: 147968 - DNA, 556 bp, Homo sapiens
aaacaaaaactttaagaatctgccttcactgaaaattcttaatgatgtacttcaagcaaaaagaaaatttcctaggtaaaagktctaagatgccagaaagaaagacatgcaaaggaaacttaccaccatattacagatatggactgtcagtctgactggtcacactaggggggcattttgttaccaaggccttgaaaataataaccaacactgcatacatgagggatgctagaagaaaggtctgagagccactcttcctggcactgaaggaaacagggcccatcagagcaaacaagtaccttttacctctctcatctccttggaagcaaatgtttataatctctggttttgtgtaaagtttataatagtatttttcattcaggttgctacctattagtggatggtgaaattaatttggtggatcacattcagaatatttttttaaaatcaaaagaatacaagctgggctcagtgactcacacctgtaagcccaacagtttgagaagaccaggcaggaggattgcttgagaacaggagttcagaatcagcctgagca

SEQ ID NO: 147969 - DNA, 571 bp, Homo sapiens
caaaaacccaataaaatctcaagcagtattaaaaaaaaaaaagaagaaatctacttctagtcacataagagtaaaactgcccctaaaaaagacagagagaaatctcaaaagcagccagagaaagaagacacattgcctcacaatagacttctcaacagcattggtgtaatactatctcatgtactaaaagaaataactgccaaccttttatattttccaagatctcttctggaaaacaaaaactttaagaatctgccttcactgaaaattcttaatgatgtacttcaagcaaaaagaaaatttcctaggtaaaaggtctaagatgcyagaaagaaagacatgcaaaggaaacttaccaccatattacagatatggactgtcagtctgactggtcacactaggggggcattttgttaccaaggccttgaaaataataaccaacactgcatacatgagggatgctagaagaaaggtctgagagccactcttcctggcactgaaggaaacagggcccatcagagcaaacaagtaccttttacctctctcatctccttggaagcaaatgtttata

SEQ ID NO: 147970 - DNA, 575 bp, Homo sapiens
ttccaagatctcttctggaaaacaaaaactttaagaatctgccttcactgaaaattcttaatgatgtacttcaagcaaaaagaaaatttcctaggtaaaaggtctaagatgccagaaagaaagacatgcaaaggaaacttaccaccatattacagatatggactgtcagtctgactggtcacactaggggggcattttgttaccaaggccttgaaaataataaccaacactgcatacatgagggatgcyagaagaaaggtctgagagccactcttcctggcactgaaggaaacagggcccatcagagcaaacaagtaccttttacctctctcatctccttggaagcaaatgtttataatctctggttttgtgtaaagtttataatagtatttttcattcaggttgctacctattagtggatggtgaaattaatttggtggatcacattcagaatatttttttaaaatcaaaagaatacaagctgggctcagtgactcacacctgtaagcccaacagtttgagaagaccaggcaggaggattgcttgagaacaggagttcagaatcagcctgagca

SEQ ID NO: 147971 - DNA, 571 bp, Homo sapiens
caaaaacccaataaaatctcaagcagtattaaaaaaaaaaaagaagaaatctacttctagtcacataagagtaaaactgcccctaaaaaagacagagagaaatctcaaaagcagccagagaaagaagacacattgcctcacaatagacttctcaacagcattggtgtaatactatctcatgtactaaaagaaataactgccaaccttttatattttccaagatctcttctggaaaacaaaaactttaagaatctgccttcactgaaaattcttaatgatgtacttcaagcaaaaagaaaatttcctaggtaaaaggtctaagatgccagaaagaaagacatgcaaaggaaacttaccaccatattacagatatggactgtcagtctgactggtcacactaggggggcattttgttaccaaggccttgaaaataataaccaacactgcatacatgagggatgctagaagaaaggtctgagagccactcttcctggcactgaaggaaacagggcccatcagagcaaacaagtaccttttrcctctctcatctccttggaagcaaatgtttata

SEQ ID NO: 147972 - DNA, 567 bp, Homo sapiens
tggaaaacaaaaactttaagaatctgccttcactgaaaattcttaatgatgtacttcaagcaaaaagaaaatttcctaggtaaaaggtctaagatgccagaaagaaagacatgcaaaggaaacttaccaccatattacagatatggactgtcagtctgactggtcacactaggggggcattttgttaccaaggccttgaaaataataaccaacactgcatacatgagggatgctagaagaaaggtctgagagccactcttcctggcactgaaggaaacagggcccatcagagcaaacaagtaccttttacctctctcatctccttggargcaaatgtttataatctctggttttgtgtaaagtttataatagtatttttcattcaggttgctacctattagtggatggtgaaattaatttggtggatcacattcagaatatttttttaaaatcaaaagaatacaagctgggctcagtgactcacacctgtaagcccaacagtttgagaagaccaggcaggaggattgcttgagaacaggagttcagaatcagcctgagcaacatggc

SEQ ID NO: 147973 - DNA, 565 bp, Homo sapiens
tgaaaattcttaatgatgtacttcaagcaaaaagaaaatttcctaggtaaaaggtctaagatgccagaaagaaagacatgcaaaggaaacttaccaccatattacagatatggactgtcagtctgactggtcacactaggggggcattttgttaccaaggccttgaaaataataaccaacactgcatacatgagggatgctagaagaaaggtctgagagccactcttcctggcactgaaggaaacagggcccatcagagcaaacaagtaccttttacctctctcatctccttggaagcaaatgtttataatctctggttttgtgtaaagtttataayagtatttttcattcaggttgctacctattagtggatggtgaaattaatttggtggatcacattcagaatatttttttaaaatcaaaagaatacaagctgggctcagtgactcacacctgtaagcccaacagtttgagaagaccaggcaggaggattgcttgagaacaggagttcagaatcagcctgagcaacatggcgagaccctatgtctacaaaaattttaaaata

SEQ ID NO: 147974 - DNA, 565 bp, Homo sapiens
tgaaaattcttaatgatgtacttcaagcaaaaagaaaatttcctaggtaaaaggtctaagatgccagaaagaaagacatgcaaaggaaacttaccaccatattacagatatggactgtcagtctgactggtcacactaggggggcattttgttaccaaggccttgaaaataataaccaacactgcatacatgagggatgctagaagaaaggtctgagagccactcttcctggcactgaaggaaacagggcccatcagagcaaacaagtaccttttacctctctcatctccttggaagcaaatgtttataatctctggttttgtgtaaagtttataatagtatttttcattcaggttgctacctattagtggatggtgaaattaatttggtggatcacattcagratatttttttaaaatcaaaagaatacaagctgggctcagtgactcacacctgtaagcccaacagtttgagaagaccaggcaggaggattgcttgagaacaggagttcagaatcagcctgagcaacatggcgagaccctatgtctacaaaaattttaaaata

SEQ ID NO: 147975 - DNA, 565 bp, Homo sapiens
tgaaaattcttaatgatgtacttcaagcaaaaagaaaatttcctaggtaaaaggtctaagatgccagaaagaaagacatgcaaaggaaacttaccaccatattacagatatggactgtcagtctgactggtcacactaggggggcattttgttaccaaggccttgaaaataataaccaacactgcatacatgagggatgctagaagaaaggtctgagagccactcttcctggcactgaaggaaacagggcccatcagagcaaacaagtaccttttacctctctcatctccttggaagcaaatgtttataatctctggttttgtgtaaagtttataatagtatttttcattcaggttgctacctattagtggatggtgaaattaatttggtggatcacattcagaatatttttttaaaatcaaaagaatacaagctgggctcartgactcacacctgtaagcccaacagtttgagaagaccaggcaggaggattgcttgagaacaggagttcagaatcagcctgagcaacatggcgagaccctatgtctacaaaaattttaaaata

SEQ ID NO: 147976 - DNA, 571 bp, Homo sapiens
aagatctcttctggaaaacaaaaactttaagaatctgccttcactgaaaattcttaatgatgtacttcaagcaaaaagaaaatttcctaggtaaaaggtctaagatgccagaaagaaagacatgcaaaggaaacttaccaccatattacagatatggactgtcagtctgactggtcacactaggggggcattttgttaccaaggccttgaaaataataaccaacactgcatacatgagggatgctagaagaaaggtctgagagccactcttcctggcactgaaggaaacagggcccatcagagcaaacaagtaccttttacctctctcatctccttggaagcaaatgtttataatctctggttttgtgtaaagtttataatagtatttttcattcaggttgctacctattagtggatggtgaaattaatttggtggatcacattcagaatatttttttaaaatcaaaagaatacaagctgggctcagtgactcacacctgtaagcccaacagtttgrgaagaccaggcaggaggattgcttgagaacaggagttcagaatcagcctgagca

SEQ ID NO: 147977 - DNA, 629 bp, Homo sapiens
ccaagcctgttataggctttttgatcatctccagactggcaggaagagaatgcatactcacactgtaagtgcctgatttgatttgcagaggatatagaacsttatcagaaaacaaccttccaaggcaagagcaaatgcaccctatctaagcacagcttttctccaattcttatttacctaaggagatgaatagttgccaggaacattgtttgcacaagggcaggagcctgccagatctgagaacacagcaaaatttttattttgtcaaaaatcttatattcagcttacaccattcattgcaggtgaacatacaacagtgcatttcagtttagggaaatgtttacagtcatctggttctctttattcctgggaacaaggttacctcacttggaacacataaccagtgccaagttgtccatccctaagcaatatcgcttccttctactttctagaagttcttcagattgtggaagagagacttttcagagttctttgccctcattccctcctccagaaattcatgcctttgtataatctcttccccttcagagccagtaggctaacctaatgagttatttttaaccagtagaatacagcaaaaatgatagattacaagagattgtggcttc

SEQ ID NO: 147978 - DNA, 629 bp, Homo sapiens
ccaagcctgttataggctttttgatcatctccagactggcaggaagagaatgcatactcacactgtaagtgcctgatttgatttgcagaggatatagaacgttatcagaaaacaaccttccaaggcaagagcaaatgcaccctatctaagcacagcttttctccaattcttatttacctaaggagatgaatagttgccaggaacattgtttgcacaagggcaggagcctgccagatctgagaacacagcaaaatttttattttgtcaaaaatcttatattcagcttacaccattcattgcaggtgaacatacaacagtgcatttcagtttagggaaatgtttacagtcatctggttctctttattcctgggaacaaggttacctcacttggaacacataaccagtgccaagttgtccatccctaagcaatatcgcttccttctactttctagaagttcttcagattgtggaagagagacttttcagagttctttgccctcattscctcctccagaaattcatgcctttgtataatctcttccccttcagagccagtaggctaacctaatgagttatttttaaccagtagaatacagcaaaaatgatagattacaagagattgtggcttc

SEQ ID NO: 147979 - DNA, 482 bp, Homo sapiens
gagacttttcagagttctttgccctcattccctcctccagaaattcatgcctttgtataatctcttccccttsagagccagtaggctaacctaatgagttatttttaaccagtagaatacagcaaaaatgatagattacaagagattgtggcttctatcttgctagcggactctctctgtcttctctgcttgcacactttgttgaagcaagctaccatcccagaggcaaggaacacaggccatcagtttagcagccttgaggaactaaattcttccaactaccacataagtttggaagtagattctccagtccagccttcagatgagaccccagccatgccaacatcttgattgcagccctgtgagagaccttgaaatagaaccatttctgatctcctgacccacagaaactgtgaaataaatatgtgttaaggtactaagtttgtagtaatttgttacgcagcagattgtaaataacacgc

SEQ ID NO: 147980 - DNA, 482 bp, Homo sapiens
gagacttttcagagttctttgccctcattccctcctccagaaattcatgcctttgtataatctcttccccttcagagccagtaggctaacctaatgagttatktttaaccagtagaatacagcaaaaatgatagattacaagagattgtggcttctatcttgctagcggactctctctgtcttctctgcttgcacactttgttgaagcaagctaccatcccagaggcaaggaacacaggccatcagtttagcagccttgaggaactaaattcttccaactaccacataagtttggaagtagattctccagtccagccttcagatgagaccccagccatgccaacatcttgattgcagccctgtgagagaccttgaaatagaaccatttctgatctcctgacccacagaaactgtgaaataaatatgtgttaaggtactaagtttgtagtaatttgttacgcagcagattgtaaataacacgc

SEQ ID NO: 147981 - DNA, 514 bp, Homo sapiens
gaagagagacttttcagagttctttgccctcattccctcctccagaaattcatgcctttgtataatctcttccccttcagagccagtaggctaacctaatgagttatttttaaccagtagmatacagcaaaaatgatagattacaagagattgtggcttctatcttgctagcggactctctctgtcttctctgcttgcacactttgttgaagcaagctaccatcccagaggcaaggaacacaggccatcagtttagcagccttgaggaactaaattcttccaactaccacataagtttggaagtagattctccagtccagccttcagatgagaccccagccatgccaacatcttgattgcagccctgtgagagaccttgaaatagaaccatttctgatctcctgacccacagaaactgtgaaataaatatgtgttaaggtactaagtttgtagtaatttgttacgcagcagattgtaaataacacgcagataaaaccagacagaacagaaaaat

SEQ ID NO: 147982 - DNA, 482 bp, Homo sapiens
gagacttttcagagttctttgccctcattccctcctccagaaattcatgcctttgtataatctcttccccttcagagccagtaggctaacctaatgagttatttttaaccagtagaatacagcaaraatgatagattacaagagattgtggcttctatcttgctagcggactctctctgtcttctctgcttgcacactttgttgaagcaagctaccatcccagaggcaaggaacacaggccatcagtttagcagccttgaggaactaaattcttccaactaccacataagtttggaagtagattctccagtccagccttcagatgagaccccagccatgccaacatcttgattgcagccctgtgagagaccttgaaatagaaccatttctgatctcctgacccacagaaactgtgaaataaatatgtgttaaggtactaagtttgtagtaatttgttacgcagcagattgtaaataacacgc

SEQ ID NO: 147983 - DNA, 512 bp, Homo sapiens
gagacttttcagagttctttgccctcattccctcctccagaaattcatgcctttgtataatctcttccccttcagagccagtaggctaacctaatgagttatttttaaccagtagaatacagcaaaaatgatagattacaagagattgtggcttctatcttgctagyggactctctctgtcttctctgcttgcacactttgttgaagcaagctaccatcccagaggcaaggaacacaggccatcagtttagcagccttgaggaactaaattcttccaactaccacataagtttggaagtagattctccagtccagccttcagatgagaccccagccatgccaacatcttgattgcagccctgtgagagaccttgaaatagaaccatttctgatctcctgacccacagaaactgtgaaataaatatgtgttaaggtactaagtttgtagtaatttgttacgcagcagattgtaaataacacgcagataaaaccagacagaacagaaaaataaa

SEQ ID NO: 147984 - DNA, 482 bp, Homo sapiens
gagacttttcagagttctttgccctcattccctcctccagaaattcatgcctttgtataatctcttccccttcagagccagtaggctaacctaatgagttatttttaaccagtagaatacagcaaaaatgatagattacaagagattgtggcttctatcttgctagcggmctctctctgtcttctctgcttgcacactttgttgaagcaagctaccatcccagaggcaaggaacacaggccatcagtttagcagccttgaggaactaaattcttccaactaccacataagtttggaagtagattctccagtccagccttcagatgagaccccagccatgccaacatcttgattgcagccctgtgagagaccttgaaatagaaccatttctgatctcctgacccacagaaactgtgaaataaatatgtgttaaggtactaagtttgtagtaatttgttacgcagcagattgtaaataacacgc

SEQ ID NO: 147985 - DNA, 488 bp, Homo sapiens
tgtggaagagagacttttcagagttctttgccctcattccctcctccagaaattcatgcctttgtataatctcttccccttcagagccagtaggctaacctaatgagttatttttaaccagtagaatacagcaaaaatgatagattacaagagattgtggcttctatcttgctagcggactctctctgtcttctctgcttgcacactttgttgaagcaagctaccatcccakaggcaaggaacacaggccatcagtttagcagccttgaggaactaaattcttccaactaccacataagtttggaagtagattctccagtccagccttcagatgagaccccagccatgccaacatcttgattgcagccctgtgagagaccttgaaatagaaccatttctgatctcctgacccacagaaactgtgaaataaatatgtgttaaggtactaagtttgtagtaatttgttacgcagcagattgtaaataaca

SEQ ID NO: 147986 - DNA, 488 bp, Homo sapiens
tgtggaagagagacttttcagagttctttgccctcattccctcctccagaaattcatgcctttgtataatctcttccccttcagagccagtaggctaacctaatgagttatttttaaccagtagaatacagcaaaaatgatagattacaagagattgtggcttctatcttgctagcggactctctctgtcttctctgcttgcacactttgttgaagcaagctaccatcccagaggcaaggaacacaggccatcagtttagcrgccttgaggaactaaattcttccaactaccacataagtttggaagtagattctccagtccagccttcagatgagaccccagccatgccaacatcttgattgcagccctgtgagagaccttgaaatagaaccatttctgatctcctgacccacagaaactgtgaaataaatatgtgttaaggtactaagtttgtagtaatttgttacgcagcagattgtaaataaca

SEQ ID NO: 147987 - DNA, 512 bp, Homo sapiens
gagacttttcagagttctttgccctcattccctcctccagaaattcatgcctttgtataatctcttccccttcagagccagtaggctaacctaatgagttatttttaaccagtagaatacagcaaaaatgatagattacaagagattgtggcttctatcttgctagcggactctctctgtcttctctgcttgcacactttgttgaagcaagctaccatcccagaggcaaggaacacaggccatcagtttagcagccttgaggaactaaaytcttccaactaccacataagtttggaagtagattctccagtccagccttcagatgagaccccagccatgccaacatcttgattgcagccctgtgagagaccttgaaatagaaccatttctgatctcctgacccacagaaactgtgaaataaatatgtgttaaggtactaagtttgtagtaatttgttacgcagcagattgtaaataacacgcagataaaaccagacagaacagaaaaataaa

SEQ ID NO: 147988 - DNA, 488 bp, Homo sapiens
tgtggaagagagacttttcagagttctttgccctcattccctcctccagaaattcatgcctttgtataatctcttccccttcagagccagtaggctaacctaatgagttatttttaaccagtagaatacagcaaaaatgatagattacaagagattgtggcttctatcttgctagcggactctctctgtcttctctgcttgcacactttgttgaagcaagctaccatcccagaggcaaggaacacaggccatcagtttagcagccttgaggaactaaattcttccaactaccacataagtttggaagtagattctccagtccagccttcagatgagaccccagccatgccaacatcttgattgcagccctgtgagagwccttgaaatagaaccatttctgatctcctgacccacagaaactgtgaaataaatatgtgttaaggtactaagtttgtagtaatttgttacgcagcagattgtaaataaca

SEQ ID NO: 147989 - DNA, 506 bp, Homo sapiens
agagagacttttcagagttctttgccctcattccctcctccagaaattcatgcctttgtataatctcttccccttcagagccagtaggctaacctaatgagttatttttaaccagtagaatacagcaaaaatgatagattacaagagattgtggcttctatcttgctagcggactctctctgtcttctctgcttgcacactttgttgaagcaagctaccatcccagaggcaaggaacacaggccatcagtttagcagccttgaggaactaaattcttccaactaccacataagtttggaagtagattctccagtccagccttcagatgagaccccagccatgccaacatcttgattgcagccctgtgagagaccttgaaatagaaccatttctgatctcctgacccacagaaactgtgaaataaatatgtgttaaggtactaagtttgtagtaatttgttacrcagcagattgtaaataacacgcagataaaaccagacagaacag

SEQ ID NO: 147990 - DNA, 506 bp, Homo sapiens
agagagacttttcagagttctttgccctcattccctcctccagaaattcatgcctttgtataatctcttccccttcagagccagtaggctaacctaatgagttatttttaaccagtagaatacagcaaaaatgatagattacaagagattgtggcttctatcttgctagcggactctctctgtcttctctgcttgcacactttgttgaagcaagctaccatcccagaggcaaggaacacaggccatcagtttagcagccttgaggaactaaattcttccaactaccacataagtttggaagtagattctccagtccagccttcagatgagaccccagccatgccaacatcttgattgcagccctgtgagagaccttgaaatagaaccatttctgatctcctgacccacagaaactgtgaaataaatatgtgttaaggtactaagtttgtagtaatttgttacgcagcagattgtaaataacacgyagataaaaccagacagaacag

SEQ ID NO: 147991 - DNA, 568 bp, Homo sapiens
atgattattcacagtgcagtaagtgtgtatcatctgtttgatattttcatattacagttttgatagtgctcttcagtctgcgaaatcttctttgggtggaaatgatgaactgtcagctactttcttagaaatgaaaggacatttctacatgcatgctggttctctgctcttgaagatgggtcagcatggtaataatgttcaatggcgagctctttctgagctggctgcattgtgctatctcatagcatttcaggtaagtcttccacttggagcaattgacatttcacggagtcttgatgtgttttaaatgaaggtgtgctctggtatgtaatgacaatatgtgaacaaacctgtggaattaaagttgaaatgaaatagtcaatttgatacagtggaaaataactaagcatacacaatactggtgaggctggtgaaacagggatgttgagtgcactcttgtcgaaagcctgcattgccatgatttgtttgtagacaaatttgaagagtttgayctttttactctgccatttttgggaacatgataaagatgtaatctcgtatgatgggt

SEQ ID NO: 147992 - DNA, 542 bp, Homo sapiens
agaattgcagtatcaaagtatatctgtgcatttataatttttagagctgttgccaaatatctaaccctaaagaggttgtatcaaattacatttccaccaccaattaagaaagtggtgatagaattaaaagccgatgctctagtcacccatatagttacttttggcatgtttctagtaagtgggcattgcctatgactggacgttttcagtgatggacattcattacttttcaagatagcccagtgcatctttaggtggtttggctcttggtacttccttatatagaataaaaatattcttcaagccttctacctgttggtcttgtttcttcttttgatgatttcttttataaaataattttaatatttgaaggcagctgtcacgtcttcccttcgccattctattcatcatgctttttttttttcataggttattgcatkaggatctctttaatttcctggttgtcccatttattccagtgctatcccctattatccatactctgaaaatgtgttatctacaatgtggcatttccaagtgtc

SEQ ID NO: 147993 - DNA, 172 bp, Homo sapiens
gaattccctccagctttgatatagaaaagcagttatataattaagatatatataatgtgaattgtttatgttggcaaaactaatggcacaargaaaaatttcaaacccttaagccaatttttttattttatttcaggtgctattcgagcacataatggtagtcttcagcacc

SEQ ID NO: 147994 - DNA, 172 bp, Homo sapiens
gaattccctccagctttgatatagaaaagcagttatataattaagatatatataatgtgaattgtttatgttggcaaaactaatggcacaaggaaaaatttcaaacccttaagccaatttttwtattttatttcaggtgctattcgagcacataatggtagtcttcagcacc

SEQ ID NO: 147995 - DNA, 172 bp, Homo sapiens
gaattccctccagctttgatatagaaaagcagttatataattaagatatatataatgtgaattgtttatgttggcaaaactaatggcacaaggaaaaatttcaaacccttaagccaattttttwattttatttcaggtgctattcgagcacataatggtagtcttcagcacc

SEQ ID NO: 147996 - DNA, 640 bp, Homo sapiens
ttggcttacagtggaattcattgcctgctttacctggaatccgaaaatggctaaaacagcttttccatcatttgccccaggaaacctcaaggcttgaaacaaatgcacctgaatcaatatgtattttagatcttgaagtaagcaaagattttaacaaattaaatattctgaattttgtttaatttttttttctaacttaacttttccttaaatraaacaggtatttctccttggagtagtatataccagccacttacaattaaaggagaaatgtaattctcaccacagctcctatcagccgttatgcctgccccttcctgtatgtaaacagctttgtacagaaagacaaaaatcttggtgggatgcggtttgtactctgattcacagaaaagcagtgtaagtagtaaaacaaaaatattgctttcacttagtgcgtaggttttaccagggatttaatcctcatgtgaagatttaatttgtcatgtgacccattaacatatatgtatgtaagcgctgaactgtgtatttagaaagcaattttagtaaattgaactattttttagacctggaaactcagcaaaattgagacttttagttcagcatgaaataaacactctaagagcccaggaaaaacatggcc

SEQ ID NO: 147997 - DNA, 640 bp, Homo sapiens
ttggcttacagtggaattcattgcctgctttacctggaatccgaaaatggctaaaacagcttttccatcatttgccccaggaaacctcaaggcttgaaacaaatgcacctgaatcaatatgtattttagatcttgaagtaagcaaagattttaacaaattaaatattctgaattttgtttaatttttttttctaacttaacttttccttaaataaaacaggtatttctccttggagtagtatataccagccacttacaattaaaggagaaatgtaattctcaccacagctcctatcagccgttatgcctgccccttcctgtatgtaaacagctttgkacagaaagacaaaaatcttggtgggatgcggtttgtactctgattcacagaaaagcagtgtaagtagtaaaacaaaaatattgctttcacttagtgcgtaggttttaccagggatttaatcctcatgtgaagatttaatttgtcatgtgacccattaacatatatgtatgtaagcgctgaactgtgtatttagaaagcaattttagtaaattgaactattttttagacctggaaactcagcaaaattgagacttttagttcagcatgaaataaacactctaagagcccaggaaaaacatggcc

SEQ ID NO: 147998 - DNA, 516 bp, Homo sapiens
aaacagcagaaaaacaaagaaaaaagataattaaaaaacactttcacgtgtattattatttaaagtgtaaagtgcttattaaagtgacaaaaatgtaaataagataaaatatatcattttagagtttttacttttggaattttttgcaaatgaaagcccttaattaatgtcttttatttttagttgcctgtgcccctggagtctgtaaaagagakgcttaagtcagccatgcaggaactcgaaaactatagtgaaggaggtcctctctataaaaatggttctttgcgaaatgcggattcagaaataaaacattctacaccatctcctaccaaatattcactatcaccaagtaaaagttacaaggtaaacaggaaagaatggaatcatttcattgtgaaattgtttctaagtgttttaaatgctcttttgtgatttttattttttttttagtattctcccaaaacaccacctcgatggacagaagatcagaattctttactgaaaatgattcgccaa

SEQ ID NO: 147999 - DNA, 516 bp, Homo sapiens
aaacagcagaaaaacaaagaaaaaagataattaaaaaacactttcacgtgtattattatttaaagtgtaaagtgcttattaaagtgacaaaaatgtaaataagataaaatatatcattttagagtttttacttttggaattttttgcaaatgaaagcccttaattaatgtcttttatttttagttgcctgtgcccctggagtctgtaaaagagaggcttaagtcagycatgcaggaactcgaaaactatagtgaaggaggtcctctctataaaaatggttctttgcgaaatgcggattcagaaataaaacattctacaccatctcctaccaaatattcactatcaccaagtaaaagttacaaggtaaacaggaaagaatggaatcatttcattgtgaaattgtttctaagtgttttaaatgctcttttgtgatttttattttttttttagtattctcccaaaacaccacctcgatggacagaagatcagaattctttactgaaaatgattcgccaa

SEQ ID NO: 148000 - DNA, 516 bp, Homo sapiens
aaacagcagaaaaacaaagaaaaaagataattaaaaaacactttcacgtgtattattatttaaagtgtaaagtgcttattaaagtgacaaaaatgtaaataagataaaatatatcattttagagtttttacttttggaattttttgcaaatgaaagcccttaattaatgtcttttatttttagttgcctgtgcccctggagtctgtaaaagagaggcttaagtcagccatgcaggaactcgaaaactatagtgaaggaggtcctctctataaaaatggttctttgcgaaatgcggattcagaaataaaacattctacaccrtctcctaccaaatattcactatcaccaagtaaaagttacaaggtaaacaggaaagaatggaatcatttcattgtgaaattgtttctaagtgttttaaatgctcttttgtgatttttattttttttttagtattctcccaaaacaccacctcgatggacagaagatcagaattctttactgaaaatgattcgccaa

SEQ ID NO: 148001 - DNA, 516 bp, Homo sapiens
aaacagcagaaaaacaaagaaaaaagataattaaaaaacactttcacgtgtattattatttaaagtgtaaagtgcttattaaagtgacaaaaatgtaaataagataaaatatatcattttagagtttttacttttggaattttttgcaaatgaaagcccttaattaatgtcttttatttttagttgcctgtgcccctggagtctgtaaaagagaggcttaagtcagccatgcaggaactcgaaaactatagtgaaggaggtcctctctataaaaatggttctttgcgaaatgcggattcagaaataaaacattctacaccatctcctaccaaatattcactatcaccaagtaaaagttacaaggtaaacaggaaagaatggaatcatttcattgtgaaattgtttctaagtgttttaaatgctcttttgtkatttttattttttttttagtattctcccaaaacaccacctcgatggacagaagatcagaattctttactgaaaatgattcgccaa

SEQ ID NO: 148002 - DNA, 549 bp, Homo sapiens
accttggtcttgacccttttccatattttattttattttatttttgagacagaggctcgctctgttgcccaggctggagtgcagtggtgcaatcttggctcactgcaacctccacctcccaggttcaagcractctcctgcctcagcctcccgagtagctgggattacaggcacccgccaccaggcccagctaatttttgtatttttagtagacacagagtttcaccatgttggccaggctggttttgaacttctgacctcaggcgatctgcccgccttggcctcccaaagtgctgggattacaggtgtaaaccaccgcacccagccctttactatatttttgaaagtactttatgtgtctctctcctcatcttccacaaaatttgagaccttcaaaggtagaaactgttttatttaaaatataagagttcctgacacagagaaggttcccgagtgattgaactgctacaatgtactaatcatactctggtctatgagttcattcccagattagctgtggattacatgtgtttcaaatgtatagctagg

SEQ ID NO: 148003 - DNA, 549 bp, Homo sapiens
accttggtcttgacccttttccatattttattttattttatttttgagacagaggctcgctctgttgcccaggctggagtgcagtggtgcaatcttggctcactgcaacctccacctcccaggttcaagcaactctcctgcctcagcctcccgagtagctgggattacaggcacccgccaccaggcccagctaatttttgtatttttagtagacacagagtttcaccatgttggccargctggttttgaacttctgacctcaggcgatctgcccgccttggcctcccaaagtgctgggattacaggtgtaaaccaccgcacccagccctttactatatttttgaaagtactttatgtgtctctctcctcatcttccacaaaatttgagaccttcaaaggtagaaactgttttatttaaaatataagagttcctgacacagagaaggttcccgagtgattgaactgctacaatgtactaatcatactctggtctatgagttcattcccagattagctgtggattacatgtgtttcaaatgtatagctagg

SEQ ID NO: 148004 - DNA, 549 bp, Homo sapiens
accttggtcttgacccttttccatattttattttattttatttttgagacagaggctcgctctgttgcccaggctggagtgcagtggtgcaatcttggctcactgcaacctccacctcccaggttcaagcaactctcctgcctcagcctcccgagtagctgggattacaggcacccgccaccaggcccagctaatttttgtatttttagtagacacagagtttcaccatgttggccaggctggttttgaacttctgacctcaggcgatctgcccgccttggcctcccaaagtgctgggattacaggtgtaaaccaccgcacccagccctttactatatttttgaaagtactttatgtgtctctctcctcatcttycacaaaatttgagaccttcaaaggtagaaactgttttatttaaaatataagagttcctgacacagagaaggttcccgagtgattgaactgctacaatgtactaatcatactctggtctatgagttcattcccagattagctgtggattacatgtgtttcaaatgtatagctagg

SEQ ID NO: 148005 - DNA, 539 bp, Homo sapiens
taagtatatgaaatgtctaacgttcaaaccttgttttcttaaaaccttacacatcatataggtccttgtaagaggataaacaaaccggctagcctttcctggggcttttttagtgatgtgtgcagtcagttatttggtgccttttgggtcatgatttccatttcttctgtgtacaggcataaaaggtcttctgttcttatacaagcatgtaaatccaacattctcattgtctcattttattcttgcaatgaccctgtgaaatgtgtagaagcagcacatcgtcattttacaattgagaaacatggagactccaaatggattatttacaggttcacaaaacagctttgtggcactgaaagggcgagagcyaagatctcctgatttctgttcctgtgttcatagattctttttccttaataaaagtaaacatatatcaagatggtccttgttttttaaaaataagatgattaaaattaaagattaatgagctcataggagatactcagaagtactgaacagggtgaagaaaactaaaaact

SEQ ID NO: 148006 - DNA, 549 bp, Homo sapiens
aggctatcctgtcaaatggaataccctagaacgggcctagaacacccataaactaaaagcttccataaaatttggtggccatttgggtaacttctcatttcttagagctgaaaaattggagattcttttccaaagacatgcttytgggtcaacgaacttcatcatacacttatgtcatagcattttttttgcatcttgccttctttagtacaagatttaatgcttaagaatatagtctttgaggcccggcatggtggctcacacctgtaatcctaacactttgggaggctgaggcaggaggatcgcctgagctcaggagtttgagatcagcctaggcaacattgtgagaccttgtccctaaataaaaaaattagccacgcatggtggtgcacgcctgtggtctcagctacttggagatctgaggtgggagactgcttgaacccgggaggttgaggctgcagtgagctgtgatcacgctgggcgacagagtaagaccctgtttaaaaaaaaaaaaaaaaaaaaaatatatatatatatatatatatatat

SEQ ID NO: 148007 - DNA, 173 bp, Homo sapiens
gaattccttggtatataaaccaatgcataaactgccaccctttcaacacatatgcaaactacaatatgccttgttaaatataagttttccaattggagaaagcctccttrtatacccaacaatgtgctaagtctgtgagaattaaaatcaaaagtcaaaataaaaggatcttg

SEQ ID NO: 148008 - DNA, 321 bp, Homo sapiens
agctccggccttcactaagcagtttaatcgcattcctagggaaagtaaaamaattctaggaccttcaccttgccctaattgcctcaaagaacttaagaagccaggcatggtggcatacatctgtagtcccaagtatttgggaggctgaggcaggagggaggatggcttgagcccaggagttcaagttcagcctgggcaacatggtgagactccacctcttaaaaaacaaaaaagacatgaaaagacttaagaagaggtttactggagggggtgtaggaggctgttaaatagaagctcatcagtcttctgggagaacttcta

SEQ ID NO: 148009 - DNA, 536 bp, Homo sapiens
ggcaactgaatatttaccacagccttttttttttttttttttttttgagacagagtctcgctctgtagctcaggctggagtgcagtggcgcgatctcggctcactgctacctccgcctcccgggtcccagttcaagcagttctcctgcctcagtctcccgattttttttttttttaattgtaaaaataagccagcccctttcttcctagtgaagtgggagaaacggtttacactgtccgatgagaaacacttccgttctttggtaaccctgctagggggcgccgctagattccatcctatttctccgatgaaagtatcaggtacctcacccctamgtttagatttgatgatagttcgcttaaaaatgaatgacgaataatctaccccatccttttctcacagtagtgacgaaattccatccaggggcaataaaaaaaatttctttttaatgtagcttagtgtttggaacttgatgttgtgtagtcagacaaacctgtattcggcctccgctggatcagtcactagctgtgtaattt

SEQ ID NO: 148010 - DNA, 607 bp, Homo sapiens
ggtcctcatgtctccttaggtacctcttggttgtaacattttctcagactttgtttttaataaggagtgctggtgaggtattttgtagactctccctcagttgagggttgcccgatgtttctctagcgattagattggactgtgtgttttggggaggaatccacagaggtgaagcatcaggggcacttgctgtcagtgcagcctggcaccgtggccctgaccgtgggctcctggctgaggtcgtgcttgctgggtctccactggaagctgctcttcctctttccagaaagccccatgcacaccacagcctttatgttcctttgttgagtaagaattgtctgactgtttagaggattttgtttaaggaaattcggttgcttgatattaaaaaatgatcagttgaaattaaatagtaataaataataatgaccatttctgkaaattcatagaattccttttgtccatcagagacatcagcagcagttctcattgcatttccttctggaaacagcattgtggggatacctggaggtgaatgaacaaagcccctctgggtttcatgtgcagctgtttcagatctgggaaggtttgtggcttctcacaaaag

SEQ ID NO: 148011 - DNA, 618 bp, Homo sapiens
atagctagaattatctagaaagcctacattgttatgggcatcagcacatctggactttctgttgttgcaggagtgtgtttttgcagacagcaccaagctgcctccttagctgtaaacatcttaggaccatgggtcatgactggcaaggagtgttccttgctagttttaagatggagttgatttaaaatggtgtcactctggctctcctaggctctttcttgaggaaacataactccatggagcaaactgstgtagcatcttctgttccagtcctttcatagtattttgagcatttgcatttaccactgggtatgcaatgcccagtccagagcaagtgtctcttcctgcatggccaatttataatgtcctggagtgaccagtagtgctgtgacagtctactgcccagctatgtgtggggccatcccccttcccacgcccacccagggagtctgcttcatatcgtctgcagtctccgtccctcttatttgaagacaggacagttgttgctggcatcttgtgcctcagagggtgtgtgtgtgggggggcatatccaggtgcactccctccttgcacagctccagcccccacgtccactcattccatgggccctggtggcca

SEQ ID NO: 148012 - DNA, 607 bp, Homo sapiens
tacatttctctatttaggacttctttaatttatcttaccaatgttttgcagttcttagggtaggcatcttccataccttttaaaatttttatttttcctatttgtttgttgctaattacagaaaaacagttcatttttgtatatcatggctcatggtcttaccaaatttacttacttgatttaatagttgaattatagattctcgagtattttatatgtagaaaattgtgttgtgaataaacaacatttaaattcttttttttggtccaatctctacgcatttttttcccttgccctatgcatttgctgaaggcttcagcacaatgttaacaacaggtagtaaaagcagatatccttgccttattgctgatcttagcggawaaacattcagtttttcaacatcatgcgtgatgtcagctttaagtttttgtcaatgctctttttctggattgagacagttttattcaattcttctgttcctattttctgaaatatttactttgaatgtgtgttgaatttttgtcaaaggccttttttcttctgaatttattgagatgctaggggtatggtgtttctcttttgttctgttgatatggtaaattatggg

SEQ ID NO: 148013 - DNA, 568 bp, Homo sapiens
aatacttttgtttgcaatttttccgctacgctggctttgctattgaagttttgcagagagaattggctttaaagactcaatcctttattgrtccaaattaatctgctggattcgtttaattccttgaaaaacactcaaaatattttttagccttctgtaaagaactaacccaaaatttcacttacattctgttttgttgttattatgtggtcacaggaaataaatggaggagtttatatggtttaaaaagacaccctggtcacacattggtttactctctccttgctgagatcagacgccaggcactggagaaactgcattttgaaggccgtgaacatatcttcatttttctaaaggatcagtgtagtcttacttttatttgagtttatttcagtattctaataggttgtctctatggatttcaatctcaaagacagacttgtaaaatttaatccctgacttctcttcccaagtttctagaataacaacattaagtatcaggtggatgaaaaatccaaatacagtgatcatcaggctcatattccaagctgccaaaattattccccaa

SEQ ID NO: 148014 - DNA, 488 bp, Homo sapiens
gagctgaaaatgttaggtatatggtgctatgggagtccttgttggtgggtcaagaaaacactggaaaaactaatatgtcagccgagagttaagcctgagtaggtgatagtcaggtaaaaggtaaggaacagaaagccttctggcctgggaagcactatatamaaatatgaggaagagcttgaccagattagataactgaaagttgttgagtgtggcaaaagtggtatattcttgtgggaaaaaatgacaaaaatggagatgggaccactctgaagagtcttgtagtttttgggcatggggcttatgcaaagggcaatggggatgaattagcagcttttcaacaggaatgtgggcaaaagcaagaaaataatttagactgtttgtaaactagatgagaggctatggtggcctaatcatgcagtatcagaagggaagaaaatgaatggaattgaatgatgttaagggagcacagaggttttggggactgc

SEQ ID NO: 148015 - DNA, 488 bp, Homo sapiens
gagctgaaaatgttaggtatatggtgctatgggagtccttgttggtgggtcaagaaaacactggaaaaactaatatgtcagccgagagttaagcctgagtaggtgatagtcaggtaaaaggtaaggaacagaaagccttctggcctgggaagcactatatacaaatatgaggaagagcttgaccagattagataactgaaagttgttgagtgtggsaaaagtggtatattcttgtgggaaaaaatgacaaaaatggagatgggaccactctgaagagtcttgtagtttttgggcatggggcttatgcaaagggcaatggggatgaattagcagcttttcaacaggaatgtgggcaaaagcaagaaaataatttagactgtttgtaaactagatgagaggctatggtggcctaatcatgcagtatcagaagggaagaaaatgaatggaattgaatgatgttaagggagcacagaggttttggggactgc

SEQ ID NO: 148016 - DNA, 488 bp, Homo sapiens
gagctgaaaatgttaggtatatggtgctatgggagtccttgttggtgggtcaagaaaacactggaaaaactaatatgtcagccgagagttaagcctgagtaggtgatagtcaggtaaaaggtaaggaacagaaagccttctggcctgggaagcactatatacaaatatgaggaagagcttgaccagattagataactgaaagttgttgagtgtggcaaaagtggtatattcttgtgggaaaaaatgacaaaaatggagatgggaccactctgaagagtcttgtagtttttgggcatggggcttatgcaaagggcaatggggatgaattagcagcttttcaacaggaatgtgggcaaaagcaagaaaataatttagactgtttgtaaactagatgagaggctatggtggcctaaycatgcagtatcagaagggaagaaaatgaatggaattgaatgatgttaagggagcacagaggttttggggactgc

SEQ ID NO: 148017 - DNA, 660 bp, Homo sapiens
gggcatctgccattgctgaggcctgagtaggtaaacaaagcggccgggaagctcagactgggcagatcccaccgcaattcagcaaggcctactgcctctatagactccacatctgtgggcagggcatagctgaaccaaaggcagcagaaacttctgcagatttaaatgtccctgtctgacagctctgaagagagtggtgattctcccagcatggcatttgagctctgagaacagamggactacctgctcaaatgggtccctaacccccatgtagcctaactgggagacacctcccagtaggagccaacagacacctcatacaggtgggtgcccctctgggacaaagcttccagaggaagattcagacagcaatatctgctgttctgcaatatttgctgttctgcagcctctgctggtggtacccaggcaaacagggtctggagtggacctccagtaaactccaacagacctgcagctaagggaatgtgttagaaggaaaactaacaaacaggaatagcatcaacatcaacaaaaaggacatctacaccaaaactccacctgtacgtcaccaacatcaaagatgaaaggtagataaaaccacaaagatggggagaaaccagaggagaaaagctgaaaagtccaaaaaccagagcacctatt

SEQ ID NO: 148018 - DNA, 500 bp, Homo sapiens
aaatttgtatgattttacaaattcgtaaagacaccactttcagataagatgcacaagggaagcaaatattccctctgctctccctcctttaatttgataaaagccaaagttatagccaagcatcttatttcctccattatgatgcaagtcttgattgcctgcttacagtagaaagggtttcattttcaagtaatgctttgcctactattctaggttcstttagtctgagttgacatttaaagagaaatctttgcataagtgaaacttcacgtacttaaaaatttgccacgagggtagatcttaagattaagtgctctaaccacaaaaagaaacaaacaaagggaatgagaggaaatattaggaggtgatgcgtaagtaagtttatggcattgatagtgatgatggttttaaaggtatatagttatctccaaacactacaagttatatacattaaatatctacaacttcttatatgtcaatcataaagcaatttttttaaa

SEQ ID NO: 148019 - DNA, 500 bp, Homo sapiens
aaatttgtatgattttacaaattcgtaaagacaccactttcagataagatgcacaagggaagcaaatattccctctgctctccctcctttaatttgataaaagccaaagttatagccaagcatcttatttcctccattatgatgcaagtcttgattgcctgcttacagtagaaagggtttcattttcaagtaatgctttgcctactattctaggttcctttagtctgagttgacatttaaagagaaatctttgcataagtgaaacttcacgtacttaaaaatttgccacgagggtagatcttaagattaagtgctctaaccacaaaaagaaacaaacaaagggaatgagaggaaatattaggaggtgatgcgtaagtaagtttatggcattgatagtgatgatggttttaarggtatatagttatctccaaacactacaagttatatacattaaatatctacaacttcttatatgtcaatcataaagcaatttttttaaa

SEQ ID NO: 148020 - DNA, 589 bp, Homo sapiens
aataagagcaaaactccatctcaaaaaaaaaaaaaagaaagaaagaaatctccatgagaggaccagaaatggcagcagacatacatttcttcaacaaattgctgtatgtttctcttattattttgagtmtggagtgtctcctgaagaaatacaaaggtaaaggtcgatcttatgttggaatatggccactttgtatatggaatggatattgaaaaatagatattgaaaataagctctgaaaaagggacggataactataaaaatacttaaacactgtatgtttattcaaacttcttgaagcaatttgtttttcaaattgggctaagtaatagcaacccttcatgatttttaaaatgattgattgttcttaggtgtgatctgaaccatgatttgaagttgtattctttttctatttcaaaatatgagatggcttaattatggaggaaatgtgacttaacatatctaaaaagtattcatttgtgtatatgcagatcaaaacatttctgcttctgtcatgtactttctgattaaatttacataagttacctaacatcttgactagttttctatctctgcaacagagataact

SEQ ID NO: 148021 - DNA, 589 bp, Homo sapiens
aataagagcaaaactccatctcaaaaaaaaaaaaaagaaagaaagaaatctccatgagaggaccagaaatggcagcagacatacatttcttcaacaaattgctgtatgtttctcttattattttgagtatggagtgtctcctgaagaaatacaaaggtaaaggtcgatcttatgttggaatatggccactttgtatatggaatggatattgaaaaatagatattgaaaataagctctgaaaaagggacggataactataaaaatacttaaacactgtatgtttattcaaacttcttgaagcaatttgtttttcaaattgggctaagtaatagcaacccttcatgatttttaaaatgattgattgttcttaggtgtgatctgaaccatgatttgaagttgtattctttttctatttcaaaatatgagatggctyaattatggaggaaatgtgacttaacatatctaaaaagtattcatttgtgtatatgcagatcaaaacatttctgcttctgtcatgtactttctgattaaatttacataagttacctaacatcttgactagttttctatctctgcaacagagataact

SEQ ID NO: 148022 - DNA, 450 bp, Homo sapiens
taaaaagtgtgtttagttctcatgatcatcagagttgggaatcaggatattttaaagggaaaatttaataagagagacattgaaaattcargagaatgctgacactgtaacttttcaaatttggtctaacaaatgctttccttaaaactgcaacgctgagtgctttcctcataagcagtgtggccatacagagacaagacaagagcgtagagtaaggattcaacgaagagtttgagggtaaatgagctcagttatagtatggggttactgaggacacaaagaacattgctggggaaaaaaggattaattagcagaaggaacaaagagacaaatgaaataaggggggggccacagaaggattattgggtatggctaatattttgttcaggggattagctggctccttaactttgtcttggatattgtcagatggcattcagctttcattcc

SEQ ID NO: 148023 - DNA, 450 bp, Homo sapiens
taaaaagtgtgtttagttctcatgatcatcagagttgggaatcaggatattttaaagggaaaatttaataagagagacattgaaaattcaggagaatgctgacactgtaacttttcaaatttggtctaacaaatgctttccttaaaactgcaacgctgagtgctttcctcataagcagtgtggccatacagagacaagacaagagcgtagagtaaggattcaaygaagagtttgagggtaaatgagctcagttatagtatggggttactgaggacacaaagaacattgctggggaaaaaaggattaattagcagaaggaacaaagagacaaatgaaataaggggggggccacagaaggattattgggtatggctaatattttgttcaggggattagctggctccttaactttgtcttggatattgtcagatggcattcagctttcattcc

SEQ ID NO: 148024 - DNA, 600 bp, Homo sapiens
tccaaagacaaagctcctgaaattacagagcttgggaatgctggattctgtgatgttcaaaaatataattgtatgatggtgagagtttttggcaaaggcttcaaagaattaccttcaattaaatgtgaagttactaagctacaggtatgttaattatagagttcagaaacaatagagtgtatgagatactcagattaatattatcttggattaattcggtctatcaattagcaacataaatccaaacgatattatatctagagagctgaacaggaaaatgattaagttacataatgttgaygcttctttgttaactttattaaaatatcttataaactttttattgaagtatcggctcactgttttcacttatattaaaaagctaaaagaatatcaagcttgatttatgtaagcctctgtatttcttgaaatgtaaaaacataaagaagagacattgtttttagccaagacatcttgcatcaactggatatgaacatttcccttttacaaatcaaaaaatgaggactaattgcatttattctttatattttccttactatggattttagacagaaaagactcacctttaaaaaatagtat

SEQ ID NO: 148025 - DNA, 587 bp, Homo sapiens
tcacagggaatgcagttatgtggactgatattttccttgcctttcttttttcccttttattcgtggtttctcctctttgctatttgtttttcttgctgcctcatatgtgggttgataaatgtttaataccctttgtggtgtgaaataatctagggtaaatgacaaaaaataaataactaaacatcktttaatgtaattgttacaacagtttatgatcaagtacccccattttgtagataagaacatgagtctcagggaggttagtagagcttgaacatgggggatcttgatttcgagaacaaaatgaagcctctctaaaacgcatccgcacttcttcccttgaagttgccttttggtcttgagaacctatgattctgcttcccccgtcagagggcaggcggggtgggtgtaggacggcagcagagggactcccaggcctctgtcagtagcacaatcacctctgagccttctacacagaaagtccattcaaattccacctcccatttctcctttcacagaagggcctacttgtctctccatcagcaatcatagttctttgttaggttaatgaagtgtggcagcagcat

SEQ ID NO: 148026 - DNA, 587 bp, Homo sapiens
tcacagggaatgcagttatgtggactgatattttccttgcctttcttttttcccttttattcgtggtttctcctctttgctatttgtttttcttgctgcctcatatgtgggttgataaatgtttaataccctttgtggtgtgaaataatctagggtaaatgacaaaaaataaataactaaacatcttttaatgtaattgttacaacagtttatgatcaagtacccccattttgtagataagaacatgagtctcagggaggttagtagagcttgaacatgggggatcttgatttcragaacaaaatgaagcctctctaaaacgcatccgcacttcttcccttgaagttgccttttggtcttgagaacctatgattctgcttcccccgtcagagggcaggcggggtgggtgtaggacggcagcagagggactcccaggcctctgtcagtagcacaatcacctctgagccttctacacagaaagtccattcaaattccacctcccatttctcctttcacagaagggcctacttgtctctccatcagcaatcatagttctttgttaggttaatgaagtgtggcagcagcat

SEQ ID NO: 148027 - DNA, 538 bp, Homo sapiens
tggtcctggtcacatacctgtcaccaggcacctctgcaaatgtggctgtgatccaggtgagctaagatttggagacagcccagtctccagggcagccccrgcagagccacccctgtggacccaggttcctcatttgcagcacaggccaccattggccccttaccccaccctgcacatgggcctccactaggaggagctcagagagggcaggcaggcagatgatgcagaaagggaactaaggaactcccccagaaagaacagcaggtgcaacagtggaaaaatagacaaaatgaggtggaagggagccgagaaggacaatgcccattgaccaggtgccagctgtatgtcaggcactgtggtgcgtgctttaccatctgtattagaccgctatcacactgccataaagaactgcctgagactgcctcacagttccacatggctggggaggcctcaagaaacttacaatcgtggcagaaggtgaaggggaagcaaggcacgtcttaccatagtggagcaggagagagagagagagagaaga

SEQ ID NO: 148028 - DNA, 497 bp, Homo sapiens
acccagttctaaatccacttcccgagttttaggtatttgttagagcagcacccgaattctcagtaccaaaatttgtattagtcagagtttgccagagaaacagaacccttgaacaacacaggtttgaactggacaggtccacttatacagagattttttaaaataamagtttcaccaagtgtgcctgtttctcctgcctccccaggaggacagagagagccttgacaagtccagtattggcagggtaggctgtcaggctggagactcaaactaagagttgcaattcaagtcaaaaggtggtttggtggtagaattccctcttcttctagggatgtgagtctttttctattaaggacttcaaatgattggatgaggctcacctatattatggaaggtaatctgctttattgaagatcaggaaattattgtctcactctttaaatggacagatgcaaagcctggaatgcacagaagacttggatgtctattggggccta

SEQ ID NO: 148029 - DNA, 500 bp, Homo sapiens
ggctatgaattcctaacactggtaggattataaggaaaaggacaagattaaagtaaacaatacattataagcatggtggctagcacatggctagtcttctcaatgaatattttttagaaaatataaaaaggatgaatatcggatatcttagtaactcctttagctttaagcacacatctctacacacagccacatacaaacgtatyggctacacattggactccttttttttttttttttttgagacagggtcttgctctgttgctgaggctggaatgcaatggcacaaacatggctcgctgcagccatgacctcccgggctcctgattctcccacttcagtctcctgagtagctgtgatgacaggtgcatgccaccacacctggctagttttttaattttttgtagagatagggtcttgccatgttgcccaggctgcacatttaactacttttactttttccttcttaacttcttgacatatggtagagaacacaacct

SEQ ID NO: 148030 - DNA, 311 bp, Homo sapiens
cgaataacgcattcctgccctattaccctgtttacacattctctactgttttagaagagggggagaaacttctcatttcttcaaagcctaaaaatgcagatgggtggttggttatccatgagggattgagggggaggcctygagggacaaggagcaggacacaggatgtggtggcactgccattacccagaaaccaagttggcccacgagtgggtccgctgaggagtgccccctcactgccctgatcagtgcctgtgtttcagagcccttgaatataggtcctgtttggcacttctgaattggtagagaaa

SEQ ID NO: 148031 - DNA, 532 bp, Homo sapiens
taacagatatggggattatcttttgcacataacaggttcttaataaatgatgaagtatttgaaatgattgagtgaaaatatctgaaataattataaatgataacagcaatttaaggcactgtaaggtaggygttctggggataagagccaaagggttgatgtagttcacaatgcagggctcaggctgatatttaaggaatatataaatttaagcctgtcattctcaactctggttgcacattacaatagtgagtgcccagatcccaccataagaaaatcttatttaattggtctgaggtgaagcccaggcatttatgtggcatttatgtggtataaaagctacagaggtgattctaatgttcagtcaaggtgaggatctctggtataaaatggtcagtgaggacagagaagaaattccaggaagagttagaggaagagggatggtaaagggggatgatttgtgtataggaccttgaaaggatgtatagtggttcaaatgggagctgtactgaagctagtctagtttaatgtt

SEQ ID NO: 148032 - DNA, 435 bp, Homo sapiens
cagttggggacaggcacagctgggcctctctacttctgtgcactgtagtctctccaaatgatgtctctaggatggtaacttcagggcatatggatttcttcatgatacctcagggttcttaaagtatgcatcccaagagaaaaaagatgagggaaaatgttgacttttttatgaccaagtttttgaagtcacaaaacatcaagtccctctttgycatagcctcacccagactcagacgaaagaactctatttttttctcctatggttcaatctattttataattattcatattatttatgtattcatctattttataattttttctatgggcttcactggcctcaaggttataaatgtgcatcttccctagaagtccactagcccaaatgttagaagtatgattatcccaccatgaaattagcaattgtctgctc

SEQ ID NO: 148033 - DNA, 419 bp, Homo sapiens
cgatggatctgggtctgaaccaatatttgattcaactacatttcagcatgataaaatgaatgtggagtgccccgggtgtttgtagtactagggggatatgaaatgattaatgcagcctgctaactataccaatttattattytagtcaggcaaaagagctatatgacttggtttcaaaacaaattgattatttagggttacctgagactgttttaagtatttgtaaagagagtaatagtagtgaaaactcacgtgcatattgtaaactgattaaccatgtatctcatttcacgactgattaaagctgtgtctacaggcgtgtctgttgagaaatttcaaaaaacatttccagctatcagtgctatccttctaaatggcagtactattggcagagataagaaaaattggttctttgtacc

SEQ ID NO: 148034 - DNA, 621 bp, Homo sapiens
ggtcatgcatttctcttctcctagctccgatagggagtttaagaaagctattgatccacaccaaaaggaaaagttctccaaggttggtggttcttatctcccccatggcctgccctcatgtcagctctcatccctcytaatctagatatttcaatgagtacctaattggttttgccaaaatatatttcattactttcagtcacaattcattattctcttaagaagatcagtaatattttattccatttggtcccatctttgctatatttagccatatttaatttaggtatgtggttttcatttagatatgtggtttattaatcttgttccctggtgtcagacacagttaagttccttaatagatacaaccagcctgtgaaaaaacaggcatatggatgttaagtaaatttcatcaagatcacatagctaataagtgagaccttgttagactttgctttccacagagtcacagaaagtgattaatttctaaaagatataatattcttattcttatgtttcagatattttttgttgatgtgacagaatttttagttttttagaataaaagtgcaaaaaaatccaagatatcatcatcatcaccatcaacaatgttataggatt

SEQ ID NO: 148035 - DNA, 621 bp, Homo sapiens
ggtcatgcatttctcttctcctagctccgatagggagtttaagaaagctattgatccacaccaaaaggaaaagttctccaaggttggtggttcttatctcccccatggcctgccctcatgtcagctctcatccctcctaatctagatatttcaatgagtacctaattggttttgccaaaatatatttcattactttcagtcacaattcattattctcttaagaagatcagtaatattttattccatttsgtcccatctttgctatatttagccatatttaatttaggtatgtggttttcatttagatatgtggtttattaatcttgttccctggtgtcagacacagttaagttccttaatagatacaaccagcctgtgaaaaaacaggcatatggatgttaagtaaatttcatcaagatcacatagctaataagtgagaccttgttagactttgctttccacagagtcacagaaagtgattaatttctaaaagatataatattcttattcttatgtttcagatattttttgttgatgtgacagaatttttagttttttagaataaaagtgcaaaaaaatccaagatatcatcatcatcaccatcaacaatgttataggatt

SEQ ID NO: 148036 - DNA, 160 bp, Homo sapiens
atattttagatcaactagcaarcctcaaaacaatttcactttaacattcattttataagtatttcaggataatttttcatatagaaaagcaaagcttcactgaaacatagtcttttggtgagtcataccttaaattttaggtttatgtaaaaggggtata

SEQ ID NO: 148037 - DNA, 500 bp, Homo sapiens
agaactgtcttgttaattatatagaatccagcaaccactaggttctgagtatttcacagacagcaggtaacctgtcctagaggactaaaagtagatgctcattttctttggcctgtctaggcagctgcagcataaccatacagtggaatatagcagtgggaaaaaagaagtcaactaaggtttaggaaacctgatttctaattctggctctattgctttttaggttttgactctcaggtaatgatattctctgaccttcagtattcttcccttcatagaatgtgtgctacagctgatagtttcttagacatttgcctaatcaatggcccatttctaygtaacctaaattaaaggtttaagatattttgcaaattgtaccaaaatgtttataaaaagtcttagtaacttatttttatgcagcattctgaaacaacaagatgaaaaatcagtcaatcactgtaagacagggtagctcatttaaaattgtgattgtcaaaaat

SEQ ID NO: 148038 - DNA, 426 bp, Homo sapiens
taaatggaatgaatgaatgatgtgattgtgatatctgaatatgctagagaggtaatgcaaaaagaaggcrcgtctggataagctattacaagagtaaggaagacgagagaagacaggaataaaaagaagaaaatgagagagaccttatctctacgaaaaactgaaaaattagccgcatgtagcggcacacaactgtgatcctagctatgtgggaagctaaggctggaggattacttgagcccaggaatttgaggctgcagtgagctatgatggccccattgtactctagcttgggttatagaggaagactctgtctagttttttctctgtctctaaaaaaacaaacaaaaataatacaattataaaatagagcaactacgcagtcagtctgaggaaatttgccactactttgtgtcccagtttagc

SEQ ID NO: 148039 - DNA, 426 bp, Homo sapiens
taaatggaatgaatgaatgatgtgattgtgatatctgaatatgctagagaggtaatgcaaaaagaaggcgcgtctggataagctattacaagagtaaggaagacgagagaagacaggaataaaaagaagaaaatgagagagaccttatctctacgaaaaactgaaaaattagccgcatgtagcggcacacaactgtgatcctagctatgtgggaagctaaggctggaggattacttgagcccaggaatttgaggctgcagtgagctatgatggccccattgtactctagcttgggttatagaggaagactctgtctagttttttctctstctctaaaaaaacaaacaaaaataatacaattataaaatagagcaactacgcagtcagtctgaggaaatttgccactactttgtgtcccagtttagc

SEQ ID NO: 148040 - DNA, 364 bp, Homo sapiens
ataaagaagatgaaaagaaaatctatatgatttcctctaaccttctttttctctttagcttccagaacactggaaatgggtgattcaatacagggcagaggccaaaggaaatcctaaaaaagcggatctgtaccactcctagagagcagccagtcgagactgcaacagagaacagagggctgccagaagggyttctccaggaatgctctttattaactttactctatttttttaagtatgcatatttgctagtatgataaaagtatattccattaaaaataaagaatattcaatgtttgagtgtcactcaagtggagagaaacagacctagcttttaaaaaacaaaagcttatttcttcttgtc

SEQ ID NO: 148041 - DNA, 364 bp, Homo sapiens
ataaagaagatgaaaagaaaatctatatgatttcctctaaccttctttttctctttagcttccagaacactggaaatgggtgattcaatacagggcagaggccaaaggaaatcctaaaaaagcggatctgtaccactcctagagagcagccagtcgagactgcaacagagaacagagggctgccagaagggtttctccaggaatgctctttattaactttactctatttttttaagtatgcatatttgctagtatgataaaagtatattccattaaaaataaagaatattcaatgtttgagtgtcaytcaagtggagagaaacagacctagcttttaaaaaacaaaagcttatttcttcttgtc

SEQ ID NO: 148042 - DNA, 336 bp, Homo sapiens
acacacttctgactgactgactgtaaatctaarggtttccataaccctctcagttttgataatttattacactgactcctagaacttcctgaaagttctatacttataattctagttttatcttaatggacctagatccagaatagccaaatgaggagacgcaaagggcaagatctgggggtagggaatggatccttcgtgccctcacctcatggaatcagagtgtgtcactgtctcagcacatgaatccattcaccaaccaggaagatccactgagcctctgtgtccagaagtttttactagggtttcatcacatgggaatgatttattaaatca

SEQ ID NO: 148043 - DNA, 548 bp, Homo sapiens
agggtgggagaaggttgaaagaccttgcttctaaggccctttcaatckacttccgttgaaagcactcagcatgccaaggtgccatagtttggggtatcatgttctgaccccagcaacggctcagactactgcacaggaaacaggtacagagagggaagtggattgcaggggtttcagttggaaagacgtgacagtggttaaggagaggaaaaggggggcctggactcttccctgaaagggctgtgaattgggtgtagctcaatgtcacttacagaaagagccctcatggtagcattctgtgtgacgtcaagccccgcatcctgtagaccagtgagtgggtccacaggaagtccctgaggtgttctgagagcaatacatttacaaaaccttggggcaaagccagaaggacagtcgggggctataggaatggataagacttgtggacatgcttaggcacaagagctttttagaggattaaatgagaagaagcatattaactcttttgtctaagacacagaatatttttaaaagctcttcaaatactggct

SEQ ID NO: 148044 - DNA, 548 bp, Homo sapiens
agggtgggagaaggttgaaagaccttgcttctaaggccctttcaatctacttccgttgaaagcactcagcatgccaaggtgccatagtttggggtatcatgttctgaccccagcaacggctcagactactgcacaggaaacaggtacagagagggaagtggattgcaggggtttcagttggaaagacgtgacagtggttaaggagaggaaaaggggggcctggactcttccctgaaagggctgtgaattgggtgtagctcaatgtcacttacagaaagagccctcatggtagcattctgtgtgacgtcaagccccgcatcctgtagaccagtgagtgggtccacaggaagtccctgaggtgttctgagagcaatacatttacaaaaccttggggcaaarccagaaggacagtcgggggctataggaatggataagacttgtggacatgcttaggcacaagagctttttagaggattaaatgagaagaagcatattaactcttttgtctaagacacagaatatttttaaaagctcttcaaatactggct

SEQ ID NO: 148045 - DNA, 589 bp, Homo sapiens
tgcagtagtgaatgaaacaaaatctctgtcttcaggaagcttatatttgagaggaaatggcaaaagatagataaacaaatacatttactagttagaggcagggagcaaaaagagccataaaaatataagacaatgtaagtgtgcttagatagaatggtctkcaagtggtatttgaacagatatctaagtgaggtgagtgagggggccatgcacagatctgggggaagaatgttttaggcaaagagaacagcaagagtagagatcctgagatgggatgtgcttggtgggttcaagaggtagtagattctttttcttctcattctgttccttcagggcagcttgacacatgacatctgtggacattccaatcctcagtcctgaagctgtatcagtcattctttgagagatgtattccatattcattccttcatctgcacatctcccaatctgtaagcagagtgttcacatcatttagagagataagattcagtcacagaactaatgtgtccctaggcccaatggtggcccccagcccctggacccctagatttttagatctcacacactactcagagtacctttcaatgca

SEQ ID NO: 148046 - DNA, 490 bp, Homo sapiens
cctggccttaaaaaaaaattcagcaccttcctctacaaacaaaatcacagctatcacgtataatacatgttattttttagctgagcctgcaatttgtaaataagcccattgaaaatatgaagaaaaatgcagtatttgaagcagcttggaaaatgatactgccagggttgctctccaatttaaacccatttgggtgactaagcagcataattgaggaggtggtcygttgctttttccaaacccagcaaattcctctccccacagtcatgatggcagaggtttttctcaacatggagaaatgacagtagaaggaattgatccctgggcataaagggtatgggggtcagggaagaagcagcagcactaacactctccaagggacacgctgcgccagacactgcatgaagaccttgaatacacattaggtgatgctcacagcaatagctctcaacctccgtgattatgcctcctggggcaagggcaacgcctg

SEQ ID NO: 148047 - DNA, 490 bp, Homo sapiens
cctggccttaaaaaaaaattcagcaccttcctctacaaacaaaatcacagctatcacgtataatacatgttattttttagctgagcctgcaatttgtaaataagcccattgaaaatatgaagaaaaatgcagtatttgaagcagcttggaaaatgatactgccagggttgctctccaatttaaacccatttgggtgactaagcagcataattgaggaggtggtccgttgctttttccaaacccagcaaattcctctccccacagtcatgatggcagaggtttttctcaacatggagaaatgacagtagaaggaattgatccctgggcataaagggtatgggggtcagggaagaagcagcarcactaacactctccaagggacacgctgcgccagacactgcatgaagaccttgaatacacattaggtgatgctcacagcaatagctctcaacctccgtgattatgcctcctggggcaagggcaacgcctg

SEQ ID NO: 148048 - DNA, 541 bp, Homo sapiens
gagctggaaaacataatgactgaattcaaaaattcactggaaggattaagtcaatcttgacgcagaagaacaaaattagagaatttataatatcaggcttcaagacttattctaaagctacaacactcaagacagtgtgcaagtgtataaaactgaactaggaaacaaaataaaatatccaaaaatagacctatatatgagacagtcaccttattcataacaaagaattcactgcaactaagcaagggaaaggatgatcttaataaatagtgctggaccaatcgggcccccaaatgaaaaaaaattaacattgacrtctaccttgcactatacacgaacattaatctaggatgtaacatagacataaacataaaagtcatatgaaagataaagcaataacactgctagaagaaaacataaaagaacaattttattaacccagattaggctaagatttctcaaacagaaacaaaaaagcactaaatataaaggcaaattataaatgctaaacacattaatacatagcttcattcaattaaaa

SEQ ID NO: 148049 - DNA, 541 bp, Homo sapiens
gagctggaaaacataatgactgaattcaaaaattcactggaaggattaagtcaatcttgacgcagaagaacaaaattagagaatttataatatcaggcttcaagacttattctaaagctacaacactcaagacagtgtgcaagtgtataaaactgaactaggaaacaaaataaaatatccaaaaatagacctatatatgagacagtcaccttattcataacaaagaattcactgcaactaagcaagggaaaggatgatcttaataaatagtgctggaccaatcgggcccccaaatgaaaaaaaattaacattgacatctaccttgcactatacacgaacattaatctaggatgtaacatagacataaayataaaagtcatatgaaagataaagcaataacactgctagaagaaaacataaaagaacaattttattaacccagattaggctaagatttctcaaacagaaacaaaaaagcactaaatataaaggcaaattataaatgctaaacacattaatacatagcttcattcaattaaaa

SEQ ID NO: 148050 - DNA, 541 bp, Homo sapiens
gagctggaaaacataatgactgaattcaaaaattcactggaaggattaagtcaatcttgacgcagaagaacaaaattagagaatttataatatcaggcttcaagacttattctaaagctacaacactcaagacagtgtgcaagtgtataaaactgaactaggaaacaaaataaaatatccaaaaatagacctatatatgagacagtcaccttattcataacaaagaattcactgcaactaagcaagggaaaggatgatcttaataaatagtgctggaccaatcgggcccccaaatgaaaaaaaattaacattgacatctaccttgcactatacacgaacattaatctaggatgtaacatagacataaacataaaagtcatatgaaagataaagcaataacactgctagaagaaaacataaaagaacaattttattaacccagattaggcwaagatttctcaaacagaaacaaaaaagcactaaatataaaggcaaattataaatgctaaacacattaatacatagcttcattcaattaaaa

SEQ ID NO: 148051 - DNA, 534 bp, Homo sapiens
ggatcttggactgttttctttgacatcttaggggaaagggagcacaatggctggttccatactcatggctgagaarcctgaaagcctgcgaagatgattggctaaccatctgattgactgaggggagatggctatctaggaaacaagcttcacttcagagatttctgggcaaataatgtcagaatatattccctttagatctatgtagcaaagagaatttacctggagctattttaaagggactttgtctaagacagttagctgatgaagcaccagaagagaacatctgtgttgggtctattgttgcaaaccagaaattgagaacaaagagctaagaccccagatggagaatagaagtgttaagaaatctacagacgaattatctatgttaagggagagtctccaaaaacctcacgaattcaaccctagtagaattgagctccaaacatcttcattgtctattaaaaaagcagaaacatattaatgtcaataaaataaatcatttcctgatttatctcctttctgttcctccac

SEQ ID NO: 148052 - DNA, 460 bp, Homo sapiens
gtaaaattaacctttctgagtctaaatttattcatcgattaagtgaatactagaattacactgtcataaagttattytgaggaataaatgatagaaagtttgtaaatgcatgccaaagttcaaggtactaaataaatactaagcactaataaatatttaagcactgcataaatctttactgccattattataaacttttatttctttaattttctaattagagttaaatcaagcaagtatgcagcgataaagtgaccaaatacttatcaggctaaagttatgaattgtgctaagcatgttttgaatggtttagaatttttttcatacaagtaaagcatatttctaataacattttaagtgcaagagacgtagattaatttatttaataagatttttagcatcttttatatactaggcatagtgtgaaatactgaggataaaatagtcataaaaatagttc

SEQ ID NO: 148053 - DNA, 563 bp, Homo sapiens
atgaagtacttattttttggatactacatccctgcatgtaatagtctagttgtgaacacattaatgattctaatgattctaatctgctgtgtttcaattaattcaatgtttatcagttttcctctaacaatgcaaggtagaatcaaagaatcaatgatcagggcaattaccacttcattataaaatttcaggagtcgttaataatgatgttcagcagttttgcattttctagctttttaaaattattttttccataaaccatgagaggaaaattattcctcrctattctaaaaatacagaaccaagtgtaattaaataagctaaatgtttttgtctgataaatgaatgctcactcacataaaaattataaatttcagctaactgtttaaagattcctctcgtacctgatatctgactttaggctagcactttaattttgaccatagcgcttctgtttggcattaaaatcttccaaaaatagacagataaagcaatgaactctttatgaattaaactaatatatcatgcttagaattgtacttacagtactaaaatttgaaact

SEQ ID NO: 148054 - DNA, 585 bp, Homo sapiens
ttaatgatttaaaaggagaatagggtgggccacttttgagatttatgcttactgctgatagtattaacttcttccatggtcaaattatctagaaaaagaaaccagtgaattctagctccacttgcctttcaagaagtgtgtttttgttgttgttgttgttgagtcatcaagtttctcaattttcatctaccattatatttttttaacaatcagaattctatratgaaaataattattatagttttcagttcaaccttattgggagctaatatattattttgaaaaataatctcttgattagtcatatatgaaaagaagtattatttagcttgaaatctaagcttctgcttctggctagaataaactcaccattttcttttccacaagaaacttgtaaaatagacaaaatatataacaaatatttttagacatttggtactaggcagtacaaatatgtaataaatgaaagaagggtaacaatcaagaaaacccttgagatgacttcaactttctgcctagaggcaatttcagcattgtgatatacacacacagcacaggcagttttgtccagttgtggagacagag

SEQ ID NO: 148055 - DNA, 646 bp, Homo sapiens
ccttaattctgtcatgtgtacccctctaagagaggttcctatggagctgacacacatacacaggaaagcaaatgatgtgaagatggaggcagatatcagagtgatgaagccacaagccaagtaatgccaggcagtgccaagcagctacccaaaagttggaagaaacaaagaaaagaacctagatactctggaggaaatgtaatgctgctgagacattgatttcagatttctggcttttataacttgggagaatacatttctgtgggtttttttcttgttgttgctttttgtttgtttgtttgtttgtttcaggcagagtcttactttgttacccaggctggagtgcagtggcatgatcttggctcactgcaacctccgccttcctgggttgaagcgattgttttgcctcagcctcccaagtagctgggactacgggcgcctgccaccacacccggctaatttttgtattttttgtagaaatggggttttatcatgttgcccagcctggtctcgaactccwgagcttaggttatctgccctcctcagcctcctatagtgctgggaatacaggcgtgagccacagcttctggccatttctgtggttttaagccgcctggtttgtggtaatttgtgatagcagtcatag

SEQ ID NO: 148056 - DNA, 647 bp, Homo sapiens
tcaacccctaaaagatttattgtaattcccccactctctggccgcaggatcagtgaaggaattacaataaatcttttaggggtgatgtacatgttaattagcagaaaacttatcttatagtctaagataagtattgatctggtttgtatcactgtgggtaattttctatttttctccaattttttataaatggaatcttacagtgtctacacattttttcaaaaggagagtcaggtttctttcacttgtatatttactttgaaatttacccatatcattaaatttattgrtaattcctgttttactacggtgtcatattccagtatacaagtacaccacaatatgtttattatttacatgttggtagatttcaactaacaatgtcctggtaaactaagtctcctgaggggatacggaggataatctgatttataatatttgctgattttcatgttgtaagtgttcacaccgtggctgatttcaactgtttggcaaatttcctgactgcttagctcctgcaagctggtaggagctgcctccatcacaccattggatgtccaaatgcagcccatttgcttaagaggaaagtttaccccaattctagctccagtatgaccccagttttactcaagttaaacagcaggtca

SEQ ID NO: 148057 - DNA, 647 bp, Homo sapiens
tcaacccctaaaagatttattgtaattcccccactctctggccgcaggatcagtgaaggaattacaataaatcttttaggggtgatgtacatgttaattagcagaaaacttatcttatagtctaagataagtattgatctggtttgtatcactgtgggtaattttctatttttctccaattttttataaatggaatcttacagtgtctacacattttttcaaaaggagagtcaggtttctttcacttgtatatttactttgaaatttacccatatcattaaatttattggtaattcctgttttactacggtgtcatattccagtatacaagtacaccacaatatgtttattatttacatgttggtagatttcaactarcaatgtcctggtaaactaagtctcctgaggggatacggaggataatctgatttataatatttgctgattttcatgttgtaagtgttcacaccgtggctgatttcaactgtttggcaaatttcctgactgcttagctcctgcaagctggtaggagctgcctccatcacaccattggatgtccaaatgcagcccatttgcttaagaggaaagtttaccccaattctagctccagtatgaccccagttttactcaagttaaacagcaggtca

SEQ ID NO: 148058 - DNA, 570 bp, Homo sapiens
acactacaaatattctgtcactggactttgaagtaaaagtgaaatcttagtcctagaccagagagaattgatgatgaattaatagtaaaaggataataagttgggaaaatacaaaatgcacaaagaaagtcaaaggcaaatgtgtcaaacaaaattctataggagttgaaaaaaggaaaaggaataaatatcctaaaaccctgaggttgcagtggagaaatgtgatgaacaacagcaacataggcaacaacgctctgagatggtaggccaggatggtaataagagtaggaaagcaaatctctagatgtattttatgatttmgattaagcaaataacttcctcccctcatagtattgttaggtatttatatactgaaataaatgtctgattggtttaagacaccaagataatgaagctttacagaagtttcagtctaaatcagtaatttggactttgttgaaagaaagaataatttgaaacagctatttattttttcttattttgtggcagtggtgatttaatatggaaatagaagaaaaaaacagaagaaatggataaattcctggacac

SEQ ID NO: 148059 - DNA, 561 bp, Homo sapiens
ttttgctttttgaattcctgcctcatttcaaacacaaaaatagtcacaataattaatatttatatagaacatttactggtgacattgctttaatatacttttttttcttcatatgattgttttaacaacttactgatctatttcactgatgacaaaactgagactaaagttaaaaagggtcatgtgcaaggtcacataaccagtaaaataaagcagccaggattcaaatttctgttttctaaatrtacatcctttctctttttctctgcatcataactgaagggtctgtagtgatcattaaggtcaaacagctcattataatgatgaaaaaaaagaggttcagagaggtcaagtggcttgccaccaggaggcttgaggcatagcatgaacaccaactagttgccttcaaaccattaattgtaataattactggacttgcagcttagttgctatgtcctagctcctttgatctgaaaataaacatgaattagtatgatgacaatgtagctatttttttttctccccctgctgtttcttagtccatctcctctcacataactt

SEQ ID NO: 148060 - DNA, 561 bp, Homo sapiens
ttttgctttttgaattcctgcctcatttcaaacacaaaaatagtcacaataattaatatttatatagaacatttactggtgacattgctttaatatacttttttttcttcatatgattgttttaacaacttactgatctatttcactgatgacaaaactgagactaaagttaaaaagggtcatgtgcaaggtcacataaccagtaaaataaagcagccaggattcaaatttctgttttctaaatatacatcctttctctttttctctgcatcataactgaagggtctgtagtgatcattaaggtcaaacagctcattataatgatgaaaaaaaagaggttcagagaggtcaagtggcttgccaccaggaggcttgaggcatagcatgaacaccaactagttgccttcaaaccattaattgtaataattactggacttgcagcttagttgctatgtcctagctcctttgatctgaaaataaacatgaattagtatgatgacartgtagctatttttttttctccccctgctgtttcttagtccatctcctctcacataactt

SEQ ID NO: 148061 - DNA, 644 bp, Homo sapiens
ctttgtatgacttgcttattaacttagcataatgtcctctagttccatccatgttgttgtgtatgaccgaattttcttctttattaaggctgtatagtattctattgtgtatatctagcacattttctttaaccattcatctgttgatggacacttaggttgctttcataccttggctattgtgaataatgctgaaataaacataggagggaagatacttcttcaacataccaattttarttcttttgaatatatatccaggaatgagattgcctgatcatatggtagttctatttttagttttctgaggaaacgccatactaatttccaaaatgattgtactaatttacattcctgtcaaaagtgtacatgggttcccttttctccacattcttcccaacagttattatttattgttttgataatagccattgaaacaagtgtgaggagataactcattgttgcttaatttgcattgccttgataattaaaggtgctgggcatttttaaatatattttcatggccatttataactcttcttttgagaaatgtctgttcagattttttgcccattttaaaatttgtttatctatttttttgatgctgagatatttgaatttcttatatattttggatattagtc

SEQ ID NO: 148062 - DNA, 644 bp, Homo sapiens
ctttgtatgacttgcttattaacttagcataatgtcctctagttccatccatgttgttgtgtatgaccgaattttcttctttattaaggctgtatagtattctattgtgtatatctagcacattttctttaaccattcatctgttgatggacacttaggttgctttcataccttggctattgtgaataatgctgaaataaacataggagggaagatacttcttcaacataccaattttagttcttttgaatatatatccaggaatgagattgcctgatcatatggtagttctatttttagttttctgaggaaacgccatactaatttccaaaatgattgtactaatttacattcctgtcaaaagtgtacatgggttcccttttctccacattcttcccaacagttattatttattgttttgataatagccattgaaacaagtgtgaggagataactcattgttgcttaatttgcattgccttgataattaaaggtgctgggcatttttaaatatattttcatggccatttataactcttcttttgagaaatgtctgttcagattttttgcccattttaaaatttgtttayctatttttttgatgctgagatatttgaatttcttatatattttggatattagtc

SEQ ID NO: 148063 - DNA, 626 bp, Homo sapiens
gagaattattcactaacatgagaacagtgcaggaaagacctgcccccataattcaatcacctcccaccaggttcctttcacaacaggtgggaattcaaggcgagatttgggtggtgacatcgccaaaccatatcagcccagtacaaaattggaagaagcaactgttttatcagatgtacatatatcaatgaagggacgcaagaaacaggaaaaattaaggaaacgtgatacctctaaagaaaaacactaattctccagtaaatgagcccaaataaatrgaaatttatgaatcacctaaaaaaggattcaaagtaataatcttaaaaccagtgaggtaaaaaaagaatacagtcaggcaatgcaacataatcaagaaaacaattcgttatgtgaataattttttaaagaaatttttatcataaaaaagaaccaggcccgggcacggtgtctcacacctgtaatcccagaactttgggaggccgaggtggatggatcatgaggtcaggagttcgaggccagcctggcctatatggtgaaaccatgtctctactaaaaatacaaaaattagccaggtgtggtggcacatgcctgtggtcacaactacttggtaggctgaagcagaagaa

SEQ ID NO: 148064 - DNA, 626 bp, Homo sapiens
gagaattattcactaacatgagaacagtgcaggaaagacctgcccccataattcaatcacctcccaccaggttcctttcacaacaggtgggaattcaaggcgagatttgggtggtgacatcgccaaaccatatcagcccagtacaaaattggaagaagcaactgttttatcagatgtacatatatcaatgaagggacgcaagaaacaggaaaaattaaggaaacgtgatacctctaaagaaaaacactaattctccagtaaatgagcccaaataaatggaaatttatgaatcacctaaaaaaggattcaaagtaataatcttaaaaccagtgaggtaaaaaaagaatacagtcaggcaatgcaacataatcaagaaaacaattcgttatgtgaataattttttaaagamatttttatcataaaaaagaaccaggcccgggcacggtgtctcacacctgtaatcccagaactttgggaggccgaggtggatggatcatgaggtcaggagttcgaggccagcctggcctatatggtgaaaccatgtctctactaaaaatacaaaaattagccaggtgtggtggcacatgcctgtggtcacaactacttggtaggctgaagcagaagaa

SEQ ID NO: 148065 - DNA, 440 bp, Homo sapiens
tagatgctgggaattaaaaaatatgctaaatattcactaaacacaatagtaagtattatccattagttttcaggagatttcatcacatgtagtagaatgttaaatatgtcaatttacttcccatgttaaatatgaatggttctatctacaacatgaaaaatcttcattggtgtctatcctttacccagaaaataaaatatttatgccgaattgtatataaggtaattcataacctggccttctctacctttctttgcttgtctgccatcactcttacaaatttgtactccttaagtacattttctacttattatgtaatcacaacctatccatctctaaggtttcagaaactccatacraacctgagggcctcttgaagatatgggcctaatcttcataaaaagagcctaataaatagatgactgatataatatgaattc

SEQ ID NO: 148066 - DNA, 633 bp, Homo sapiens
taggtagtagcatttggttcaaagttgacacctactcatgggatcaaagactgacgagtgaccaataaatgctgcaaagttttaattgagttcccaaatatgagaatcttatgmctgggaaatcatagagaaaagaatcaggacattcagaagaagaatgggtacctaggagagtacttggcacatagtgaaggcttgaaactattagttgaacaaatgatgatgtgactgactacttgtgttgtatgcattctgaagagaaagaggtcagtaggacttggagtatccagaggacccttcttggagaaagtgggttgaaggtagggacataagaatggatgggctttagatcagaggatcagagagcaagaagagtggatggcatgaacaaaggaagggcatgaggcctgcagaggatgcctgattcttttgcctgcccagcacccttctgcctccttttggtggactcatatacactttactactttcaggcttggtgggactctcaatcaaggaatcctgtcttatctggaaaagaagtggatgggtgattccagctacactggtaagaagctccatccctaacatgtggatctcacatggagttatccagaggattatggtcaaaccaat

SEQ ID NO: 148067 - DNA, 633 bp, Homo sapiens
taggtagtagcatttggttcaaagttgacacctactcatgggatcaaagactgacgagtgaccaataaatgctgcaaagttttaattgagttcccaaatatgagaatcttatgcctgggaaatcatagagaaaagaatcaggacattcagaagaagaatgggtacctaggagagtacttggcacatagtgaaggctygaaactattagttgaacaaatgatgatgtgactgactacttgtgttgtatgcattctgaagagaaagaggtcagtaggacttggagtatccagaggacccttcttggagaaagtgggttgaaggtagggacataagaatggatgggctttagatcagaggatcagagagcaagaagagtggatggcatgaacaaaggaagggcatgaggcctgcagaggatgcctgattcttttgcctgcccagcacccttctgcctccttttggtggactcatatacactttactactttcaggcttggtgggactctcaatcaaggaatcctgtcttatctggaaaagaagtggatgggtgattccagctacactggtaagaagctccatccctaacatgtggatctcacatggagttatccagaggattatggtcaaaccaat

SEQ ID NO: 148068 - DNA, 633 bp, Homo sapiens
taggtagtagcatttggttcaaagttgacacctactcatgggatcaaagactgacgagtgaccaataaatgctgcaaagttttaattgagttcccaaatatgagaatcttatgcctgggaaatcatagagaaaagaatcaggacattcagaagaagaatgggtacctaggagagtacttggcacatagtgaaggcttgaaactattagttgaacaaatgatgatgtgactgactacttgtgttgtatgcattctgaagagaaagaggtcartaggacttggagtatccagaggacccttcttggagaaagtgggttgaaggtagggacataagaatggatgggctttagatcagaggatcagagagcaagaagagtggatggcatgaacaaaggaagggcatgaggcctgcagaggatgcctgattcttttgcctgcccagcacccttctgcctccttttggtggactcatatacactttactactttcaggcttggtgggactctcaatcaaggaatcctgtcttatctggaaaagaagtggatgggtgattccagctacactggtaagaagctccatccctaacatgtggatctcacatggagttatccagaggattatggtcaaaccaat

SEQ ID NO: 148069 - DNA, 633 bp, Homo sapiens
taggtagtagcatttggttcaaagttgacacctactcatgggatcaaagactgacgagtgaccaataaatgctgcaaagttttaattgagttcccaaatatgagaatcttatgcctgggaaatcatagagaaaagaatcaggacattcagaagaagaatgggtacctaggagagtacttggcacatagtgaaggcttgaaactattagttgaacaaatgatgatgtgactgactacttgtgttgtatgcattctgaagagaaagaggtcagtaggacttggagtatccagaggacmcttcttggagaaagtgggttgaaggtagggacataagaatggatgggctttagatcagaggatcagagagcaagaagagtggatggcatgaacaaaggaagggcatgaggcctgcagaggatgcctgattcttttgcctgcccagcacccttctgcctccttttggtggactcatatacactttactactttcaggcttggtgggactctcaatcaaggaatcctgtcttatctggaaaagaagtggatgggtgattccagctacactggtaagaagctccatccctaacatgtggatctcacatggagttatccagaggattatggtcaaaccaat

SEQ ID NO: 148070 - DNA, 523 bp, Homo sapiens
cagtggctgtcttgtgattttcatctggtttcatctacgtgtttctrtcccaacccaacaaaagtaaatattttcctttctttctcaagccccctttattgggtgaaactattattggggtgttgctctccattcttctttttttatcctctgctaacttttccactagcttcatctcttgcttcttactcgaaacacttcaaagttttcttctgatgagtgctaattggactatactcctcattttttctcatgcatcctggggagagtaacatttttctccccaagggaaaatgaaaacacgacagaagactgaagtagctattatgtaaacaagagaggaatcacagaacagacttcagtggcctttgtgcaaaaggaaagcggaagggagatgagcaattcaagtccagggcctggccacgtggactaccctttttcaaggatagcacggcatgagaaaaaaggagggcctgtctcagaggaagtgcatgtgggatggctgtgcatgtccttgttgtta

SEQ ID NO: 148071 - DNA, 523 bp, Homo sapiens
cagtggctgtcttgtgattttcatctggtttcatctacgtgtttctgtcccaacccaacaaaagtaaatattttcctttctttctcaagccccctttattgggtgaaactattattggggtgttkctctccattcttctttttttatcctctgctaacttttccactagcttcatctcttgcttcttactcgaaacacttcaaagttttcttctgatgagtgctaattggactatactcctcattttttctcatgcatcctggggagagtaacatttttctccccaagggaaaatgaaaacacgacagaagactgaagtagctattatgtaaacaagagaggaatcacagaacagacttcagtggcctttgtgcaaaaggaaagcggaagggagatgagcaattcaagtccagggcctggccacgtggactaccctttttcaaggatagcacggcatgagaaaaaaggagggcctgtctcagaggaagtgcatgtgggatggctgtgcatgtccttgttgtta

SEQ ID NO: 148072 - DNA, 574 bp, Homo sapiens
cagaatacaaagtactgtaacatacatctaatgtactgtaaatattgtctcttcttgtcaatataaagtccttgaaaatcatttaatgagtcaaaatacaaataattattacatttaaaagaattatcccaaacacatggttttgaataccttaaccaaaagaaagtccctagtttttatcccctagaagatgatattaagatgagattctagtcatgtctgttgccatatttagctttccaggtcattttgcctttccagtatttacacatggtttaatctatcattcccatccattcatgsaaaaatatgtgtcaaaccattaccataatcacttgcagtatgatttatattggccatggaaactattttacctgttattttgcaacatggagataggatcataactaatttctctcatgctgtagtaaaaggaaaatcatttaaaaagaggcaacaacactaagacttgagccctcttcttgcctctgtctgtggaagaaactcctggttgctgagagcaggaacagatggggccttgttggaaaatgcctagcaatgtggagcattattg

SEQ ID NO: 148073 - DNA, 574 bp, Homo sapiens
cagaatacaaagtactgtaacatacatctaatgtactgtaaatattgtctcttcttgtcaatataaagtccttgaaaatcatttaatgagtcaaaatacaaataattattacatttaaaagaattatcccaaacacatggttttgaataccttaaccaaaagaaagtccctagtttttatcccctagaagatgatattaagatgagattctagtcatgtctgttgccatatttagctttccaggtcattttgcctttccagtatttacacatggtttaatctatcattcccatccattcatggaaaaatatgtgtcaaaccattaccataatcacttgcagtatgatttatattggccatggaaastattttacctgttattttgcaacatggagataggatcataactaatttctctcatgctgtagtaaaaggaaaatcatttaaaaagaggcaacaacactaagacttgagccctcttcttgcctctgtctgtggaagaaactcctggttgctgagagcaggaacagatggggccttgttggaaaatgcctagcaatgtggagcattattg

SEQ ID NO: 148074 - DNA, 498 bp, Homo sapiens
tttgggaggccaaggtgggagcctcacttgaggtcaggagttcaagaccggcctggacaacaaagcaagaccccatctctacaaaaaaataaaaaaaattatctgggcatggtggtacacatctgtattcccagttactcaggaggctaaggcaaaaggatcccttgagccygggagtttgaggctacagtgtgctatgatcacactattgcactccatcctgggtgacagagcaacactctttctttaaaaaacaagatataacacatgttcaaagtttaatcaaatatgttttagacgttttccccctggacttagacattgataatatgagtgaaattttagccttgttcaaagattaatcaaattctaaagttgatggagtatgaagtgctctaaggaaccatcccacctgctcctcttgctaagaaggatctcgtggtttgttggagaaatgcttcatgtcccacagcatttgcctgctttgtttttggcctt

SEQ ID NO: 148075 - DNA, 370 bp, Homo sapiens
tgaagatacctgtaggtaactgcttaattcatttcctctctttgggcctccgttttcttacctgtacatggaaagggctagattaaataatctctgagttygcttttgtctgttgagtaaaacatgcttctttatgttgcatctctgtatcttcattgtaagcaccactaaggtagcaccagtctgtggaaaatgacactcaactgcatcatctgactgctctgtccagttacagaatgtccttccttgggtgctgatacggtttggctctgtgtcgccactcaaatctcgaattgtagttaacatcatttccacatgtcgtaggagggaccctgtgagaagtaattgcatcatgagggtgggtctttcg

SEQ ID NO: 148076 - DNA, 597 bp, Homo sapiens
gttgtctgtttactctgttgatagtttcttttggtatgcagaagctctttagtttagttaggtcccacttgtcaatttttgtttttgctgcaattgcatttgaggacttagtcataaattctttcccaaggctaatgtccagaatggtgtttcctagattttcttctaggacccttacagtttgtggttttacatataagtttttaatctaatttgagttaatttttgtatagagtgaaaggcaggggtccagtttcattcttctacatatagctagcmagctatcccagcacagtttgttgaatagaaggtcctttccatattgctcatttttgtcaactttatcaaagatcagatggctgtaggtgtgtggccttatttctgggttctcaattctgttccattggtctatgtgtctgtgaacaagttcttgaggtgcaagtggcaattacccttcccactagatgatctgtgaggtgccagcaagtctggaagcataggctgagccatggtccacttcaagcaaagggcagcctgcccctgagccatgatggtggtgccctccagcaacttgagttggcactcacattgcatgcc

SEQ ID NO: 148077 - DNA, 675 bp, Homo sapiens
cttggacactttgttgtatgtcccaaaatagaggaataggatgttttaaatttgatatctcccgaaatttttcacaaccttcatagttggccagcactatatgaaagagattattattaaagctttatgcattgtaacagttaaaatatttactgtgttaaaggcagaaaatccaggtttaagaggggagattgatttaacgactcrtttaagttcaaatttttcaaaagtagagtatggtccaggcacagtggctcatgcctgtaataccaacactttgggaggccaatgcaagaagactgcttgactccaggggttcaggaccagcctggtcaacatggtaaaacactgcctctacgaaaaatacaaaaattagcccagtgtggtggtgcacacttgttttcccagctgctcaggaggctgaggtgggaggattgcttgagcttaggaggtcggggttgcagtgagccacaatcatgccaccgcactctagcctgggtgacagagtgagaccctgtctcaaaaaaaaaaaaaaaaaaagaaaagaaaatggtagagcatgcttcagacatcatttaagactctgactccatttctctgcatttatcttggctttgccttttgtgtgatgctcatgtcctcaggttggctttcttcatgatgacaaggtggatg

SEQ ID NO: 148078 - DNA, 447 bp, Homo sapiens
gatagactattgaaccactgaacaaaaaatgcttagagagcccttcttccttagacataaaactcctgtctccgtaagtgaacctattttagtattagcttctgaatttacaaagacagatcacggttttgctagagtataaaacataaacaaatgggttgcctccaaactatataaacattttcaagatattcaagatataaatattcacattaaacttgtcatatttgggtatgtcttaccacatatacaattattaaaatgcaaaaaagggggaagaagttagagctacagaaargcaggagatttttatatatatgtggtcatcatacagagccattaaatttctagtgaaaccaaaaattcaagggtgattgaagaattgcatgcaatattatggaataaaaaatgacagtttttcagtctccaaaattgacaagatgctgc

SEQ ID NO: 148079 - DNA, 675 bp, Homo sapiens
cttggacactttgttgtatgtcccaaaatagaggaataggatgttttaaatttgatatctcccgaaatttttcacaaccttcatagttggccagcactatatgaaagagattattattaaagctttatgcattgtaacagttaaaatatttactgtgttaaaggcagaaaatccaggtttaagaggggagattgatttaacgactcatttaagttcaaatttttcaaaagtagagtatggtccaggcacagtggctcatgcctgtaataccaacactttgggaggccaatgcaagaagactgcttgactccaggggttcaggaccagcctggtcaacatggtaaaacactgcctctacgaaaaatacaaaaattagcccagtgtggtggtgcacacttgttttcccagctgctcaggaggctgaggtgggaggattgcttgagcttaggaggtcggggttgcagtgagccacaatcatgccaccgcactctagcctgggtgacagagtgagaccctgtctcaaaaaaaaaaaaaaraaaagaaaagaaaatggtagagcatgcttcagacatcatttaagactctgactccatttctctgcatttatcttggctttgccttttgtgtgatgctcatgtcctcaggttggctttcttcatgatgacaaggtggatg

SEQ ID NO: 148080 - DNA, 500 bp, Homo sapiens
gagattctgctgggccgtgctgcttctgagcgtgctgctctgtatatgagtctcttgtacaaatgctagcaaaggaactctcttcactttggaaccaaaaggaacagctaaaagcaaagtagacaaatacaaataaaaaatacaaggtagctggcaaccttacgagtcgtgttaggcagtttgaactttacttgattttgcctcggatttatcctatgattctgtactataatctttgccaacatttggtttttgtttgggcttacttttcaggtttcagaaatacaaattgaatatgtatagcactatgacttctacctgctagtgagaaatatggctagacatktcaaatggtttttattggatcatattgtattttgaagctttattctggtttacctttaaagaataggtggtgggaggcctcaaactacaattgtattatttctttaaatgtatataaaatataaaggatatattaaaatattcttaaaaattga

SEQ ID NO: 148081 - DNA, 449 bp, Homo sapiens
tatgggccagggagtaagactactggacccagtacacaatagctgggacagaaacaaggctgtgatatattgatttatrcattcactcaaaattcatcatgtttctgtatgtttcagtgtgtctcagagactgcattccacgtgggagatagaaaacgattaagatatagaccctgccttcaaagaaagtctgccatagaaaacaaggcacataaggacttcacttgagaaaagatatatataaaagacagtcacagcacaaaaaagtattatactctgctgaggaggaagggattaaaaaacttccaagcaaaaagaacaaggcacatacaactataattggtccattatagataaagaaaaagaaaaaagccaggcacagcatgtaaatggcggaagttaaatctgaatctagggagtctaggtctagagtctactcccttaaatca

SEQ ID NO: 148082 - DNA, 572 bp, Homo sapiens
acaaaagggaaatagtagacactatagtttttaagccttttaatttttttttttttttttttttttgagatggcatcttgctctgctgttgcccaggctggaatgcagtggcttgatcatagctcactgcatccttgaactcctgggctcaagggatcccyccgacctcagcttcctgagtagctgggactacaggtgtgggccactatgcctggctaatttattttttatttttgtagtgacagggtctcattttgctgcccaggctggtctcgaactcctggcttcaaacaaccttcctgccttggcctcccaaagtactgagattataggtgtgtgctaccacacccagttcctttttaatttttaaaagattttagatttttttttttgaggcaatcctttcacatttctcacaactcatcgtgagttgttttaatgtaaagttattttccagcagattgaaacagtgaagacctctgtattccaggagggcaagtgttctgcctcttcaagatagctgaaggaaaggaaactgtatagctccctgcagtttaaaagttagttgcgca

SEQ ID NO: 148083 - DNA, 592 bp, Homo sapiens
aaaagggaaatagtagacactatagtttttaagccttttaatttttttttttttttttttttttgagatggcatcttgctctgctgttgcccaggctggaatgcagtggcttgatcatagctcactgcatccttgaactcctgggctcaagggatccctccgacctcagcttcctgagtagctgggactacaggtgtgggccactatgcctggctaatttattttttatttttgtagtgacagggtctcattttgctgcccaggctggtctcgaactcctggcttcaaacaaccttcctgccttggcctcccaaagtactgagattataggtgtgtgctaccacacccagttcctttttaatttttaraagattttagatttttttttttgaggcaatcctttcacatttctcacaactcatcgtgagttgttttaatgtaaagttattttccagcagattgaaacagtgaagacctctgtattccaggagggcaagtgttctgcctcttcaagatagctgaaggaaaggaaactgtatagctccctgcagtttaaaagttagttgcgcactgattgcttcatgaataaagc

SEQ ID NO: 148084 - DNA, 531 bp, Homo sapiens
tttgacttaaattgtggtttggattatyggtacattttagctattcatctcatttgttttttctatagctactaataattgaaagctgactgcagaaaatagaataaatttataattctcaatacaatagaagctgttgacagagagaaaaatcaaatccccttatgaaacaatttcatatgagcaatgattttatgttctgagaatattaatgataagatatgtgaggacacaatttgagacttttattactaaaagatttctggttatttctgaggaatctcaaacagaagcttgttttgaggtaaaattatactcgattatctctttatgacgtttattagacaatgggaaaaacagaaacaacttataccatggggttaacaaatatttacttgggggcttttgagaagaacttgaactataaggttttggagtatgttttgatcctaaatttattttacctcaaataagcatgtaataaagttttaacatttgttttactttctgatgtttgagtattatatttct

SEQ ID NO: 148085 - DNA, 531 bp, Homo sapiens
tttgacttaaattgtggtttggattattggtacattttagctattcatctcatttgttttttctatagctactaataattgaaagctgactgcagaaaatagaataaatttataattctcaatacaatagaagctgttgacagagagaaaaatcaaatccccttatgaaacaatttcatatgagcaatgattttatgttctgagaatattaatgataagatatgtgaggacacaatttgagacttttattactaaaagatttctggttatttctgaggaatctcaaasagaagcttgttttgaggtaaaattatactcgattatctctttatgacgtttattagacaatgggaaaaacagaaacaacttataccatggggttaacaaatatttacttgggggcttttgagaagaacttgaactataaggttttggagtatgttttgatcctaaatttattttacctcaaataagcatgtaataaagttttaacatttgttttactttctgatgtttgagtattatatttct

SEQ ID NO: 148086 - DNA, 588 bp, Homo sapiens
aaccttctactgctggtattgaagctatggttccatacagtcccttaaaacccacttcaattttacaattggaaccaaaatcctattaatcttccaggcttttgccccattactagtcttcactttagatttagatttgttctttctttttaagtatgggatgagtcacatatctgtgagagtgtacttgtttatttctgttcaccttcatccacacccttgtgctttcatctcctggatccacaaccttctctatccacatacccgataatgattatgacgaggaagatgacaatagtagcaactgcttgatacattgcatatgctataccaagcacacacactatcttactcatgacaactctgcaaagtaatcatcattatatccgatttatagatgaggcatctgagatkctgagagactgagtgacttaccctaggtgccatatcaacacgcggtggagctgccctttgaatccagaccaaacttttaaaatggtgcttttcactggctgaccagcaggcttagatatttctgttgacaggaagcacaaaaataataatacctgatacttacatgatgccagg

SEQ ID NO: 148087 - DNA, 585 bp, Homo sapiens
tgggtccaggcagcctagtgcaggaataagaatgcaggccctgtgtgattacctgatagtggtgagactagccaagttatataatctccctcagggtrgtaataatacctacatctcagattttgtgagaattaaatgagataatacatacaaaagatgtaagtcacagtgcacaaaactagacagcatatatgttagctgttatttgtttgtttgccaggtgaggataaacatggagaaatgaggtttttgttatttttatttctttgttaacttctgacttaagcccacttagtgttgtcagagatttcttaatgtttttgtttggtttagtaacagaagctgattgttagatgtgattgagcaaatgctgttcaaattattccaagagagagcttttcagacagaattgattttctattattataactcacatactagctgctggtatttcagcttgagcactagagtagtggactactactaaacaagagtagagaacatttccacacttccaatagctcctttttctcctccattgagtttggggcctgttaatctggtgtcctttccccaagagctgga

SEQ ID NO: 148088 - DNA, 603 bp, Homo sapiens
tttcttaatgtttttgtttggtttagtaacagaagctgattgttagatgtgattgagcaaatgctgttcaaattattccaagagagagcttttcagacagaattgattttctattattataactcacatactagctgctggtatttcagcttgagcactagagtagtggactactactaaacaagagtagagaacatttccacacttccaatagctcctttttctcctccattgagtttggggcctgttaatctggtgtcctttccccaagagctggacaaatgacctcctttgaatttgaattattagctgagagaaaaagagcctgggctctgttggagactttttattccagtgrtgctgctctaagaagatatctttttctatacgattcttcctttagttcttatgcattagatctgaaacacttgattcccaagtaattctccagacttgctattgattttcagagctcctctaagtattttaataaatgctctttgtttataagtttagtagattcaatttaccttgcttccagttggttgaatgattaataaccatcctggaaagacataatcactgaattaggaggctgtggta

SEQ ID NO: 148089 - DNA, 610 bp, Homo sapiens
agctgcccttcttatttattcatgactttcattgattacttgttgaataacaggcaataaataaaaaatgaatataactattacctcttcaatggtcattcctattaaatatgtatttacacttttcctggatagatttccaacttataatttaatgcattccaatgtgtgccatgattctgggctgcttttataaatttatgtttagtatatgtgactattacttttccccataacgyttttgctttttatcactacttaagcctttgctccttctgcttttatctaaaacattttcaatttccgtgggaagagcagagattgaagcttctcacttctccgtgtgtagttatgtttctaacccaggcagattccctcactgaattcccgaatttcaggaccttacagttctggggaatcttgctacaacagaggaaattacatggatgtcagtgtagaaatacgctttcaattagagcctgaaaacacatttgaagtctctgttcattgttgagagacaaaagaaaggaaacagatgatgggctaatgggaaaagaagtatgaggagaggcatccatctctgaaagctgagtgagagtgagaagtgggc

SEQ ID NO: 148090 - DNA, 629 bp, Homo sapiens
cttatccaacaatataggacagtttaaatagaatgttaatgcttcttagcaataggcagactggttacatggtgtccagatttctgccttgggtggctgcatcccagctgtgctgcccaggagtttagtagagataaaagccgggctgttgacatgattatggaagcacacaccactttatctccagtagaactaaatttagcatctcttggaggtacacttttttttttcagatgaaagctgcattttataatgaatctgaataattcaaaagtggcaggatcctaatgaatagatgcatcatagaccagaggacttggctccaacttgtgaagttattgaaggtcttacttttctttcaggaaaattttccttagagaaaatttgtttcttacacacagagttttagcctaaggtgagttgtagcttaagtgagtttgatgtcttaactctgcattaagtatttcttacagtgatataagtggaaagaaaacattgataaccaaattgtttcattctggttccttacagcycttgtaggttttatactcacaagctccttttctgatattgttactcaaggaagacaaaaatgggctacatctatctaatttccttattgttaatcc

SEQ ID NO: 148091 - DNA, 531 bp, Homo sapiens
gactgctaaaaaacaaagctagcgtataaagtcttgtataggaaaagtatgttttagaggtaactatgtcctagtattaaatctgagtaggtgagactgaagcttcttaacaatgtatattgtgtatcctctgagtcagcccatagagtctttacatgtactctgaaactagagagggaaaaagccagcaacttcyttcctgttctcctttatcaatagtacattttagcctgggagaggaagaataccatcaaaaggaacaattatatgtatgcatagtgtgtgcttgtatatgtgttatatcataggctcgtttcttatattaaacaactcacttattaaaccctgcttattgtaagctctgtaataatacatgtagatatgataataacaataatagaggaatgaaattttccttggaggctttggttaactaaatgtattctcagctgttcttatgaaaaacataaaaatgtgtaagcaatataataattacaaatgccatcaagatggaaattacaattttaaatt

SEQ ID NO: 148092 - DNA, 423 bp, Homo sapiens
tagatcaatctaattgcctagctgtatcctctgacaggataaagaagcaatgataattcagtagcaattagcataagtagtaccattatcttggtttctaaatactattcaccaacaaaaatcaaccaagtcttcttccttgctggggcaggaaaagaacaagataagcctggaacaggtgttgttttttgtttttgtttgtttgtttgtttttggtttttttccatttgaaagtaagagagtgagcaaagaatgatggggacatgtcaaaaggacacaygagccagctccaaggggctcctactagccaaatacaggacaatgtgaccataaaaataaatggtagtaacagatggaataagaatccatgagtccatactgataagaacaaatagatgagcaactatgtaaaatggaaagtta

SEQ ID NO: 148093 - DNA, 454 bp, Homo sapiens
gaattcgtggtttttatagctatgtagatcaatctaattgcctagctgtatcctctgacaggataaagaagcaatgataattcagtagcaattagcataagtagtaccattatcttggtttctaaatactattcaccaacaaaaatcaaccaagtcttcttccttgctggggcaggaaaagaacaagataagcctggaacaggtgttgttttttgtttttgtttgtttgtttgtttttggtttttttccatttgaaagtaagagagtgagcaaagaatgatggggacatgtcaaaaggacacacgagccagctccaagggrctcctactagccaaatacaggacaatgtgaccataaaaataaatggtagtaacagatggaataagaatccatgagtccatactgataagaacaaatagatgagcaactatgtaaaatggaaagttagttattc

SEQ ID NO: 148094 - DNA, 568 bp, Homo sapiens
tctagtgatctatctgcccatagcttatgccaagcagcatggattatacatttttgatacctgtagacgttttaggagccttcttgatgttatgttgaaatcttattcctgtagttatccacataattttctaccaaatcaccctgtagaactgatgcataattacttcttaggatttgtttgttactgtaataatgaaatattttcctgtctcttggtatacccatgtgtatactgtgttttttattttgtaagtcccatgaaggagaaaggacttctatttttgttttattggagttgaacacttcttgagcctccttcttggagattctcaggtttctgatcattcttgttatagttaactgattatttttgtttccttagatcaatttagagggtcacaatatagcactttcagaaaatttgtcagagcttttattacattaggaagagtagccatttaagwgtgcaaacacatcactcattgactggctcactgaacatctatgagtcaggtagctgctgagaactagagatgttaagctagatgagatagttctctgcaaga

SEQ ID NO: 148095 - DNA, 462 bp, Homo sapiens
gggaaatatcaagaaacatgaggtaaaacaacttcttgactgagtaaaggatgacttctaggtttttggtttgagtgagaagtgartggaaatattactaaatgaggtatgaaatatcaggggaagtgaagttgaagtggaaactaagtttactttgggccatggtggattttacatgactatgggccatctaggtgaagttgcccaatggaaagttggatatatgagtcaaacctccagggagaagtctgggctgcagtttcagtgttggaagttatacccgtaaagggataaatagaaccttgagcatagtacagtcacctattaaataaaagcagttagagatgagctaaacccagaggaacaccagtatttagaggctgggcaggagagaagacctaaaagaaaagaagagctgaggggtaagaaaaccaggagaatgagcttccacagaagccaaga

SEQ ID NO: 148096 - DNA, 421 bp, Homo sapiens
agatcttacattagtatggtacttattggcaggaagtcacctcatgtagctcacacttgaaaggtggggagttgtattatacttccttgagggctgtgtatctaattatgcacagatttgtctattcttcccccatttatttatttagtcagtcatttacttctaycagcatgaactcatggatattattttatactttgggttataattcaatattacttttttgttgctcaaattattccagtattggctactgggaactctttcagttggctgtgtccctttgacataactcattcgtgtttttgtttgaatagttccttcctttccagcactacaagatactccaggttgatcttacagttttattagctgccccagtcctagaatcagccatttctccacaaaggcctggttcctt

SEQ ID NO: 148097 - DNA, 531 bp, Homo sapiens
gttgctgggaccacaggcatgtactaccatgcctggctaatgttttttgttttttgttttttgtttttttttgtagagatgaggtctcactttgttgcccaggctggtgtaccaatttttactccagccgtataaaagttcttgttttcccatatattcctaacacttggtattagagtacttttttttaagtaagttaaawttttttttacaatgtgatgggatcgtggggtggtgacgttggcaaaggcagttttggtagagtggtggaaactgatgccagagtgcctgggttgaaagagagtgggagaaggggaaatgaaactagtggggtatcagctacccttttactaaccttagccatagagggaagtgagaggtaaaccattagatggaattggtggagcatttgtgttacgattagaatcctgggctgctgggagtaaggcagtagagaatgtaccagagaaagagagaaaaaggaattaataactggagcaaatgtctgtggggtttacaatttcagaggtg

SEQ ID NO: 148098 - DNA, 602 bp, Homo sapiens
tttacctatttgtaaacttatataatttaaaatttaatagctatgtttaacaaccagtttgcaaagttcctgaaactttaacaatcatctcttatgaactagtgtgagccaactccagcataccattctgtagagacacacctacagagataaaggctatatgcagttctcacagaaaaaatctcactgtagataagctcatactcccaaaattaaagaaacacatttggaaataatatactattccaagagtaagcacataaaacgagcagtagaataaaaccccwaggagcttcagtaaatataattatctaagaagactataaaatagttgtacttgaagtgattttaaaaatcaaaacataataggccaggtgtggtggctcatgcctgtaatcccagccctctgggaggctgaggcaagtggatcacttgagtccaggagttcaagaccagcctgggcaacacagtgagaccccgtcttctaaaaaaaaaaaaaaaacaaaaacaaacaaacaaacaaattagccaggcgtagcggcatgcacaggtagttccagctactcaggaggctgaggtgggaggatcatttgagcctggga

SEQ ID NO: 148099 - DNA, 602 bp, Homo sapiens
tttacctatttgtaaacttatataatttaaaatttaatagctatgtttaacaaccagtttgcaaagttcctgaaactttaacaatcatctcttatgaactagtgtgagccaactccagcataccattctgtagagacacacctacagagataaaggctatatgcagttctcacagaaaaaatctcactgtagataagctcatactcccaaaattaaagaaacacatttggaaataatatactattccaagagtaagcacataaaacgagcagtagaataaaaccccaaggagcttcagtaaatataattatctaagaagactataaaatagttgtacttgaagtgattttaaaaatcaaaacataataggccaggtgtggtggctcatgcctgtaatcccagccctctgggaggctgaggcaagtggatcacttgagtccaggagttcaagaccagcctgggcaacacagtgagaccccgtcttctaaaaaaaaaaaaaaaacaaaaamaaacaaacaaacaaattagccaggcgtagcggcatgcacaggtagttccagctactcaggaggctgaggtgggaggatcatttgagcctggga

SEQ ID NO: 148100 - DNA, 577 bp, Homo sapiens
ttgtcttttcttcatttcaattctttggttgggttttgtttttcccctggcaggcatctaaggaagaaaatgctggatacgctctattttaaaatattgggcctggacacagtggctcacgcctgtaatcctagcattttgagaagccaaagcaggcagatcacctgaggtcaggagttcgaaatcagcctgatcaacatggcaaaaccctgtctctactaaaaatacaaaaattagccrggcatggtggcgcatgcctgtaatcccagctacccaggaggctgaggcaggagaatcgcttgaacctgggaggtggacgttgcagtgagccgagatcacatcactgcactccagcctgggcaacaaagccagattccatctcaaaaaaaaaaaaaactcgactcctcagagttaaaaagcagcatacctctccgtgaatcccggcatggcagtcatagcagcactggcaaacagctgtgtagagagtagcgcgccatgtcaagtacctgagtgacaggagcgggaccaaggactccatacacatgctggcccacaggagatactctaaggcctgcaa

SEQ ID NO: 148101 - DNA, 426 bp, Homo sapiens
gaaaagttgggacaagaaaaaaaaatctgaaggcggcacaaagggcctctttaattacacttagaagaaggaaggtgtggatccactcttgaggctgtaattggagcagaggagtgatatcagtggtcatggaaggaaggggacgatgtcaaatccgattttgcttccatattctaggaaagatataaaatcagaaagagcaaatattgtcagttggttcagaagctggagttacgtaacaaggttgcttgagtctgargcttttctaaacatggatcccttggctcatgtcttacattccagggacccccgagaacctgtagatgaaatagatcggtaacttcaatgcatcaggaaggttgagagagatgctggaattctatagctgagcagacatggttaggacttgtccaaacagaagaggca

SEQ ID NO: 148102 - DNA, 565 bp, Homo sapiens
tccagtcttccttctcttaacctctccccctgcctacagcaggtagtctgaactccaaatcatagctccaggcttttgcctgcaaatctcactaacaggtttagcatccctcctaggcttcatagcagccgccagtgcagcctcagaaatggagatgcccacagacaggtcaatttctccatccctgtctcttctggtttaacagcagggtcctaacatccaagcctgttagggcttcttcacacttactatggagagggagactgcagacttttcatggcatggggtgggttataaatgggcatcagcttcctgsggctgagcaggaaccagtgggtgggagtgtgatgctgactcccctgacttcatttgaccatggccattgtgggaatcaccaccatcatgctcacccttgctgctagcatctagcacccaagtcagagctgtctgagcctcagggagctaacccctaagacacagcaaccaaaccctaaagaggaccccagacccacctttttttgggtagattttgcacacttacaggtggggtgttttaaatggaatc

SEQ ID NO: 148103 - DNA, 606 bp, Homo sapiens
tggcagttcttgagttcttaactatattttgcttgtttgcttttttttttttttttcctttctgccacccagggagaggaatcatttcaaagaattgaaatacatgaaatgctgctgcaggcccctgatctgcagtctgcccacccactcaaagaccaggtggagcccatagcctgggcctcacaggccagagtctgcaggccagtgtccagctcagagccctcagtgccatcttcatacaggagccatcagctggcagtcctccctgtctcccccagggcttctggcagccctcaraccacagtgtctgtgcaaggtctggaaggctcagtacgtccaatgctctatgctttcttgctccctctatctttctgccatgctcctaccccactcaaaacacttacttggatattaatccttgggaagagggcagatggcccagactccaaaatgctaaattttctttaaggtgtcttttaaataccttctttctgcatgtttctgtcacatcatcctagactgtctgaagggttattctagcctcccatctgccttctttattgtccatctttttctctgcaggccaaggctcagacacctcttttg

SEQ ID NO: 148104 - DNA, 580 bp, Homo sapiens
ctctgcttggccacagctttgctctttggtcctcaggccaccagacccctcacagcatggcccttggctcttcctgcactgccctcaccctcagccgtcccaaggagtgcccagcactactcagcatgtagtccaggacctgcggcatcagcatcccctgggagcttcttagaaatgcagacctgtgggctctaccacaggcctctggaatcagaatcttcagggtggggcccagcagtctgtgttttaacaggttctcccggtgatgctggtgcatgctcaagtttgagaaccgctgctctcatagactgctcctccaaggggaagcagtgtggaacagcagagaaagtcccgtccctatctctgactgtgcagtgagtgtggcctaggaacaggtcccttcctaagctctagtgtccccatctgtaaaatgggctgattggcctccayggtcagagcggccatctggctgtgccatcctgcatttttaggaatggaaagcaggcctctgaggcagtggacaggaagacttctcatccttgaattctagctcccattccaaactgttagtccccaacct

SEQ ID NO: 148105 - DNA, 524 bp, Homo sapiens
attcttatctgtaaagtatctgtaaaatctgtaaaaatctgcaaaataaaaataatacaatgttaggcactcagccccacaaagcagtgacatgtagtaaaataaaggcacttatgtgtactggggaaaaagggaggccatagggcaagatggctgaataggaacagctctggtctgcagcttccagtgagatcaacgcagaaggtgggtgatttctgcatttccaactgaggtacccrggtcatctcactaggactggttagacagtgggtgcagcccacggagggcgagctgaagcagggtggggtgtcacctcacctgggaagcaaaaggggttggtgaactccctcccctagccaagggaagccatgagggaccatgccgtgaggaatggtgatatccggcccatatactatgcttttcccgtggtcttcgcaacccacagaccaggagattccctcaggtgactataccaccagggccctgggtttcaagcaccaaactgggcagccatttgagcagac

SEQ ID NO: 148106 - DNA, 615 bp, Homo sapiens
gaggacttataaattttattacttattcctatttctcttctaggaaatgtatttttcttcaactagatcttcaggaactaaactctttatatatttttagtttgaatatccaattgaaagtgaattagcattaactgggcagaatttacctagctagagactaaggagcrtatttcctgcagaactaggacaatcactgaaacagtgggcttgctttggggtaacacggtttcaactccgcaaggaggatgactttgcagttcctccacagcattttgctttttatgttttcatttaatggtgtgacatcctatgacaattatcattatttttggtccaattttccctctgaagcagctttgacacagatcaatgcatctcagtgtcggtttttatggagctgcaacatcagaaactgacagctggaaatcttaattggtccagtgacagaaaatataatgactgctcacagtgacttattttatctgaccttgtgtttaattcaaagggaaattttaatctcactactggaaaagaaaaagttgtgggtcgatgagtggggcagatcagccagagaaaggcctttcatttggaaagaaattactactagttgta

SEQ ID NO: 148107 - DNA, 591 bp, Homo sapiens
aaccatgaaaccttatgagacttattcactgtcatgagaatagtatgggggaaatgacccctacgattcaattatctcccacctggtccctcccacaacacgtgagaattatgggagtacaattcaagatgagatttggttggggacacagagccaaaccacataagcatgcatctctataaatatgtagctctgccttatgactaatagttttatgatctatgacatctttcactctttgatcacgacttggtttatttctctgtcttcatcaaagttataggtaaacamtttctacttagaaaaaaatatgtgatttttgtaatgtaagatgttctcttatgaggcaaaagtgtcacttgaagcattctcgctttggcaaagtgaatattagaaaagatctgaaaaccacccacaacgttgacaacttcagataggctcataaaattgtcagctgttactcagctaagatttcacctagatgtaaatttagctctgtttgactcaatactcatgctttccccaagacaccatgctgactcgcagcgcatggctactatactgtttcaaacttttccctttctccctcta

SEQ ID NO: 148108 - DNA, 451 bp, Homo sapiens
cagcgcatggctactatactgtttcaaacttttccytttctccctctaaacacacagcttctgctacctggtagttcatatgttgacaaatttctgcctctgtgaaggtatgtaaaaacattaccttcatgaagccttcctacagaccccaggacagaattacttctttaatttcaaagtaccttttcttaaatattttttaaggcatctaacacagtgttcatgctattttcccaatacctggaaccatgcctagcatatagcacatgggcaataaatattggttgaataaatgaattacactttatttatatgcagcttctctgtctttctaggtattgagctccttaaacatactgtctaaccaatttgctgaaaatgctaagctggttactgtgaaaccctgaagtaatttcactatattgtctatgcacattcttagatattaaaa

SEQ ID NO: 148109 - DNA, 598 bp, Homo sapiens
ggtcaggtaatttacaagtgccatcttcagcttcaaaaatagtgcttttccactccagttatgcactggaatcacctcaggggttcttgttttacattttaattacttacatgacaaaagctcgaaataagtgtctgacatagaaccctgcaatcaatatatatgtatatttatttatatatcatatctatgtgtatatatctatatgtatttatatatatatatctcatatatatatatttcttaaagtttcaaatagttctgaactactgacctaatatccctatgagaagcattgctattcctttcttaaacagaagtaatgtgtatgagatggctaaaataactggtccatgttcacaatgccagcaaaatgggtctagttgatttcktaacaaacacatgtgcatacaccataaataaaatgtttataataatgactattttactcaatatttcctttgtgacaggatataacatctaagtacaataagaatcctgtaaattcattatataatttcaaagataaatgaagtcagtgaggataagtatcttgccattagctaaacagcataaaaacagaagaaaattacaggtt

SEQ ID NO: 148110 - DNA, 491 bp, Homo sapiens
ctgtgtccccacccaaatctcatcctgtagctcccataattcccacgtgttatgggagggacccagtgagagataactgaatcatgggggcaggtcttttctgtgcagttctcatgacagtcagtaagtcccatgaggactgagagttttacaaatgggagtttccctgcacaagctctgtttctttgcctgctgtcatccacgtaagacatgacttgctcctccttgcctttcaccatgattgtgaggcctttccagccacgtggaactgtaagtccattaagtctctttcttttgcaaatttcccartcttggtaatgtctttatcagcagcatgaaaatggactaatacactgtgagactgagaaaaagtcactggttctcttattccctattatctatgtttttaattgccagcctaaataaaaatggaacttaaacaataatctagaataaaggaataaaattctctgagaacaagcttttaaaca

SEQ ID NO: 148111 - DNA, 624 bp, Homo sapiens
ttggtaatgtctttatcagcagcatgaaaatggactaatacactgtgagactgagaaaaagtcactggttctcttattccctattatctatgtttttaattgccagcctaaataaaaatggaacttaaacaataatctagaataaaggaataaaattctctgagaacaagcttttaaacwcctctttttaatgaaggaaagttatcctattaattctggcaagaacttatacttgacaaaaatgtacatgcagggtggtttaggaagctccagtccatgctatggtttccttagcttctgtcatgcaattgagtttgtatgttggagattagttttttagggtatggtatggccctgagaattaggctggtgagattgcaagttaagaatgtttattttcccattctggttaatttattattatactttaagttctagggtacatgtgtacaatgtacaggttgttacataggtatacatgtgccatgttggtttgctgtacccattaactcgtcatttacattagtaattttaaagtttactttggggcacagaggaatccagtaaaaacctattcaaaatattaaaagaccattgggccaaaataggcttccctgaataaaa

SEQ ID NO: 148112 - DNA, 585 bp, Homo sapiens
atatttaaaattaacctattaaaggctttaagaagacttatggtaaagtaataggtctaatccatcatttctaaacttacttggctgtataatccatttgaggaatatctatarcagtctatagaaaattgttctaggcactccaccgaattctattatccctgttgtaaaatatcaacaagagaaattactctgagaatatggagggaattatccctaactcattctgcatgcccagaatcatcctgataccaaatccaagcaagcacacaacaacaacaaagtaaaactacagaccgacacccctgataaacatagacacaaaaatcctcaaataaatactagtaaactgaatgaagtagccctcaaaaagatagtacaccatgatcaagtgggttttattgcacggatgcaatggtatttcatacacaaatcaataaatgattcaacgcataaacagaactataaacaaaaccatacaatcatttcaatagatgaggaaaaaaattgataaaattcagcatcaattgctgagaaaaacccttaataaactaggcatcaaaggaacacatatcaaaataataa

SEQ ID NO: 148113 - DNA, 554 bp, Homo sapiens
atattaataccctgccaggttgtcattatttatatatatgagtttatccttgagggcagaaatttgttatttccgtctctgtagtttctagtacctggaacatattcagtagcctcaaaaatacaagggttggagctaccactgtttttcctagaaacaattgaaagctcacaataaatggaaccccctttattgttcagcaacatgtgctttttctacctttccttttttcacttccagctatgagagtctaataggtcagctcccatttactattctattacatttgaagatgaatgttaaggcagacaaataggatacttttattgacttgattttgtaaaatacttctccgataagtagtgagtraaccaatcctttatccatttattcatttaacatacatttattgagcactcactgtgtgtctggacctctgttaagaaaccattggtacaaaacaatggaaaatataggccttcaagttcatagtctagcagaaatatattgaaaatacccactctccttcctcagttgccttttgcagaaggaac

SEQ ID NO: 148114 - DNA, 582 bp, Homo sapiens
agaagtgatagagagaagcaatgatttattacattctggcaatgttkcatcttttcaaatgggttttattattaacctaaatcagaggagtaggtacattacatgaaactacgattttcagaaatgtaatttcctactgtatctatttctctttgtaatatatttcctatcaaccttgacggccttaatggtaatattgagactttaccaattatccaactattggccttcagaaactgaattattttttcctgtctattcattgaaagtctaatgatagagactgtgatcaagtctataattatatagactttgatacagagtaggatatagtctataatgtagatggagtcaattcacacatatctttaaacaatgcaacctcatgcatgctctttattagtgacatgttctaaggtataaaatgtgtatagttagggaatccttaaatttaattcaaatactaccttgtactccaagactgacttcctgtgcataggtatttggtgataaacttttggcattgcctgtttgaaattataaaattcacagtagcccttggactcctactttgagagatcc

SEQ ID NO: 148115 - DNA, 582 bp, Homo sapiens
agaagtgatagagagaagcaatgatttattacattctggcaatgtttcatcttttcaaatgggttttattattaacctaaatcagaggagtaggtacattacatgaaactacgattttcagaaatgtaatttcctactgtatctatttctctttgtaatatatttcctatcaaccttgayggccttaatggtaatattgagactttaccaattatccaactattggccttcagaaactgaattattttttcctgtctattcattgaaagtctaatgatagagactgtgatcaagtctataattatatagactttgatacagagtaggatatagtctataatgtagatggagtcaattcacacatatctttaaacaatgcaacctcatgcatgctctttattagtgacatgttctaaggtataaaatgtgtatagttagggaatccttaaatttaattcaaatactaccttgtactccaagactgacttcctgtgcataggtatttggtgataaacttttggcattgcctgtttgaaattataaaattcacagtagcccttggactcctactttgagagatcc

SEQ ID NO: 148116 - DNA, 565 bp, Homo sapiens
attagatatcaaagaactgttctggagttttaacaagttgcataggtatacagacttgaagatatcacttaacttttttgagtctatatttatctaaaaatgggaatccaacttttttgtgtgtgctattcaattgcttaaaaattctccagagtgcttattaaaatacagatttctggacgggtgcagtggctcatgcctgtaatccctacactttgggaggctgaggcggtcagatcacttgaggccaggagttcaatactagcctggccaaygtgttgaaaccttatctgtactaaaaatacaaaaattagctgggtgtggtcacatgcacctgtaatctcacttactcaagaagctgagacatgagaattgcttgaacctgggagtcggaggttgcagtgagctgagatcacaccactgcactccagccaggcaacagagtgagactctgtcacaaaaaatttaattttaaaaaatacatattcctgagacctacactcagatatattatccacttgctcctatatagggcccagggatgtggatgcaatgccatgttttt

SEQ ID NO: 148117 - DNA, 511 bp, Homo sapiens
acctcacacccattagaacgactgctttttttaaaaaaagaaaatgacaagtttcattgaggacatagaggaagttgaacccttgtgcattgttggtggaactgaaaaatagtacagctactaaggaaaacagtatgaaggttccttgaagaaaattagaactaccataagatcyaacaattctacttctgggtataaatccaaaataactgaaagcaggatttctaagagatatttgcacacccatgttcatatcagcgctattcatagtagtcaagagatggaagcaacccaaaagttcactgatggatgagtggataaacaaaatatggtatatacacacaaaggaatattactcggccttcaaaaggaagaaaattctgacatatgctacatcactgaaacttgaggacattatgtgaagtcaaataagccaatcacaaacagacaaatactgtatgattccacttaaatgaagtatcaaacgtaatcaaatttaacagccaggtgc

SEQ ID NO: 148118 - DNA, 206 bp, Homo sapiens
cctgaccctcacagaatcttttgacctctggtccatggtttgtcaattccaagaaatgaatgcatgagaatattgaggaaactggcagtgtcaaggtttatctttatttggctaatggcgatgacagtaagstcggctgagctgccaatctgtcctccaattaagttctaatctgaagaagaattgttgtccatgattaaactccc

SEQ ID NO: 148119 - DNA, 318 bp, Homo sapiens
taaatgaaagcatgctatcaatggaagcattcatgtcaccttttctctgaaagattcaaaagagagaaactgaggtctcaaaggcttttctatggtgttttgtctgatctttaaaatgtaaaaccaaggaaactgctggtagaacagtaaggctcaaatcttaacagtatactgtaaagatgrttgcattgccaatttgaaaagattttatattctcaaacccatcatcaatattaactctgggaagttttcagatgtagataggaaaatagaaaaatggaaaacagatataagtggtaaaaatactatggaatccct

SEQ ID NO: 148120 - DNA, 628 bp, Homo sapiens
ttaaaaataaatatttattttaaggactaattattatatttatcaaagaagtacatttatttttgctcccacttaaaatttttatgatatttctagtaattaatgtttaaatggtttattatttttaatattttttaatatttttcttaaatagattatgttgcagcaattaaaagattctaaatttatatcacattaatacttgcctttacaactattatagattcaaatttaagaaatgtgtcattggctattggttagtgaattatgatgttcatatttaaaaatccacccatcaactttyggtatttgtctttgtgttccagatttttagtttttaaaatgacttgttacttgcaatgatctgatactatcattgaccagtattttaaattacaacatgtgtttaagatgaaacttatttttataaacagtgggcataaacccatattttaaatagcctcactgataattataaatttttttttgaattttttttagagtttatttgtttaccatttttttttacctggctcatgtagggctcatattaggcagagtgtggtatttctttttcttgtttcccactttcgtttgtacaattattattttcttccatggtgtttta

SEQ ID NO: 148121 - DNA, 445 bp, Homo sapiens
atcctacttgtattctagaaagatatgacatatttgcagaggatgaattgaaaaatataaattacaagaggtaggggaaaagttaagaggctactaaaatagttcacatgagaaattattaggctattttaaaagaagacagtataaaaaggaagaaagaaaaggatcaaaagatgtttgagggagggtatcaatggatttggtgaacatatataacaattatagaaaaaagaataatttaggctaacatgtakaatttttcttggataatttaagtggatagtgttgctattaataaaataaaaaatgaagacagagggcaaataggaaaactgattgtagtttgagttatgtgtattttgatgttccttatagtatcaatttgatgttcagtagacaatagaaataagtatctggaacacagatgaatagaagaaactattga

SEQ ID NO: 148122 - DNA, 355 bp, Homo sapiens
catgcatatcacttccatttgatgatcgagtgctgctgtgcatgacccagtttatggttagatgggtcagaaagcacccggttcattatagttcaggttgcatggtgaattgatgacccatagtcgaatgttcatgttctaccaaagcccagtaatgggccaagagctgtctctcaaaaaaaaagagtagttatctgcagaagatggcaggggcttttctccaaaatcttagagatgtccattggggttcacctatgggggtctgccagaggctccaaacagcatccgtatytgcccctgacacctcaagcatcattggatctgctaggtcatatggcccaagtggcagagcagc

SEQ ID NO: 148123 - DNA, 596 bp, Homo sapiens
caaacaaaaaccacagtgtgatacatttcataaccactaggttggctatataagtatttgaaaaatatatagtaatcattgtcaaggttgtagaaaaataggaatccttgtatattgctggtgataatttaaaatgttgcatccactgtgaacaartttgatggctccttacaaagttagacagagaattaccgtaagaccctgcaattctacctctaaatatagatccaagattaataaaaatatatgttcacacagaaacatgtacatggatgtttacagcagcattattctcaatggtcaaaaggtggaaacaatccaaattttcattaacaaacgaatgtacaaaatatagtatatacttacaatatgatattatttatccataatgagaattaagtgctgatatatgctacaacctggatgaaccttagaaattctatgcttagtgaaagaagccagacaaaaatggtcatatattatatgattcctttatatgaaatatccagatagacaaatccatagagacagaaatggttcagtggttgccagtggataggagtggaataaatggagagtgattacttaatagagac

SEQ ID NO: 148124 - DNA, 596 bp, Homo sapiens
caaacaaaaaccacagtgtgatacatttcataaccactaggttggctatataagtatttgaaaaatatatagtaatcattgtcaaggttgtagaaaaataggaatccttgtatattgctggtgataatttaaaatgttgcatccactgtgaacaagtttgatggctccttacaaagttagacagagaattaccgtaagaccctgcaattctacctctaaatatagatccaagattaataaaaatatatgttcacacagaaacatgtacatggatgtttacagcagcattattctcaatggtcaaaaggtggaaacaatccaaattttcattaacaaacgaatgtacaaaatatagtatatacttacaatatgatattatttatccataatgagaattaagtgctgatatatgctacaacctggatgaaccttagaaattctatgcttagtgaaagaagccagacaaaaatggtcatawattatatgattcctttatatgaaatatccagatagacaaatccatagagacagaaatggttcagtggttgccagtggataggagtggaataaatggagagtgattacttaatagagac

SEQ ID NO: 148125 - DNA, 530 bp, Homo sapiens
ctgtctatatatattttctatttgttcaatttctctggataaccctgagttgcacagattttgatactgaaattggttctagaggaacataactttaagaatgagttttccgaattatttagggggttctagaattggatctctactctgattatacttaaagatattaaagattctatttctaggagtaaagagagcactgatagtccatggtgtaatatccaaaatatgtgcattggatactcttaattaaccacttataataagcaaggaagtaagcaattacgtayatgacacttgctaacattttggaaatttaagaaatataatgatactggttgcttgttcctaatgtcactggacaaagtgatgaaagaaaaaaataagttcagtgatttgaattacaagctcaagagccacatcaatgatttaagagcttctaggtgtgccctgagaaagagcattatctcctaccactggagggctgcaagtgctgaaaatcaaatgtaggacctcatcctgtgattggc

SEQ ID NO: 148126 - DNA, 303 bp, Homo sapiens
ttattgtaagcttaaccacatggagttaagactccagctgaagcttctgtaccagatgtggtttaactgattgaggaaattaacatattcccgggtacctggtatgtagcattaatctggaaaatgttttgttgggtttttttcctccatacctgtcaataaagtctaccagaagtagttgctttcagggggaaaggccataaatccaccttyactgttcccctacctcaggggtaggtcaactctccagtcatgtaccataatttcatccatagggatcctgattgccttttcattccacaa

SEQ ID NO: 148127 - DNA, 513 bp, Homo sapiens
tggaaataaattttctccttctctatctgtcacttaacgactgtggcacaagacatccaagcacaggatagtcttggtatcagagacctaggttttctgtttcttrtatctctgccatatttaaggtgttggccatgatcctgaggttcaggaaggcttgccaacactagactgccttccagcaaacggaaagtggaagagggaaggagaagcatatctattcattttaagggcatgttcccgagtttaagggcatctccctaagatttaggtaacaaactgaaaattatacaactaagatttattcatatttctttgagagctttactcatatatcttagctcctatagctataagcgggggggcagaagaatgtagtcttgatttgacacacccagcttgaatctggaattctattattctgtaagttactgggagacagtagtcatctctgacagaaggattgctgatgaacatttctatgtattaatttgtgtagctcatataacaacc

SEQ ID NO: 148128 - DNA, 394 bp, Homo sapiens
tctagtactgtgtgctcagcctaatactttttatttttccccttctctttggtaaaaacaagatgctgaaaatttgagacaaattgtccatgtaattacaaatgaaatcaatattatttaatggaaaattttaaaacatttcaaaaaataaaataaaatggtcttcagagacatgttcccaatggctatacataaggtggtcctaaaataattggaactattgttgcataaggaatttttctaaaaaataagtatagacatgcacaatgctaataaaagtataaaatctcttacacaaaattcactaatctgttagtgttcaatgtattttttcatgtattctcttagaggaaattttatmccctactatctaaactctcactatctgaattct

SEQ ID NO: 148129 - DNA, 566 bp, Homo sapiens
gagaggaagggaaggaaagagagatatgaagtgctctggagatcttcagaattccttccatttttctgcatacgcatgaggaaagtagccaaggctggggaaagagccacttaaaaggggctaaggaaacaatcactgtcactcacccaggaccaggaaaagtacttgtttctacttgccttagtgagaaacttgtaattgatggggcatcaggtagagtacccaaaagtgtattagtatagtggtgaggcaaaatttgccctggtctagaggctgatacagtcttgcttataaaatcaagcttcaaagggatcaggttatttccaactaacttaactgtgactcataaacaagttcaagattatttataggaatccaaaatatccagcacccaagmatgtctatagaattaaaaaacatccagtactcaacaagataaaattcacatggcatgtgataaaaaattaccaggtatgcaaaaaggcaggaaaatatgacacatcataagggaaaagtcaataaatagagacagatcccaaaatgacagataatagattcaccaggta

SEQ ID NO: 148130 - DNA, 535 bp, Homo sapiens
taatgtacactcgcacttaaaactttttagtgactccacattgcctttaaaataaagctcatgctctttaacacagcttatgagtccttcaccacttatcccttgcttatcactccaatttyatctctcaccagtttgagctctctctctaggatccagccctgtagccctacttctgaagcctcaatatgccaggttccttctcgtttctgggacttcacatatgctgtttcctctgcctgaaatattcttactaatcccttgacttgagcttttagttttgagcttagacgtcatttacaaaaaagtctttcctaataacttgagtcagatttaggtgctattcttatatgcttccataacatcctgtactttcatttcagcatctagcagagctcatctatatttcccctatactgccagcttttatggagtgagccatgtttgttttgcagctatatttctatctactggaatacaccgatgcttattgaaagtgtaggggagaaaagatttctcatccagtgcaaggttc

SEQ ID NO: 148131 - DNA, 535 bp, Homo sapiens
taatgtacactcgcacttaaaactttttagtgactccacattgcctttaaaataaagctcatgctctttaacacagcttatgagtccttcaccacttatcccttgcttatcactccaattttatctctcaccartttgagctctctctctaggatccagccctgtagccctacttctgaagcctcaatatgccaggttccttctcgtttctgggacttcacatatgctgtttcctctgcctgaaatattcttactaatcccttgacttgagcttttagttttgagcttagacgtcatttacaaaaaagtctttcctaataacttgagtcagatttaggtgctattcttatatgcttccataacatcctgtactttcatttcagcatctagcagagctcatctatatttcccctatactgccagcttttatggagtgagccatgtttgttttgcagctatatttctatctactggaatacaccgatgcttattgaaagtgtaggggagaaaagatttctcatccagtgcaaggttc

SEQ ID NO: 148132 - DNA, 603 bp, Homo sapiens
taatgtacactcgcacttaaaactttttagtgactccacattgcctttaaaataaagctcatgctctttaacacagcttatgagtccttcaccacttatcccttgcttatcactccaattttatctctcaccagtttgagctctctctctaggatccagccctgtagccctacttctgaagcctcaatatgccaggttccttctcgtttctgggacttcacatatgctgtttcctctgcctgaaatattcttactaatcccttgacttgagcttttagttttgagcttagacgtcatttacaaaaaagtctttcctaataacttgagtcagatttaggtgctattcttatatgcttccataacatcctgtactttcatttcagcatytagcagagctcatctatatttcccctatactgccagcttttatggagtgagccatgtttgttttgcagctatatttctatctactggaatacaccgatgcttattgaaagtgtaggggagaaaagatttctcatccagtgcaaggttcatgcctgagacaccgacaataaaagaaagattaacaagaaaaaaacatacacatttatttaatatgtt

SEQ ID NO: 148133 - DNA, 636 bp, Homo sapiens
aagaaaagagaaaatattagaaaaggatgaaaagaaagaccactgaggaggctattacaacattccacaagagagataataaatgtctgaactaagacaattatgccagggacagggaggacaagatgcattattgaggtatttcatggcagaattacaaaaagaaagaaaagaaaaactacttcatgcccatttaaatattcagataaggggaggaaccatggatgatgaggaagaagattctcccacgaacatgatcttgcccatagctttttaagatacaatttgtacattcagtgcattagcttgaggtttgggtggatagttaaccctgttttcttccaatgcaaacctatttgcatttattgagtttcttcaagttacatcataagggaggctccaaacaaggccagcagaaaagacttcctragaagaatggccaataataccacaatgtcaaaactctccagggggatttagatgtgtttcctagatggttgcttaagtgagatatcatatgtaaactgcaaatagagtgcctgtcacattagaggtactcaataaattttaactattttaatattaaggttcagtcatccacattgatcacaggatttctctagatggctaattaat

SEQ ID NO: 148134 - DNA, 576 bp, Homo sapiens
taaaattccagtagaagatgtttatgcagagaaaccttaaggaattcttcattgtcatgtcacaattttgatcttgttgaattaagaaagacagggaaaagttgaaaaacaaataagcaaaatgtgaatttactattgaactcttatgggtttgtaatgcagaattgtgtttttcctttcctacttgttggtcaggttctttttaatcataagaaggaaaatatttaaaatataattttatacatggtacaattgtctccccttagccttggctcgctttctgtggttttagttacccgcggtcaactgtggtctgaaaatattaaatggaaaattccagaaatagactattcataagttttaaaktttgtgctgctttgagcagcataataaaatcttgcaccaccccacttcatcccacccaggatgtgaatcatcctttgtccagcatctccatgctatatgtagctaccccttagtcacttagtaaccatcttgatgatcacatctactgttgcagtaatatcacacagcatcacttatgttcaagcaacacttgttttgcttaaaatgact

SEQ ID NO: 148135 - DNA, 523 bp, Homo sapiens
tgtgttagttggatgagagaatgaggggtgtggtgtatgtgtatataaatacatgtatatggaaaggaatatctatattagacatcacagttaacatttaaaacatggttgtgaaaaaaaataaaaccaacagtagctatggcttggacttacctcttttgcagttatcttcctattattagataatctacttggtaaaattgcatggtacaagaggattattaataaataatcattaaaaatggctagttcattcagactattctccataytcctgctgttgttattgcaataactttccaaattttctaaatccatgaataccctttcaatgaatataatttttctacattatcttcctacctctctctctctctgcttttatcttaattgataatgaaacccagtaaggtaagtgattatttagaccaataacattgaacaaatcaatcattcctaaatgtaggacccaaacttatatcacagaattgtgtgtgtgtgtgtgtgtgtgtgtgtgtgtgta

SEQ ID NO: 148136 - DNA, 499 bp, Homo sapiens
ttggtcctcagcacaggggctccatgtcagtcactgagcatatgttgggggaatattactcagcccctcytttccctaccttcctgtttttgttcatcaattcccttgccttctcagattttctttcttctctctgttgcttcctggctgcccaggcaacagcttagcctggcttgtgaaacactagaggttttcaactaaaataatctgtcagaatggtctgtaacctccctggcttaaaataatcccatagtgacattgtctcaaaggacttcacttggaagtagtctgcagggtttggacagggaggtgaaaatggaatactttatatgtttgactcaaataatacttgccttcacgaataaaattgcatactgaggcttttgtgcaacttacatctaatctctgaaggatattaaggggttaccctttcccactatgtgtcaccaggagccaaaagaacaccagtggggctaagctctagtgcaccccaggacag

SEQ ID NO: 148137 - DNA, 541 bp, Homo sapiens
gtgagactgattctgttaaaatcctctggaggagtttgatttttggtttatttgtatgttttggtcagcaatcaacttggttaggttcagactgcaagttctgtctcaccttctgtgggaggtggttctattgtcagttcagttttcagtgtttactatgcttttaggtctgccccttgtgagcaccacacaaagattagtctgagactaaacagtcactgagcagtggtttacatcatagtccagttctcagagccttgctatatttctttggatgtgcctcatacawgcacagctggaaggtggcccaggatttgagtcatttcatatagaattaggagatcttcttcttttgctttctcctgagatttcccctgcattctttatctcccaagtgcccctttttgaagttgtctggccagaaagatgggattccctcagaggtttagcttcctgcattgtcatgcagtttcacatgactgccctcggggtgaagcagtgacagtaaggagacacaaaaaaacaattaagcatgaattat

SEQ ID NO: 148138 - DNA, 587 bp, Homo sapiens
aagcgtttagttaattttaactgcttttttttcttttttttttttgagacggagtcttgctctgttgcccaggctggagtgcagtggcacgattttggctcactgcaacctctgcctcccgggttcaagcaattctcctgcctcagcttcccaagtagcttgggactacaggcgtgcaccaccacgtctagctaatttttgtattatttagtagagcggggtttcactatatgttggccaggctggtctcgagctcctgacctctagtgacccacctgccttggcctcccaaagtgctgggattacaggcttgagccaccgtgcccggtcctaattttaactttttattggcacctgtcatacagtgtttattcttctgtccttattctctagcctagggtgagaaaaattccagtctttatccttaccttgttaaacwttgctagagtcaccatggtatttgcttcaacacctaggacacaatatctgaatccttctcaacattataatggatccaaatgagaatgaaacctatttcatgaaacctatttgccaactcagattgtttatagagttcttgattttta

SEQ ID NO: 148139 - DNA, 374 bp, Homo sapiens
agtttgtagagatatttgttatagaaatggcttaaatgcaacaggatttttctcttgatactactgtttgagatacaggtttttatttaatggtctctttggcttgccgtcacaatgaaggttggtggaaaggaatgaagcagtttcttcctgcaaaagcagtggaccatgaggaaaccccagttcgctatagcagcagygaagttaatcacctgagtccaagagaagtcaccacagtgctgcaggctgactctgcaggtaactatgttgcagccttctggtaccaggcagagggagaaactgcttaggcttgctataaagtgctttgggatttacagttctttgatccctttcatgtttaagaaatgaattgt

SEQ ID NO: 148140 - DNA, 636 bp, Homo sapiens
gtattccatagtgtatatgtaccacattttctttatccagtctaccattaatggacatttaggttgactccatgtctttgctattgtaaatactgctgcaatgaacaatatgagtgcaatttatattcctctgggtatatacccagtaatggggttactaggtcaaatggtggccctgcttttagcactctgagcaatcaccactggtttccacaatggttgaacttacactcccaccaacagcgtttaagtgttcccttttctccataacctcattagcatgttatttttttactttttaataatagccattctgactggtatgagatggtatctcattatggttttgatttgtatttctctaaagatcgatgatattgagctttttttcttatgcttattggccacatatgtgtcttctttggaaaagtgtctgctcatgttctttacctgctttttaatgtttcttttttcttgtaaacttgtttaagttccttatygatgttggatatcagacctttgccagatccacactttgcaaatattttctccccattctgtaggttgtctgtttactctgttgatagtttcttttgctgtacagaagctcttaattttaattagatcctatttgtc

SEQ ID NO: 148141 - DNA, 611 bp, Homo sapiens
ctgggtagcaagtaaatttttgttcaatgaatgaatcaatatgtcaaagaaaattttgtttcattttactctgcagttaaaatttccatttttatatgtttccgttccactaagactcacttttccatccctcttccctttatccccaattattgttccacccccagctcagtgagaggagtcagagcatgcaatagaggaatgtggcagaaaggcatgactgtctccagcccacccaaatcttaatrtgagttctgtgctctcctttttgacctttgctctgcctcttcagccttctgcctgttggtgtgcttcagtgttttttgatccccaccatctcagatcattttatctcttctttcctgatatacctttgtttctgtctactcttggcatcctaaaagccagctttataggtctggatgtgaggtggacattcttttgcatgcatggaggaagagtgttttagttaggacttttgaggttatagagaacagaaatccatatctgattaaggtagaaggagaaactattgggaggattgagaggggaaggcaggaatgcagctagacttcaggaaccaaggactcagcttagttcttccctcttgt

SEQ ID NO: 148142 - DNA, 515 bp, Homo sapiens
cattcttttgcatgcatggaggaagagtgttttagttaggacttttgaggttatagagaacagaaatccatatctgattaaggtagaaggagaaactattgggaggattgagaggggaaggcaggaatgcagctagacttcaggaaccaaggactcagcttagttcttccctcttgtttcagtctggctttctctttgtggaaggaatcatggctgctggcaatcccgaaggcttacggttttaacacggagaaattctgtattttccctattgtacaaggtccaggaaagggtgagttggccctcacattgacccagtgtgattcagtacccacccttggaccagtcaaataaccagggggcatgaggtcatattaaaactgttgggaaactgcagagcaccttccagagaaggataaggcagggtactagataaacagaggcatcctcttctaggagaaagagtgttacatttataaagagwccactgtattttaaagaagttcttactgaac

SEQ ID NO: 148143 - DNA, 609 bp, Homo sapiens
tattcttagctgaaataaaattaaaattcaaaaattaggttaacaggcttctaccctttttgatcagttatagtctggtggagaacatgtcgaggaggaagatgaaaaagagaacctgtcagtgatagtgctgatggagtttggagaaggagaaagttagtgaagttggagttggtgagaatgtatggattggtgctctgaatgttgttttttccaagagtagttttactctttttgtcaattctgccttatgagcaggaataatagtaggtggtgtagcctggtcacagatcattattcttcccagtgtacaaagctactcagaattaatagcagtcacagatgattactgttagctcctttccctcctaatgttaagagctcctgacccagaaaaaatatatatcatttgaggtctgtagactaataaaaagcatttctttatgttaaagaaaaataaaacattccttttactttttttaaaaattggaaagtcggaacataaaactcttyagtataactgctgatctttgggggaaaaccagtctcttagtgaatagaacagcattaccctttgggccaaatggaacccagccaagagctaaacca

SEQ ID NO: 148144 - DNA, 530 bp, Homo sapiens
cacatttctatattttacattcactttttgaacaattaagttgctcttcttttgaagattggatttattataacatgtatatgtatatttaatgactactaatttatatttacttttatttgttcagaattgaaatctccttgaacttataaattatataagtaaccattgattattttgacytaacttgtcttctcttgcctcctgtgaatagatatactaagaacaatgtcaggtcttgtgatttgttaaaggatacaaagttacagctagataggaggaatctaccactgcaggatggctatagttaacaaaattatgtagtttcaggtaacacaagtgataaatgtttgagatgatgcatttgctaattgccctgatctgatcactatacatcatatgtatcagaacatcactgtgaaccccatgagtatgtacaattatttgtccattaaaaaaaataaaatagaaagtatgggtggtataaaatatttgatgtcgtgcatatttttaaatcttcacaaaaaaat

SEQ ID NO: 148145 - DNA, 579 bp, Homo sapiens
gcaagccctagtgccagacagggaaaataaaaaaatgaacaaaaagagtatccatttttgtctaaaccacatcctacattcggagaatggtatcaatcaaatgataataaaactataaaatttagctgtgattgagtatcctagatgacagttacaggacaggatgtgattgcttgataaagttgacctaatgtaagttgaggcagcaagaaagttttcccttgaagaagtgacgttttagctcagagcagatggataataggatttaaagatggtggagtgagtgggtgcagttttctggggagaggcctaaaatggttcatctctgtgtcccygctcaaatctcatcttgaattgtaatccccatgttacaggggagggacctggtgggcggtgattgaatcatggtggtgctttcctccaagctgttcttgtgatagtgagcaacttctcacgagatctgatggtttaaaagtgtgtggcagttcccccttcaagctctctctctcttctcctgccaccatgtaagatgttccttgcctcctcttccccttccaccatgattgtaagtttcctgag

SEQ ID NO: 148146 - DNA, 433 bp, Homo sapiens
agggaaaaatggtttcatgggctgggcccaggaccccactactctgtgtagcctyagaacatggcaccctgtgttccagccactccagctccagccatggctaaaagaggccaaggtacagcttgggtcattgcttcggagggtgcaagtcccaaacattgatagcttccatatgtgttgggcctgtgagcacacagaagacaagagtggaggtttgggaacctccatctagatttcagatgatgtgtggaaacacctggatatccaggcagaagtctgctgcaggggtgaagccctcacagaggacctctactaggtcaagcagaggggaaatgtggggttggagcccccacacagagtccccactagggaactgcctagtggagctgtaagaagagggccaccatcctccagaccccagaatgttagatct

SEQ ID NO: 148147 - DNA, 641 bp, Homo sapiens
ttctgccacatgcacacagtgcctagaatgccggtctgcagggagtaatgaggggcagagcagaagcagagagaagaggccacacaccacacagcccagacagatggggtctgggcctccagctccccaccttccttaagttccatggccaaggagatacctatgtgtgcttcctgtgagcccacttttcaccgtgagctggtttgagtgttgtttttcttgctggtgaagcatgaagccaggagagagcaagcctgtgttggaggtaggaagctgatggtcctgagcagrgcaggcacaggtagacagagcccagagagtgagagaaagccagatctatggggcaccacgagcttggcacttgcacacagtctcaactgaacttcgttgcaaccctaaaagataagaattcttggcgcctgtagtcccagctacttgggaggctgaggcaggagaatggcgtgaacccgggaggcggagcttgcagtgagccgagatcccgccactgcactccagcctgggcgacagagcgagactccgtctcaaaaaaaaaaaaaaaagaattcttacccttcaatttaggtgagaacacagaggcttagggactttctcagggtcacgacactagtgctcaaaagatg

SEQ ID NO: 148148 - DNA, 641 bp, Homo sapiens
ttctgccacatgcacacagtgcctagaatgccggtctgcagggagtaatgaggggcagagcagaagcagagagaagaggccacacaccacacagcccagacagatggggtctgggcctccagctccccaccttccttaagttccatggccaaggagatacctatgtgtgcttcctgtgagcccacttttcaccgtgagctggtttgagtgttgtttttcttgctggtgaagcatgaagccaggagagagcaagcctgtgttggaggtaggaagctgatggtcctgagcagagcaggcacaggtagacagagcccagagagtgagagaaagccagatctatggggcaccacgagcttggcacttgcacacagtctcaactgaacttcgttgcaaccctaaaagataagaattcttggcgcctgtagtcccagctacttgggaggctgaggcaggagaatggcgtgaacccgggaggcggagcttgcagtgagccgagatcccgccactgcactccagcctgggcgacagagcgagactccgtctcaaaaaaaaaaaaaaaagaattcttacccttcaatttaggtgagaacacagaggcttagggactttctcagggtcacracactagtgctcaaaagatg

SEQ ID NO: 148149 - DNA, 484 bp, Homo sapiens
ttattttctacttgtcggtggattttcagaataaacggagtacaaagaaaggatatgagtgattacagagagcaaaaaaggtattattaatttaataaaaacactgaatatttaatattacaattattgcttagacaggtcactggcacttgtagggagaggactctgatccaaaccattgctagagtccttattgtgcagttattaatayggctggctcatatgctcattactcccaaaccccaagcaactcatttcctgttgggtctccactttacgcttctccccatggagattttgcttcctgagactgaagcctggagccgggaacagatgcttggggccctcatgacagccccaagggatatttcagaaagcttggagttggtgtgtcaagaaagaaagccctttgttaagcacaccctggcactcagggaggcagggaggagggatttgccaaaacagagaaaggcaatgactcata

SEQ ID NO: 148150 - DNA, 462 bp, Homo sapiens
ggtgctgtcaggcgaggagcctggacccagacacaggactggggaagagcccttacctcagctggtgatggagtcaggggacggggtccttctgaggtttctgcacagcccctcctccacatctaccttctttcgcctgytggtgagaggtgggagatgagtagtgaagctaagattgtcactgggaccagataatgacaatcttagcttcagatttctctaatcttggtcttatttgtgtttgtggccttgggcaaattatatcactaagttggatttcgcacctgtaaatggagaaaattcctacctaaaagctgttttgagggttaaatgagatagggagtttagccatgtacctagcacatagtaaatatcaaagagggagtatttataatgatgatgatatttgtcatatcagctcactccctctcacttgtccctggccctttcctcagctttggg

SEQ ID NO: 148151 - DNA, 586 bp, Homo sapiens
ttgaacatgactcagagttgtcccatagaaagggtgaagaagccagggtctttattctttaactcctcaccatcatttgctggatccatggtccttattctctaactgcttgccatcatttgctgagggctgttggctgaggggtattaatccttgcccaccgcccccgtgcatctgacctgccccatgtgcaggctgaggaaagccttcaggaaggggtgataggtgttctcagaaggacgtcattggcacttacctgaataaasaatgacaaggagatatgagtggggtgccctgttcatagcctctctttcccattttcagcctgattctccctcacttcacctaggctttgtatccatttcatttcctcaaggaggcctttcctaactcccctatttgagacaatgccttctcatgctttatcctcctttactgcttgtttttctatctgtgtgtttttttgtctgagtcattttagtgtgggaaaagacagtaagcagacaaatatttaatatatcaggcagtcaagggcatgacagagaaaattaaagcaggagaagaagacttaggaatgtcatatggg

SEQ ID NO: 148152 - DNA, 524 bp, Homo sapiens
tgtgtaaccatcatttttgtcactctgcttttatacctcttaaaatgatgtactactggagctagaagaaaaattccagaaattatctgacatttttaatagaatgcaaaaagacagtgcttctaagtaatataaacaaaactcaagacatgrtgaaattaaaataacatgggtaaaataaatataaatgatatatggaagaatttggaggaaataaaatatacacatagattagaagagttagtgtgtactttggagttagtaaagaggagtacctttactatggaaagtggaatcataatttgacaatctagtgggataccaaacatggaacaaatcattcctatatgatttagatgaaacaaattattcctgtatgatatattattcctatattaatttagaggcaaagaatgaagagatgaaagtgggggagggaaaaagaagatcataagaagacccaggcatgttgtaatgaattgggaaaggggaaagaagtaagcaatggttaaattttagtcacc

SEQ ID NO: 148153 - DNA, 524 bp, Homo sapiens
tgtgtaaccatcatttttgtcactctgcttttatacctcttaaaatgatgtactactggagctagaagaaaaattccagaaattatctgacatttttaatagaatgcaaaaagacagtgcttctaagtaatataaacaaaactcaagacatggtgaaattaaaataacatgggtaaaakaaatataaatgatatatggaagaatttggaggaaataaaatatacacatagattagaagagttagtgtgtactttggagttagtaaagaggagtacctttactatggaaagtggaatcataatttgacaatctagtgggataccaaacatggaacaaatcattcctatatgatttagatgaaacaaattattcctgtatgatatattattcctatattaatttagaggcaaagaatgaagagatgaaagtgggggagggaaaaagaagatcataagaagacccaggcatgttgtaatgaattgggaaaggggaaagaagtaagcaatggttaaattttagtcacc

SEQ ID NO: 148154 - DNA, 387 bp, Homo sapiens
aggcaaactctggaagttttattcagttacctgggtctattgatgtcacttggactggatcaatatatcttcctggataagtcagagaagaaaaatctatgtgggacctactctgtagggagagcacgttcgtgccagagtgacagctctgtgaggagagtgttaagcactcacgcactgaggaccccgccatctccctggctggagctctaccttaccatccagatggaatgagcaatgagaaggggagtgaatgcgtgggaagctgtcatacatttacamacaaaaggatccagcatcaactgagctcctgtggtatgccaagctgcatgatggacactggaatcacaggactaatgaggcaccatgactgctcatatgggacaa

SEQ ID NO: 148155 - DNA, 569 bp, Homo sapiens
ccccacagatgtccagggtccttgaaatgccgcaggttgccttgggccctttctatgctgcctccacaggcctccttcacaggcaggtccctgggtcctgagcctggctctctaagaacttacagagcctggtgctgtgacccagagcctggctaagtggcagccacagtcaattctgaaatctgatgctgagtcttaaagagggatgtacctctgccaaccctccctcttctccactgatattaagcctggggactggagcttttggggactggagcttttrgggtcacattatctatggtcagagatttctaaaagattttttttgttttgttttgtgttggtttctacttattactactgggttttaagactccagatgtctttgaggctcagcccttgattgcaaatgggagcaaagtaaatgagacagactgcttggggaagatgggtggcaattaaggattaagatgagtaaatggggaagacagatagatatcttaccctcttgccaggactaaattaaacatctgtcttgcctgatggcttctgtggcgttctagagaagc

SEQ ID NO: 148156 - DNA, 569 bp, Homo sapiens
ccccacagatgtccagggtccttgaaatgccgcaggttgccttgggccctttctatgctgcctccacaggcctccttcacaggcaggtccctgggtcctgagcctggctctctaagaacttacagagcctggtgctgtgacccagagcctggctaagtggcagccacagtcaattctgaaatctgatgctgagtcttaaagagggatgtacctctgccaaccctccctcttctccactgatattaagcctggggactggagcttttggggactggagcttttagggycacattatctatggtcagagatttctaaaagattttttttgttttgttttgtgttggtttctacttattactactgggttttaagactccagatgtctttgaggctcagcccttgattgcaaatgggagcaaagtaaatgagacagactgcttggggaagatgggtggcaattaaggattaagatgagtaaatggggaagacagatagatatcttaccctcttgccaggactaaattaaacatctgtcttgcctgatggcttctgtggcgttctagagaagc

SEQ ID NO: 148157 - DNA, 591 bp, Homo sapiens
cttgttctaccagttactakccgtttttctacaagcaagtcactgaaatcttctgaggctcagttttcttatctgtgaaatggagataatcctcataggtgatttgtgaggactacaccgcatgtgttgtctgaagggtttagcataatgcatgacaaattcaataaatggtggccacattattcctgttacttgtctcatttccccacgcccagctccctctcattttccctttgactgtgtgtgtctacacgcattcatagcctgacttaataaaacactgattactttatccattttagtatctcaaattggtcaagatacttgatcaggcagtccctggtatttcagaaattgtctctctctctctctccctccatttccccatatccttttctccttgatacattttaatttctccatctttcctgaaaatacctggggagacagtggccatcagcattactttgcagtcataagtcccacctggattctattcagaacatttggctaaaagagccagaatatctgccacttagagcctctctcacttagcccaccatgtttaattcatgtgtgttgcaggccatt

SEQ ID NO: 148158 - DNA, 591 bp, Homo sapiens
cttgttctaccagttactagccgtttttctacaagcaagtcactgaaatcttctgaggctcagttttcttatctgtgaaatggagataatcctcataggtgatttgtgaggactacaccgcatgtgttgtctgaagggtttagcataatgcatgacaaattcaataaatggtggccacattattcctgttacttgtctcatttccccacgcccagctccctctcwttttccctttgactgtgtgtgtctacacgcattcatagcctgacttaataaaacactgattactttatccattttagtatctcaaattggtcaagatacttgatcaggcagtccctggtatttcagaaattgtctctctctctctctccctccatttccccatatccttttctccttgatacattttaatttctccatctttcctgaaaatacctggggagacagtggccatcagcattactttgcagtcataagtcccacctggattctattcagaacatttggctaaaagagccagaatatctgccacttagagcctctctcacttagcccaccatgtttaattcatgtgtgttgcaggccatt

SEQ ID NO: 148159 - DNA, 462 bp, Homo sapiens
tgaggttctttctaaagttgaaagtgagcccataatgtggtctctgtgggctccaggctgtattcaggccagtgagttgtattggggaaataatttatcatgagaattgtggaatgtccgccttaaaaggcattggaaaggtcacctccagccacccacccacagctccaatctcttctgcatgagtgattgcagactacgcttgaactcctccagtgacagggagctcattattccagaggyagctcattccctcctcagacagctctgactgagcccgaaatctgttcctctaacttcaaacttatgatcctaatattctcaatggagtcaataagtttaaaaagataacaactaatttatcttccacaaacttcatcatatatttgaagacagagattctgtcttcccaggaattttctctttaatctggctaaacatcttcaatttctttatgaattc

SEQ ID NO: 148160 - DNA, 489 bp, Homo sapiens
gggagttagggttcactcataccacagctcactaattctctctttttwtttttttagtcttattgtatttctgtattttatttacctgtgtatccacctcataacatggcctcaaaatgtaaaatgcaaaatttgcagcaaggaaaaataaataatttcatagcaatggcagaaactcctgctatgtattcaggtttcctaatattttcttgtacaatgtctaagctaccataattttattcagtgtattttttatctcaaacattgcagttttcatctcttgaagttcaaattgagtctattgttatatcttttatgcctctactttacatagcataatatttcttttagctttttgaacatatggaatatagttataataagtgttattatgcccttttgtactaattctaccatctggatcaatttttattgatttttctccccattatgggtataattttaatgcttctttacacagttgttttt

SEQ ID NO: 148161 - DNA, 489 bp, Homo sapiens
gggagttagggttcactcataccacagctcactaattctctctttttatttttttagtcttattgtatttctgtattttatttacctgtgtatccacctcataacatggcctcaaaatgtaaaaygcaaaatttgcagcaaggaaaaataaataatttcatagcaatggcagaaactcctgctatgtattcaggtttcctaatattttcttgtacaatgtctaagctaccataattttattcagtgtattttttatctcaaacattgcagttttcatctcttgaagttcaaattgagtctattgttatatcttttatgcctctactttacatagcataatatttcttttagctttttgaacatatggaatatagttataataagtgttattatgcccttttgtactaattctaccatctggatcaatttttattgatttttctccccattatgggtataattttaatgcttctttacacagttgttttt

SEQ ID NO: 148162 - DNA, 489 bp, Homo sapiens
gggagttagggttcactcataccacagctcactaattctctctttttatttttttagtcttattgtatttctgtattttatttacctgtgtatccacctcataacatggcctcaaaatgtaaaatgcaaaatttgcagcaaggaaaaataaataatttcrtagcaatggcagaaactcctgctatgtattcaggtttcctaatattttcttgtacaatgtctaagctaccataattttattcagtgtattttttatctcaaacattgcagttttcatctcttgaagttcaaattgagtctattgttatatcttttatgcctctactttacatagcataatatttcttttagctttttgaacatatggaatatagttataataagtgttattatgcccttttgtactaattctaccatctggatcaatttttattgatttttctccccattatgggtataattttaatgcttctttacacagttgttttt

SEQ ID NO: 148163 - DNA, 489 bp, Homo sapiens
gggagttagggttcactcataccacagctcactaattctctctttttatttttttagtcttattgtatttctgtattttatttacctgtgtatccacctcataacatggcctcaaaatgtaaaatgcaaaatttgcagcaaggaaaaataaataatttcatagcaatggcagaaactcctgctatgtattcaggtttcctaatattttcttgtacratgtctaagctaccataattttattcagtgtattttttatctcaaacattgcagttttcatctcttgaagttcaaattgagtctattgttatatcttttatgcctctactttacatagcataatatttcttttagctttttgaacatatggaatatagttataataagtgttattatgcccttttgtactaattctaccatctggatcaatttttattgatttttctccccattatgggtataattttaatgcttctttacacagttgttttt

SEQ ID NO: 148164 - DNA, 557 bp, Homo sapiens
tgtaattcaccaattaaaaggatgaagaagaaaaaaattacataattatctcaatagatataggaaagtcatttgctaaaattcaatgtctgtccttgtttaaaattagaaaggaataaaaagtttagcaaattaatgacaaaaggaaatttccttaatttcataaaggacaacgacaaaamaattgcagcaaacaccattcttaatgataaatattgaaagacttacctttgatatcaggagtgatgcaatgatgttcgttttcaccttccttattcaacattatattgcaggtcttatatagtccagggcaagaggcagaggaggataaaataattgaaaatgaatatataggataatcttgtagttcataagcatgatgattgccttttcacactcgtatgagatgtgcctcccttgaaccttgttatgatgttggcacattacccatctgatgtgaaaaagaaaaataaggaaaaaaataaataaagctgtcactttgtgtatttgaaaactgaaaataatgtacaaataaactgatagagttaaattaattt

SEQ ID NO: 148165 - DNA, 557 bp, Homo sapiens
tgtaattcaccaattaaaaggatgaagaagaaaaaaattacataattatctcaatagatataggaaagtcatttgctaaaattcaatgtctgtccttgtttaaaattagaaaggaataaaaagtttagcaaattaatgacaaaaggaaatttccttaatttcataaaggacaacgacaaaaaaattgcagcaaacaccattcttaatgataaatattgaaagacttacctttgatatcaggagtgatgcaatgatgttcgttttcaccttccttattcaacattatattgcaggtcttatatagtccagggcaagaggcagaggaggataaaataattgaaaatraatatataggataatcttgtagttcataagcatgatgattgccttttcacactcgtatgagatgtgcctcccttgaaccttgttatgatgttggcacattacccatctgatgtgaaaaagaaaaataaggaaaaaaataaataaagctgtcactttgtgtatttgaaaactgaaaataatgtacaaataaactgatagagttaaattaattt

SEQ ID NO: 148166 - DNA, 557 bp, Homo sapiens
tgtaattcaccaattaaaaggatgaagaagaaaaaaattacataattatctcaatagatataggaaagtcatttgctaaaattcaatgtctgtccttgtttaaaattagaaaggaataaaaagtttagcaaattaatgacaaaaggaaatttccttaatttcataaaggacaacgacaaaaaaattgcagcaaacaccattcttaatgataaatattgaaagacttacctttgatatcaggagtgatgcaatgatgttcgttttcaccttccttattcaacattatattgcaggtcttatatagtccagggcaagaggcagaggaggataaaataattgaaaatgaatatataggataatcttgtagttcataagcatgatgattgccttttcacactcgtatgagatgtgcctcccttgaaccttgttatgatgttggcacattacccatctgatgtgaaaaagaaaaataaggaaaaaaataaataaagctgtcactttgtgtatttgaaaactgaaaataatrtacaaataaactgatagagttaaattaattt

SEQ ID NO: 148167 - DNA, 580 bp, Homo sapiens
aggcaactcattgaagtcctctgagccttagggtggtatgcatagttctaagatggttcccaagctctccattccaagtgtacctccctacacaataccctccctggagtgtggagtatcactcacatgattagattaccaattagttgactttgtgttaatcaaaagggaggtggtcttgggtgggtctgacctaatcaggagagctctttctaaaaaggtagtcagactcagcaactccataacttggtatctacccaaaggaaaatagatcaaactgccaaaaagacacctgcacttacatgtttatcacagcactagtcacaatagcaaagacatggaaccaacytagatgcccaataagggtggattgaataaaggaaatatggtacatatacactgtggagtactatatagccataaaaagaacaaaatcatgttctttgcagcaagatggatgtagctggaggtcattatcctaagtgaatttttgcagaaatcaaaaactaaataccacatattcccacttgttagcaggagctaaacattgggtacacatggacataaggatgggaacgat

SEQ ID NO: 148168 - DNA, 560 bp, Homo sapiens
tgttgcccaggtaggatgcttaacctccatgaacagtgttactagtcagcacttttctaccccaccctagccaagaaacacaccccagatggatttaatcacctacctagggtgtcctgggggctgtggaggagttagaagtggctacagagaagtcaactgcatgaacatcctcaaagttgtcttaagtggctttaatccagaaagatccagggattctcaacacatgaaaaataagttcagggccaatcgcttccttcctcactcctggaatcatttttccagctctgctgtctgcacaccccatgggagctrttcattaatgaggatgagaaatgcctaaattacacctctggttcatgtccagctcattcaggtggtaagaaagtgagataactcactcctgcatcacttcgattattatcatcaagtcatttccccttcagcacagagaagccattgaccaggggaccaaaactgcatccttccctcctcatgtctgcatcccactctgaccgccaggctcttcctttccattcctgttttctttatcaatggaa

SEQ ID NO: 148169 - DNA, 560 bp, Homo sapiens
tgttgcccaggtaggatgcttaacctccatgaacagtgttactagtcagcacttttctaccccaccctagccaagaaacacaccccagatggatttaatcacctacctagggtgtcctgggggctgtggaggagttagaagtggctacagagaagtcaactgcatgaacatcctcaaagttgtcttaagtggctttaatccagaaagatccagggattctcaacacatgaaaaataagttcagggccaatcgcttccttcctcactcctggaatcatttttccagctctgctgtctgcacaccccatgggagctattcattaatgaggatgagaaatgcctaaattacacctctggttcatgtccagctcattcaggtggtaagaaagtgagataactcactcctgcatcacttcgattattatcatcaagtcatttccccttcagcacagagaagccattgaccaggggaccaaaactgcatccttccctcctcatgtctgcatcccactctgaccsccaggctcttcctttccattcctgttttctttatcaatggaa

SEQ ID NO: 148170 - DNA, 444 bp, Homo sapiens
gtaaaatagttgtagaaggaagagtagataaaatgggggaacaaatgggacattttcccagctgggcaggaggatgctgattgagtacaatcaatgccaccagcccgctaacgagacccaatcaggcggggcgattagagatattcttcagggaaagaagcctgacagctgcaggaaagtttctgcttttccagaggagagygagtgggagagacaggcagagtggtgtggcagagaggggagggagagttgggggaaatcgaatcaacaaagctgagcacccacccagcccttccttgaagaagtcaaagaggagaaaaggagggtaaagcctccagagagatccttctgctgtctccattttcttagacattgattttcatattcattcccactgacttccattctcctgctgggctagggagtcatgggtctgccacagtg

SEQ ID NO: 148171 - DNA, 444 bp, Homo sapiens
gtaaaatagttgtagaaggaagagtagataaaatgggggaacaaatgggacattttcccagctgggcaggaggatgctgattgagtacaatcaatgccaccagcccgctaacgagacccaatcaggcggggcgattagagatattcttcagggaaagaagcctgacagctgcaggaaagtttctgcttttccagaggagagtgagtgggagagacaggcagagtggtgtggcagagaggggagggagagttgggggaaatcgaatcaacaaagctgagcacccacccagccyttccttgaagaagtcaaagaggagaaaaggagggtaaagcctccagagagatccttctgctgtctccattttcttagacattgattttcatattcattcccactgacttccattctcctgctgggctagggagtcatgggtctgccacagtg

SEQ ID NO: 148172 - DNA, 453 bp, Homo sapiens
ttaataaacctaaactaattgaaatatataaaaataccatacctcacagcctcttggagccaaggtagagtaaccagtaccagatataccctcctaccgaaaataactaagaattttaagaaaattttactttcctgtttstgaaacaatgtttcttaaaactttagacattaagcaaaaaagaacagtgatttctgagagatgggaaataaaggagataagtgaactctacagctgcccttggttcattgcctaaagagagtttccaggctgtggtgcaaggagggaaacccaggaggagtccagtgatctctgaattgaggggatagatcaagagtcagaggagaccaggggagttagggttcactcataccacagctcactaattctctctttttatttttttagtcttattgtatttctgtattttatttacctgtgtatccacctcat

SEQ ID NO: 148173 - DNA, 560 bp, Homo sapiens
atcaaaattctgtaatgggtacttcatttttaattctttttttccctttttccttctctttagatcttacagctaatatttgttttattttagacraatgataccaagtatttatctattcttaactaataatcagtccatcagtattttcacgctcatggagctacatactttttttatattaatgacctgttttacactcctttggctatcaggtccttgaatattaattagaggccacctagcttagatatctacatttaacagtgcctgaaaagaatatataatggacactttatgaaaatgacataggagtttatggagaatgacagattctaccctctggaatgaaaattgtacagttttctctgtcaaccaacaaaatcagttatagaacatattcagggagttctaacgcccagatcttcctctctgggagacaggtaatgtggatgtgggagttttcctgttctggtcattgttgtctgtttgtcccatgttgctcttgttctcccttgtctatattgtaatgcttgcatctttccttagggcctgtttac

SEQ ID NO: 148174 - DNA, 540 bp, Homo sapiens
aagagagtagagtgtaaaagagatggggagaaaaggagagtaaactaagaagcagagagatgcagggttatcaaaagcaaaagaagaagagttcgcctgctttgctggcaacccccaaaagagtcagaaatctgttggccatggagggtcctgacttaagtgtctatgactctaagagatggcatgtgttttatctgtctctcaggggcatctaacagaagacrgcacaggagaaatgggtaatcctggaccagctgtttttcttcagccattcattcatgcctccacctttaccaaaaagcataagccaaatggtcctcttcatttagttaatagcaaagtaattttgctgaaaaccacattttaaaatatgaaatcaaacaccacagtgcaaagttcacagaatgctgttcctgatagtttttactctgtgctcaaatctggggtggggagagtagagaaatcaggcacactagttttaaccaactactgcatttttctaacccagaaccaaaatttatgaataccttcagagattgt

SEQ ID NO: 148175 - DNA, 540 bp, Homo sapiens
aagagagtagagtgtaaaagagatggggagaaaaggagagtaaactaagaagcagagagatgcagggttatcaaaagcaaaagaagaagagttcgcctgctttgctggcaacccccaaaagagtcagaaatctgttggccatggagggtcctgacttaagtgtctatgactctaagagatggcatgtgttttatctgtctctcaggggcatctaacagaagacggcacaggagaaatgggtaatcctggaccagctgtttttcttcagccattcattcatgcctccacctttaccaaaaagcataagccaaatggtcctcttcatttagttaatagcaaagtaattttgctgaaaaccacattttaaaatatgaaatcaaacaccacagtgcaaagytcacagaatgctgttcctgatagtttttactctgtgctcaaatctggggtggggagagtagagaaatcaggcacactagttttaaccaactactgcatttttctaacccagaaccaaaatttatgaataccttcagagattgt

SEQ ID NO: 148176 - DNA, 540 bp, Homo sapiens
aagagagtagagtgtaaaagagatggggagaaaaggagagtaaactaagaagcagagagatgcagggttatcaaaagcaaaagaagaagagttcgcctgctttgctggcaacccccaaaagagtcagaaatctgttggccatggagggtcctgacttaagtgtctatgactctaagagatggcatgtgttttatctgtctctcaggggcatctaacagaagacggcacaggagaaatgggtaatcctggaccagctgtttttcttcagccattcattcatgcctccacctttaccaaaaagcataagccaaatggtcctcttcatttagttaatagcaaagtaattttgctgaaaaccacattttaaaatatgaaatcaaacaccacagtgcaaagttcacagaatgctsttcctgatagtttttactctgtgctcaaatctggggtggggagagtagagaaatcaggcacactagttttaaccaactactgcatttttctaacccagaaccaaaatttatgaataccttcagagattgt

SEQ ID NO: 148177 - DNA, 540 bp, Homo sapiens
aagagagtagagtgtaaaagagatggggagaaaaggagagtaaactaagaagcagagagatgcagggttatcaaaagcaaaagaagaagagttcgcctgctttgctggcaacccccaaaagagtcagaaatctgttggccatggagggtcctgacttaagtgtctatgactctaagagatggcatgtgttttatctgtctctcaggggcatctaacagaagacggcacaggagaaatgggtaatcctggaccagctgtttttcttcagccattcattcatgcctccacctttaccaaaaagcataagccaaatggtcctcttcatttagttaatagcaaagtaattttgctgaaaaccacattttaaaatatgaaatcaaacaccacagtgcaaagttcacagaatgctgytcctgatagtttttactctgtgctcaaatctggggtggggagagtagagaaatcaggcacactagttttaaccaactactgcatttttctaacccagaaccaaaatttatgaataccttcagagattgt

SEQ ID NO: 148178 - DNA, 566 bp, Homo sapiens
ttaattttatgacttatgaagacagtatttgctaccattttgtgttttgttaacttcaataaggtaaaatacaaatatcctatctggtccttatattggaaaagtaacaataaataacatgcgtactttttcatattaaagaagtcatgaagtgggaacaatataatgccctaagagaacgttgaaagcagsaaccacatttgtgcttaatcacatctactttccaggaaggatcccacataatgatctcctcaagttctcggatttttactgagcctgccacaaaatgcacaaatcccaacctttaccccttgacttcccattcttcatctaatttataaaaatcagagaagaatttagtgaactataatgccttgattcaggcccactagggctgggattcacagccctgccattgcaagactgacatcccttgaaccctcaactctcctggagaagatgctgctgtcctgcgattcatgcctgaaatagttataggtttactgagactataatattggtcacagtcagtggtgagactgctttgtgaatggcggccccagagt

SEQ ID NO: 148179 - DNA, 603 bp, Homo sapiens
tctgtggcaattataagattacatagtgcaatcatgcttagatgcctttcttgaaagcatctttaccaagccatctatatttctcctgaaagtctacagcttcaaacttattccaagtgtgaccagccctatttaggagttttcttgtatggacataatgtaaacattctaaattttcatccatttatcttttttctcatattctgaagcgacacagaatatgtttaatccttttttttttttttttttttttggaaatgaggccttcaaataaatagagagggcattgatgccccttttaagtcatgttttccaaactaaactttctcaggccttttgccactcttcacgtaatatgatttctagtttactcaccagtctggttattctactccaaatggcatccagctgtctaggtcggtgtgacagctgatgcaaccatagtgtggtgtctgaatgtgacccatccaaaatgggaacgagcttgcagccccattctaaatyctgtgttctctcaatgaagtataatgttgatttagcatttgggagagccattttacattatatatttatactgaatttatgtttgattcaaactcctaa

SEQ ID NO: 148180 - DNA, 410 bp, Homo sapiens
cagggttcaaattctgtctgcaagatctggattccctccatctcccagctctttctacttggtgggcttcaagtcaagctcaggctctatgaggtggtaagayggctgccaataccaccgaagctgtgtcttctcaggttcaggtcctgtagaatagggcacgcttttcttctaacagccccagcagaagactcagatgtccattgctaaaccaatcatgatggcatggccagcgacatccagaactccacttggaaaaactgaatcgcaaacccattcccatggaaataactcttccctaacccaaaagctaagatgtgggctcaagggaaagacggtatctcaggggaaaactactgacaccattagaagagtggttgaacactacgtggccaaagttacatattcac

SEQ ID NO: 148181 - DNA, 517 bp, Homo sapiens
ttgtcttttgtgactggcttgtttcatttagcataatgtcctcaaagttcacagaygttgtagcatgtgtcagaatttccttcctttttaaggctgaataatattcccttgtacgtatataccccttttttaaaattctattcatctgtcaatgaatatctgggttgttgtcaccatttggctaatgtgaataatgctgttataaggacggttttgcaaacatctcttcaagaccctgcttttgattcttttggctacattcccagaagtggagttgctcgatcatggatcatataaaaatacatcatgaaattttacccctgcacttcaacatgcatgatttaagaatgatggtattctcctgcataaatatttccttttatttgttaaggttcatattacggtagctgttagctgatgccttggtgtattagtccattctcatgctgctaataaagacacacccaagactgggtaattcataaaggagagaggtttaattgactcacagtttagc

SEQ ID NO: 148182 - DNA, 517 bp, Homo sapiens
ttgtcttttgtgactggcttgtttcatttagcataatgtcctcaaagttcacagacgttgtagcatgtgtcagaatttccttcctttttaaggctgaataatattcccttgtacgtatataccccttttttaaaattctattcatctgtcaatgaatatctgggttgttgtcaccatttggctaatgtgaataatgctgttataaggacggttttgcaaacatctcttcaagaccctgcttttgattcttttggctacattcccagaagtggagttgctcgatcatggatcatataaaaatacatcatgaaattttacccctgcacttcaacatgcatgatttaagaatgatggtattctcctgcataaatatttccttttatttgttaaggttcatattacrgtagctgttagctgatgccttggtgtattagtccattctcatgctgctaataaagacacacccaagactgggtaattcataaaggagagaggtttaattgactcacagtttagc

SEQ ID NO: 148183 - DNA, 513 bp, Homo sapiens
atatataaagtcctgatggccaaaagtcaccaaaaataaacagcttttccaaatggaatagttgcgagaagccatttttaaagatgagaaagctgtgactaagcttgatcaaggccacaaatgctaacagcttttttggtgctaatagaaaataaaaatatataggggcattaaaaaaaaaaaagagagagaggcttataggcacttcctagcacaaccacatcatccataggactctaaaatacagagtgtaactgctctatgtggaaatatgaaatgggaaacaaaagagtgaaagctcagatatttccttctaaccacagatattttgaactaaccagatcatcactgtgtaggaactaacatcctccagaactaccactagtaggagttatgtagcgtaacgtagactgtgggaataaagccatcgctctggaagttggcttgtcttttgggtactttggtcttataaaatytaggtcagtctatgttttattttatgcctttctagtg

SEQ ID NO: 148184 - DNA, 598 bp, Homo sapiens
atttttaatctatgatggttcacatttgccaagtgtctctttttcttgtttcattttgcggctcccagttggaaggaaaarttcatcccatggcttatttgaaaaggagcaagtgaagagaggtgatgtgtagatgaccacccttctttgcctttttggggggtaggtgcctttgttcacacagctgttctcgtgctgtggagaaactgccacagaatcagaaaaacagacacaaattatctgccacgatgcattttcttttcatgctaattttccctgttggaaacttagtgtatataaatgcaaggttgctcatagctgttttagaccctgcaccctatgtttctattcaatggagttaaaacaaacaaaactttaataattaagaattagagaaacagcaccagtagtttttgtttcccttggtagacttcagtatctaaaactgacaaaacaggtaagttcctggagtgctgcaatgtaaggtaattatgtatctcactcttttcaaacacactgaagtctaggcagtgccagtgagcacatcagggtggcaccagactgatccccagcagagaaacaatcaggtctagcagaa

SEQ ID NO: 148185 - DNA, 606 bp, Homo sapiens
ttctatggaaactcaaagcagtctgtcctgtttttcttaatttatagcttttcttggctatctcggtttgtggcccctgaatctacatgtagttctggtgtcataatcactcttcattcattactctatagatattgaggatgttatataaaatatggatgcaaagactttagcacaattcctggtacttattcaaagatagtagctgttgttgcattaatattgttattattttaaaccatgaaaataactgtgcaaaatggcatcatccccactgtatctgttaaaagctaagacttggagaggttgtgtgtgtgtgcatatgtgtgtttgtstgtgtatgtgtgttttcacccaggttgcacaaaagtcagtccagaattttaacctgggcattctcgctctaaagcgtgaggtctttgcaatgtgtctataatgtgatgagggaaatcaagtcttccttaagtgcacacagaagggccacctatccctgactgggggaaaaatgagtttccaatcttcttcccagcactaatagaatacgagttttctgttccagtctcaatggattagttatttctttctgaccttcatgtcttggctggt

SEQ ID NO: 148186 - DNA, 536 bp, Homo sapiens
gtgtattctttggtcagaaagagagggggagggatcaagaaagacacagtaagaaagagaggttaaaaataatgacaagcatcttatgagatttacagtctacagcaatcttttgcatgcatattttcattttccatgccagcaccatttttttaagatgtactgtttttacacaggaaaaaacattaagactcagaggggctaagaggtttatccaagttgagtggaaaaacaaacaaaatataaaaattccaaatccttgttttttcttgtttsctagtacacagggacttacagattttgtgtggagattagtatttttgtagggtcttcactggtcagttttcttaggtggacagataaccattttgctggatcctatatcaattctgcccttttcctaaccaatttcaattctttcattagagaaatgaaacaactgactgtccctcttctcttccctgtccttgctagtgagccccgacaaagcagggaggtgtgaagtatcgatgaagatgtggaaggtgtgttggctc

SEQ ID NO: 148187 - DNA, 536 bp, Homo sapiens
gtgtattctttggtcagaaagagagggggagggatcaagaaagacacagtaagaaagagaggttaaaaataatgacaagcatcttatgagatttacagtctacagcaatcttttgcatgcatattttcattttccatgccagcaccatttttttaagatgtactgtttttacacaggaaaaaacattaagactcagaggggctaagaggtttatccaagttgagtggaaaaacaaacaaaatataaaaattccaaatccttgttttttcttgtttcctagtacacagggacttacagattttgtgtggagattagtatttttgtagggtcttcactggtcagttttcttaggtggacagataaccattttgctggatcctatatcaattctgcccttttcctaaccaatttcaattctttcattagagaaatgaaacaaytgactgtccctcttctcttccctgtccttgctagtgagccccgacaaagcagggaggtgtgaagtatcgatgaagatgtggaaggtgtgttggctc

SEQ ID NO: 148188 - DNA, 539 bp, Homo sapiens
ctaccctagagacctgaggtcttcattatttcagattactgtgggttgtcatctaccattgtagacatttacttccatatcaatgaaggaatttttgctataacctatattatgtgaaatgactcatactgataataaattggccaaagacaagatcttcaatctttccatctcatccttgcttccttcttctctgtcccctcactcctccatttctgcaatttcttggccctgtgtttagtgaaaacattccttctactactggatgtgttgagagaaggatgaagattcattccaatctggctcccaatgttattaacaaccaaattgtccctaaacaccctcactttcccgctctgttggtgattatcaaaatcattgacaaacattggcttagaacatcttcatcccattggacagatccaagaggtgcatcaaacaaaaataaaacttcttgcytttggcagactcaaacctattttgaaactttcaaaatgcatcaatgtgtttaggatttttattttaaaaatactatttat

SEQ ID NO: 148189 - DNA, 414 bp, Homo sapiens
tactaacacctgcccagagtctactttgtctccacatccccaatgatttgggtgtcaagacagtctgtccactcaaatttacattcaattctatcagaggccacagtcctaactcaaagtagcctacttatgtggttctttaaaggagttttatagaggattgtctctcacaaacataagggaaatatataaggccctttaaaactcttgcttagccccatagctcatcgtgaaccactgaacccctgcttgctctgggaaagccacattggcctctcaccaattaatttactgggataacacccatctcttttccactttggaatcttcagcctcttgtttcctctccttggatamgttttacctatgcatcaagccatagctgacatggaactcagagagattgccctgaaa

SEQ ID NO: 148190 - DNA, 594 bp, Homo sapiens
tgtctctcacaaacataagggaaatatataaggccctttaaaactcttgcttagccccatagctcatcgtgaaccactgaacccctgcttgctctgggaaagccacattggcctctcaccaattaatttactgggataacacccatctcttttccactttggaatcttcagcctcttgtttcctctccttggataagttttacctatgcatcaagccatagctgacatggaactcagagagattgccctgaaatatccttccctgggctgagtaaggttctctatgttactcttcatcatttgccctatatttgcattcataacaccaaaaattgtgaacacttatttacttatttgttaagttatttgraatgtataaaattcgatgatgcatgaagatagggtcttgttgattgtacatttctccttgtatgtagtatattacaggtgctcaaacaggtgagcacttcgaccatgacaacaaaaagtagatagaataaaagttgccagagtcattcagcccattgttgataatcaattaatatcttaatctatatgattctgtttttgcttcatatttgtaaatgtatagtg

SEQ ID NO: 148191 - DNA, 594 bp, Homo sapiens
tgtctctcacaaacataagggaaatatataaggccctttaaaactcttgcttagccccatagctcatcgtgaaccactgaacccctgcttgctctgggaaagccacattggcctctcaccaattaatttactgggataacacccatctcttttccactttggaatcttcagcctcttgtttcctctccttggataagttttacctatgcatcaagccatagctgacatggaactcagagagattgccctgaaatatccttccctgggctgagtaaggttctctatgttactcttcatcatttgccctatatttgcattcataacaccaaaaattgtgaacacttatttacttatttgttaagttatttggaatgtataaaattcgatgatgcatgaagatagggtcttgttgattgtacatttctccttgtatgtagtatattayaggtgctcaaacaggtgagcacttcgaccatgacaacaaaaagtagatagaataaaagttgccagagtcattcagcccattgttgataatcaattaatatcttaatctatatgattctgtttttgcttcatatttgtaaatgtatagtg

SEQ ID NO: 148192 - DNA, 594 bp, Homo sapiens
tgtctctcacaaacataagggaaatatataaggccctttaaaactcttgcttagccccatagctcatcgtgaaccactgaacccctgcttgctctgggaaagccacattggcctctcaccaattaatttactgggataacacccatctcttttccactttggaatcttcagcctcttgtttcctctccttggataagttttacctatgcatcaagccatagctgacatggaactcagagagattgccctgaaatatccttccctgggctgagtaaggttctctatgttactcttcatcatttgccctatatttgcattcataacaccaaaaattgtgaacacttatttacttatttgttaagttatttggaatgtataaaattcgatgatgcatgaagatagggtcttgttgattgtacatttctccttgtatgtagtatattacaggtgctcaaacaggtgagcasttcgaccatgacaacaaaaagtagatagaataaaagttgccagagtcattcagcccattgttgataatcaattaatatcttaatctatatgattctgtttttgcttcatatttgtaaatgtatagtg

SEQ ID NO: 148193 - DNA, 655 bp, Homo sapiens
tgataatcaattaatatcttaatctatatgattctgtttttgcttcatatttgtaaatgtatagtgtgtcaactttgtaaaaacttgacattgtggaaatctgtataggtattgtataaataagttttcttcactycagacaagagagagcaactactattttgaaaagggacttaattgtgaaaaatagggagctcgtataattgatgcgaaaatggaggagtatgcttaatgaggagacagaaaccagaagaacatacaattcagacagtagcagcaatgctttaaagattctcattgacactataccattgctcccagacactactggaatctctgggcactatcattatctctcactgcagaaactctgcagtaactgtcatggatgacctcttttagtaactgactttaacttcaaagtcctgaattagagggctgcttgatcaaggactggttatattatctagccctggtctctggattagacagcgaaagaactgcccacttttgcacaggcattttgagatggggaatgtcatcccacacaatgaattattgcccccaaatacggaagagagatgaattatgggcacctctcaagcagctgatcaatcaaaccagccaagcaacataccaaccaacagcaattgtt

SEQ ID NO: 148194 - DNA, 655 bp, Homo sapiens
tgataatcaattaatatcttaatctatatgattctgtttttgcttcatatttgtaaatgtatagtgtgtcaactttgtaaaaacttgacattgtggaaatctgtataggtattgtataaataagttttcttcacttcagacaagagagagcaactactattttgaaaagggacttaattgtgaaaaatagggagctcgtataattgatgcgaaaatggargagtatgcttaatgaggagacagaaaccagaagaacatacaattcagacagtagcagcaatgctttaaagattctcattgacactataccattgctcccagacactactggaatctctgggcactatcattatctctcactgcagaaactctgcagtaactgtcatggatgacctcttttagtaactgactttaacttcaaagtcctgaattagagggctgcttgatcaaggactggttatattatctagccctggtctctggattagacagcgaaagaactgcccacttttgcacaggcattttgagatggggaatgtcatcccacacaatgaattattgcccccaaatacggaagagagatgaattatgggcacctctcaagcagctgatcaatcaaaccagccaagcaacataccaaccaacagcaattgtt

SEQ ID NO: 148195 - DNA, 655 bp, Homo sapiens
tgataatcaattaatatcttaatctatatgattctgtttttgcttcatatttgtaaatgtatagtgtgtcaactttgtaaaaacttgacattgtggaaatctgtataggtattgtataaataagttttcttcacttcagacaagagagagcaactactattttgaaaagggacttaattgtgaaaaatagggagctcgtataattgatgcgaaaatggaggagtatgcttaatgaggagacagaaaccagaagaacatacaattcagacagtagcagcaatgctttaaagattctcattgacactataccattgctcccagacactactggaatctctgggcactatcattatctctcactgcagaaactctgcagtaactgtcatggatgacctcttttagtaactgactttaacttcaaagtcctgaattagagggctgcttgatcaaggactggttatattatctagccctggtctctggattagacagcgaaagaactgcccacttttgcacaggcattttgagatggggaatstcatcccacacaatgaattattgcccccaaatacggaagagagatgaattatgggcacctctcaagcagctgatcaatcaaaccagccaagcaacataccaaccaacagcaattgtt

SEQ ID NO: 148196 - DNA, 480 bp, Homo sapiens
tggtctttcttgcacaaagcagattatattgcccagggtttttsagtaattagaagaatgagaatggggttgagagtaaggcctcaaaaggaagaaactaggcttccctaatggttaatggcagagcgatgaccaagagattaactaaaagtgaaataaaataaaaagtagaaatgacaataactacaaactaatgaagttaagttttactagtgacatgtaaacttcttattacttagctttcactttgtaatgctacaggaacaaacaatctccaaattttggtaaattacagcaattaagttttagatccctttcacattccatgtcagcataggtcagcagagtcagctgccactatgcttccatctatggctttgcaccatcttactcattttgtgatcaagctgtaggagcagtttcattctgggttacagtgaacaagttacagttcttaatgtttctgctcccatggcacac

SEQ ID NO: 148197 - DNA, 480 bp, Homo sapiens
tggtctttcttgcacaaagcagattatattgcccagggtttttgagtaattagaagaatgagaatggggttgagagtraggcctcaaaaggaagaaactaggcttccctaatggttaatggcagagcgatgaccaagagattaactaaaagtgaaataaaataaaaagtagaaatgacaataactacaaactaatgaagttaagttttactagtgacatgtaaacttcttattacttagctttcactttgtaatgctacaggaacaaacaatctccaaattttggtaaattacagcaattaagttttagatccctttcacattccatgtcagcataggtcagcagagtcagctgccactatgcttccatctatggctttgcaccatcttactcattttgtgatcaagctgtaggagcagtttcattctgggttacagtgaacaagttacagttcttaatgtttctgctcccatggcacac

SEQ ID NO: 148198 - DNA, 414 bp, Homo sapiens
caagttctcagtgatatgtaaggcaattcttcgtaagcagacggttcaaatgtttggaagttccctagacttgagaacaaaatagccttcagcattttttttttccatctgtattctttcttctagccagaagccaactactgggcatctttgaaggtaaaccattttctgataaattgtaggctgaaaacaatttgtattttcatttccagattkcttggcatcagggatccaattgcattgaactgatcaatggcacatatctgggggagtcctgaatgcatccaatctatcgtcaccaatcctctgtggttttgccctgacagcttccatgtgggctcagagaagggctgggctgccaaaggattgtaaatatgagcctggggtggggcccaagtcttccagatgtggctg

SEQ ID NO: 148199 - DNA, 369 bp, Homo sapiens
agtaatttttactggcctgtgatgtacaggaattaagtaaataataagtacagaaattaaggataagtatgtagaaaatataacaatttgatacagtgattttgtgactataaaatataaagttctaaatatggttcgtatttcaygtagctctttttcatttacttttctaatgatttacaatcttttttttttcacaaaagtattattccactaatattgggaaaataatctatcaccttgatgcaatgagtttgaaaagcacttatctaaatcttccatacttttcataccttcctaaattttgtaggttttctgaaaattacatcatcaaaggatatataaggtagactaacaattggagcagaa

SEQ ID NO: 148200 - DNA, 614 bp, Homo sapiens
ttaacaaataatgcaaaataattgaggaaaaatatagatttaattagaaaatattccatgagaaaaatcaggaataaaattcttattaaaatagccrtatttaattccggggtaatttagagcacagtcagaaaacatgagttcatatctccactctttcaattattatttgtataaccttgaccaagtgtccaaaaatccctgatgctcactttattcattgaaagtgtgagtaataatagtaactatctaataaaattaacctcttcttgaattgtagatccaggtattttgaaaatatgagtatatattttgagaagattttaaacacatatgaccctttttttttaccatcttttataagaaaaaaaaatgcttttatttttggcatccccaaaagacatccaaacacactatagtacagcaggctgttgataattgttacaactgggtgttgggtacagtaggtttcattatattgttgtttctatttttgttaatatttgaatattctcataattttaaaaagttgtttaaaaaactctaatatcactacttaattatctgatagtataaaagtctgtctggccaattctgccataaaaatttatttt

SEQ ID NO: 148201 - DNA, 614 bp, Homo sapiens
ttaacaaataatgcaaaataattgaggaaaaatatagatttaattagaaaatattccatgagaaaaatcaggaataaaattcttattaaaatagccatatttaattccggggtaatttagagcacagtcagaaaacatgagttcatatctccactctttcaattattatttgtataaccttgaccaagtgtccaaaaatccctgatgctcactttattcattgaaagtgtgagtaataatagtaactatctaataaaattaacctcttcttgaattgtagatccaggtattttgaaaatatgagtatatattttgagaagattttaaacacatatgaccctttttttttaccatcttttataagaaaaaaaaatgcttttatttttggcatccccaaaagacatccaaacayactatagtacagcaggctgttgataattgttacaactgggtgttgggtacagtaggtttcattatattgttgtttctatttttgttaatatttgaatattctcataattttaaaaagttgtttaaaaaactctaatatcactacttaattatctgatagtataaaagtctgtctggccaattctgccataaaaatttatttt

SEQ ID NO: 148202 - DNA, 614 bp, Homo sapiens
ttaacaaataatgcaaaataattgaggaaaaatatagatttaattagaaaatattccatgagaaaaatcaggaataaaattcttattaaaatagccatatttaattccggggtaatttagagcacagtcagaaaacatgagttcatatctccactctttcaattattatttgtataaccttgaccaagtgtccaaaaatccctgatgctcactttattcattgaaagtgtgagtaataatagtaactatctaataaaattaacctcttcttgaattgtagatccaggtattttgaaaatatgagtatatattttgagaagattttaaacacatatgaccctttttttttaccatcttttataagaaaaaaaaatgcttttatttttggcatccccaaaagacatccaaacacactatagtacagcaggctgttgataattgttacaactgggtgttgggtacagtaggtttcattatattgttgtttctatttttgttaatrtttgaatattctcataattttaaaaagttgtttaaaaaactctaatatcactacttaattatctgatagtataaaagtctgtctggccaattctgccataaaaatttatttt

SEQ ID NO: 148203 - DNA, 462 bp, Homo sapiens
tggatttttgtgggcaactgacttgaggaagagagagaattgaatataggaaggcaacttgaaaacaaggaatgggggcattaactaaaatgtaagtctgttttctggtgcttaagtttgtcaaattgctcattagctttgaccaaacaatcatttagagaagcgatttttgaatcagaatttcattctgggttttctgcataccaactaaaaaatgctttccattgaggttgagtgatcttgttctctgtttgtttgtttctattatgtctcttaaaagaacaacattttagagtcaaatgtgcacacaggatccactgaaggtccaaatgatccttggtaaagttatgacatttggaaagataatataatagttaacattatattcagaatacatacagaggcagkatttttttttttccacgaaggaggataatatttagccttaaaatgcttataaga

SEQ ID NO: 148204 - DNA, 458 bp, Homo sapiens
aatctagctgggcatggtggcacatgcctgtaatcccatactcaggaggctgaggcrtgagaatcactggaacccgggaggtagaggctgcagtgagccaagattggacaaccacactccagcctcattgactgagggacactctgtctcagaaaaaaaaaaaaaaaaaaaaaaaaaccggaaggaaaaagaaccctctgctcttgacctgggcataatggtttttacactcattcaggggaaattggctcaactttaatttgttagtcaaaattgtgtaagctgaaccagttgaaatggctatgctgttctctattgattctgctattaatcattgttcatcttcaattagggcaccataaaattaattttttccttgcacattgatgtggatggtctactgctgcgagcttcatctttaatattgtctcatctctacttaataggagttatccatt

SEQ ID NO: 148205 - DNA, 440 bp, Homo sapiens
agccattggtttgattgtgcttgtcttcaggattgtactagttaagctatgttacatgccctgtcactgttctcaaaaaaaaaaaaaaagtaaaagatcatcagaaaaccttcagcatccattgaaagatctgctcttgattggtcattatggctccagcctgtattcccagcactttgggaggccaaagcaggcagatcacttgagaccaggagtttgagaccagcctggccaacatagcaaaagcctgtatctactaaaaatacaaaaatctagctgggcatggtggcacatgcctgtaatcccatactcaggaggctgaggcatgaraatcactggaacccgggaggtagaggctgcagtgagccaagattggacaaccacactccagcctcattgactgagggacactctgtctcagaaaaaaaaaaaaaaaaaaa

SEQ ID NO: 148206 - DNA, 440 bp, Homo sapiens
agccattggtttgattgtgcttgtcttcaggattgtactagttaagctatgttacatgccctgtcactgttctcaaaaaaaaaaaaaaagtaaaagatcatcagaaaaccttcagcatccattgaaagatctgctcttgattggtcattatggctccagcctgtattcccagcactttgggaggccaaagcaggcagatcacttgagaccaggagtttgagaccagcctggccaacatagcaaaagcctgtatctactaaaaatacaaaaatctagctgggcatggtggcacatgcctgtaatcccatactcaggaggctgaggcatgagaatcactggaacccgggaggtaraggctgcagtgagccaagattggacaaccacactccagcctcattgactgagggacactctgtctcagaaaaaaaaaaaaaaaaaaa

SEQ ID NO: 148207 - DNA, 612 bp, Homo sapiens
ggccttacattacaggagtgaaaattaggaaagctgtcagatattaatcaattcctagtcatttggggctaattgttataggggtttagtttgacttctcagaattgttattagaattagtagtctggcttctgggaacaatttactataaataatgaatgggttggctagctgggctggttgctggagtttgagggtcagagttctatttttatttatggtctggttattgtccatttgtatgttcagtcttccacttggctctgctatttactacctgcttgattttaggtaaatgatttaagcccttcctttcctaagttttatccaatgtaaaataatgttaataataacatctattaaaaagatttttggtgatgattaaagggtagagaacttagaccagtgtctggcaaacagtaagtgatatttacatgcttcttatatattttctatttcyttgaatagagtttgataattttatagttttattaatataatttctgtacatttgtctttcctattcatacttttaactaaagatgttttaaaatatgtcttgaaacttgtattttaatatatcataaatatattgtactttgcatgtttatt

SEQ ID NO: 148208 - DNA, 383 bp, Homo sapiens
atcatcataattcagaaaatagaataatttatttcatgtacacracattcagagatgtacattgacaaccaccaacagtcaaataaaaagtgggcaaaatatgtaaagagagattttacaaaaaggaaaatgcatgttttcttaagtattagttgtgttcaatctttcacatatgagagatatcctaattaagggtttattgatataccaatgttcaagtatcaaattagtaaataatgaaaagtttgataacacattatggtggaaaatggtgaggaaatacgtacacttatttttgatctgttgatgggaacaatgtccatgaataaattttgatggtaaaaacaaaatttgaataatgtaggttttattcctgaaattct

SEQ ID NO: 148209 - DNA, 383 bp, Homo sapiens
atcatcataattcagaaaatagaataatttatttcatgtacacgacattcagagatgtacattgacaaccaccaacagtcaaataaaaagtgggcaaaatatgtaaagagagattttacaaaaaggaaaatgcatgttttcttaagtattagttgtgttcaatctttcacatatgagagatatcckaattaagggtttattgatataccaatgttcaagtatcaaattagtaaataatgaaaagtttgataacacattatggtggaaaatggtgaggaaatacgtacacttatttttgatctgttgatgggaacaatgtccatgaataaattttgatggtaaaaacaaaatttgaataatgtaggttttattcctgaaattct

SEQ ID NO: 148210 - DNA, 611 bp, Homo sapiens
ggttagggacagaattcttatctccctgggacaaagcccctggggtgaggagtggctgtggtttccatgggtcaacagaattagtcttttcccctgctggctctgaggaatccrggcagtccagataagtgagattctcaccagcacagcacacccactctgccaatgggcagccagagtgcttccttaagtgggtccctgatctcatgcctcctgatggggtgagattcccccaacaggagtcgccagacaccttacatgggagcattctggctggcatcaggtcagtgcccctctgggatggagctcccacaggaaggaggaggcagacatctttgattttctgcagcccccatacctccaggagcaggagaaacccaggagaagagggtctggagtggacccctggcaaaccacaacaaccctacagaagagggtcttaactgtaaaaacaaaaccaaaaaaacagaaagcaacaactacaacaacatcaatgaaaaagtccccacaaaaaccccatccaaaggtcagcagcctcagtgatcaaagacagataaactcaggaagatgagaaagaatcaatgaagaaattatgaaaactcaaaaagcca

SEQ ID NO: 148211 - DNA, 611 bp, Homo sapiens
ggttagggacagaattcttatctccctgggacaaagcccctggggtgaggagtggctgtggtttccatgggtcaacagaattagtcttttcccctgctggctctgaggaatccaggcagtccagataagtgagattctcaccagcacagcacacccactctgccaatgggcagccagagtgcttccttaagtgggtccctgatctcatgcctcctgatggggtgagattcccccaacaggagtcgccagacaccttacatgggagcattctggctggcatcaggtcagtgcccctctgggatggagctcccacaggaasgaggaggcagacatctttgattttctgcagcccccatacctccaggagcaggagaaacccaggagaagagggtctggagtggacccctggcaaaccacaacaaccctacagaagagggtcttaactgtaaaaacaaaaccaaaaaaacagaaagcaacaactacaacaacatcaatgaaaaagtccccacaaaaaccccatccaaaggtcagcagcctcagtgatcaaagacagataaactcaggaagatgagaaagaatcaatgaagaaattatgaaaactcaaaaagcca

SEQ ID NO: 148212 - DNA, 611 bp, Homo sapiens
ggttagggacagaattcttatctccctgggacaaagcccctggggtgaggagtggctgtggtttccatgggtcaacagaattagtcttttcccctgctggctctgaggaatccaggcagtccagataagtgagattctcaccagcacagcacacccactctgccaatgggcagccagagtgcttccttaagtgggtccctgatctcatgcctcctgatggggtgagattcccccaacaggagtcgccagacaccttacatgggagcattctggctggcatcaggtcagtgcccctctgggatggagctcccacaggaaggaggaggcagacatctttgattttctgcagccyccatacctccaggagcaggagaaacccaggagaagagggtctggagtggacccctggcaaaccacaacaaccctacagaagagggtcttaactgtaaaaacaaaaccaaaaaaacagaaagcaacaactacaacaacatcaatgaaaaagtccccacaaaaaccccatccaaaggtcagcagcctcagtgatcaaagacagataaactcaggaagatgagaaagaatcaatgaagaaattatgaaaactcaaaaagcca

SEQ ID NO: 148213 - DNA, 611 bp, Homo sapiens
ggttagggacagaattcttatctccctgggacaaagcccctggggtgaggagtggctgtggtttccatgggtcaacagaattagtcttttcccctgctggctctgaggaatccaggcagtccagataagtgagattctcaccagcacagcacacccactctgccaatgggcagccagagtgcttccttaagtgggtccctgatctcatgcctcctgatggggtgagattcccccaacaggagtcgccagacaccttacatgggagcattctggctggcatcaggtcagtgcccctctgggatggagctcccacaggaaggaggaggcagacatctttgattttctgcagcccccatacctccagsagcaggagaaacccaggagaagagggtctggagtggacccctggcaaaccacaacaaccctacagaagagggtcttaactgtaaaaacaaaaccaaaaaaacagaaagcaacaactacaacaacatcaatgaaaaagtccccacaaaaaccccatccaaaggtcagcagcctcagtgatcaaagacagataaactcaggaagatgagaaagaatcaatgaagaaattatgaaaactcaaaaagcca

SEQ ID NO: 148214 - DNA, 388 bp, Homo sapiens
tggtcacttctcagcatgaatctgaaagcaaataatttccacaaaaaaggactgtatttaactagacaagtaattacattgtggtgctactayctcccctgcctcagattagaaaagtattcaattatcactccattagatcaaaaaatatttttagtgatacatttcaagtgaagtaatttattcctaaatagattccaatgaatttttggattaaccttcatgaattttgctgattaaactcaatgcttttcctcaaaaataaaatttaaacctgttttatatttgattaatattttcttcactattaatatttttcttaaattatgcagtaaatcatattcaatttacagcataggataattgagttaattgtacagtttaacca

SEQ ID NO: 148215 - DNA, 586 bp, Homo sapiens
catgtgcctttagaagccacctctctcagtagctaagaaatgagcatgtcagtcctgagagcatatctggtcagcccagggaggcttaccacagtcattgactamagtctactccttacactctaattccttacttgatcatttaaatttatttcttttggaaacagctgctctaggattcctgttgattttgtttctgggagggctagtagggaaccatatagtccctgtcactacaaatggtcatgagcttctaataaatactcttgatctcccaccctactacccattctagattcccctaatcttgtctaacatctcttcttagtctagatagcttagcttggtagggtgctccgaaccctcattacaggcaaacctcagagatattatgtgtttgattctagactaatgcaataaagtaaacatcacaatgaagtgagtctcacaaagtttttgatttccaagtgcatataaaagttgtttacattatactatagtccattaagtgtgcaatagcactatgtcttaaaaaaatctacctactttaatgaaaaaatactttattgctaaaaaatgctacaga

SEQ ID NO: 148216 - DNA, 625 bp, Homo sapiens
ctactaatgattaaagcttcaatttaacaagaacatacagtagtcctaaacatatctaccaagtaatagaactgtcagttatatgaaggataactgttagaactgaaaaaaatgcaaaaattcatacatatttttgaaaatttaaacatctctctcacctattgatggaactaaacagaaaattagcaaggatgcagaactcaatcctataatcaaccatgggatctactctacatttataaaatactccacccaactacaatgctatacatattctttccaagtgccatagaacattcaccaatatacactatatcaaagaccataaaatagatttcaacaaatttaaaagaattgaaattaaacagtgtattattttaccaaaagctagaaacaatcaaagcatccttcartaggggaatgtttaaaccaactatgatacatccatatcatataataataatcagcaatggaatggaaaaaactgttggtaatttaacaacttgtatggacataaagaacattcttttgagtaaaaatagtactaatctcaaaaattttcatgttatatgcttctatttatgtcacattctcaaaatagcaaaattatgaaaattaggaacag

SEQ ID NO: 148217 - DNA, 398 bp, Homo sapiens
atggatcttttaaggtgaaagkagaatgccaggttctactgaaataatatctgaaaggaacaaagagccatttgccatgtgctttttctaagtgcccatgctggaaaaaattttctcaataatatgaagatgctggtacaacttttcctattaaacaatgtcttacacaaccacatgcgttacatttatagacagatttacaatttggaaggaaaaaaagttctgtcttaataaaattagttttttttacaaactgtagtccaactaaagttctctgtctcctcacgcagcagaggcattatctccataaggtgtgtgtggtccaggaaaacacttccccgagcagatcctgccagatttggttcattccatgatgtcgactctgcttggagcaccac

SEQ ID NO: 148218 - DNA, 531 bp, Homo sapiens
aaatgacagcaaaggattaggatttagaatattacccaaacttagttgataaagcagcagcaggtttgataggaattttgaaagaagttctactgtgggtaaaatgctatgaaacacagcatcacatgctacagagaaatcttcctgaaagraagagtcaattgatgcagcaaactctattgtcttattttttttaattgccatagccacctcaatcttcagcagccaccaccctgatcagtcagcagccataaacatctaggcaagatgctccatctgtgaaaacattaagactgactgaaggctcagatgagtgttagcaggttttagtaataaagtattgttaaggtatacacattgttttttatgatgtaatgctattgcatacttagtatattgcagtattgtgtaaacataacttttatatgcactgggaagccaaaaaatgtgtgtgacttgctttagtatgatattcgctatattaaggtggtctggaactgaacctgcaatatctctgagctatgccagtag

SEQ ID NO: 148219 - DNA, 558 bp, Homo sapiens
tggactcctgacaccatggaaggggcatcaaatatattgataagaactgacatatattatgactattcatttgcttttttgcccacagggctttgaccagtgccatttttaggggcatatgaagcatgatcactatatatgaaatattgcttaacatcactttggaccaaggacccactttaaggcaaaaaaaaaaaaatgtggcattggaacctgagtttgggatccartggtcctatcataagctgcacacctttgtcagctactgacatgatagttaaggagggactttttgaaaccacagctgaagtgctatcatagagtttatactctaggaagaaaaggtgccatcctctaggatactgtatatatgctaaaacaatgatcattgtatggttctctatgcctgtatagaatgcattggtctgggaactatggggtctaagtaggggtgacaaatgtaggaaaggtatgtttcccattcttgcaacttaaggatctatggatctagaggtcctggcttccagaggggtgatgcatctgccagggaatgccaga

SEQ ID NO: 148220 - DNA, 558 bp, Homo sapiens
tggactcctgacaccatggaaggggcatcaaatatattgataagaactgacatatattatgactattcatttgcttttttgcccacagggctttgaccagtgccatttttaggggcatatgaagcatgatcactatatatgaaatattgcttaacatcactttggaccaaggacccactttaaggcaaaaaaaaaaaaatgtggcattggaacctgagtttgggatccagtggtcctatcataagctgcacacctttgtcagctactgacatgatagttaaggagggactttttgaaaccacagctgaagtgctatcatagagtttatactctaggaagaaaaggtgccatcctctaggatactgtatatrtgctaaaacaatgatcattgtatggttctctatgcctgtatagaatgcattggtctgggaactatggggtctaagtaggggtgacaaatgtaggaaaggtatgtttcccattcttgcaacttaaggatctatggatctagaggtcctggcttccagaggggtgatgcatctgccagggaatgccaga

SEQ ID NO: 148221 - DNA, 579 bp, Homo sapiens
cttcagatgtagaggcactgtcatcatcctcagaaaaggagctacagtccaataggaggcagagagagawgagttaatgttttcaaccactgcagagaggcaacattcctcactagggggacaattgcctcacctcttttccttccctctcaaactaacacacataacaatttttagttagcataaagttagaactatacaaaatacatagaattatataaaatatgtgcataattcagtaaaatgcatttaactaagaaactagtttctaggttttccacattcctattgtttgatgcattggttgatgttaatatttatcaaatagcaagtgtgatatctgggacttagatcatattatacctttgtgtgaactagttttctaactaatgtttcgtcccactaaaagtaaattcaaccacattcatatacattatattcatttatagggtaagcactttaaattatacttttaaatcacattgctagcatttcatactctgagtacttttcatatgtatctatggcaatgtcatctctttagattcaaaatgtcacttgaggaaaagccctgccatt

SEQ ID NO: 148222 - DNA, 589 bp, Homo sapiens
tcttaaatctacccttactctgcctgtgtactgtcattgcctacttcaagcctttacagctgcttaacatgtggattaaatccatatgataattgtgaggtagataactgttactactagttttacagatgacaaaactgagacacattaggtaacttgctcaaagtcattttttgcttaatctgctgtaactgtctcttaactggtacttccagctttcagtcttggcctccacatactcatttttctttagttgccagagtcatctttttaaaatgcatgacttcaaatagcatgctatccgctgtgatgtgctgggcagtacattttattgatgcagccaaactttaatacatgtttcaaagaaatcttacataaatttttaaaatataaggttggtttttattttgtaaaagcctgttctatcttcttcttaaattctgttttttgagttagctgttaaattagatgaaatttaaaatgttttgtatctgttaatgccagctttgttgaaaagcaaaataggcgccccatactattctgcttttaaggattttttwaaaaacttcaatgtttgtttaaaataaag

SEQ ID NO: 148223 - DNA, 574 bp, Homo sapiens
catgatttcatgagatgtggctattgtactgtaaaaacctcagggtcttttcattcaacaactttttattaagaatacacctgctaaattcatacacacacacccacccccacccccactcactcacatctatgcttatatttatgctcagtggctctactaattagtttaggcttttcctttcacactttgcttttccttaagactttacatcttgctgctgttgcttatggctctgcttctgccaaatttgttgagaattctaacagccaaaaaagcaagtataactgagagagagagctgaggtactgattttgaacaaagtacacaagatttaatacacagacttcgttacctcttgayagctcattggttacttttttaaaaaaaacttcttgttttacagctatattttgagcaattgatattgctagacagttcttacataatatggtgctattagtgagtttgtgttattttcagatgttgtttagggtgagattttcaatctttaaatttccagatggagatacacgtgaattagagcgaacaaaacaatatgtaaatgaagctt

SEQ ID NO: 148224 - DNA, 552 bp, Homo sapiens
agccactaacaatggcctaagattgtgaatgtggtggtcttgttttcctccttacttgtggcattaacaaagtgtatgagcttcctatttgaaatctgtggaatatgtatattgaaatctttagatttttttggtttaaatgcttttcagaattgacaaactgtttttcagttaatttcacatctaaattaaatgaaaacaatctcaaataagtacaattgctactgaaattgtcaaaggaattttgctgaggcaaarcagtgaaaacatttcccttctataaagaagttatgatgcttgaacttaatggctatgaaggttaaaaattttaaatacagattaatctctgtgctagtgtttagagagagatgacatataagaattttttggctcttcatgttattttaaatgctcatgagtaataccagaaacaggctttatttggaaatagatatactatttaagacaaaatttgaagagatttattttaaagtgttccatttctctttgagaaatattttttttctttgcctagatacctggcacagtgat

SEQ ID NO: 148225 - DNA, 610 bp, Homo sapiens
  misc_feature (1)...(610): n = A,T,C or G
nnnnnnnnnnnnnnnnnnnnagtcttttaggggctgggcacagwgactcatgcctgtaatcctagcactttgggaggccgaggtgagtggatcacctgaggtcaggagtttgagatcagcctggccaacatggtgaaacctgcatccctacgaaaatttaaaaaattagctgggcttggcacacatctgtagtcccccagctactcaggaggctgaggcaggagaatcacttgaacccaggaggtggaggttgcagtgagccaagattgtgccacttgactccagcctgggcaacagagtgagattctgtctgaaaaaaaacaaaaacttaggtaaatatgaaatcacgctaacctatataatgttgtgccttaaatatacctgaagacttttgcagagtccatagtggaaatattgttgcttattacccttccccaaaactggctttcaatttagctttctcagacatgacaaattatctatgtgatataagcctcctaacttttgttgctgctgccacttcttccacaggcctacccctaacattaacagaactggggcaagaaaacaaatggatatctatgtactacattactaaatatttaaaatc

SEQ ID NO: 148226 - DNA, 424 bp, Homo sapiens
atatgattgttgaaataacagatattttttaatattctaggggagtttttttwaatctttttcagctgtataatgaaaagaggtccatgaagaagatggagttgtacaaagatattgaagcacagtctttcaatcaggtgtgctaacacagtgaatctaacacagtgaatcagaaatcagccaatcagaaaaacggctaacatcaggtggttcaatagagggaatttaatacagagcattagctacaaaagtgttagtaatgtcaaacagaggacagtgaggaaacccagagattaacaataataggacactcctactgccccaagagcaggagacataaatgcaagaggctgcttaaagttaggaatggcccacaggatctgggactagaaagggagagtctctctgttggaagagaaatcat

SEQ ID NO: 148227 - DNA, 624 bp, Homo sapiens
attaggctgctcctatgtttttgctattgtgaataatgctgcaatgcacatgggaatgcagatgtcttttcaagatcccaattttaaattctttggttacatatctaraaatgggatcatatgttagttctatactgtatgctggtatcatatgctggatcatatgatagttctatttttaatttttttgaggaacttccatactccttcccataatggctgcaccaatttacattcccatgaaccatatacaagagatgcattttcttggcatccaacacttgttatcttttgttttttgatcacattaaacagtggcaaagggctgaaattctctttgtggttttgatttgtaattctctggtgattggggatgttgagcatctttcatatacttactggccatttttatgtcttctttggagtaatgtctatttaggtctttttcccattttaaaatcaggctattagctttttggctactgaattgaaggagttccttatatatgttggatattaatcctttatcagatatatgattcgcaaatattttctcccactttatagattgccttttcattttgttgatcatatcgtttgctatgcagaagctttttagtttag

SEQ ID NO: 148228 - DNA, 503 bp, Homo sapiens
cactgggcaagggagtgttcattagatcccctactgtgaaaagcaatttgcctagtcaagagtatcaccttgggacattagacaaactttggttaaaatttcaaattttctacttgcttagctgtgttacttaggtcaagttacgtccttcatgatttcttaattaaatgatcaatctaatgtgtaaactgccaaaaaygaggtgctccatctatggttagattcctgctaatgagcaaactatctttggttataatttaacttctcaggtagatttgtttacagggaaactcattagttacagaacatgagcatccaatctgtaaaaccagacccttgaaagttaattttatatgaaatctgtccagaatcccttaatcactgaacaagtaaataaaataaaattttgatcacacacaattctacctctgggagttgtacacttaccagggtaccatcattctacggtaactgaaatttcaagcccccccataaattactaa

SEQ ID NO: 148229 - DNA, 595 bp, Homo sapiens
aaaacagtatggagatttttcaaagaattaaaagtaggcctacctttcaatccaacaatcccagtactgggtatatacycaaaggaaaagtggccactatatcaaattgcatgcacatgtttatcccagcaaaattcacaactgcaaagttatgtaatcaacctaagtacccatcaactgatgagtgaataaagaaaacatggtatatacatatcatggaacactattcagccattaaagaaggaacaaaataatgtcttatgcagcaacttggatggaattggaggccattatcttaagtgagtaactcaggaatggaaaactaaataccacatgttcttgcttatagcaggacctaagctttgtgtacagaaagcacagagagtggtatatgaacattggaaatttgaaaacaaggaggatgggatgggggtcaggatggaaaattacttattggatataatgtactctactcgagtgacagttgcactaaaagcccaaatttcaccactatacaattcacccatgtaaccaaaaaccactcgtactcctaaagctattgaaataatttttaataggagaatgttttcttcta

SEQ ID NO: 148230 - DNA, 595 bp, Homo sapiens
aaaacagtatggagatttttcaaagaattaaaagtaggcctacctttcaatccaacaatcccagtactgggtatatacccaaaggaaaagtggccactatatcaaattgcatgcacatgtttatcccagcaaaattcacaactgcaaagttatgtaatcaacctaagtacccatcaactgatgagtgaataaagaaaacatggtatatacatatcatggaacactattcagccattaaagaaggaacaaaataatgtcttatgcagcaacttggatggaattggaggccattatcttaagtgagtaactcaggaatggaaaactaaataccacatgttcttgcttatagcaggacctaagctttgtgtacagaaagcacagagagtggtatatgaacattggaaatttgaaaacaaggaggatgggatgggggtcaggatggaaaattacttattggatataatgtactctactcgagtgacagttgcactaaaagcccaaayttcaccactatacaattcacccatgtaaccaaaaaccactcgtactcctaaagctattgaaataatttttaataggagaatgttttcttcta

SEQ ID NO: 148231 - DNA, 532 bp, Homo sapiens
ataattagagctctggcagcaagaactcattatcaaatactcacacatgtgaccaaagtatgccacaaaacagagacagatccctttgcatataaacatgtaaggtatcttaaaatgaaaaaaaccacaatgtatttaagtcccataaaatgggaactgatataatgcccctcacctttctcgccagctttaacacactctaaagtttcaaaaaaaagtgataataggcatctgatgtgtgactgatgtgtgactatgtgtgactayggaaaagatgagggagaagaaatcattcctggtgatggcaggtgggtggtgtctatgaaatcacaatgcagctataaatctcaattttttttctttctaaatgtcagtgatacctctttctcatagcttacttgaatcactgcccagaaaccaatggataaatggaaaatgcagtaagatgtgaagtgaagtgttaattagttagcaatgaatgaaaactcatgatatgtgaagaactcagaagcaggactggctataagaattc

SEQ ID NO: 148232 - DNA, 618 bp, Homo sapiens
cataacagttatttaaaactgcaaccacctcatcccttgctttatatttttctatagtgcttttcgccatctgacacagcaggtattttacttagttgtttattgtttattccttcctagaatgcactctgtggtagtgggggcttttggcttctttaagtccagcacatagcagatgctcagtaaacatttgaatatgtgaatatatgaataaaatcagatgccatctaaatacagcttatataatttttcaggagctatgaaatagattagtaatttatagcattaggtttctgtcctttaacataggaattctctcttataaaaagtaaaaggaactctgtatgataattatacagacattataactggtgagacaatataggcaaataaaattagtcaagcaataggttatacttttcattgttaatttatacttgttttcctaaacatagatgttttttcctttcacttcagtagttctaaatscttccctatatattttttttggtctcaaaaattgattatctccataggtcatctgtagaaaagaagaatctgtcacattcataaatgatctgaatgccaacataaattgcagagtggagggagtaactc

SEQ ID NO: 148233 - DNA, 473 bp, Homo sapiens
cctcccactccacttcccaagtgatagccagtaatattctacccttcttcccaccgccaggcaagaatggagaaaaacacaccacccaaaagactggtagacaagycccatgcatatatgtacacacagaacttccagtcagttttttttgtatttcatacttaaaaaaaaaaaaagagtgctttccatttttctgtgcaaaatgtgtaatatttcagttatgttatggaagggtggaaagtttggaatctgtgaactctgctgtctcacctcatctgttacttcttgaaaactgctctgggtcctcatctcctctccactgtgccctatgtgccagcacttagaataatgccaagtatatgttaagtactggaaaaatacttgttgaatgaattatgtgtatttaaactctcatggaggcccaaccacctcaaaaatgttagcattctattcatagagtgtcacttcatatc

SEQ ID NO: 148234 - DNA, 599 bp, Homo sapiens
atctactataccatatactgcactgattgctttacataccagctcatttgagtccttattgagaagctatagagtgatgctgttattttaatttcacccataaagaaatggaggctcagagaagttgagtaccttggacaaggccttgggcaagttgctgagtcaggtggtttagaacaaaatcaatcaatacaactaatttcaggtcartctcataaatgttcattgagcaccaggctctgtgccaggcactgtgatatgaatggggattcagcagggcacaaggcaagtatggcttcatggttctaaacagtcaggaaggttcagctctcctgtgtactgaacacctatagcaataaggacaaaccactgtatattggtatatgtgcatagtttacatttctattcgttgagcctgtcatttataagcatcttactggaaaaagtgcacctattaagtagtactttgttgacatcactgccactgagcttggcatagtattgtcgatatgatcacacaccttttgatggactataacttactaagggcaagacagaagagaggaagatagcttttacttaacagaaatacaacatca

SEQ ID NO: 148235 - DNA, 568 bp, Homo sapiens
ggctcttcatttatttagatgtccatttatattgcttaataacgatatttgctttttcttcataaaagtcatgtgtattctttaccaggttgatttctggttgctttatattttttgctatttgaatggtgttttgttctggttttattttctgttttcttatttgtggtgtaaaagacattggttttaacatttgacgtgtatacctaataagcttattgatcaatcttaactacatctagtagactctgctttctgtggtagatgattatataatctgcaagtagcgatagtgttttctcttgtttcccaatttaaatacttcttttttactttttctctataccaatattgaacagtagaggtaatagtaaacatttgtatcttgtgttctgatcttraagaaaatatatctagaagagatattttatgtaatttttttcatacaggattaatcaagttaagaatctattcctagttttatatatttgttttattttgaaatcataataacatttctgacctattgagttaattatatattttttatctttttggagatgtgacg

SEQ ID NO: 148236 - DNA, 477 bp, Homo sapiens
ctaaatatcagcaattagttatcactgcgctacctcccatgttgctaataccatgtgacagtcctaggcaaattatgggtataaatgagaaacaaaatctgccttacagggagtgaagagtgggactagcagctatgataccttacatacctttatgaratgctttagaccaagtgtgagaagcagaaaggcaagagtaaatgacttttgttccagcaactctgtttagatcaagtccacacaacctaaaaacaatactgtatttgaatgagagtcaatgtattggactcagtaacatcttcattaaaaaatcctgaagataacctaggaaatgccattttggacattggccttggtaaagaattttcactaggtcccaaaaagcaattgaaacaaaaacaaaaattgacaagtgggacctaattatactaaagagcttctgcatggtcaaagaaactgtcgacagagtaagcagat

SEQ ID NO: 148237 - DNA, 595 bp, Homo sapiens
gtctctccttttccaaggatgccttaacatatattattgaaaatataattctggagtatgtgctgttaatgccaagatgtgtaaataggtgagaaatttttcaataatggtttcccaatacccaataaggcattagaaataacacatattattgtggttgttactgcacattatccaatgttctgaaacatactagaaggtatttttttaatatcgccaaatatacatccaaatagctagtcttcttaaggaaacaaatgctactagctcatattaactcagaagttaccattatcttgcccatgctcattctatcaatttgagatgtacttttccgtaagtatttttcccctaaggataaatgctttttcattttttttctaattctcaccaaatatttactcccatcttaaattcatgggtgattattctctgctttgaaataccagagcacaattttatgtggracttattcgtgtttatattatatataactatgggcatgtacatgcacctacacatagaccacagactggcaagatatttgtgtactgttttctagatgtagacaatacatagatgtagatggatgtaa

SEQ ID NO: 148238 - DNA, 595 bp, Homo sapiens
gtctctccttttccaaggatgccttaacatatattattgaaaatataattctggagtatgtgctgttaatgccaagatgtgtaaataggtgagaaatttttcaataatggtttcccaatacccaataaggcattagaaataacacatattattgtggttgttactgcacattatccaatgttctgaaacatactagaaggtatttttttaatatcgccaaatatacatccaaatagctagtcttcttaaggaaacaaatgctactagctcatattaactcagaagttaccattatcttgcccatgctcattctatcaatttgagatgtacttttccgtaagtatttttcccctaaggataaatgctttttcattttttttctaattctcaccaaatatttactcccatcttaaattcatgggtgattattctctgctttgaaataccagagcacaattttatgtggaacttattcgtgtttatattatatataactatgggcatgtacatgcacctacacatagacyacagactggcaagatatttgtgtactgttttctagatgtagacaatacatagatgtagatggatgtaa

SEQ ID NO: 148239 - DNA, 494 bp, Homo sapiens
ccctcaaaaccattcacttaagatattcaagtgtttgcaagtttgggtgaatagtgagattgtgtattatagaatttctgaaaataaacatcagacattttttgttctaaagcctttttttcaccctcccatgaacattatttgtttttcaactatctgcataattttcaacttcccataaaccttctctgtccatttcctacatcatattctcttgatcctctattatttaagtatttccctgtgacatttcctcaaaatttgaattaatagtctcattatattagaataaagagtgatttagatctttcaaccaaactgcacacttaaggctataagggcgtatgggtctgtgggtttgtgtgtgataaaagacttatgaatattatttggcaatgtaagggcatacatattctgctgcatccaacacaacacacaygcacacatactcacaccttcaatagaattttaaaccttctactagtgttactaat

SEQ ID NO: 148240 - DNA, 505 bp, Homo sapiens
gtgaatgcaagtccaggttgtctcttcctaaagtttgtcaaatcaaaaattgcactggatagaggtaaacaatgaaggaagacttttttcaaggctaytgaaatagggtagagaaaccagagcacagtctcaactcaattttcacataaacaaagggcagagaaatttttaagatgtggatgagggagggagatcttaggccatctgtgtttgataatcggctttacccaaatgaaaagtacactttctcatatcttcagggcaggaggtagttttacaactacagcaaggtccccagagaacttaagctcctaccatttcaccgaaactgggagatagaggccctatcttccttgattatatttcaaaaaattggctcccaggtacttgagaaagacattcctgggttgtgaaactggcagaaggcttttaaaaagatttaaatctcaaaggatcagactaatttataattagaagttttctttaagtaagtgctctaaggaaa

SEQ ID NO: 148241 - DNA, 600 bp, Homo sapiens
cccacctgtgagtgagaacatgtggtgtttggttgaatcagcaaagaatgaaacattatttttgcctttagaatctcacagaggcatacatttaaacaaatacatacaatgtaatgtcttaagtgctgatgtggttctcagaaacccactcaggttgttcataagaaacagacagaatttctcaagaatgagtatgtgtttgtatgtgcatgggttcactgasactgggaaattggaaaagtcgagtgaacccagaaggataaagtaggcaaagaactgtgaaagtccaaaagctaagcgtgaagtttcacacctctaaatagctgagtaccatatgtgttaaaggagtagaaaatatgcgaacaaacattttagatgaccatggatgtacctggtctcagtaaacacgcttcttgaagtggtactttatatatagtttcttcaactatccaactatttacatattctctgagttgttgtaatttggcatctactcctattattctactaaaaccattctcttgtaggtcagccataacttgcgcaaccctattatcaataaacatttcaaaatattttgtcatattgtgaaatattctt

SEQ ID NO: 148242 - DNA, 618 bp, Homo sapiens
tacaaaactcactggtaatagtaagtacacagaaaaacatggaatattataacactgggattaaggtgtataaactactcttatcctaagtagaaagactaaatgatacatcattcaaaaataaaaacttcaccaatttttgaagacatcaacaatataataagatataaaaaaataaaaaagtgagagggtgaaagtaatatggggagtttttattactttaatttttgcttgtttctttatgaaaaagagttaagttatcagcttaaaattatgggtcatatgataatatttgctaacctcatggtaacctcaaaccaaaacctaccagagatacacaaaaaattaaaaggaagaaactaaatcatatcaccagagaaaatcaccttcacaaaataaagaggacaagaaggaaaagaagagggaacagaggaccacaaaacaaccaaaaaaacaacaaaatggaaggagccaagtcctcagttatcaataamaacattgaatgtatggactaatctctctaatcagaagacatagaatgtttgaatggacaagaaaataagaaccaatgatctgttgcctccaagagacacactttacctatgaaggcacacagag

SEQ ID NO: 148243 - DNA, 618 bp, Homo sapiens
tacaaaactcactggtaatagtaagtacacagaaaaacatggaatattataacactgggattaaggtgtataaactactcttatcctaagtagaaagactaaatgatacatcattcaaaaataaaaacttcaccaatttttgaagacatcaacaatataataagatataaaaaaataaaaaagtgagagggtgaaagtaatatggggagtttttattactttaatttttgcttgtttctttatgaaaaagagttaagttatcagcttaaaattatgggtcatatgataatatttgctaacctcatggtaacctcaaaccaaaacctaccagagatacacaaaaaattaaaaggaagaaactaaatcatatcaccagagaaaatcaccttcacaaaataaagaggacaagaaggaaaagaagagggaacagaggaccacaaaacaaccaaaaaaacaacaaaatggaaggagccaagtcctcagttatcaataaaaacattgaatgtatggaytaatctctctaatcagaagacatagaatgtttgaatggacaagaaaataagaaccaatgatctgttgcctccaagagacacactttacctatgaaggcacacagag

SEQ ID NO: 148244 - DNA, 520 bp, Homo sapiens
tttgtctagtttcccatatgtaatccacttagtcttacgtgaataaatgggcaggaagttaacatgaggagctgaacgtaaaagctagtgagtgaaccagtacaaaargtagaggtttctatctgtacatcttttggtctctgacaggtgctctttgcttataaaggtgatgctcctctggcaacagacccagaagtgaccagagacttccaagccaaggtgaaacccatgcttttttgctagttaggggagtgtccttttacctgctccccaatatttgggaaagatatttcaaatatgactatttaaggaatagaaacacatactgatgagttagctgaatgagctccttggctccaaatacttaaaatccatttcataatgtagggttaagagtctagaaatatttttcacagagtcccacactatatttttgaaattgaggctgctctttgaaggatgcaatgtaatggtggcattttggattaataatattccatctcctagaatagagcttata

SEQ ID NO: 148245 - DNA, 564 bp, Homo sapiens
ttctttaattttactccagtgtttagtagttgtctaaaaaaaaaaaaatttaaagacttggatgcttagctttagattcccatattgaacccactgtctagtgattatctatagtttaaatttaacattaagttgttttgtataatgtctgttccctgtaattttcaaggtacactttctgctgacatatatgtactgctttagttactattaataagttttaagtctgatgactcattagaacccatttcctctcctacccctgctatacaatgagcaaatcaggagggaagatgatttgttctgactgatgtaaatcaggtatagaaaggatggtaaatgaatatataatttgtttagattattctgcctaaatgatttgttctkactgttgtaaatcaggtatagaaaggatggtaaatgaatatataatttgtttagattattcttcctaaatacattatgtaatttagatatgataaccaactagcccattcaatataagggactaaatggaatggacacagtcatgaggttccagttgtgcctggctatctctgtgaa

SEQ ID NO: 148246 - DNA, 568 bp, Homo sapiens
ggaactgatgaacaaagtcaaaaaagttgcaggatacaagattaacatacaaaaattagtagcatttctgtatgccaacagtgaacaatctgtaaaagaaataaaaatcccatttacaatagccacaattaaatatgtaagaattaacgtaatgaaaaaagcaaaaggcccctataatgacaactacaaaacagtaattacggaaattgaagaagacaccaaaaaaatggaaagagcttccgatttcatggattggaagaatcaatatttttaaaatgtccatactatccaaagcaatctacaaattcagtgaaatccctatcaaaataccaatgacattattaacagaaacakaaaaaaaaaaaactctaaaatttatatgcaaccacgaaaggcccagaataaccaaagctatcctaagcaacaagaacaaaactggaagaattacattatttgacttcaaattatactacacagctgtagtaaccaaaatacagtgtactttcataaaaacagacacacagaccaatgtaagacaatagagaacaaagaaacaaatccacaccca

SEQ ID NO: 148247 - DNA, 470 bp, Homo sapiens
aggaagaagactgtctaaagtttagtccagaggaggggaaagttaaggcctttttggtcaactaatctattcattaaataacctcttattgctttatcagaagagccagcataaaatayatttgatcacactttctgttatttagtatttaattggatacttctaagtctctctgtctctctccccttttggtgtttatgcttgcttttcagacttatcatggaaaggagagaaggagagatctttttataaccagggaggcttcatagtgtagaatgtttaaaaggagaaggaagtgtgaagacaagttccacattaatttttcaacgcattaaatgtcagttgtattaatttatattttcttgaacattgaaataggttttcattaacactgcacatgaagtttagaatggtctattcatataatttccagtattactatcagagtttttagcaatatggcaaaccat

SEQ ID NO: 148248 - DNA, 524 bp, Homo sapiens
gctgagagatttcatcatgctactcaaaacagcatgcaatttaaagtttaggaattgtttatttctggagtttttcatttaatatttttagactgtggttgactrtgggtaacttaaactgctacaagtgaaaccacgaataagtggtggacttttgaggagtctcagtcacatgactcgtttttcacgacatgtctccaagcaccaaaataagcttgtaaagtcacattctctagctttccaaaaactgtgcagatacacaatttgataggcaataatagactctctctccaaattgctaaagttatttacaattgaaaatctgacacaaatacagattaaggagaaactaacagaattcaatttcacaaaataatttatttcttgattctcagccagttagtagtcatgtaaaacctatctatgataagaaaacaggattgaatagggctataaccaggaaggttaaacttggataattgcacaattgcattaaaaccatctatcaagtctaaatgcctacc

SEQ ID NO: 148249 - DNA, 524 bp, Homo sapiens
gctgagagatttcatcatgctactcaaaacagcatgcaatttaaagtttaggaattgtttatttctggagtttttcatttaatatttttagactgtggttgactgtgggtaacttaaactgctacaagtgaaaccaygaataagtggtggacttttgaggagtctcagtcacatgactcgtttttcacgacatgtctccaagcaccaaaataagcttgtaaagtcacattctctagctttccaaaaactgtgcagatacacaatttgataggcaataatagactctctctccaaattgctaaagttatttacaattgaaaatctgacacaaatacagattaaggagaaactaacagaattcaatttcacaaaataatttatttcttgattctcagccagttagtagtcatgtaaaacctatctatgataagaaaacaggattgaatagggctataaccaggaaggttaaacttggataattgcacaattgcattaaaaccatctatcaagtctaaatgcctacc

SEQ ID NO: 148250 - DNA, 524 bp, Homo sapiens
gctgagagatttcatcatgctactcaaaacagcatgcaatttaaagtttaggaattgtttatttctggagtttttcatttaatatttttagactgtggttgactgtgggtaacttaaactgctacaagtgaaaccacgaataagtggtggacttttgaggagtctcagtcacatgactcgtttttcacgacmtgtctccaagcaccaaaataagcttgtaaagtcacattctctagctttccaaaaactgtgcagatacacaatttgataggcaataatagactctctctccaaattgctaaagttatttacaattgaaaatctgacacaaatacagattaaggagaaactaacagaattcaatttcacaaaataatttatttcttgattctcagccagttagtagtcatgtaaaacctatctatgataagaaaacaggattgaatagggctataaccaggaaggttaaacttggataattgcacaattgcattaaaaccatctatcaagtctaaatgcctacc

SEQ ID NO: 148251 - DNA, 604 bp, Homo sapiens
tgttcacgagtttataacagattggttagaatgatattttcattataataagtgctctcatcagcagatgggacagttcaaggactcaacaagaagtaagggggttctagtttctccctgatcatggacagacatgcacacatgcayatctaagattatgtgcataaatattctacatccagaataagagagattttgaatgatgaaaactcacgtttctaatttcattgtagccaaagacatatttatcattattctcaatcaattttataccaaggaaccaatcaaataaaatggtttgaattccctttcctgttgtgtttgttggagtttgaggcacagaagtcaaatcttttccctgagtttgtgtttaggaggactccaggagggctattgctagcctctctcctccctgcctcactgtcctaggggagaaggagtgttttctctaatcagtcctttgggaatagaaactaggaatgtggagcctcagcccttcgtcactcaatttttctctttggggtgtcaactgcctgcaggaaacatgaacacttacatggtcccagtctgtgctttagggaggcagagtttatactgtgtggaa

SEQ ID NO: 148252 - DNA, 604 bp, Homo sapiens
tgttcacgagtttataacagattggttagaatgatattttcattataataagtgctctcatcagcagatgggacagttcaaggactcaacaagaagtaagggggttctagtttctccctgatcatggacagacatgcacacatgcatatctaagattatgtgcataaatattctacatccagaataagagagattttgaatgatgaaaactcacgtttctaatttcattgtagccaaagacatatttatcattattctcaatcaattttataccaaggaaccaatcaaataaaatggtttgaattccctttcctgttgtgtttgttggagtttgaggcacagaagtcaaatmttttccctgagtttgtgtttaggaggactccaggagggctattgctagcctctctcctccctgcctcactgtcctaggggagaaggagtgttttctctaatcagtcctttgggaatagaaactaggaatgtggagcctcagcccttcgtcactcaatttttctctttggggtgtcaactgcctgcaggaaacatgaacacttacatggtcccagtctgtgctttagggaggcagagtttatactgtgtggaa

SEQ ID NO: 148253 - DNA, 556 bp, Homo sapiens
ctagatataaagaaaaatgacttttttccttactaaagagcagtgttagaaacgagtatttcagagaatggacagaacaaatacctaataagaaaaccttttcccatagtttctgtcttatcttaggggattctgttaaagtttgatttggctgtacaggtactcaccaagatccctttgttcacataaagttcatatgaaccaaataaacaagaataaaaatcacataaaagaaagtgcacttaataatcttttttttgttgttctgrtgatttaagttgttactttgtttgaaccatttcaggaaccaggcaagggtagcaaagtgggctgtgaaacactttaactcagtggcccacacccatgcagtgaattcccttctggaagaggccaactcatcactgctgctgctgagactcatgtattctacacaaaggtttgacttactcaaagcattgacatagtcttgaaaattttgaaaagtgaaagatggtctatttgttttgttttactgggggcaaagatttgcagaaataggatttggcccacaggtcag

SEQ ID NO: 148254 - DNA, 437 bp, Homo sapiens
agcaataatagctcagtgtaacctcaaacttctatgctaaagcaatcctcctgcctcagcctccagaacagctgggactgcagggatgccccaacatgcctggctaaccttttttttttaatagagatgagggcttgctatgttgyccaggctggtctcaaactccaggcctcaagtgatcctaccacttcagtgtctcaaagtgctgagataacaggcacaaaccaccacacccagcctgaactttctattaacattggatttgctctctgagaaaatagttcagaatatttccactctgtttattaaatacattttacagtgtatgaagcactcttccatttgatcttctattttgtcatgaaaacaaccctgtcagcagtgggcaggcatccccactgaaagcttagacagtggggcagacattgccagttgcc

SEQ ID NO: 148255 - DNA, 540 bp, Homo sapiens
aatactactatctcatcctcagaccccatttatgttcatccactagtcctaacaatgtcttttctagcaaaaggaggcagttctgagtcactggttgcattgaattgtcatggctatttatcttccttcaatctgcaacagattcttgtccttgacattcatgaacttggcatttttgaagattacaggctagttatttttttttaatggccctcaatttgagtttttctgatgtattctcacaattaggttcaagttatgcatctttggtggtaacatcccagaagtgatkctgtgtccttctatctggactttgcaggtggcacaaaatttcaatttgtctcattcaaggtgatgttagctggagaaacctggcagacacaccagagtaaattactcatttttcttttgtaatatgtaggtatttcataagaaggtactttgagactgcataaatatctcagtcctcaaaaaactttccagttatttgttaatttatttatattactgtgaactcagattcctgtctcattcactgag

SEQ ID NO: 148256 - DNA, 540 bp, Homo sapiens
aatactactatctcatcctcagaccccatttatgttcatccactagtcctaacaatgtcttttctagcaaaaggaggcagttctgagtcactggttgcattgaattgtcatggctatttatcttccttcaatctgcaacagattcttgtccttgacattcatgaacttggcatttttgaagattacaggctagttatttttttttaatggccctcaatttgagtttttctgatgtattctcacaattaggttcaagttatgcatctttggtggtaacatcccagaagtgatgctgtgtccttctatctggactttgcaggtggcacaaaatttcaatttgtctcattcaaggtgatgttagctggagaaacctggcagacacaccagagtaaattactcatttttcttttgtaatatgtaggtatttcataagaaggtactttgagactgcataaatatctcagtcctcaaaaaactttccagttatttgttaatttatttatattamtgtgaactcagattcctgtctcattcactgag

SEQ ID NO: 148257 - DNA, 461 bp, Homo sapiens
agaatgttagaatataactcaagtgatcaagacactatgaggctgggtgttggatacatcaggcacatagatttaagttgtccacccaaatgtatagaaggccttatgaaaccttttccttttgtacttgttcttatttaagtatatttaaatgtatattttttctgtttttcttttaagttatggaagcatacgcagctatctcagcatattttcatgctgccttgaaaatttgtattattataatttaaagtttaatccattctcagttatattctttcttatagtcatatttcttttatagatttctgtttcctgaaattatcttgttgatacaaaagaaatggttctaaattttgccttgagaaatgtttttgtttgctgattacggtttattatgactgctatttacaaattaagccctcatcattcamagaactaagttaccaaccacactagct

SEQ ID NO: 148258 - DNA, 570 bp, Homo sapiens
aatgctatcttttgtttgtttctgattcttagaattaggctggagcctgtgttctgaccagggaacaaaagtaggtccaatagagctctcagcccactggtttatgaagagagtcagggagagggtgaggccactctttagtctctgtgacctacctgacttgggctaggcaggggcgccatgggtgtgtctgtgggcccttctctagaaaaatcctaagaactcccacatctctatcctgacacatctggtcctgccaattaactctcatatttacagtgctctaggctccaaatgactttggaaacctccaaaggggacttttctgcccaagttawtcacatactcacttctagaagaagtgttggtagcatttgcagaaagcttttctcctcaggggaatatatttaacctggttttgaaggatgatcaagccacctatcattattgttacttgttagccaccactaggcattacaggagttggtcaagaccaagagttctttccatcagccttgccttattggtgccaaaactcagaaatagtgtagtcagtggtcagggtgttcc

SEQ ID NO: 148259 - DNA, 542 bp, Homo sapiens
tagagttatctgctctgcctttgatcaccttgtttcaagcttttctgtattttgttttatacacatttttataagttataattgttgtggatgatgttactgtttaaagattttttctttttgctatttatgtgctttttgtttgttcatttttgctgtatacattttatttttatttgctatttttctggcaatattctaaaagataagtttgttaaaaaaaaaagataagctttgtgctttcaatgacaatactggttaacttagatttttcaaagacaatcctagatctgtactaaattaactcttacagtaaatacaaaattagtagttttaaaaccatttgaattagttcatttgggtttctattacaaaawaccataaactagcatctaaacaacagaaatgtatttctcacagttctggaggctgggaagtccaagatcaaggtactaacagattcagtgtctggcgagggcctgtctcctggttcatagatggtaccttctaactgtgtcctcacatggtagtaggagaaaaca

SEQ ID NO: 148260 - DNA, 610 bp, Homo sapiens
acgtatgctttggatgagtgttacagaggattcaccaggctttgttttgtgctggtcaggttctagtgcaggggtctccaaactttttgttagtgtgtattcatgcacaaattaatgtatggataaaaatcaatggagataggaaataaaatttttcttcctatccgtcagtggatcatcttgtgcaccatttgggatcactagtctgttcccttgttaattacacatgtgcaattaacttcatctcttcaatgaagagggtaggtggccagtcattggaaacattgtgcatgtgtgaaagcaaacagcatggagcatttaccggcacccgtggaagatgctgctctaaggcccctggaatactacagttctgctaacatcctggaagctctgtgatcccatgagcagttgcccaggmatttttgatgacaaggaggggagaatctatggaacagttgattattttgatgtgtttgaataaagttttttacctttagatggcttagccataatcatttgaaagacaattgagaatgtcctagtgtcattttttctgcttacagattttaccccattttactagataatatcccaccacaagttgattact

SEQ ID NO: 148261 - DNA, 547 bp, Homo sapiens
gtgtttctctttctcttcatctgtggacttcagctttccttagttgattataggttggtaacagtaaagacaaaggtaagaagagctggtcccttataacagtctgggagactctgacctactcgcagccccagccaaaacagagggcatttctcaatctcttggagaaacaactcagagacctggcaggtcacaatacatctttgtttatcaaagatacctcattctgtccccactttgtgccattaaaaaatctcagctcaatataagtagaaaaaaagaatggaaaaatatgaaaaaaaaaaaacaatttcggtaaattccaagtgaagctgcagtgcccttttctgtcttcttcatctttaataacctatttattgttgaaaatcccctggcatatccaacttcagccayggagactttcttaattctaatcacaccaactctcacgttatgcattccattctcagaatttcatagcaacttgggaatgcctttattatcatacactcagttttctttgtaattatttgttcatatatctatc

SEQ ID NO: 148262 - DNA, 507 bp, Homo sapiens
caaaacagcttacagcatagtcaagatttgcaaactcagaattcctgacctgaggttaggtaaagttattatttctcatctgagacttctcaactccagagatacacgattccaaagagattagagaaaatttgaaaggtatcaatatttgaggagtagaactggtgcccaagtaatcgagtgggcctgtgcaggcagcattcacggattttagaaccacggagacaggtgctgccctgggaatgactrctgttggagtaaatacagttcaaggatgaataaaatgtgagagatgaaacaagtcctgggatataactcaaacttgttgtaaaaacggacctgcactagaacctaagaaagacagaagtgactgctaatgccgttgtttgctgttccctggtgcattcccaggagacatcagtaatggcgtgccttgtataaacatcttctccgccagaggcggtcacagagcttttgttgcgactcattttcttctaatttaaagca

SEQ ID NO: 148263 - DNA, 546 bp, Homo sapiens
tgcaaaattgtatctttattggctgaaaggtaaagtataacagaaaaatgtgagaggatacaaaaaatgcatgctttgtgttcttccattctccctaatattccaatatgctgctttggcaccctggctagatttgagacaccttgagactttatagaatgatcaaaccttcattctaccccttgatagaaattactgtaagttgtcatgatattgaaatttcagtgctaatcacaaatatcaatgggcagattattcttcaacttgctgcatttgatgcagacttatcttgaaacattctactgccttttatactgcgttctgccttattatcttgcttgcttgattatawgtttctgatatacacaacccctgcacaattcttaaatattggtatttctgttggaacacattttcttctaactctacacactcttccagggagacaccattcatactctgaccacttttattccattactcacagatctgtttagatagatcagaatcatcccagaagctgcagattcatttacttaatatatt

SEQ ID NO: 148264 - DNA, 516 bp, Homo sapiens
gcagttttcaccattaaaagcaatgttgaaaacygcaattacttttgcaccaaactaatggcaatttattataaagttaagtgtacactgagcgtatgaccctgtgattccattcctctgtattattgaattcttctatagaaccgtgctgaagatcgctcacatctccttgactccctggaacttcaggcaatataatggtagtgtcaaaaagattattttcactcgctttctttgctcctttttgctgtatgtactaaaaagaaaacgcagttgctaatggacaaattaacattagcaaatggaaaaaaaagtcagtgaacaaggcaaattttctagcaagcttgagaaaatgaattcaaactggcctcatgccaccgaaagtgctatatacgtcttagtctcctgattttattatggaacaagatgttaaaaatttgtcctgttctgagattttcttttctaggagaaacttgtattttctgctgagataattcctttctctttcttcttgtt

SEQ ID NO: 148265 - DNA, 516 bp, Homo sapiens
gcagttttcaccattaaaagcaatgttgaaaactgcaattacttttgcaccaaactaatggcaatttattataaagttaagtgtacactgagcgtatgaccctgtgattccattcctctgtattattgaattcttctatagaaccgtgctgaagatcgctcacatctccttgactccctggaacttcaggcaatataatggtagtgtcaaaaagattattttcactcgctttctttgctcctttttgctgyatgtactaaaaagaaaacgcagttgctaatggacaaattaacattagcaaatggaaaaaaaagtcagtgaacaaggcaaattttctagcaagcttgagaaaatgaattcaaactggcctcatgccaccgaaagtgctatatacgtcttagtctcctgattttattatggaacaagatgttaaaaatttgtcctgttctgagattttcttttctaggagaaacttgtattttctgctgagataattcctttctctttcttcttgtt

SEQ ID NO: 148266 - DNA, 516 bp, Homo sapiens
gcagttttcaccattaaaagcaatgttgaaaactgcaattacttttgcaccaaactaatggcaatttattataaagttaagtgtacactgagcgtatgaccctgtgattccattcctctgtattattgaattcttctatagaaccgtgctgaagatcgctcacatctccttgactccctggaacttcaggcaatataatggtagtgtcaaaaagattattttcactcgctttctttgctcctttttgctgtatgtactaaaaagaaaacgcagttgctaatggacaaattaacattagcaaatggaaaaaaaagtcagtgaacaaggcaaattttctagcaagcttgagaaaatgaattcaaactggcctcatgccaccgaaagtgctatatacgtcttagtctcctgattttattatggaacaagatgttaaaaatttgtcctgttctgagwttttcttttctaggagaaacttgtattttctgctgagataattcctttctctttcttcttgtt

SEQ ID NO: 148267 - DNA, 562 bp, Homo sapiens
tttagttctctacaagatagtgggagccatcaatttatttctattcttagtatagtccctgggttactgtcattccttgaagatcaagttcgggaatagcaacagccatttctctttatcgtacacatattcttttatatatatattatttaatcaaaattggaaatcaatgaattcttcattattgtgtggcagaatttgagtcctatataaacaaattttgtaaatattaaatgagttttaaagrcatattttcatttgtaaagcagaatttattgacctcaatattacattttctttctttgcatttgccagctgaatatttttctgagcttgaatcttggcatctgttttagaagtcacttgctggaatgcgacatgattattagaggttttgttttccttgtataatctcaatacatcatatacaatgactttttgttaacctggggaaagctggcaagtctgataaagggtgggaattagaaacagaggagaaaggaggaagtgaatgagcgtgagataatggaagaggagacaggatctgttatgtgttgaccac

SEQ ID NO: 148268 - DNA, 578 bp, Homo sapiens
agacaaattattatgatctcttcaaggaaaactaagacatttttctggatcacgaatattcttaaataaggtaggagcaaagcatgtgtacagtcaatgatcactttagaaaatgaaataagacttgtcagtgggtagggaggatggggagagttgagcgagaaactatttagttgtgaattaccagctaggaagatggacaaagtgaccctgaaataagttcccgatgataatccctgggacagataactcctctgatttcaggcaaggagacaagaaaggagagatgaagaaaatactcaaaaaaccatttttgtctgtttgaaaataaagagaaatacagtaaatagaaaaaaaataatctcttgctaatttttctatttcctacagaaggagagaaggtagcagctcccttacagaccactttaacatrtaagtaacacttcggaaccttctgatttgaggaataaaaaccaactatagactccaccaaatgtcagagaaaattgttttgttccaaatgggctatctttagccacatttgttacaatctattactaattctgtggacagtgcat

SEQ ID NO: 148269 - DNA, 532 bp, Homo sapiens
catataaatgacattaaatgtaaatggtcgaaatgtatcaaatacagagaatgtcagagaatattaaaacatgtgatctaacaatatgttgtctacaagaaattcaattcaaatataacaatataggcaggctgaaaataataagatagggaaagctatttatgaagatattacatgtaggaaagcagaaattgctatatcaatttaaagtaaacttgatatcagagcaaaggaaatatcacagaccaagagagatattatataataagaaaagggtaaaaaacacaagcatagcaatcctactggtgcaccaaacctcacacctgcaaaaatatatgaagcagtgtagataaaactgaaagaaggcatagataaatcaatattaataattggamattttaacatctctttctgaacaactgatagaagcactagacaaaaaagttgacaagaatttagaaaaactcataaacactctcataaagcaagatctacatgacatccataggaacttcacatagcaacagaaata

SEQ ID NO: 148270 - DNA, 550 bp, Homo sapiens
atttcctgaatctggggcagactgttccttcctgtccctgaacctatgatacatgctgctaagggatatttggtagttcacagaatatctaggatggacttatgaatatatatatatatatataaaaccagggctttgagaaacaatgcccccccacaatctggtattgtaagggtactatctttgctaaacccccaatagagaatttctctgctctagtagaaaattgagcaatgttatgcaytacctctaattctagagaccctctgcagtatattatatatgctactgtgtcaaaagaatcaatgccctatgcttaatctatattttcaaaaagcttacttccaaatcaaagactcctagagaagatcaagctggaacaaccaacatctcatacctgcacactagtagcatgaaatttaggaatgcagtatgcacatgtacacaggcagttcttactttccataacattatattaactgaaacttgtacatattagaactcggtctttgtgtttcatagttccctgatcgctgcaagaaaacctgaa

SEQ ID NO: 148271 - DNA, 420 bp, Homo sapiens
acctcaactatttttggctcccacgtataagtgaaaacatgtgctgtttatctttctgtgcctgacttatttaacttaacacagcgtcctctaggtttatctatgttgcyatgaataacagtgttttgttttttaaatggatgaatagtattcactgtgtgtacatataacatttctttatccattcacctgttgatggacatttaggttgatttcatatctttactcttgtgaataatggtgcagtaaacatgggggtacatacatctattgaatatactattttgtttcctttggataaaggctcagtagtgggattgtgggattgctggattatatggtagttctatttttaatttttgagaaagctttaaagtgttttccataaatgctgtactaatgtataatcccactatcagt

SEQ ID NO: 148272 - DNA, 420 bp, Homo sapiens
acctcaactatttttggctcccacgtataagtgaaaacatgtgctgtttatctttctgtgcctgacttatttaacttaacacagcgtcctctaggtttatctatgttgctakgaataacagtgttttgttttttaaatggatgaatagtattcactgtgtgtacatataacatttctttatccattcacctgttgatggacatttaggttgatttcatatctttactcttgtgaataatggtgcagtaaacatgggggtacatacatctattgaatatactattttgtttcctttggataaaggctcagtagtgggattgtgggattgctggattatatggtagttctatttttaatttttgagaaagctttaaagtgttttccataaatgctgtactaatgtataatcccactatcagt

SEQ ID NO: 148273 - DNA, 540 bp, Homo sapiens
tccctgcccttcagggacacatggatcacattccagataaaaaatgtgtttgtagagagttgtcgtgcctcagtactagcttttttctttctgattacatctgttctggaaatgctgaacaactattccactttgtttcaaacaatggtgggtgatgaaatatcataggaaaaagtaaagaggattaaattttatagttttttaaaatgaaaataaattatatgaaatttgaatttgcatccctggggactgtgaatatatctcttttaaagttattgttgacagtattggataaagcagttttgagcytaaaataaattgggccagttccttcttcacttaacagatgagaaaaatggttatatcctatgtaacaaacctgcacattcagcacatgtatcccagaacttaaagtaaaataaaaaataaaaataaaaaataaatgactacatcagcttgttccaaggttataaaactagttagaagtgtgagttacttgttctgttagtcttaatcataccaaatttggattttatactg

SEQ ID NO: 148274 - DNA, 580 bp, Homo sapiens
gtttgcctataatatttatattgcacaataatacatttacttattttttacttattgaaatatgccacttgtttttaaatagcatgtaagatgcagatatttgcacttttaattgatatgccaggcaggagatttactgctctcaacaggtattaagaggtaggaaagctgccccccggcaagtttcttagcactgtggaactgatcctagtgccatggtgagtaagtggcagacctcagattcacaccacgtctctgactcccaataaaccacactgtccccccacccccaaccctcatggtgattaaaatgattactatgtacacacaaaatatattaggttacargttttttgtttacaattctaagcttctaagctctgttcatttgtatcttcataatttgggggcctatgaaggattgtttatccctaaattgaaagcaagcaaactaacaaaaaatgagatcaaacattgtcagagacggttgttcagttaatccaagcattcaacaagggttataaatacggcatagaagactagggggaaaaatccaagtttttgataaattgtcctcaaa

SEQ ID NO: 148275 - DNA, 561 bp, Homo sapiens
aaaacaaaaaataaggaattgaatatatgagtcctratttgaggctccagatacatttactgttactctagcctatgttttgtgtctgctttctatttgtagctctcttgcaaaacctaagaggattcagttgcttcatattggtcccaagttagtactaagctgactcacatagattttcttatttccaccactaagcatgataaaggttacaagtatttccggtgcaattataaattgcatctgcacaccccagcttgtaagtacctgcggacaatttcacactactgtggttcaatgtctccctgttgccctctaagcttgagaaacccattgatattgaacctcctctgacagcaaaggcaactgagagttccatgtaggggaagaagggaggacatccaaggaagacacacagaaaagcagtttggaggagctggacttgactggtcctctctgacttaatgacctttcttctcccaaggagccggatgccggactcagggccattagcaccaccactgatctccaaaccagacatgtccccagggaggccccaaa

SEQ ID NO: 148276 - DNA, 577 bp, Homo sapiens
cttcctgttgaaccagaaaacaaaaaataaggaattgaatatatgagtcctgatttgaggctccagatacatttactgttactctagcctatgttttgtgtctgctttctatttgtagctctcttgcaaaacctaagaggattcagttgcttcatattggtcccaagttagtactaagctgactcacatagattttcttatttccaccactaagcatgataaaggttacaagtatttccggtgcaattataaattgcatctgcacaccccagcttgtaagtacctgcggacaatttcacactactgtggttcaatgtctccctgttgccctctaagcttgagaaacccattgatattgaacctcctctgacagcaaaggcaactgagagttccatgtaggggaagaagggaggacatccaaggaagacacacagaaaagcagtttggaggagctggacttgactggtcctctctgacttaatgacctttcttctcccaaggagccggatgccggactcrgggccattagcaccaccactgatctccaaaccagacatgtccccagggaggccccaaa

SEQ ID NO: 148277 - DNA, 585 bp, Homo sapiens
gagccatagtgttaatgtttttgatttaaaggatttatgtatatttgatatttcaagtaattaaaagaaataatttggcctaggtaacagatcagcctgtatttccaaattaaaatgtacaatgaagtagctcatttagacatttgatttgggggaaggttgaaattgtactagttttataagcaacattttagtgcatttaagataatttattaggtttctaagacttgtttaagggaagattttataatttaaaaagcaggtagttctaatatttaaaagaaataattacttattcatggcttgaaacatagatgaaagaaagaacatgggtttttgaaaagtgagcttgctcatctgaaaagcaaggacatgagagtgaagatgagctttcaatgaaataatgactacagcgtaatgcccaggccacagtactcagtaaggacctgttgaagtcataatttttagaagtcactgaacaacaggatacgttctgagaaatacrtcatcaggtgattttagtcattgttagaaaatcgtcaagtgtacttacacaaacctagatggaatagccaactacacacc

SEQ ID NO: 148278 - DNA, 548 bp, Homo sapiens
tgttctcaccacaaaaattggtaagctrtgtgaggtaatacatgttaattagctcgattcagccattctactgtgtatgcatatttcacaacatcatgttatacaccataaatgtataaaatttttatctatcaattaaaaataattaattaaaagtacatgctaaaaaacatataaagaccaaatagtttcacaggagtaagttttatgtaatctttaaagaatagttatttccagtgttattctttttatgaaactagtgtacattcaagactgaaatttggcaaacaggttattgaaaaaggtatatagttgggtgtgacagctcacacctttaatcctagcactttggtaggctgaggtaggcagatcgcttgagcccaggagtttcagaccagcgaaaccacatttctacaaaacaatacaaaaaattagccaggcatggtggcacaggcctgtagtcccagatactcaggaggctgaggtgggaggattgcttgagcccagtgaggctgaggctgcagtgagccaagatcatgccactgcat

SEQ ID NO: 148279 - DNA, 548 bp, Homo sapiens
tgttctcaccacaaaaattggtaagctatgtgaggtaatacatgttaattagctcgattcagccattctactgtgtatgcatatttcamaacatcatgttatacaccataaatgtataaaatttttatctatcaattaaaaataattaattaaaagtacatgctaaaaaacatataaagaccaaatagtttcacaggagtaagttttatgtaatctttaaagaatagttatttccagtgttattctttttatgaaactagtgtacattcaagactgaaatttggcaaacaggttattgaaaaaggtatatagttgggtgtgacagctcacacctttaatcctagcactttggtaggctgaggtaggcagatcgcttgagcccaggagtttcagaccagcgaaaccacatttctacaaaacaatacaaaaaattagccaggcatggtggcacaggcctgtagtcccagatactcaggaggctgaggtgggaggattgcttgagcccagtgaggctgaggctgcagtgagccaagatcatgccactgcat

SEQ ID NO: 148280 - DNA, 548 bp, Homo sapiens
tgttctcaccacaaaaattggtaagctatgtgaggtaatacatgttaattagctcgattcagccattctactgtgtatgcatatttcacaacatcatgttatacaccataaatgtataaaatttttatctatcaattaaaaataattaattaaaagtasatgctaaaaaacatataaagaccaaatagtttcacaggagtaagttttatgtaatctttaaagaatagttatttccagtgttattctttttatgaaactagtgtacattcaagactgaaatttggcaaacaggttattgaaaaaggtatatagttgggtgtgacagctcacacctttaatcctagcactttggtaggctgaggtaggcagatcgcttgagcccaggagtttcagaccagcgaaaccacatttctacaaaacaatacaaaaaattagccaggcatggtggcacaggcctgtagtcccagatactcaggaggctgaggtgggaggattgcttgagcccagtgaggctgaggctgcagtgagccaagatcatgccactgcat

SEQ ID NO: 148281 - DNA, 548 bp, Homo sapiens
tgttctcaccacaaaaattggtaagctatgtgaggtaatacatgttaattagctcgattcagccattctactgtgtatgcatatttcacaacatcatgttatacaccataaatgtataaaatttttatctatcaattaaaaataattaattaaaagtacatgctaaaaaacatataaagaccaaatagtttcacaggagtaagttttatgtaatctttaaagaatagttatttccagtgttattctttttatgaaactagtgtacattcaagactgaaatttggcaaacaggttattgaaaaargtatatagttgggtgtgacagctcacacctttaatcctagcactttggtaggctgaggtaggcagatcgcttgagcccaggagtttcagaccagcgaaaccacatttctacaaaacaatacaaaaaattagccaggcatggtggcacaggcctgtagtcccagatactcaggaggctgaggtgggaggattgcttgagcccagtgaggctgaggctgcagtgagccaagatcatgccactgcat

SEQ ID NO: 148282 - DNA, 528 bp, Homo sapiens
ggactctatctgatgcatttgtgaatcatgtttgtcactaattctaatttaacttcatagaagttttaaaacgctgtttagtttttttgctgttgttcctttcccaaatcaactttcaaaaaacgttggtttaacggtgttagaaaggcttagacattttcttttgggggacagtgtgattaatgtttgcagcaaacgcaagggctgtggtgttgacagatccaagttttattaactccaggactattcctggatgtgtgacctcaggcaagtcagttcatctctaagcttctatttcctcatctgtaaaatgatttaaattaaatccacctccmgcagcgtcatgaggcaaagattacctgagatcacatctataaacaacacattgctcacagcgcccagtggacacaaggtctcttccttccttccttcaggcacaggtgagaggcccacactctgagcagctggttatgagtgggccattatcagggatttgaacagtcacttggcttcactgcttgctcccag

SEQ ID NO: 148283 - DNA, 560 bp, Homo sapiens
cgggacatcctatttgcttcctttcaggtgcttccaaatcactttggctttttagaagttaacaggaaaaagaagtgggagaaagaaggagggtgatatggtttggttgtatccccacccaaatctcamctcgaatcgtaatccccacatgtcagaggaggggcctggtggcaggtggcccccaggctgttcctgtgatactgtgggagttctcaccagatctgatggtttaaaagtgtgtggtggttcccacccacctttctcctgccaccatgagaagacgtgccttgcttccccttcaccttcagccaccatgattctaagtttcctgacaccccccaaatcatgcttcctgttaagcctgtggaactgtgagtcaatgaaacatcttttcttcataaactacccattttcaggtagttcttcatagcagtgtgagaatggactaatacagaaggtaagaagcagacatccaaaaatacaactctctgccccaaggaaggtttaaaggaaggcaacagtctgcccttgaatgaagtttccagtatacagaggccaac

SEQ ID NO: 148284 - DNA, 560 bp, Homo sapiens
cgggacatcctatttgcttcctttcaggtgcttccaaatcactttggctttttagaagttaacaggaaaaagaagtgggagaaagaaggagggtgatatggtttggttgtatccccacccaaatctcaactcgaatcgtaatccccacatgtcagaggaggggcctggtggcaggtggcccccaggctgttcctgtgatactgtgggagttctcaccagatctgatggtttaaaagtgtgtggtggttcccacccacctttctcctgccaccatgagaagaygtgccttgcttccccttcaccttcagccaccatgattctaagtttcctgacaccccccaaatcatgcttcctgttaagcctgtggaactgtgagtcaatgaaacatcttttcttcataaactacccattttcaggtagttcttcatagcagtgtgagaatggactaatacagaaggtaagaagcagacatccaaaaatacaactctctgccccaaggaaggtttaaaggaaggcaacagtctgcccttgaatgaagtttccagtatacagaggccaac

SEQ ID NO: 148285 - DNA, 596 bp, Homo sapiens
tatttgggtcctgtactggcaaatgttttggattttatgacttacatttattattgtgtggagccaagtaggtccacattcagcagtgcttgtaagttatgtccatgaccggaaaaaattatcgcagaggtcctgtgcttgccaggatttaagcagattaaggagtcctcagtcaggtagatgtccatgagtgaggtggttagatgaaggaaatgaagtcattccaaagccagaggactcacagacatgtctgtggtcccgtgtgtgcctgtactgtcaaaatgaaggctcgcgataacccaggttcctgggctaccgtcaagggttttaytgtgccttttaggagaccctcaaaagtctcctcttgcccttcaatgccttccttgaggcaattagctatggggctgaacatccccaggtggtcaagataacctgagaggaaccaaatctcatcgtgtgtaatgagggcttcttccttctcttcagggacatatgtcttggaggagttccctatcagtttgtaggacgaaagaatggtgagagacatgggaagagaacagctgatcggatcccggtcctcttcctcgaagcatcca

SEQ ID NO: 148286 - DNA, 596 bp, Homo sapiens
tatttgggtcctgtactggcaaatgttttggattttatgacttacatttattattgtgtggagccaagtaggtccacattcagcagtgcttgtaagttatgtccatgaccggaaaaaattatcgcagaggtcctgtgcttgccaggatttaagcagattaaggagtcctcagtcaggtagatgtccatgagtgaggtggttagatgaaggaaatgaagtcattccaaagccagaggactcacagacatgtctgtggtcccgtgtgtgcctgtactgtcaaaatgaaggctcgcgataacccaggttcctgggctaccgtcaagggttttactgtgccttttaggagaccctcaaaagtctcctcttgcccttcaatgccttccttgaggcaattagctatggggctgaacatccccaggtggtcaagataacctgagaggaaccaaatctcatcgtgtgtaatgagggcttcttccttctcttcagggacatatgtcttggaggagttccctatcagtttgtaggacgaaagaatggtgagagacatgrgaagagaacagctgatcggatcccggtcctcttcctcgaagcatcca

SEQ ID NO: 148287 - DNA, 325 bp, Homo sapiens
aaacttcctatcgctcaatttccctgctggtaaaatggtaacagtgagtggcttactgtgattcatatggttttggcagcartgactttcaagacagccttggctgctggaaattgtcctaaaacacattgggctatgctcttgcaataccaaatctgactcaaagaagggatttgagtgactggtgaaggggttatgttctcacggcacctctgatcctcacgttaaatgccagtctgtcttggacgtagtagagacgggggacgaaggctaggcactttctcagctttgtgtggagcccacggctcatgctctccatgagatt

SEQ ID NO: 148288 - DNA, 432 bp, Homo sapiens
atcacaagcatgtatttatccctgacctcccaacgtggatattagtttagcgtgctggacaagttggtcctttgcaaaagatgaaattgtgggctcactgatgtgagttactgctgatgtccctgtgtcaaataaatactgaagagacattggcgctctgaaggcactcaacacgtccttctggaagatacgaccccggtgctctgaaggcactyaacacatccttctggaagatatggcccattggaaatgtccctctgacatcttccttcagtcccagtgaaaaatgggcctccctgaatcttgcaagccacctgtcccggggcttgtcatttacaatcagtgcatgacaaatgacgttactgtgcacacgtgggctgaagtgacggtcaactgatcatcagccggcagaaatatttcctcaatgtcctg

SEQ ID NO: 148289 - DNA, 608 bp, Homo sapiens
cccaacgtggatattagtttagcgtgctggacaagttggtcctttgcaaaagatgaaattgtgggctcactgatgtgagttactgctgatgtccctgtgtcaaataaatactgaagagacattggcgctctgaaggcactcaacacgtccttctggaagatacgaccccggtgctctgaaggcactcaacacatccttctggaagatatggcccattggaaatgtccctctgacatcttccttcagtcccagtgaaaaatgggcctccctgaatcttkcaagccacctgtcccggggcttgtcatttacaatcagtgcatgacaaatgacgttactgtgcacacgtgggctgaagtgacggtcaactgatcatcagccggcagaaatatttcctcaatgtcctgacttggggttggctgtgggaggaattccagaccaattagttattctgaatcatggagggttagaggatagtggtgctattgacctaagaataagctgaggctcttgttactcaaacataaagagcccatagaaaagtaaacggtgtcaagagaggacatctgaacctttaaactcatcacagtgctgcgtggcgcagaccaagc

SEQ ID NO: 148290 - DNA, 475 bp, Homo sapiens
atgacacaaatttcagctcagaagctagaatgcaagtccgcaaggacagtcctgactgcatatttctgaagttaatttacactaggtgctgattctatttttccttcaattttgattggcttgtctgcaagtacttgtgacttttttcctacttgatgctgaacatgattctatttcccaagaacctttgtgccgtcagtccagtgtgatgagtcgccaacaggtttgaatttggcgtccatggtgagataagccatgagtgcagtgccragctgtgtctgtctttgcttgtcctcttgtatttccccttggcccgtttatttacgtaattttaaaagtttgtttcctgtctcttcaatcgttgtggagcaggaagaagacttcataagtaagactagaataaaatcaggtcatccacgtgaataattcccatgattttctatctgcattcttactcacaagctccactttgatg

SEQ ID NO: 148291 - DNA, 263 bp, Homo sapiens
ttcaagtacaccaagattctgattctgatgtctgaatccacgtactgaatcagattcaagtatgtgtctccagrtcacagttcttctgtggatgagctgtcagcggggctgacccctgagcgctctggcagcggggccaggcacaggtgcagggccccatccacccccagccaggcccttagccccaggccccacgtcctgtctctacaaccgcctcccagctctgctgatggaaagcaagtgggggtggggttttcccagct

SEQ ID NO: 148292 - DNA, 263 bp, Homo sapiens
ttcaagtacaccaagattctgattctgatgtctgaatccacgtactgaatcagattcaagtatgtgtctccagatcacagttcttctgtggatgagctgtcagcggggctgacccctgagcgctctggcagcggggccaggcacaggtgcagggccccatccasccccagccaggcccttagccccaggccccacgtcctgtctctacaaccgcctcccagctctgctgatggaaagcaagtgggggtggggttttcccagct

SEQ ID NO: 148293 - DNA, 482 bp, Homo sapiens
tggggaatgagtcggagaggagatgggcaggcactgtgaggtgaggcttctttgtcaggaagtttggttggaggatggatgatttggcacacatgctggaagggtgtgtggggtgcaggaacggtggaggttaggagaaccttgagcatgggtgaagatgcgcttagaaaagagaagtcaaggttaagctgtgggagagagtgaggatgtctgggcgacagagccatgagaatgggatgaggtctggaataatgacagagagatgaccttagccaagctcaggtccctcttccactgtgatggggttgggaaaaggggggatgtgcaaaacaatgggtgtgaaartgttgttttgtagcacaatattttaattatgtccttttaaaaaatttccccacagacactacccgaagcagtccttcaccacggtggcagatacacctgaaaatcttcgcctgaagcagcaaagtgaattgcagagt

SEQ ID NO: 148294 - DNA, 425 bp, Homo sapiens
taatcccagctacttgggaggctgaggcaggagaatagcttgaacccgggacgtggaggttgcagagagctgagatagcaccactgcactccagctgggtgaaaagagtgaaactycatctcaaaaaaaaaaaaaaaaaaaaaaatcaaacgtgaaaagtgctttatcaactacttagcacaacaattcaatgcaataagtacaaccagactcattttcaaggtaagaaatcctaaggtaaaagaaaggagaacatagacaaatatcagaaagatataaaatggcccaatcagaagtcccaaaacagttgaagaggaccccaaattctagtcttcaatctggaataactgagtgccttggcaaaccaccccacttccccagatcttagattccctacgtgttcaataagtgacttgaaccagaga

SEQ ID NO: 148295 - DNA, 560 bp, Homo sapiens
  misc_feature (1)...(560): n = A,T,C or G
catccacataaagacttgtacaaagatgtttatggaagcattgttaataatagccaaaagtagatacatttcaaatacccatcaacagggtaaatggataaatatgtggcatattcatacaatggaatattattcagccataaaaggtatgcagtactaattcatgctacatggacctcagagacactatgctaagtgaaagaagccagatgcaatagaccacatactgtttgattccattcatatgaatgtccagaaaaggcaagtctatagagacaggaagtagatcagtgcttgcttgaggctgtgggtgggaatgagcagtgactgcagatgggcatgagaaatctttttggagtgatggaaatattctgaaattggattgtagtgatggttgcacaactccatacattttytaagaatcgttgaggggccctctttaaaatgagtgggataatatggtttgtaaatcataccttgataaggnngnggtggtttgtttttttaaggaacccgtgttttatgattgaaaactctgacctgaactgggtctgaaatat

SEQ ID NO: 148296 - DNA, 590 bp, Homo sapiens
aaatctatgatgcaaatgtcaatctcaagaagttattttaaaaaagcaacaaactaaacccaactaaagcagaatggaggaaataataaggatgggagcagaatcaatgaaatggaaaataaacctatagtagacagaattaacaaagtcagaaattaattacttgagaagactagtaaaattgataaatatgtggcaagactgactaaaaaataaagaggctgggcgcggtggctcacgcctgtaatcccagcactttaggaggccaaggcgggcggatcacgaggtcaggagatcragaccatcctggctaacacggtgaaaccccgtctctactaaaaaaatacaaaaaaattagccgagcgtggtggtgggtgcctgtagtcccagctactcgcgaggctgaggcaggagaatggtgtgaacccgggaggtggagcttgcagtgagccgagattgcgtcactgtactccagcctgggtgacagagagagactccatctcaaaaaaattaaaattaaaattaaaaaaataaaaataaataaagaaggcacaaattaccaatatcagtgatgaaaaaagagataatgc

SEQ ID NO: 148297 - DNA, 590 bp, Homo sapiens
aaatctatgatgcaaatgtcaatctcaagaagttattttaaaaaagcaacaaactaaacccaactaaagcagaatggaggaaataataaggatgggagcagaatcaatgaaatggaaaataaacctatagtagacagaattaacaaagtcagaaattaattacttgagaagactagtaaaattgataaatatgtggcaagactgactaaaaaataaagaggctgggcgcggtggctcacgcctgtaatcccagcactttaggaggccaaggcgggcggatcacgaggtcaggagatcaagaccatcctggctaacacggtgaaaccccgtctctactaaaaaaatacaaaaaaattagccgagcgtggtggygggtgcctgtagtcccagctactcgcgaggctgaggcaggagaatggtgtgaacccgggaggtggagcttgcagtgagccgagattgcgtcactgtactccagcctgggtgacagagagagactccatctcaaaaaaattaaaattaaaattaaaaaaataaaaataaataaagaaggcacaaattaccaatatcagtgatgaaaaaagagataatgc

SEQ ID NO: 148298 - DNA, 590 bp, Homo sapiens
aaatctatgatgcaaatgtcaatctcaagaagttattttaaaaaagcaacaaactaaacccaactaaagcagaatggaggaaataataaggatgggagcagaatcaatgaaatggaaaataaacctatagtagacagaattaacaaagtcagaaattaattacttgagaagactagtaaaattgataaatatgtggcaagactgactaaaaaataaagaggctgggcgcggtggctcacgcctgtaatcccagcactttaggaggccaaggcgggcggatcacgaggtcaggagatcaagaccatcctggctaacacggtgaaaccccgtctctactaaaaaaatacaaaaaaattagccgagcgtggtggtgggygcctgtagtcccagctactcgcgaggctgaggcaggagaatggtgtgaacccgggaggtggagcttgcagtgagccgagattgcgtcactgtactccagcctgggtgacagagagagactccatctcaaaaaaattaaaattaaaattaaaaaaataaaaataaataaagaaggcacaaattaccaatatcagtgatgaaaaaagagataatgc

SEQ ID NO: 148299 - DNA, 590 bp, Homo sapiens
aaatctatgatgcaaatgtcaatctcaagaagttattttaaaaaagcaacaaactaaacccaactaaagcagaatggaggaaataataaggatgggagcagaatcaatgaaatggaaaataaacctatagtagacagaattaacaaagtcagaaattaattacttgagaagactagtaaaattgataaatatgtggcaagactgactaaaaaataaagaggctgggcgcggtggctcacgcctgtaatcccagcactttaggaggccaaggcgggcggatcacgaggtcaggagatcaagaccatcctggctaacacggtgaaaccccgtctctactaaaaaaatacaaaaaaattagccgagcgtggtggtgggtgcctgtagtcccagctactcscgaggctgaggcaggagaatggtgtgaacccgggaggtggagcttgcagtgagccgagattgcgtcactgtactccagcctgggtgacagagagagactccatctcaaaaaaattaaaattaaaattaaaaaaataaaaataaataaagaaggcacaaattaccaatatcagtgatgaaaaaagagataatgc

SEQ ID NO: 148300 - DNA, 283 bp, Homo sapiens
gaattcctaacgcgtgctattctacaaccatgtgatccattgcacccatctttagcacccctgagttggaggaagtcgccgtcatgaagcaacagctgtcctttttttttttctttcttaraaaagctggttgtacttagagaatttgcttttggtaaaatttgagtttatttctacttatgaaattggaaataagctgaaatcaacaacttctgggccctcctgccattttcatgtcaaggcacatggagacatgtcagtgcacgtgggacgtggaagctgc

SEQ ID NO: 148301 - DNA, 348 bp, Homo sapiens
gtggctactgtcttatctcaggtccctttgcccaagtctctagttcctttttttcttccagcyagtcatttaaagtttatggaccttttcctggcaaatccatagattttttttccccctatctaatcatgaccctaattttaaatctgacctaagcagggcacctgctgtggtcctcccatttacagttctcttgagcatttcattcatttattcatctgccattctctactctagaagtctctagtagcctttgtgcttaatcattatattgatgttgattttgaggactgtgaaatattttatgatctcaacgtgtctcatcaaagcaattgtttcatgcttttc

SEQ ID NO: 148302 - DNA, 339 bp, Homo sapiens
atcttggttttattcttcttacatgaagaagaaactgtaagtacacttccatttatttaaaaaaaatcatatgyaagatggcacgttagattctctttgcaaaccaagctgaatacacttggtggttgcacagctctcctggtatattatttattgcgaaggaaaattatcgtgctgataagaaaatagtgtcacttaaaaattaggtggttcccaatcaacttatgacagtaattgctgtaatgtcctctttgatttagatatagtaatatcaatgtaattgccactgggaaaaaattataatggctgttaatgataactaacacataaatggcaatg

SEQ ID NO: 148303 - DNA, 541 bp, Homo sapiens
ctgctttctgtcaatgttcctcatcagtgtcagccaaccttctttgtacacacaaggcaagacagtcaactcactattcatggtacctggtttgctcatttccactcatacatgcctgaaaaccttccttctggtcccaattgtcgtctgttcctaactcacctttttgaaaactaaatggcacttgttgatttagaagtttataatattatctgattcctaaatatatctatctattggattggatttcaacctcgacttttttttttttgagacagagtctcagtcacccaggctggagtgcagtggtggattttggctcactgcaacctccaccttcccagttcaagtgattctcctgcctcagcctcccaagtagcygggattacaagcacctgctaccacactctgctaatttttgtatttttagtagagatggggtttcatcatgttggccaggctgatcttgacctctggaccttaggtgatcagcccacctcagcctcccaaagtgctgggattgcaggtgtgagccgccgtg

SEQ ID NO: 148304 - DNA, 432 bp, Homo sapiens
gagcaggaaatatttttcttataaataatacatgtgaactatgtagaagacaygagaattgatctagttttaactatcacagcagtcctatgttacctaaaatatttagctaaatatgatacttggaaattattgggtgaattggtgagggattgtgtactttgggagagggaacataggttttaggtatgtgtctgaagaaagagaagaaatagatcacaacattaaatctatagaaacaaatacaatggaaatattttccagagttagtcctcagaacgtatgctctttatatgacctataataaagataatgtggaaattattattttatttaatgtacatttttcttggttaaaatctatttcttgtataaacagtttgggttaaatgaactgcttagtcaactgtaaaatgcccttgtgtagtcata

SEQ ID NO: 148305 - DNA, 456 bp, Homo sapiens
atatataaagaccaggtgcagactcagagaatatacaatgcatttgtgttacaagagacttgcattcaaaataactaaggacaattatacctcaataaggagaaaatgaattaaatagaaatgaccataaaaaaatttaaacaactttkcaacaaggcaattcatgaatgtccagtaatcacctaaaaagacattaaacaatactaatcatcaggaaaatgttaattataaccacaaaggaaaaccactagacactaagaaaggaaaaaattgaaaatctgatcataccaatttctatatgttatggacatgtttgcctcatacataaaatgtatctaaatgttaattatcttacttctgtaactataataaaatctgaactgacttgtttttatttactataaattttaagatgtagttcatatactaaaagtcattgttatttaaataatcata

SEQ ID NO: 148306 - DNA, 456 bp, Homo sapiens
atatataaagaccaggtgcagactcagagaatatacaatgcatttgtgttacaagagacttgcattcaaaataactaaggacaattatacctcaataaggagaaaatgaattaaatagaaatgaccataaaaaaatttaaacaacttttcaacaaggcaattcatgaatgtccagtaatcacctaaaaagacattaaacaatactaatcatcaggaaaatgttaattataaccacaaaggaaaaccactagacactaagaaaggaaaaaattgaaaatctgatcataccaatttctatatgttatggacatgtttgcctcatacataaaatgtatctaaatgttaattatcwtacttctgtaactataataaaatctgaactgacttgtttttatttactataaattttaagatgtagttcatatactaaaagtcattgttatttaaataatcata

SEQ ID NO: 148307 - DNA, 456 bp, Homo sapiens
atatataaagaccaggtgcagactcagagaatatacaatgcatttgtgttacaagagacttgcattcaaaataactaaggacaattatacctcaataaggagaaaatgaattaaatagaaatgaccataaaaaaatttaaacaacttttcaacaaggcaattcatgaatgtccagtaatcacctaaaaagacattaaacaatactaatcatcaggaaaatgttaattataaccacaaaggaaaaccactagacactaagaaaggaaaaaattgaaaatctgatcataccaatttctatatgttatggacatgtttgcctcatacataaaatgtatctaaatgttaattatcttacttctgtaactataataaaatctgaactgacttgtttttatttactatamattttaagatgtagttcatatactaaaagtcattgttatttaaataatcata

SEQ ID NO: 148308 - DNA, 302 bp, Homo sapiens
ggacttgtacttgactgcattaagaatgtttagaacattgcatgagagttcttttaacttcagacattttttttctataaattaatctatttccagtttagtgcttaaatttgagcccagaaattgatatgtttttcctactaatgaagttcacttgtattttatttttttaatcctatcacatctgtatttcttctaggcaaygtggagttgcattttgcttttctgagagatctaatctgaaagtctctgacttttattgatgtgttcagataccatttacattgtacatgattattgat

SEQ ID NO: 148309 - DNA, 570 bp, Homo sapiens
tggatttaaatccagacttcagcatttccatcctgtagaaatcaggcaatatttttttaaaaacttctctaagccttaatacttttctctgtaaaatgtagaaagcaaaaattaaagaaaattcgacttagcattttccatacatatggaakcatatgtatggcttccacatggtatgtgcttctcatatattactttcttgctgctttcaattgacatcttcatacaaataaatacttattgatataacatactatacaaacataacaattcgtaagaactaattactaaaatctatgtgcaattatataaaatgttattatataacaagcataagagcatatttcttactatatatatatatatatatatatatataaaatctaagaattatctgagataaattctataaaacttgctaatatgttacaccttactctaataatcacacatacactcaaggttatactaatttacctagcagaacccaccaaaagaaaaataaacaaatctaagtatgatagtcagaattaaggttcccaaagatgttcacatgtcaatctgtagaat

SEQ ID NO: 148310 - DNA, 570 bp, Homo sapiens
tggatttaaatccagacttcagcatttccatcctgtagaaatcaggcaatatttttttaaaaacttctctaagccttaatacttttctctgtaaaatgtagaaagcaaaaattaaagaaaattcgacttagcattttccatacatatggaatcatatgtatggcttccacatggtatgtgcttctcatatattactttcttgctgctttcaattgacatcttcatacaaataaatacttattgatataacatactatacaaacataacaattcgtaagaactaattactaaaatctatgtgcaattatataaaatgttattatataacaagcataagagcatatttcttactatatatatatatatatatatatatataaaatctaagaattatctgagakaaattctataaaacttgctaatatgttacaccttactctaataatcacacatacactcaaggttatactaatttacctagcagaacccaccaaaagaaaaataaacaaatctaagtatgatagtcagaattaaggttcccaaagatgttcacatgtcaatctgtagaat

SEQ ID NO: 148311 - DNA, 330 bp, Homo sapiens
agttaaaatggctctttgaatttttgcatgtttgactatgtgggttactacagtctgcagcagcgtgtttcttaaaacaataataataaggcagttggaaagctgctcttagttttcttggtttttgccttaggataggcagtacctgaccgtactagggtttggtgccaacactcaggctgctgtatagggcatttaggagagaatataatgagaaaagcagagaaaccttggttcaaagakgtttaaggtagacctttttcagacagacctcctcctatccttactctccacccataaaagaggatggatgattttaataaaaggtgg

SEQ ID NO: 148312 - DNA, 626 bp, Homo sapiens
gtttgtattttacttgtttggttgattttmtcacagtatttcatagtggagagtttctcaagtgtttgaaaattattttctgcctatttgaatttaataatgaggtaatgataagttggatgttttgtgtgcattggtgaatcttggactggtttacttgaccaggaatgcaggcatgatgctgagataccagtaaatatctgtaactatatatatttcctcctgagttgttcaattatttcaggaaaaaaaatcttcaattttatggtaaaaagtaaattcctgtcaacagcaatctttgggccaaatggtacaagcaggaggacacattagcaaagagtctcattattcaatatgtaaactcatatagtcatcctgttgtgacaagtccccataatttatatttttctgtgctttgttttccctgaactgcagcatctctcactcaatatctcagaaaataaacttttatactcctgccaagattacggaggaatatatgcctagattgatagaatatggggagagaccactgtgcctaactgatttgtcattcttgagctttggaatcattccgtttgcagccctcaccttttaccttcgggaaattttattaaaattattac

SEQ ID NO: 148313 - DNA, 535 bp, Homo sapiens
catttgtaaataatttagctcttcttgttttctttgcttgtttctgaacatcttctgagagcaaaaataaacattccaaatgatgaatgtgagatggaaaattaaaagccactagggcaattgytccaactaaaacccagtttcaaactccctgacaggatttactaacataagattttctttgctcttgagagattaataagaaaaaaaaatgggactcttaaacattaaggcatgccaagctttctgggaccccagtcaggtacatagctttttttcctgtgcaggttttaaaatctgtgaccatgatgaggattattagaactttccaagcttgtttttattatatctgaattagaaactgcagccaactatagagttaacatgtagggtcttttaaattctctgtatatctctgtattgcttttcctgcctactctaaatattttggctttttttttttttgcttttattaagataatgtactattgctaatttcaaaagtcacttagaagtcttagggcatttcaaacaa

SEQ ID NO: 148314 - DNA, 595 bp, Homo sapiens
aggatatagaaaggtggataagttttcactcctctgtgatttctgcttttaagacaataatttactttaatgctggcagaatgcttcatactcaaatgattattttgtccttatgagaaagtttagcagattccatttaagagaacattagaattttcagattccagaattatgacaatattcagagactaaaatagtctctaacttctgtagcttcaaatgtcctgaaatattaatagacatttttattatgtccatgaaacaattaaaattgattgctttgaaaaattgggcctaataaatgatttttttttaaatgcgtgtgtgtgtgtgtgtgtgtgtgtgtwagagagaaaaagaggttgtgctagagaatgatccatgagtcctctgtgctttttccagttccatgacttaccacctgcagtctaagactccttgttttattttataggaattatgtattttctaaaataaaaggattagaactagagccggaattcacaaactagctgacagcaaatatgatctgtggataacttttgctcgacttacagggttatttgttttacacaaatttgaaatgtttaaaaaa

SEQ ID NO: 148315 - DNA, 595 bp, Homo sapiens
aggatatagaaaggtggataagttttcactcctctgtgatttctgcttttaagacaataatttactttaatgctggcagaatgcttcatactcaaatgattattttgtccttatgagaaagtttagcagattccatttaagagaacattagaattttcagattccagaattatgacaatattcagagactaaaatagtctctaacttctgtagcttcaaatgtcctgaaatattaatagacatttttattatgtccatgaaacaattaaaattgattgctttgaaaaattgggcctaataaatgatttttttttaaatgcgtgtgtgtgtgtgtgtgtgtgtgtgtaagagagaaaaagaggktgtgctagagaatgatccatgagtcctctgtgctttttccagttccatgacttaccacctgcagtctaagactccttgttttattttataggaattatgtattttctaaaataaaaggattagaactagagccggaattcacaaactagctgacagcaaatatgatctgtggataacttttgctcgacttacagggttatttgttttacacaaatttgaaatgtttaaaaaa

SEQ ID NO: 148316 - DNA, 595 bp, Homo sapiens
aggatatagaaaggtggataagttttcactcctctgtgatttctgcttttaagacaataatttactttaatgctggcagaatgcttcatactcaaatgattattttgtccttatgagaaagtttagcagattccatttaagagaacattagaattttcagattccagaattatgacaatattcagagactaaaatagtctctaacttctgtagcttcaaatgtcctgaaatattaatagacatttttattatgtccatgaaacaattaaaattgattgctttgaaaaattgggcctaataaatgatttttttttaaatgcgtgtgtgtgtgtgtgtgtgtgtgtgtaagagagaaaaagaggttgtgctagagaatgatccatgagtcctctgtgctttttccagttccatgacttaycacctgcagtctaagactccttgttttattttataggaattatgtattttctaaaataaaaggattagaactagagccggaattcacaaactagctgacagcaaatatgatctgtggataacttttgctcgacttacagggttatttgttttacacaaatttgaaatgtttaaaaaa

SEQ ID NO: 148317 - DNA, 595 bp, Homo sapiens
tcattgttgaaatgacaacaaagcatttccatgaacgtgacttataaagcatgggcagtgtttgmgccaatggactccaattttgaaagaaagtttttatgtgtgtaaaatgttagcaagcagcatcacatactacagagaaaatttctgtgaaaggaaaagtctattgatgcagctaacttcattttgcattgatgcaaaaatcctcaacaaaatactggcaaaccaaatccagcagcatatcaaaaagctaatccaccacaatcaggtaggctttatccctggggcaaggttggctcaacatatgcaaattaataaatgtgattcatcacataaacaactaaaaacaaaaactacatgattgtctcaacagatacaggctctccatattgaaaataaagataatatttgactagccagattttggtttattgaattccatctttttccacctaaaatattggagctcttataaaagttaagctcagtccattgatcttgcaattctatagtttcttttatttttattgaaaatcttcacctttactttatagaattatgttaagtaggtatataatactgtaaagtaaaatct

SEQ ID NO: 148318 - DNA, 595 bp, Homo sapiens
tcattgttgaaatgacaacaaagcatttccatgaacgtgacttataaagcatgggcagtgtttgagccaatggactccaattttgaaagaaagtttttatgtgtgtaaaatgttagcaagcagcatcacatactacagagaaaatttctgtgaaaggaaaagtctattgatgcagctaacttcattttgcattgatgcaaaaatcctcaacaaaatactggcaaaccaaatccagcagcatatcaaaaagctaatccaccacaatcaggtaggctttatccctggggcaaggttggctcaacatatgcaaattaataaatgtgattcatcacataaacaactaaaaacaaaaactacatgattgtctcaacagatacaggctctccatattgaaaataaagataatatttgactagccagattttggtttattgaattccatctttttccacctaaaataktggagctcttataaaagttaagctcagtccattgatcttgcaattctatagtttcttttatttttattgaaaatcttcacctttactttatagaattatgttaagtaggtatataatactgtaaagtaaaatct

SEQ ID NO: 148319 - DNA, 616 bp, Homo sapiens
tgataattgcttaggctgatagaatagttaactaaagaattgatatttaaaaaaaaaagaaagaaaaaataataaagaaacaagtaggctttcagaccaaacagatcaaactcctggtctgagataaaaactataaggtattcctgtctggcataagaattgctttgccagcaatgcagggtccagaaaacaccaaaaataaaaataaaaataaaaataaaaacctttggatacactcttccttttaaaaataaaagcactactaaaatgctttccctactgacattgactagtctaacaaagcagatgaataaacaaaagaaagatttgttactaaaaaaattcaaaggcacttggggatatttttcctatacayttcagccagtcctagcgaaaatgtaaacatttgaaaatttaacctcaaattcattgcaaaatgaaaaaaaggacagaaaagggataaaagaaaatttttgaaaaccaaactgctttacccaaaaattgggatctgcagctttcattcgattacctataggagcaaataaaatttagccatctgaacaggtcttattttgtcagaaatataatttggatccagctgtcttttataaaccag

SEQ ID NO: 148320 - DNA, 556 bp, Homo sapiens
aatttggatccagctgtcttttataaaccagtgagcttgtattactttgttttattgtctcgcgacttaaattttgcartgaaagctataagatgtttatttctgtgtttgtatatgtgtttaggtctttatatatgtatgttttgtttacgtggtataacctggtgtagttggccagaaatccctacagaaattatatttagattggcttacataaatgaacagttatataaactatatagtaattaaccaaatgccttttaattatgtgatttaagtaaatctttgaaaataagctggtttgaaatttgttgataaaataaagacaaaaatgttttcaaaattttctacatacatttttgcctaggtttacaagtcacacagagttttatatttgccactgctttaaattttaaggtcatcaaactataaacccaaccttcggacaaaaactccttctttgtctcaaatccactttcatttgatttttgtatatggtgagagataagtgtttagtaacataattctgcatatgaacctcattttcccaggacca

SEQ ID NO: 148321 - DNA, 524 bp, Homo sapiens
aaacaaggataattttatttcttcctttataatttggatgccctgtrtatctttcttttttaattgttgtggctaggacttacagcaatatgttgaataacagtggtgaaagcaggcatcgttttcttcttccagatattagagaaaagaatttcagttcatcctcattcagtatgatactagctgcgcttctatcatatatgccttttattatgttaaggtatgctccttctgtactcagttttttgagggtttttgtcatgaagggatgttgaattttatcataggcttttccagcaccaattgaaatgattatatagtttttgtccttcattctgttgacatgatgtatcatactgattgatttgtgtacgtggaaccacacttgcatgcctgggataaatcccacttagtcaggatgaatattttttactgtgatcttgaatttagtctgctagcattttctggaggatttttgcatccatattcatcagagatactggactgtagtttttttttttaat

SEQ ID NO: 148322 - DNA, 338 bp, Homo sapiens
atgagttcccagttatcttttttgttcaaaagcaccaactatcaccgaatttcaaagttgaatatagaaaagcccctgawgtattgaaaaaaatggcaactgtgaaactacatgatcttattttcctgcagctcttcttccctacctctttagataaaatcaaattgttcaccaatggctgttaatctgaaaaaacaattcctccctcttttgaaaatcattaaacaattattttagacaccagaaaagtaacaaaagaactcacctttcttctccctaagtaaaacattcctttggaattgcctcagtatccataatgaaggtttctgcttaatgat

SEQ ID NO: 148323 - DNA, 437 bp, Homo sapiens
gagcctgggtggtatcaagtcaagcaagagctgcagcccagcttcctgggaactatcacagtgcccagagaacacacagaatggttcattaactgcaagcatccagctctcttacaacaagaagagagctttccccacacaccagctgaaaagagccaaacccaactgtggtatgtgttaacttgtagatagtggctgagctctctccttgaggaaaaataataatttctctgttctcatacacacaggaactgacgacagaagaaagattgggtgggaaaatcgaacacttaactgactgaataagttgcccaaatggaacttacttagattgagggraataaaaaatagatgtagaatagtgaaatatttaatcctctaggtatttttctgtctgccatcagaggaaatggaggtttgtgaaaaaggtgatattt

SEQ ID NO: 148324 - DNA, 437 bp, Homo sapiens
gagcctgggtggtatcaagtcaagcaagagctgcagcccagcttcctgggaactatcacagtgcccagagaacacacagaatggttcattaactgcaagcatccagctctcttacaacaagaagagagctttccccacacaccagctgaaaagagccaaacccaactgtggtatgtgttaacttgtagatagtggctgagctctctccttgaggaaaaataataatttctctgttctcatacacacaggaactgacgacagaagaaagattgggtgggaaaatcgaacacttaactgactgaataagttgcccaaatggaacttacttagattgagggaaawaaaaaatagatgtagaatagtgaaatatttaatcctctaggtatttttctgtctgccatcagaggaaatggaggtttgtgaaaaaggtgatattt

SEQ ID NO: 148325 - DNA, 597 bp, Homo sapiens
gctgggtttgtaatttcttagcctgttattaatgtagatgtaattttcttacatagtatttctaattaattcatttttatgacttcttattccttcatattactaatactttattttgtctctttgagtttattttttgtatatcagtttttagtttgtatgttcctataattctgcttcatatagtttttgctttttaggttgtaatcataatactcaagtatctaggtattttcatctgtatgtttgcattgaggtttttacctgtttgccagataatgtgtactgagagaagggctcaaaaggccaattttttcccgcttcaactgttctggtatatgagcagatgtgcaggttcgttacaggtaaacatgtggcatggtggtttgctgcacagatcataccatcacctgtgtatcaagcccagcatccattagctattcttcctgatgctctccttcccctcgccctccccaacagaccccaacgtgtgttgttccccacaaygcgtccacgtgttctcattgttcagctcccatttataaatgagaacatgcggtgcttggttttccgttcctgtgttggtttgctgaggat

SEQ ID NO: 148326 - DNA, 597 bp, Homo sapiens
gctgggtttgtaatttcttagcctgttattaatgtagatgtaattttcttacatagtatttctaattaattcatttttatgacttcttattccttcatattactaatactttattttgtctctttgagtttattttttgtatatcagtttttagtttgtatgttcctataattctgcttcatatagtttttgctttttaggttgtaatcataatactcaagtatctaggtattttcatctgtatgtttgcattgaggtttttacctgtttgccagataatgtgtactgagagaagggctcaaaaggccaattttttcccgcttcaactgttctggtatatgagcagatgtgcaggttcgttacaggtaaacatgtggcatggtggtttgctgcacagatcataccatcacctgtgtatcaagcccagcatccattagctattcttcctgatgctctccttcccctcgccctccccaacagaccccaacgtgtgttgttccccacaacgcgtccacgtgttctcattgttcagctcccatttataartgagaacatgcggtgcttggttttccgttcctgtgttggtttgctgaggat

SEQ ID NO: 148327 - DNA, 349 bp, Homo sapiens
aagttctgaatttggtaagttaattgaagtaatgaagacatgaatataaataatataattgcatttaaaaattacatcctttatgctggtacagaaaaacagtataaatggtattatgcaaaaataatatatttagataatatgaataaacttcaaaggaagtttcatgtatttagatatgtaaaacataacatggaccagatgacataattaaaagtttatcttttcatttatagatattttattttcctagatagttaarttgcagttattgttggaagatttttatttttataatgataaatatataattttttagttgtcatatttttttaacctttcaacatat

SEQ ID NO: 148328 - DNA, 570 bp, Homo sapiens
ctgtttcatctatacctctctagtttttttttccatccatattttgaagaaaattttagatatcgtattatttcctctgtaaatgtttcawtatatctctatctaaatggtaaagatttttttaaactacattacttttacacataaaaactaatattatccaatattaagtcagggttcaaattgtctcataaatattgtagatgtattatcatcttcataccatctagatataccagattaactcctgagtccttttgagtatttctagtagatttgacagcttctttgctatgcagagtaatatgctgttctaggcttatctcgtatatctccagcttcagtcccaaacataataaaccctttgtccaagaagcctttttttttaaatgatagtagttttcagagatcacaatctgtgtcctagaggagctcgttgccattgagtgattatggtctcttagatttttttcatgcatggaggtaagtattatgtgattattttttgtcttaaaagacatcatgaattcatacttatcaaattcagagatgcagaatttatccttaaac

SEQ ID NO: 148329 - DNA, 570 bp, Homo sapiens
ctgtttcatctatacctctctagtttttttttccatccatattttgaagaaaattttagatatcgtattatttcctctgtaaatgtttcaatatawctctatctaaatggtaaagatttttttaaactacattacttttacacataaaaactaatattatccaatattaagtcagggttcaaattgtctcataaatattgtagatgtattatcatcttcataccatctagatataccagattaactcctgagtccttttgagtatttctagtagatttgacagcttctttgctatgcagagtaatatgctgttctaggcttatctcgtatatctccagcttcagtcccaaacataataaaccctttgtccaagaagcctttttttttaaatgatagtagttttcagagatcacaatctgtgtcctagaggagctcgttgccattgagtgattatggtctcttagatttttttcatgcatggaggtaagtattatgtgattattttttgtcttaaaagacatcatgaattcatacttatcaaattcagagatgcagaatttatccttaaac

SEQ ID NO: 148330 - DNA, 497 bp, Homo sapiens
aatctgtgtcctagaggagctcgttgccattgagtgattatggtctcttagatttttttcatgcatggaggtaagtattatgtgattattttttgtcttaaaagacatcatgaattcatacttatcaaattcagagatgcagaatttatccttaaactcaattatctatatatgccttctatcatgctgagaaacttggttctcaatggctcaaaaataatagagtatcactaattttctatcctttatatacattayacacacaataaacagtctgagaatagcagcatcagactatcactcttaatatgatcataaaatttgagaattattttgcagatatttttgttcttaggctgtatcttactatcttagactgtatctcaatagtaaaattaatgtgtttaaaaatcacttggaatagatcctctgtatgtggccatgccactctggatacatatactttcatttgtttcattttattttatatttttagg

SEQ ID NO: 148331 - DNA, 392 bp, Homo sapiens
tcttacttaatgctagttaggatgaatgaaaggtctacaaataaagctaattgcaatatttcagaacattgtggataaagacaaaattgtaaatgctttacgaggcacaaaaatttaaaaatgtaatagtcttttwgtgagcaatgttggatgctaaaagtcaattgatttaaaattccagggggaagccaggcacagtggtttgtgcctgtaatctcagctacttggaagaatgagaaggcaggagtgcgtgcgcccaagagttcgaggctgcggtgagctgtggtctcacacctgcactccagcctgggtgacagagcgagaccctgtctccaaaactgtaataataaaaaataaaattccaagggaaaaatgattttcaaccttatgtt

SEQ ID NO: 148332 - DNA, 593 bp, Homo sapiens
taatatatacattaatatatttgtttatcacttaattgtcaattgtttttacatacttaaattacattttatttttacgtctctgtgaggtaaacagaacagatattaaatcttttttcccaaataagagcctatattagagctcattttttttctattttagtgttccctgtacttcaccactatgttttttctgtaaatacattcaatataagrcagcatacagtaagcaagaggcacagagaaaatgccacaggggcccaaaggagagggaaatcagatcaggtgatcaccatagacctccaacccagaggtgccatttgagtcagacttgaaggttggtaggcatctgttgggcaaggaaatgagggtcttctaagacaagagatagtatcaaagctacagttataaaaaggcatggaactatttgaagaatggcaattgaatgtgttttgatggatgtagggctaatatgggtcccaggaagggaagctggaattggatcatgcaggaccttgaagatggaattgattttgctggcagtaggaagtaactcatgtttctaagtgggcaaattggtctgatcagcattg

SEQ ID NO: 148333 - DNA, 506 bp, Homo sapiens
gttggtctcctgttacttcttagactgcatgggcttttcttcctgttgatgttgcaaaaggattcttttttcttttttttttttttattcttctcacttcaaaaacttttcctatacagtatcacccaagcccgtgtctttaatcactgactatgttttgataatttctaaagctgtatctcccatctagacctttctttctaactccaaatccrtctgtataatcaccttcctggacatatccacctaacagttaacatatcagacatgtcagcatctgaactctgtcttcttcttacctcactctacaccttttctttttgccttagctcaatgaatgaactctttactttgttaagctgctaaagtgtccttctaaatagctcaccccacatgtaaataatcaccaaatcttaattattttgcctcctgcacatctctcatatttgttatttccactctatcctttctgctgatactctagcttaagcattcattctctcttg

SEQ ID NO: 148334 - DNA, 564 bp, Homo sapiens
tttaccacaacacaggtggcttgaagaccttttaatatagttactaataagctaatctatatgttttagagttttactcccttagccttgtgcccctaatttttctatgcaaattaaattaggttactgagaattattcattccttccttaatcagatcatatctgttggagagaacgttgtagaacttgtgaaaagcttcattcagctgtttcttggcattttgtttcaaaatgttatctcttcacataggatttggaaacactttgagttcaagtaccaggggaagtaagctaccccttcaagagtcaaagagcaaattccaaagagaaatgtcaaacaggcaagttttagaacttaggtttgtaatatttgcaactttatatccccttgacacatagttggagatggggatcaagttattagatgtcacagatgctaaaaggtattagccaacctaaaccctcttaatcttagaggtgtatttctcmaagtgctgttgtgaaaccacctgcatcaaaatcactttgaggtgcatattaaaaatgcacattcttaagcccca

SEQ ID NO: 148335 - DNA, 541 bp, Homo sapiens
ctgttagttggtgtatggtcagggcatacaaatatattttattaccttaagtaaaatgtaattaataaataaatctcctgcaaattctattataataaattctaaagccaaattgaaatgattgcagaattattcactgttttaagttttggcacaatttaccccttagtagagtcattcagagtctttttaccatgaccctatttctagaaaacattctcgtcaagcacagtagggaaccattctttgaggacccttagcctatgggtcacatggatagtattacctatggcatgctagataataacaggtatgtatatttaagaacttttcttttgtgggaatagagtaggtaccagtgagaaggaagtaaaagcatggaaaagtaactaagctaagaattacgctaagtaaakaagctaagaatttcagtctgggttttgaataggtcgtagaacaaaacaaaaaggaaaaccctggcacttcttatcttttgtcatttcaactcctggctgcccatagttaagggccttgccactca

SEQ ID NO: 148336 - DNA, 542 bp, Homo sapiens
cttcatatctgttaatatttttgaactttcttacaggggaaggatgatttaagttcttcctgtcaagccagtatgttgatagttataattaaacccaccacttaacacaaccaaattatcaaaaacaaagagatttggtattaggtaaccagaaacacatcagctaatgaagtacaatcaatgcttaatgaaatagttgagtgaaattctgtacattaaagaagagataaaaatcaagtggccttgtcaaggtaaataagaaaaagcactactctggaaaagataaactagaagtgtagttctgatttacttgccattatgtacttgcatctcttccatcatatttagcactcaggtataacccttatataatctcttatttccctataagaactttgcaaattcttttcagaatatggagtgtgactggagactagaataatttatgataattcttttcctaagatgccagatagcaaatgwtaaaacctcatcattaaatattgtcagaatctatattaatgtaacttagttttaaaata

SEQ ID NO: 148337 - DNA, 593 bp, Homo sapiens
ttttaacatgattaatacaaacgttatgaatttattttcagttttgtgcaacaaggaagggtgtgcaacaggctgcttctgttcttgtgaaagatgctaaatttattatgactgtggaacagaaacagaggtatagtattttattttttcatggaagtagaaggacttttagggctcatctagatgacatgagaaaattaggcttgtcccataaccttggggtaaacctcagtgtcctcatctataaaataaggataatgrtaattttgaggattaagtgagatagtgaatcttcgtacaggggtgatccagatttcttgaatgataaagattatccatactactatctattttttttaacctaatttcaatccagcatcttttatagtctttcactaaagctgatcttgcgaattaatctttaaggactctctatcatatttggccacttccaccttacttaaacactctggactctgtgcttccatgatcatttctactgattttcttcctcctttgcaggctgttcgttctcagtccccttttcacctcttctacccaactcttaaatgttgacattcgagtgagtatac

SEQ ID NO: 148338 - DNA, 577 bp, Homo sapiens
aagctttcagttgttccccattgattatgatgttggctgtgggcttttcataaatggcctttgttacattagttgagaagttttccttatatgcctgcgtgttaagagattttatcaagaaaggatgttgaacttgctgtcaaatgctttttctgcaccaattgagatggtcttgtgttttttatctttcattctgttaatgtgatatatcacagtggttgattggcatrtattaaaccagccttgcttgccaggaataaatccacttggccatggtgtataatcctttttgatgtgttgttgaattcagtttgcatatattttattgaggatttttgcatcaatattcatcagagatactagcctatagttttcttgtagtgtctttatgtggcctaggtatcaacgtgatagtagcctcacaaaatatgtttggaagtattccctgtagctgtattttttggaatagtttatgaagtattggtggtaattcttctttgaatgtttggtagaattcagttgtgatgctgtctggttctgggcttttccttgttggaagattcttcattactacttc

SEQ ID NO: 148339 - DNA, 560 bp, Homo sapiens
tttcagccggtgtccttatagctaagatggatctctggtaggcagcatrtagttggatcttggttttttttttttcttctatcaatttagacactatatgtcttgattggagaatttaattcatttgccttcagggttattattgatagataaggacttactcctgccattttaattgttttctggttgcttggtagatcagttgttcctttcttcctcttgttgtataagtttgtgatttgttgtttttctgtagcgctaagctttgattcctttctctttctcatctgtatcttctgtagcttcttgctttgcagttaccacaaggcttacgtaaaatatcttagagttataatagactattttaaactgaacttcagtcacatacaactactctagatttttgccctccccccacaatttatgtttgttgacacagtttacatctttttatattcagtattccttaacaactcattgtagctgtatttttgactattttgatttttcaccttcataatagagatttgaaagatttgcacaccaccattacagtggtg

SEQ ID NO: 148340 - DNA, 556 bp, Homo sapiens
catccctttattttgagcctgtgggtgtcattgtgtgtgagatgggtctcttgaagagagcataccatcattaggtcttgcttttttatccagcttgccactttgccttttttttttaagacagattctcactctgttgctcaggctggctggagtacagtggtacaatctcggatcactgaaacctccacatcccagttttaagcaattctcatgtctcaagctcctgagtagctgggattacaggcatgtgccaccatgcccagctaattgttggttgttttktttttttttttttgagatggagtctcgctctgtcgcccaggctggagtgcagtggtgcgatctcggctcactgcaagctccacctcccaggttcacgccattctcctgccgcggtatttttagtagagatgggcttcactatgttggcccggctgttctcaaactcccggccttagtgatctgcccacctcagcctcccaaaatgctgggattacagtgcccagcccctttgccttttaaatgggggcatttagcctatttacatgcaagg

SEQ ID NO: 148341 - DNA, 525 bp, Homo sapiens
taagtcttacgatgtttctaattgaaaaaaaaaagtcttcagactacaacaggaacttcagcagcagaggcaggtttgtggaacagagcttctgaaataacttcatttgggcttttgcttgcccttctcatgagaatcaccaacactggttgggcacggtttcctactctctttatgaaaccattcttcgtattctcctagcacttcctacatactttcactgtagaaaccaataccccattttgtaatatattattgtttccattagatggtgagttccttgaagatagggaccatccctcactcatctctgtatctcyagcaaccaagtacagtgtttggctcagagcaggcaatcaatcaagtttgctgggaattttaccatatagttaaagagcatctagttccccacaatttattcttctctaaggcacagaagaataaggaaagcttccaaatttctttatgatgtctgcacaacattgataccaaaagctgaaaagcactgcacaaaaaagaaaacta

SEQ ID NO: 148342 - DNA, 579 bp, Homo sapiens
gcagttctaggcattggaattttaaaaactccataggtgattcaagtatgtagccaaggtcaagaaccatgggtctaaactgttgttccaatcactgtctttgcactacctctgtcacataaaacccaagctcatatacaggacataggatactggtataagatatcacagaggtaagactcagagtggaggataactgaggactggggcagtgtgatgggacagggtatagggagacaggaagggagggatagagcagcaatggcaggaagtgagagggagccactgctcctagcaactcactagcctgtgtggtgtcacagggctcctgcttcgtggaargctgtgacctgcttccaggtgtttcagagcctgctcctgactgcggaccccaaggagtccttcccactacaatgagctgggcttttcttggcacatgaggcttatacagaccacttctcgactgatccacttgtgagaagatccagaccttttctggtagtcatggccagaaagcagcatcatatgtacagctgaggagggctacaggagccagctttcccaagctggcaggactcc

SEQ ID NO: 148343 - DNA, 584 bp, Homo sapiens
gatatgagggtcaaataaaagctgttcgctactgacaagctactcaattggttacatcctcttcttccaggttcctatagcattctgtacttcccagtrtgtaactctcaacccaactgcaactactttttcaatgactcttctggactagactataagctccttgaacaaggcagacactgcgcttgcctgattcactactatattgccaggcataagagttgctaaataaaaatgtgttcgattgtactattataaaactgatgttgctaaaatgatcattatgatgttatgtcacatatttaatatcatattgtggtatcaacgtaaactcattagtaagcagaactaaagactttaagtcaaaggaaacaatgaatgaatgaaaattaatgttctgaagaaaacatggatttttaccaccactcctaccaacaaaaatctattcaactctattcaaagatccaggtttgctatccagatacctctaaaagaagaaaatacagcagtcttaagaagaatgcatatttcctcacgttgtcagcttgacatattcaggacagaatctctccttcagtgcttaa

SEQ ID NO: 148344 - DNA, 409 bp, Homo sapiens
gagttggaggctgcagcaagctgtgatcatcacactctgtcctggacaacagagtgagacctggtctcaaaaaataaataaataaataaaatgaaaaygaaaatgattggtcagagtagaatctatgagtggactagaaaagaccctgaggttctggagtactatacacattatgtacatcagaaaaaaccattacgaggaagggtgttgggaggtgttggtcaaagggtacaaaatttcagttagacgggaggaataagttcaagacatctattgaataatatggtgactgtggttaatagcaatgtattgtgtttcaaaaattgcaaagagaatagatttttaagtgttctcactgcaaaaaaatggtatgtgaggtaatacatatgttaattagcttcactgagcc

SEQ ID NO: 148345 - DNA, 550 bp, Homo sapiens
tttggcagccatttgttcatgggcctctcatcttttccccatgagaacttgctctttgggaagggttttataagcctattcatatgakatatgaatgactactatggcttaatagggtatcttcctctgccatattcactttttagtaggggacagtggcctcaatttcttattgaagaacttgaagccttagccagttacgttgagagctgaatcttgatctgaggcattccaagagccctactgttcaacacatgggtccctgtttatatcccctagccataaatcttgttctgaatctgttacaggaatgatcacctcattttctcttctgggtcagtgtcaatatgtcaataaaaacagtacctgtttgatatgacacaatttcaaacatcatacaaataattcaacttgatctgaatttaactaccattgaatattagccaggctcaaagaatatcaatatcaagcaaatttagaaagaagatacaacacatacgttcacaaggaagtattttttttcttaacagacagactctgaaactctcag

SEQ ID NO: 148346 - DNA, 454 bp, Homo sapiens
caccccattgccacgtccaactactagttagtactaataaatttagtaatcttcccatcttaccgcagaggactcaatttgcaactcaatacctcaatcatgatgtcttccatgctgccatgaagtttgccaattataatasctgaaactaaacattgaatctggctatgtactagaaaacatcacagaaggatctacattctctttaaatacaactattgagaacatttatcttcaactaatttgcattaatgaacactgctaagtagccatgtttacaagctgtgaaggtgtaaccttgtcccacagtaactctgaattgaagccaagattttaatcagaacaggctatcaattttgcccaaagaagcatttattgcttaatatagttggtaaaatccagatatgatcaatcacaactaatggtccttagttggaaggcaagtacattgctg

SEQ ID NO: 148347 - DNA, 491 bp, Homo sapiens
ctagtcctgtaaccaactctccatatagtagcacaatcaggaacctggtcctcttcttgtctctataagtctgaacctgtctgaacaacctgcatagcacctcaggtctttacaaactgagcctcttgtttgcactctcagttctcccattgagggtgcttggggtgccattatctgctatcagacaccctggtaacaatcacttcattctcatgctacacatgtcacacaaaccaactctggtgtctcttaagatccatggacacccatattctccagatgctgtggtttagttggcttgattgtcttcctccaccagccmacaaattttgagtgagttcctcctgtctactgagctaccctaccactacactacacccaaacttacagcaggttggaaaaacacctccctcacttccatctttacagacacttgcacaacctgccagtgagatttacttctgcccaggcagagtgtctccaatgttatt

SEQ ID NO: 148348 - DNA, 581 bp, Homo sapiens
aatttagttaagtgaatttgaagatatactgggtggttttctaccctaatgaaatagagcctgtggccagtaacaagttagaggctgggacttccatcccacatatgkgtttatggacatgaaccatcagctttctgtctcaggcaacacaatgcttcctttctggtagcccgataatgagaaagtgagctgctggtcctaagctggatctgatgagatagtcactgaggaaatctatgacctctactgaaaaaaaactaggttccacggtgcatgtgctattgtttctatacagggagaaaagtgttatctacaaatacaaaagatagtctgcatctattccttaacatgaaacttcctatgaatataatgtgaaggctttaaaccacaaggcttagaaaacgaccaaattgtgaaaacctaagattctcattataatcgtaacttgactatattacacatttttcatataacaaaacagccctggaaagtttatccagatattgagagagattatacatgtacaatttggatgagttaacattacaatgaaagcctttgcttttgcatttcctggcttt

SEQ ID NO: 148349 - DNA, 634 bp, Homo sapiens
atggtaatgttatgtttaactctttaagaaaccatcatataattttccacagcagctgcagcattttactttctcaccagcaaggcacaagagttctaatttctccacaccttcactaatgcttgttattttctggatctttttatactactactaattatttttaagttgcaatgtatcaataacagcatgcatgatataagttataagactgtgaattgtttttaatggtcatgagatcctcacttatctaggagtcaggaagattgcacttgagtttgagatttatgcttccaaagtgccagtacatttgaggaaaaaccttaacaataaacagaagactttggacaccttagaagcagttgctgttatattaaaaaaaaaagagctcttttgttaaattcaagacatcaaaaacacctttcactatagattatattaaatatcagtgaatgataataggaccaattatgataaaaatacatcttaatttatcacaattgcccaaagscttatggtgccactagaattatttctcaaagagtaatgtcaaattgtcaaattttatgaaaccatccataattcaggatgtgttagcatgttgataattgctggtgtggagaagcagcccatg

SEQ ID NO: 148350 - DNA, 567 bp, Homo sapiens
agcaggcctgggttgtccaaactctgtatattccaaaggacagtctgacctttgaccagctcctaagaaactacctctaaatacttggaataccctgcctgatagtggtgtctttgtctacaggggccataatccacactagagagtttatgttaataatgtgatttatggtggggacttgtggtgtcaatgtggcctctggagaagctggaaactgaggaattaaggtcagctacatgggtgcttcatgcctgtgtggctgatccccartaaaaaccttggacatcaaggctcagggcagcttccctggttgtcagtattccatatgtgttgtcacatacactgatgctgggagaattaagtgctatgtgtatgattgctggaagagggcaactggaagttcatggctggtttctcctgcattccaaactatgtgtctttttcttttgttgatttcagcccaaatccttttgtcacaataaaccataaccatgagtacaactagttttctaagttatttgagtccttctagtgaatcactaagcctgagagtggtcttggggaccc

SEQ ID NO: 148351 - DNA, 603 bp, Homo sapiens
  misc_feature (1)...(603): n = A,T,C or G
nnnnnnnnnnnnnnnnnnnnnngaattctttgagcaaaacatcccaattgaaaattttgctgttacattccaaaattagtaaaggacgaaatgttaaatatgaattattacaaaaagacaaggaaaaaggcagtgagagcaagactgacatatgttgggaaagtcaaatgttgaggcctgtgtactctgaagtctgttcaggttcacagctagcrcagcacctgttgaatgtaatgagcatcagtaggattgcggaaggagagaatgggagtgtgaatgaatgaatattttctataagtgaatttgcaatggttagggaaagaggtagattttcaatctgatttactcagtttggctctccatactatcccattaatcagataattgtgaattttcaacttgtgccatatgtgatttgtactttctagtttgcttacacccctggggtccttacaaattacacatctgggagctttttgcacacaaaacttcagaataagtgcagatttttattttgaagtacagtaagtattgtcaagtccagttcccgtagctctcagtgccaaccttaaaagatagaggcgattcacttataggttatcc

SEQ ID NO: 148352 - DNA, 594 bp, Homo sapiens
tgtttccatgttagttcttctgattcaaattctgtctttcctatctctcttaagcctttaaggatcagccaaataatgtttatatttgaagatttccccaattctttttcctaacctttatggcattactagaagatagtttcaaaatctgactcttaaaagggtgaagacaatgttctaaaatgaccacttaaaatataatctgattgcttcttagccttttggctaagatcaagtataatatgatctgattgtgtgaaggatagtctcttcaaatacctcatgtaatatataakgtctaattccttgcatcttttctcagacaaagtattgaacagttattcactccaatttcatatctttgttatgggttcttgaagtatttccacatagttgggaccaaaaattggttcaacaacttgggaaagcataaaagttgacatgaacatatttgcaatgttttattttaattgaaaacatataaatgtacattagtttgataaccttttgatataggcaaaggcctcataaatatgcatgtatgtctgccaatttatgttccgtgtccactgtttgaatcacacccacaaagtg

SEQ ID NO: 148353 - DNA, 594 bp, Homo sapiens
tgtttccatgttagttcttctgattcaaattctgtctttcctatctctcttaagcctttaaggatcagccaaataatgtttatatttgaagatttccccaattctttttcctaacctttatggcattactagaagatagtttcaaaatctgactcttaaaagggtgaagacaatgttctaaaatgaccacttaaaatataatctgattgcttcttagccttttggctaagatcaagtataatatgatctgattgtgtgaaggatagtctcttcaaatacctcatgtaatatataaggtctaattccttgcatcttttctcagacaaagtattgaacagttattcactccaatttcatatctttgttatgggttcttgaagtatttccacatagttgggaccaaaaattggttcaacaacttgggaaagcataaaagttgacatgaacatatttgcaatgttttattttaattgaaaacatataaatgtacattartttgataaccttttgatataggcaaaggcctcataaatatgcatgtatgtctgccaatttatgttccgtgtccactgtttgaatcacacccacaaagtg

SEQ ID NO: 148354 - DNA, 573 bp, Homo sapiens
aagactggatattctcagttgacaaatagtagcaatttttagcgaccaattatggaaaacctagttggcttttttttttttttttgaagcagcagcttttttcctccatttctttttcccttcttactacccttttatcctcacagagaataataatttcggatacaatttttcactttgtctcccagtattcatatattgatggttatgaaggccgagcacataataaaaagaatcagtaagacattttaatttcagacacattttttttggcttatttcaaatgatccagtcctagaaaagggttgacaaagccaaatagaacaatatgttaaagggtaatattggaatgtaccatggtaaaaagaaagtgcaatttagaagcaccaaacccaggctgcagttccaacccatcatttagtagtaatgtgacctgaagcaatatcacctcatttctgcaattttcactttccccatctgygaggtagtaaaaacaggatcctccttatacagctgtggtgagaacttacgagaaaatatttctaaaaaattctttgggaactatgaacgcct

SEQ ID NO: 148355 - DNA, 419 bp, Homo sapiens
actggggcaggggacctgagtgacccacagctgaccaggccaactcatattcatagctaacacttttgagtacttaccatgtggcatgactgcagaggcacttaargtatattaactcatttaatctttgcaacagcccttatgaggtaggtgctatcattacattcattttccagacgaggaaattgagtcagacataggctaagtagcttgcctaaagtcacacaaacagaaaatgggagtgctgggatttgaaccccagcagcatggctccagaatccccactgtaaccaatgtgctacacaaccatcttgaagcaagcttgtgatgtatttctattctgtgtgcaaaggctgtgggcatttgcagctgcaggaggtggcctagctggctttggaattagacctgtgtgctactcc

SEQ ID NO: 148356 - DNA, 419 bp, Homo sapiens
actggggcaggggacctgagtgacccacagctgaccaggccaactcatattcatagctaacacttttgagtacttaccatgtggcatgactgcagaggcacttaaggtatattaactcatttaatctttgcaacagcccttatgaggtaggtgctatcattacattcattttccagacgaggaaattgagtcagacataggctaagtagcttgcctaaagtcacacaaacagaaaatgggagtgctgggatttgaaccccarcagcatggctccagaatccccactgtaaccaatgtgctacacaaccatcttgaagcaagcttgtgatgtatttctattctgtgtgcaaaggctgtgggcatttgcagctgcaggaggtggcctagctggctttggaattagacctgtgtgctactcc

SEQ ID NO: 148357 - DNA, 614 bp, Homo sapiens
taagggaagaccatccaatcagaggaggcatgtgagctccctgagagcaggggcttgacttgccatctagaaggctcctcgcatgcctctgacatatgaatgtgtgaaagagtgaaataatacatggaaaaaagaatgagyaggagggctagaaagagagggaaatttcacccacagaaaaaaacccgaaggagggttttgtacaattccagtgatcaatacccaggatgcaagatgacaggtcagtcaggataagctaggtaatgctgtggtaacaaactccagtcccagcggatttccaacaaacatgtttatttcttgtttatgcactataaggcaggttaccagggtgttctgttcttccaagttactcgaagatccagctgaaggaagctccacgttgacatacttttataatggcagcggcagaaaaaagaggatgtgacaaaccccacactggttctgaaatttctgcccagaaatgtcttacatcccttctgctcatcctttctgctcatatttcattggtcaaaacaagttatatggtcacacttcaagtggatggagaaaagttcaagtggatggagaagtacagtccttacagaaatgacagg

SEQ ID NO: 148358 - DNA, 614 bp, Homo sapiens
taagggaagaccatccaatcagaggaggcatgtgagctccctgagagcaggggcttgacttgccatctagaaggctcctcgcatgcctctgacatatgaatgtgtgaaagagtgaaataatacatggaaaaaagaatgagtaggagggctagaaagagagggaaatttcacccacagaaaaaaacccgaaggagggttttgtacaattccagtgatcaatacccaggatgcaagatgacaggtcagtcaggataagctaggtaatgctgtggtaacaaactccartcccagcggatttccaacaaacatgtttatttcttgtttatgcactataaggcaggttaccagggtgttctgttcttccaagttactcgaagatccagctgaaggaagctccacgttgacatacttttataatggcagcggcagaaaaaagaggatgtgacaaaccccacactggttctgaaatttctgcccagaaatgtcttacatcccttctgctcatcctttctgctcatatttcattggtcaaaacaagttatatggtcacacttcaagtggatggagaaaagttcaagtggatggagaagtacagtccttacagaaatgacagg

SEQ ID NO: 148359 - DNA, 614 bp, Homo sapiens
taagggaagaccatccaatcagaggaggcatgtgagctccctgagagcaggggcttgacttgccatctagaaggctcctcgcatgcctctgacatatgaatgtgtgaaagagtgaaataatacatggaaaaaagaatgagtaggagggctagaaagagagggaaatttcacccacagaaaaaaacccgaaggagggttttgtacaattccagtgatcaatacccaggatgcaagatgacaggtcagtcaggataagctaggtaatgctgtggtaacaaactccagtcccagcggatttccaacaaacatgtttatttcttgtttatgcactataaggcaggttaccagggtgttctgttcttccaagttactcgaagatccmgctgaaggaagctccacgttgacatacttttataatggcagcggcagaaaaaagaggatgtgacaaaccccacactggttctgaaatttctgcccagaaatgtcttacatcccttctgctcatcctttctgctcatatttcattggtcaaaacaagttatatggtcacacttcaagtggatggagaaaagttcaagtggatggagaagtacagtccttacagaaatgacagg

SEQ ID NO: 148360 - DNA, 614 bp, Homo sapiens
taagggaagaccatccaatcagaggaggcatgtgagctccctgagagcaggggcttgacttgccatctagaaggctcctcgcatgcctctgacatatgaatgtgtgaaagagtgaaataatacatggaaaaaagaatgagtaggagggctagaaagagagggaaatttcacccacagaaaaaaacccgaaggagggttttgtacaattccagtgatcaatacccaggatgcaagatgacaggtcagtcaggataagctaggtaatgctgtggtaacaaactccagtcccagcggatttccaacaaacatgtttatttcttgtttatgcactataaggcaggttaccagggtgttctgttcttccaagttactcgaagatccagctgaaggaagctccacgttgacatacttttataatggcagcggcagaraaaagaggatgtgacaaaccccacactggttctgaaatttctgcccagaaatgtcttacatcccttctgctcatcctttctgctcatatttcattggtcaaaacaagttatatggtcacacttcaagtggatggagaaaagttcaagtggatggagaagtacagtccttacagaaatgacagg

SEQ ID NO: 148361 - DNA, 576 bp, Homo sapiens
cctggtcaaaacaagtgggttttaaaggaaaaaagaagaggtagttcctgaattgtttaccagtaatttacataaaatgacataagctattgattgtctataccttgttctttttttcttttttgagacagagtttcactcttgttgtccaggctgaagtgcaatggtgcgatcttggctcactgcaacctctgcctcccaggttcaagcgattctcctccctcagcctcccaagtagctgggattacaggcakgcaccaccatgcccggctaattttgtatttttagtagagaccaggtttctccatgttggtcaggctggtctcaagctcctgacctcaggtgatccgcccacctcggcctcccaaagtgctgggatgacaggctcgagccaccgtgcccagccacattgttctttgtatgacaaattctaggaaaatgaagataatgggtgaggcagctctcaggaacaaaatgcctttaaacagttgtccccaggcatgggtacagggaggaggccatgactgaagtcccacactcatggctgtttgggcctgcaagcctcacagaactcag

SEQ ID NO: 148362 - DNA, 575 bp, Homo sapiens
ctttaattaatttatctgagctttctgactgtcagggggaaaagggaaacccagtcagacctatggtttccaaaatggaaagagagctaacatatattgtgctcttacgcccagtggcataagagawactctgtggaaacagggcttatctggcacagaattatttaaaaaaaatgtgggactttatgtaaggggaccttgagtgatgtgacagacaatgtcctcccacaactttttttaaatagcaaatgcagtagagaattaatttcctcaaccctcaaaaaatgccaaggttttaaaattcaattcaattcagggaaggcaattctatgagagatttataattattgtggtccaactacacagcctcgatccaaggtttcaacctgaagtcctgaggtacaggtcagttctgcatgtccctgggggtactccctggagtttcagcaggcttaattaagtacctgactacctcctgtgcacctagcactgtgaaggttggcagttaagtaaattctcattttaaccagggagaaaagaaatttatgttaaggctatctgtactttagaagctt

SEQ ID NO: 148363 - DNA, 492 bp, Homo sapiens
gggcagccctttgctcctgaaaaataccaactctctttgaaccgaaatgattattagagagctgtatgtgaagaagcagaatgatgtaatgggaaaagtgcagagatagaacacctggatcaaatccatgccacttgggcaatttatttgtcttggtctcttttctcacgtgtgaaataggygtaatgaaatttatgacagatttgttgtgaggatcaagagagattatatatgtgaaggaactcgatataatatcccacacatgggaagcactcagtggatgttgaatgtgaacctgaaatctgtctcttggaaacttcttactactggtcccatagtgacccagagcacatcctctgtcttcctcacgctggtccttcaaatgtttgaagataacaggaatgtcctcctgagtatcctctccttcaagctaagtgtttctagttcctttgatcattttggttttttaaacactgatcctgttccaggccg

SEQ ID NO: 148364 - DNA, 529 bp, Homo sapiens
actggggaggaggagggctgagcytcccgtcactaggggtgtctattggttgctctgtagaggagacttagggtcacatacgggctggaccaggagacgctgaagacccttctcagcgctgagattcatgttacacagagtagggtgtgacactgcacacatctgaattagaaatcaagctacttacccgccctcgttctgtgagagtcgtcaacatgacaatgagtgacaacttctgatcccagacaacctgccaaaactgtgcacaggtatgcggcaggggcccctgagtggcgatgtacttgttcacaaggttagcagcaggaatttccatctggtaagaaattggtaaagtattagaatctgttgctgccccagggtgcacagggaactggattttaaactattctacttgctaattgatattgcaccagaaaaattatctctttatcaattcacagccaataaggaaaatcaaacaagttatttctaaaacttcttgaaaaatatctgacaaccaccagtatta

SEQ ID NO: 148365 - DNA, 639 bp, Homo sapiens
ccaggtggagtggccaagggagtgcttctgccacctctctgccaaccctcagcagcacagctcacagctgcagtagagactccttccctacacttgagaagaagagagggaagagtatagaggactttgtcttgcaacttggatgccagctcaaccacaggaggatagggtacaaggcagagtcctgaggccccccattccaggccttcgatcttggataacatttctagacacaccctgggccagaaggaaaccaactgctttgaagagaaggaccaagtcctggaaggattcatcacctgctgactaaagagccttgggccctgaataatcagcagtgatacccaggaagtaagccatgggtcttggaggagactgaagagatgtgctggcttcagttttgacccagcaccttccyagctatggaggcaatggggagagactcctgcttgataaaaggctagggaagagtaagggagactttgtcttgcacttcaggtaccacctaagccacactgggagagagaaccaagtgagcttttggggtagctgattccaggcatcagctcttggatggcatttctgtacctgccctggaccagagggaaatccactgcccagaaaggagagtcccaggcc

SEQ ID NO: 148366 - DNA, 555 bp, Homo sapiens
aagcagcaacctgatgactcagcagctaccaacatcgaggcaagaccctctaccatcaagatgatcatgacttgctgaaggctcagatgatcattagcatttcttagcaataaagtgttttttaattcagatatttacattgctttttagacataatgctattgcacacttaatagagtacagtatagtgtaaacataacttttatatgcactggaaagccaaaaattttgtgtgactcacattattgcaatatttgctttattgcaatggtctgtaactgaacccacartatctccaaaatatacctgtatttgaaaataatgtctttcttagttgtttattgcaatgttctacaaatgttattaagcaggatttgttaattaagctttctaatcttttaattttaattttttattatactttaagttttagggtacatgtgcacaacgtgcaggttagttacatatgtatacatgtgccatgttgctgtgctgcacccgttaactcatcatttaacattaggtatatctcctaatgttatccctcccccctcc

SEQ ID NO: 148367 - DNA, 555 bp, Homo sapiens
aagcagcaacctgatgactcagcagctaccaacatcgaggcaagaccctctaccatcaagatgatcatgacttgctgaaggctcagatgatcattagcatttcttagcaataaagtgttttttaattcagatatttacattgctttttagacataatgctattgcacacttaatagagtacagtatagtgtaaacataacttttatatgcactggaaagccaaaaattttgtgtgactcacattattgcaatatttgctttattgcaatggtctgtaactgaacccacagtatctccaaaatatacctgtatttgaaaataatgtctttcttagttgtttattgcaatgttctacaaatgttattaagcaggatttgttaattawgctttctaatcttttaattttaattttttattatactttaagttttagggtacatgtgcacaacgtgcaggttagttacatatgtatacatgtgccatgttgctgtgctgcacccgttaactcatcatttaacattaggtatatctcctaatgttatccctcccccctcc

SEQ ID NO: 148368 - DNA, 555 bp, Homo sapiens
aagcagcaacctgatgactcagcagctaccaacatcgaggcaagaccctctaccatcaagatgatcatgacttgctgaaggctcagatgatcattagcatttcttagcaataaagtgttttttaattcagatatttacattgctttttagacataatgctattgcacacttaatagagtacagtatagtgtaaacataacttttatatgcactggaaagccaaaaattttgtgtgactcacattattgcaatatttgctttattgcaatggtctgtaactgaacccacagtatctccaaaatatacctgtatttgaaaataatgtctttcttagttgtttattgcaatgttctacaaatgttattaagcaggatttgttaattaagctttctaatcttttaattttaattttttattatactttaagttttagggtacatgtgcacaacgtgcaggttagttacatatgtatacatgtgccatgttgctgtgctgcaccygttaactcatcatttaacattaggtatatctcctaatgttatccctcccccctcc

SEQ ID NO: 148369 - DNA, 420 bp, Homo sapiens
tcttcatcttcctaatttccctcaaaaaattggctccaagggatcaaagatccagttcctcagagtttcaatggctgcttctaaatgtcatcagtgacagattcttctccttctaccccacctttagctccctaagacatttttggagaccggcataaaaatggaaagataaaattttattttcattttctaatttatctccaatacaaatgtcagcattttaaactttttgtcagaagaaagaagtgttttcaactgtttgaagttactttggacgtttttaacttgtcaaacagaacaatgttaaaccatcacttccacccatctcagcatgagacattawgaatacaggaagaacaagggggagaaggactacaaacaagaagcagaaagttagggaggaaaaaaagcaacttctta

SEQ ID NO: 148370 - DNA, 506 bp, Homo sapiens
attgataaggcaactcaatagtaagtaaagataaagacaaattaaacaattttatcaaccaatctaacctcactgacatttacagaatacatcatttaatgacagcataatatatacttctttcaagtatacctgacacatttcccaacacaaatcacatgctgggtcatgaaacaaatctcaataaaattttaatttaaaattaatatcatccaaagtacaattctgaatacaacagaattaaagtagraatcaaaaaaagaaagaaatctgagaaatccccaaatatttggaaattaaacaacatgcttttcttttttcaaattaatatctttttaaattttggtttttttactcatactaagttctgagatacatgtgcagaacctgcaggtttgttacataggtatacatgtgccatggtggtttgcttcacccatcaacccctcatctacatgaggtatttctcctaatggtactcctcccctagccccccatcccctgac

SEQ ID NO: 148371 - DNA, 334 bp, Homo sapiens
ctgggaaaagcttgctcaacaatttcagtcattagggaaatggaaattgaaaacacaactaaataccactacacatccgctagaatttctacactcaaaaagagaaacaataccaagtgttgttgaagatgtagaaagactggaactttcttatgttgttggtggagatgtgaattggtacagcctgtttgaaaatgagtttgccagtttcttgaaatgttaaacataaacttacyaagtgactcagcaatttcactcctaggaaactactcaagagaaatgaaaacacattttcacacaaaggcttatacacaaatgtttattaccaaactat

SEQ ID NO: 148372 - DNA, 636 bp, Homo sapiens
gagtcttgggatgtggtaccctgcatcccagctgcttcaactccagccacagctaagaggggcaaacacacagcttaggccgttgcttcagagagtgcaagccccaagccttggtggcttacacatgatgttgggcctgtgggtgcacagaagtcaagaactgaggtttgggaacctccacctagatttcagaggatgtataggaacgcctgattgtccaggcagaagtttgctgcagrggaagtgtcctcatggagaacctcttgcttgggcagtgtggaaaggaaatgtggggtcagagccctcacacatgagtccctactggggcactccctgctgaagctgtgagaagagggacaccagcctccagactctcaaataatagatccaccaacagcttgcaccatgtgcttggcaaagcttcagacattcaacactggcccatgaaaacagccaggagtggggctgtaccctgcaaagccacatggcaagaactgcccaaggccatgagaacccacctcttgcatcagcatgtcctggatgtgagacatggagtcaaaggagatcattttggaactttaaggtttatgaatgccctattggatttcggacttgcatgaggcccatagacccttt

SEQ ID NO: 148373 - DNA, 546 bp, Homo sapiens
agtgcttaccagttcttttcctttccagtttctgttattaattcttatcgctgaggaaaataaagaagatcactttttttttacccttttcctgagtgttgagtagaacttgaagaaagaatcctcatttatttcagctaactcacaatagaatagctataggaattcaagaactctaagaataaaatcccctctattgacattatgtatattatatctagagttagattattctggctcactatggtaattcacaatttctactcctgttggtagtaagtcttaatagacattctgcgtaatttgttccatccgcaggttcatctgtctgaatatagatatcaagaagtggcagagtawcagaggagaaagatatcaagaaatagaatattcaaggtactaatgggattgtcaataaatattatccccaactctcatacaccaggacatcctaagggagaaatggcatattatctgatattaacttaatgtaatgtatttagtgctaactatgtgttagacagtattctaggtaccagatataca

SEQ ID NO: 148374 - DNA, 596 bp, Homo sapiens
agttagattattctggctcactatggtaattcacaatttctactcctgttggtagtaagtcttaatagacattctgcgtaatttgttccatccgcaggttcatctgtctgaatatagatatcaagaagtggcagagtatcagaggagaaagatatcaagaaatagaatattcaaggtactaatgggattgtcaataaatattatccccaactctcatacaccaggacatcctaagggagaaatggcatattatctgatattaacttaatgtaatgtatttagtgctaactatgtgttagacagtattctaggtaccagatatacagtgctttcatggaacttacactcaaatgttaggagacattcaatttaaaaatgaatacataaatgaaaatggtgataatttttgtgcaaaaggtgaaattcagaagaaggtagggataattggagaggggattattagttattgggcaggaaaggcatcactgagaaggtyatatttgacctctaaagtcagtaagtaaccaagatttgtggagtttgggagagaagtgcattcaaacagacaaaaccacaaggacagctttgcttggcac

SEQ ID NO: 148375 - DNA, 482 bp, Homo sapiens
ttctttacttctaaagtctgtaaaggccttaatatcaaaaataagttgaaattataaggcgagttgggacatttttttctcttttccctggcagagcttttgtgagattggtattaatctgaccttaaatttgaagaaaaaaaatcagcagtaaattagagcaactacatcaactacgagatgtttatatatcaatttgaattggttaattgtttaatgttcctaaaacttcaaattcattatcatgaagtaagttaaaatatattactattatcttttatgacattakcattccttttttcctgattcagttttttcattgataaattttgcctagcctattttcagtctgttcaaataacaactattttgttgattttttctattatagtctcaccatatacgccattgttttctgtgggattttttttttctttattatttcctttctatttcctttgggcttaacttaaacttccttt

SEQ ID NO: 148376 - DNA, 481 bp, Homo sapiens
ttttgttgcctctgcttttggtgtcatattcaaaaaataattgccaagaccaatgtcatagagctcgacctctatgtttttttccaggagttttacagttccacgtcttatgtttaagtctttaactcattttatgttgtttccgtgtttggtgtgggataagaatccactttcattttttatttttttgcatgtagatatccaattttctcaacaccattwtttgaaaatactatcctttccccgtcatgtaattttgtcatctttgttgaagatgagttgatcacatatgttgtgggtttatttctgggatttctattccactccattgtctagatatctggtttcatgccactatcataccgttttgattaatataacttcacaatgtaatttgaaaacaggacgtgtgatgcctccagctttattcttttttctcaagattgtttaagctatttagggtcttggaaatcattgaaac

SEQ ID NO: 148377 - DNA, 481 bp, Homo sapiens
ttttgttgcctctgcttttggtgtcatattcaaaaaataattgccaagaccaatgtcatagagctcgacctctatgtttttttccaggagttttacagttccacgtcttatgtttaagtctttaactcattttatgttgtttccgtgtttggtgtgggataagaatccactttcattttttatttttttgcatgtagatatccaattttctcaacaccattttttgaaaatactatcctttccccgtcatgtaattttgtcatctttgttgaagatgagttgatcacatatgttgtgggtttatttctgggatttctattccactccattgtctagatatctggtttcatgccactatcataccgttttgattaatataacttcacaatgtaatttgaaaacaggacgtgtgatrcctccagctttattcttttttctcaagattgtttaagctatttagggtcttggaaatcattgaaac

SEQ ID NO: 148378 - DNA, 447 bp, Homo sapiens
ttcaagtttgtgaatattataatttcccttttattattctagtttgaaaaggatgccactggttcccagttttaaaagactatttttctaattactttactctatacaaagatacatactccaaaaatttaacttttaatatgatatcagtttaatacagataactcaataaaagctaaaaaaaaataaaataaaatgcctacttagaagaaaaaaagaatataacataaataacagacccctttcttacctcgacaaagtgaccacttattgataagaatctctgcacggtcaggacaggagtaggaaagcatctgcattcggtcatttttatttctccttagctttagggtcagctactggacaaasagcaagcctgtgtactcttatatcccgagcatttcaaatcctgaacaaagttgcacagcttctgaacataaacaaggc

SEQ ID NO: 148379 - DNA, 567 bp, Homo sapiens
ccctaactttctggaaatgcagtccagccttatttttcctagccctcagttaagacagagtcacttcgttccaacgcctctgacaatgttactgtgggagctagagaaggagaggaggagacatgtctaacactaattctgtcatcgtgagtccttctttgtgagtcctcctgagtcaccatgtcaggtgttccagaagtaactggagagacgttgagggatggttgagatgtcagacccacaatagcacagtgggggcaatccagaaaaacatcacattgtttgtctttcctggctacctatataaataataaagaaaaaggcctatcctgtcttcgccagtgatgctccactgcatatctcctccactcaccaatgagttcaatagttgcaatggacaacggctttgcaattttagctgcctgttataatgcctctctacctgagggctttctccaactggtgktgggaaagcaggcttggcagacagctcacaggcaggatggcctgtgatttcatacccttagaggatggacagaagttaatggatgaatattcaattttccc

SEQ ID NO: 148380 - DNA, 348 bp, Homo sapiens
aattttttgaggaactgtcatgctgttttctaaaatgactgtaccratttacattctaaacagcagtgagcaagggttccttttctctacatccttgacacttacctcattttcttgataacagccatcctaacaggtgtgaggtgatatctcattgtggttttaatttgcctttccctgataattagtgaagtttatcattttcatatacctgttggccatttgtatgtcttctcttaagaaatgtcttttcaggtcattttgtgtagaatggacattttaagaattaatgttgtgacatgtttatacagttattgaaatgtcgtagaaatgccaagtagagaaaat

SEQ ID NO: 148381 - DNA, 568 bp, Homo sapiens
gataaactatgcccttggataggaatgtttaatatcataaagattagaattccacctatattcattaaaaatataatcaaagtccaataaaaatgaactttttggragtatgtaatttgatactaaggttaatatagaaaaatcaaagataattaggaaaactttgaaaaggaagaacaatgagaggcaactagcagccttttttattttagttggtaccaccttctgcccagttatttacagtaaaagtctaaaagtctcccttggttattctctttctttcactcactataaaccctcaagaatgttgagtatatatttataaccatcccaaggttatcaaaattataaagcacccacccatctctgttttagtcctggcctcctacatttgaaaatgttccttaataccttaacaacccactcaagtgttctctgattccaaatgagagcctcccaaatccctaccaaaaaaaaaaatcaaaaccaaaatgaaactgaaacttcccatttccatcagtactgattatttcatcaagaatttgacagagacatgaaatccagtgat

SEQ ID NO: 148382 - DNA, 450 bp, Homo sapiens
tgtgggctagggcctcattttctatcacacagaactagataagcagagtctataagtaactattttgtgcctagtgttttataatatgtttctaagacataggaagaataaaatacagttgtccctcagtatctgtcagtatctgggagggactggttccagggcacctgccgcactggcagatactaaaatccacaaatgctcgagtttctgatataaaataatatagtatttgcatataacctatgcatatactcctacayactttaaatcatctttagattacttattacttaggtattataagtaatacctaatacaatgtaaatgctatgtaaatagttttatactatttttatattatttttgttgttatttatattttttctaatatttttaatcatagatagttgaatccacagatgtggaacccacagatacagagggctt

SEQ ID NO: 148383 - DNA, 247 bp, Homo sapiens
tcaacttcctttcccatgaggcaaatcttcaaacatctgcctgatcctgaatcagcaggtaaagcaaaatggcaaaccaatctgarctagaacctcacatatagagttttgctttgtcactttctcgggatacggaaaatctgagtcattcccaatatattagttcatgtcacggtgtggtttaaaggagaaatcactgagagaaaatcacaggaaggaaaactcagtaatcatgcacagaacagca

SEQ ID NO: 148384 - DNA, 386 bp, Homo sapiens
aaaattaaaaaaattcaaaataggaaacaacctactaaacaatgggcaaaagacttaattatttaattcactaaagaagatcacagatggcaaataagcatatgaaaagatgttcaacatcagtattcrttaagggaatgcaaatttaaagcacagtgacataccaccatatgtccactaaaatgtcaacagttttaaaacctgaccatctgaagtgatgacaagtatatggagcaaccagaactcatatagtgtttgaaggaatgcaaagttgcaaagtggtacagtgtttttgtaacgtaacagtttttaacgtatttaaacatacacttacgatgtgacctagccattcccctttgagatatttgctcaaaagaaattaaagc

SEQ ID NO: 148385 - DNA, 386 bp, Homo sapiens
aaaattaaaaaaattcaaaataggaaacaacctactaaacaatgggcaaaagacttaattatttaattcactaaagaagatcacagatggcaaataagcatatgaaaagatgttcaacatcagtattcgttaagggaatgcaaatttaaagcacagtgacataccaccatatgtccactaaaatgtcaacagttttaaaacctgaccatctgaagtgatgacaagtatatggagcaaccagaactcatatagtgtttgaaggaatgcaaagttgcaaagtggtacagtgtttttgtaacgtaacagtttttaacrtatttaaacatacacttacgatgtgacctagccattcccctttgagatatttgctcaaaagaaattaaagc

SEQ ID NO: 148386 - DNA, 427 bp, Homo sapiens
ttcaagggatcttagaaataatgtagtctaatttgctcattagtctggtgagtaaacagagtttcagacagattagcagttagtggtagaatcagtactagaattcagatccctggcttcctcttctgggcattttcaaatctgcaacaatgtctatcttaattaacattataattaggaccaagataatcttcattcaactcaacaaatattttttgactaccagatatatttctatgtgyacttattttatactaggtactgttccaggagttgagactaccaagaagttctctactttttagagcattcttttgagaactaacattatttgtattagtatgacttaactctttgttccaggaaattcttacatagaaaataaaactaagctcatggagaactttgccatttgcttgaggaaatt

SEQ ID NO: 148387 - DNA, 549 bp, Homo sapiens
atggggaaggtgatacttataataatctatctgggtatagttaggatcttcacatgccacactatgtagtgacataatttgacctggaaatagctggtcacattggctatattgatagcaacaggagatagacaaattcttaggcagacagggatgcgtccctggtaaaacctgatctccaagccaaagacagcctgaagactgaaaactgagctgccagttcggggtagagcccatgaccagagtgagaatttcctcgatgccttttagccaatataatgatgctttttccaggcccacccatggaccaatcagcatacactcccccattctgaacccataaaaaccccaaactcagccttacagacagccacctgcttttgggcctcctctcacacagaggaccatccacttcaagtcccctcttgtgttgagagcttttctgccactcaggaaaattcttctctgctttgctcactctccggtgtctgtgtacgtcattcttcytggtcacaggacaagaacccggaacatgccaaaagggtgtaa

SEQ ID NO: 148388 - DNA, 429 bp, Homo sapiens
gccttggcaagactacaggcagaggtcacagcagccacagagatttccagctggtgaagcagcactgaaggagtcctgtaacagtatgttagtctacaaacttggtaaattctcattctctgttttctgtgacattttgattttaaaaattttattctccaatacatcgcaaggactggatatcytgccctctattttgaaagtatggtgtccaaattcataggagaaggcaagggtaggtgactcagaaggcacacacaccaaaaagagtcattggaggaacaacccaggaagccatagaagaatgttatcccaaactagatggaaaagttttgtttttatgtaatttagaaaaacattcttattatttatttgcttaaagtttgtcaccattttttcaaattttttttatagaatgccatcctattt

SEQ ID NO: 148389 - DNA, 429 bp, Homo sapiens
gccttggcaagactacaggcagaggtcacagcagccacagagatttccagctggtgaagcagcactgaaggagtcctgtaacagtatgttagtctacaaacttggtaaattctcattctctgttttctgtgacattttgattttaaaaattttattctccaatacatcgcaaggactggatatcttgccctctattttgaaagtatggtgtccaaattcataggagaaggcaagggtaggtgactcagaaggcacacacacmaaaaagagtcattggaggaacaacccaggaagccatagaagaatgttatcccaaactagatggaaaagttttgtttttatgtaatttagaaaaacattcttattatttatttgcttaaagtttgtcaccattttttcaaattttttttatagaatgccatcctattt

SEQ ID NO: 148390 - DNA, 561 bp, Homo sapiens
aagtttgcttttcttgtctagtgagcacattaatacagattttaaccctcttttgtcctctcctgattcacacgaaaaaatacataggcctcagctgttcattggtgccagataaaaataaagtactttttaattgtaattactgcaaaggctcttcaacagtgcacagtataccaggaactgaaacttttcttataaaacaaaataaatatcagtagaaacagagcaaaggcatttcattaagtattatggactgaattgcattccctgtaaatgtgttaaagtctgaactctcagtacacctcagaatataactgtatttagaaatagggcctttaaagaggtagttaagattaaatgagatcatgtggattggtcttaatctaagatgactggtgtcattataagaagaggagaagacaccagagatgcaaccrcacagagaaaaggtcatgtgagcagggatccccaaaccctgagccaagaactgacagtggtccatggcttgttaggaaccatgccacacagcaggaggtgagccaaaggcaagggagcaaagct

SEQ ID NO: 148391 - DNA, 607 bp, Homo sapiens
gtctgggagctacaataatgactgagattgaatagttttctccttggtggaatgaaggcatatagtcaaatttaatctgatttaaaggaaatgagtttaaggaccgtagagattagacttttatacgggactgttgggaccttaaaatttaaaatatagccaccgttattgttttgttccaagtgtaattgttgcaggtatacaagagagctaacaatgttttatctcacaaaactgtattttctacctatttttatcatggatatgcacgcaaagtagagaaaaaaatgacagtaaagatgtaacagaaaaggattacatcccagataaatatattattacagaaactcctctgtagtccaaagactttcaatttgtatccaacaaataatttatgtattataaattaataatatatgtattaaattcaataaaattctataatagaaacmaagaatgtggttacattgttagcatataaaattcatattggtcttgaaaaagtcaaagcatgcttcaggctcaaatatggagttttcagaaaggtattgcctcaataccttctgtgggtcaaattaatccaaaactaaggggtattgtggaccca

SEQ ID NO: 148392 - DNA, 604 bp, Homo sapiens
aattatgaactggtaatatttttattatttattactacttggtactcttagaacttcaatttagtgttctgtgggttttttctttcttttattttcttttttcttatttttttgagaccaagtctcactctgtcacccaggctggaatgcagtgccgcgatctcggctcactgcaacctctgcctccagggttcaagagattcttctgtctcagcctctcaagaagcttgaattacaggcgcgtgccactgtgcccagctaatttttgtattcttartagagacagggtttcaccatattggccaggctggtcttgaactcctgacctccttggcctcccaaagtgctgggattacaggtgtgagccactgcaccatcctgggtttttcaatggataatttttaaaatgcctgtcttgtagaattattgttatgattataattttaagaacactcacaatggttatcctgagtaagaaaaaaaaactttaattatgcttgatatcctatgttaaagatcacaggaaaatattttggaaatattttcctttaaaatagttcaaattttaatatttaaattataagttaacctttaaatattcaga

SEQ ID NO: 148393 - DNA, 541 bp, Homo sapiens
gtgactctaattttctggaaatagcagtgacttctggggtccaagttataaggaaagtcagcatgggctgctgagtgcctccttcacagcctcctccttggctggagcctcctgatgccttccccctgccccccatcatgactacacaccttggtgcctttgccctgatctttgtccccttgacttcctgacctattcccatgcatgtgctgttcagatccagggcaagcatcacaaccgtcmtgaaatgcttccccagatggggttaattggcccttctcttgacctcccagagcatctttcacccaacagcattggccctttccacgctgtgctatggagatctgtttccttgtgactctgtcatcagccccagagacacgcaggcctgcgtgtgcattctggctcacaccttgctggaggtgacaggctgggaaaatcgcctcccatttctgccctgtcactgcttatcgctacacattggaacaactgcctggcaggattctgtagggatcctgtgtctgccctgtaattcagtctc

SEQ ID NO: 148394 - DNA, 554 bp, Homo sapiens
taaactcaaatcatttttattcttcaaattttcaaagcattctttcttcccagtgcatcagtcagcttgtgctatagaaaaaacaacccactatgttaataacttatgaaaataaacatgtattttyttactcacatgatgtgaggatggtggcatctctgggctctgaaggccccgtatgccttcctattcagggaccttggcagaaggtgcagccaaacccgagacacgctgttctcttgttgcagaggcaggtgcaggagtgactgtcctgaacctcacaatcactagaaacagctttgcctcagacccagcacacagcacatcccctctcatctcattggaaagtgtcatatggtcaagtccaaagccagaagcatctgctcctaggatgctcaggcaggtcacatgacaatgggcaagagtgttacatttaactcaggcctactgaatctttgccagtagcattgattttgtctttaattgacaaatctcattcacaaagacttgtccttcatctgtgacatgttctaattttatctattttagaattc

SEQ ID NO: 148395 - DNA, 517 bp, Homo sapiens
  misc_feature (1)...(517): n = A,T,C or G
nnnnnnnnnnnnnnnnnnnnnnnaatgatgtttaattagaagctagagtcctttaacactttaaactcaaatcatttttattcttcaaattttcaaagcattctttcttcccagtgcatcagtcagcttgtgctatagaaaaaacaacccactatgttaataacttatgaaaataaacatgtattttcttactcacatgatgkgaggatggtggcatctctgggctctgaaggccccgtatgccttcctattcagggaccttggcagaaggtgcagccaaacccgagacacgctgttctcttgttgcagaggcaggtgcaggagtgactgtcctgaacctcacaatcactagaaacagctttgcctcagacccagcacacagcacatcccctctcatctcattggaaagtgtcatatggtcaagtccaaagccagaagcatctgctcctaggatgctcaggcaggtcacatgacaatgggcaagagtgttacatttaactcaggcctactgaatctt

SEQ ID NO: 148396 - DNA, 554 bp, Homo sapiens
taaactcaaatcatttttattcttcaaattttcaaagcattctttcttcccagtgcatcagtcagcttgtgctatagaaaaaacaacccactatgttaataacttatgaaaataaacatgtattttcttactcacatgatgtgaggatggtggcatctctgggctytgaaggccccgtatgccttcctattcagggaccttggcagaaggtgcagccaaacccgagacacgctgttctcttgttgcagaggcaggtgcaggagtgactgtcctgaacctcacaatcactagaaacagctttgcctcagacccagcacacagcacatcccctctcatctcattggaaagtgtcatatggtcaagtccaaagccagaagcatctgctcctaggatgctcaggcaggtcacatgacaatgggcaagagtgttacatttaactcaggcctactgaatctttgccagtagcattgattttgtctttaattgacaaatctcattcacaaagacttgtccttcatctgtgacatgttctaattttatctattttagaattc

SEQ ID NO: 148397 - DNA, 517 bp, Homo sapiens
  misc_feature (1)...(517): n = A,T,C or G
nnnnnnnnnnnnnnnnnnnnnnnaatgatgtttaattagaagctagagtcctttaacactttaaactcaaatcatttttattcttcaaattttcaaagcattctttcttcccagtgcatcagtcagcttgtgctatagaaaaaacaacccactatgttaataacttatgaaaataaacatgtattttcttactcacatgatgtgaggatggtggcatctctgggctctgaaggccccgtatgccttcctattcagggaccttggcagaaggkgcagccaaacccgagacacgctgttctcttgttgcagaggcaggtgcaggagtgactgtcctgaacctcacaatcactagaaacagctttgcctcagacccagcacacagcacatcccctctcatctcattggaaagtgtcatatggtcaagtccaaagccagaagcatctgctcctaggatgctcaggcaggtcacatgacaatgggcaagagtgttacatttaactcaggcctactgaatctt

SEQ ID NO: 148398 - DNA, 442 bp, Homo sapiens
atctgtttacttctcacaccaactttccatcaaccccgtttgcttcagattagaaaccaagggcttcamaaggtgacatgtttgctggggaaatgggactggctgtgaagtcctctctcttctttgcttggcacaggaagaaagagcattggggacttgctcccctccccatttcaacttcccagtcacattccttccaataagaagaatctaaggcacttaaatgctatttatttatgcctatgagcatggggtgcaagagcttctgtccagggaagctatgcatggggatggcaggtcccaattgggcttcggtggctcctgactcaaggcacttgtttctaggctgctgtaacctatgagtggtctggtgtggggagacacatggcatggggcaatggcacttagctaagccaaactgcccaggtctgcagcagacact

SEQ ID NO: 148399 - DNA, 484 bp, Homo sapiens
ttaagttgtctagattcagttcacagggctttaagaaagcacaacttagttttcagtgatttcaaattaggaaaaatggaagaaaaaaaggaagaaagaaaaattgaaaacagtattttggaaacattttagccaggaaatattaaaattcagtccaaattrtagaaaatagtaaaaattgaaaaacattaggcaagactggactctaacaactggtgtactatatagctttttgaaacataatttttctctctccagtttcccatttttactaaagacaaatcatggtaggaccaatttgctttattatacttggccagattatttttataaagtgcagcaagagtaattatttttcacataggcttttaaaattggctttgatggaacattgttctacagaaggaatctcagataagacttttttaagccaagcccagctgtgaatttgtacaatcgaatacgtataagttggatgaattct

SEQ ID NO: 148400 - DNA, 542 bp, Homo sapiens
ctctaacaactggtgtactatatagctttttgaaacataatttttctctctccagtttcccatttttactaaagacaaatcatggtaggaccaatttgctwtattatacttggccagattatttttataaagtgcagcaagagtaattatttttcacataggcttttaaaattggctttgatggaacattgttctacagaaggaatctcagataagacttttttaagccaagcccagctgtgaatttgtacaatcgaatacgtataagttggatgaattcttctactcttgaggtcccaagataactgggggctctggacttgtcaggaagtgacattctgtacattctgtgacattttgaccctgtacagagactgtgtagacaaggtatgaggccagttttcccaagtggcttttattggctaagtcaatttcaattccttaaaggaaagcataccattccagccaaagctttggtaaaataaccagtttctccaattgtatcctgctacaactcaaaacagattcttattgcacttatg

SEQ ID NO: 148401 - DNA, 401 bp, Homo sapiens
ttgtccataggagtatattaaattgttaaaagctgtcaatagctcaaaagaaaagcttccttgactccaaaaaataaaggatcagcaacattttaagcaaaaagtcaaaaagattcctttagtcttctattagttcagtccatgaagataactttgttatcttctgttctgcttgatattaatgaacatttcaactctccatgagtcctgaaagtttttcctttattctgaagtcrcaatctccaaagttatcagaatcttgcattcaagagtaactgttagagttttatagctgattataaaaccaccttctaaagaggaccaaaacaagacagtaattgcccatggatgacaaaaagttttagggcagtcatagtcacagacacaattgacaagaaaat

SEQ ID NO: 148402 - DNA, 565 bp, Homo sapiens
ctattgcaggatctggctagcaacaaaggggctctttctttgttcccaggtggatcgggaggtcaagaaataaaagacayacacaagatagtgaaagctgagtccagggggtcaccgctgagatgccgccaatgcactggatataccagcatttattattaagtttagtgagggtgggggtaggttagtgagggatttaaggtcattcgattatgaggtgaggtggtcacatggggatgaagtaattctttaacataacatcagtatgcagaagtacagtatgcagagctaagaatttacaatatagtgtgtgcatcagcaatttctaacagagccttaaaacggaaacacagtctatccataacctatgtttagtaagatactaatcagtagtaataattgcagcaaaagctggttgcaaacaatcaatagaagtaggatgtgaaactagacaactggttagaccacagattctcagaagggagtatgtctcaaccctaaagagacctagaagagctatggaaagatggggtgtttatagccctatcttatccatatgaacagg

SEQ ID NO: 148403 - DNA, 565 bp, Homo sapiens
ctattgcaggatctggctagcaacaaaggggctctttctttgttcccaggtggatcgggaggtcaagaaataaaagacatacacaagatagtgaaagctgagtccagggggtcaccgctgagatgccgccaatgcactggatataccagcatttattattaagtttagtgagggtgggggtaggttagtgagggatttaaggtcattygattatgaggtgaggtggtcacatggggatgaagtaattctttaacataacatcagtatgcagaagtacagtatgcagagctaagaatttacaatatagtgtgtgcatcagcaatttctaacagagccttaaaacggaaacacagtctatccataacctatgtttagtaagatactaatcagtagtaataattgcagcaaaagctggttgcaaacaatcaatagaagtaggatgtgaaactagacaactggttagaccacagattctcagaagggagtatgtctcaaccctaaagagacctagaagagctatggaaagatggggtgtttatagccctatcttatccatatgaacagg

SEQ ID NO: 148404 - DNA, 534 bp, Homo sapiens
tctgttgtaaaggagttagtggggttatttttttttctttgatgactggatgtgttagttgttycctgctgtggtgttttctcagtaaatttctctgtctcgttgtcgcatgcatcttcaggacacaatttcaggtgtctagtaggaatccaaacaggagactgatgttcacctggggaaacacaagcatagcctcttccccacgttaaaatagaaactttcaaccatatattagattgaacatctttccaccatacttcctgtccttggtttaccatagggtggttaccagaggaatgtgttttggcagcaataacagaactagatttaggaatattaagaaaatttaacgtgagcaatgccaagtttagttgtatgtgaggcgtagacaactccttatccccctctttttgtttaagtattgtaattttaaagttctgttacttccttctataatagcttgaccttgtgggttataaagaataccagtaatatgtttaatatgccactgatcaagaaaatttttaaaagctt

SEQ ID NO: 148405 - DNA, 529 bp, Homo sapiens
aataaaaatacaatataaatcaattaaataaaagacaaacagaaagaaaataaaagaatcaataaagtgaaaagtttttttcaaaaatattaaaattttatgaactgctaattgaatgctgaagaaaacagaagaaaatacaaattagtgatatcagaaatgaagaggggtctccactacacrtctcacaaatgttaacatgataactagtggatatttttagaactcaataccaataaatttgaaaaacaaaatggaatgcaagaatgacttaaaagatgcataaaaccaatatccttccaataagaatgaacaatctaaatattcctatatctacttcaaatttaattcataaagaactttccacaaaataatcagttctagaatgctttagtaatgattgtagtcaaatacttaagagagaaagaatatcaacattaaataagctttttcagaaaatagaggggcaagggcttctcaattcaccgtatgagacaaatacaagcctaatagcaaaatcagacgctga

SEQ ID NO: 148406 - DNA, 400 bp, Homo sapiens
aaataaaaatacaatataaatcaattaaataaaagacaaacagaaagaaaataaaagaatcaataaagtgaaaagtttttttcaaaaatattaaaattttatgaactgctaattgaatgctgaagaaaacagaagaaaatacaaattagtgatatcagaaatgaagaggggtctccactacacatctcacaaatgttaacatgataactagtggatatttttagaactcaataccaataaatttgaaaaacaaaatggaatgcaagaatgacttaaaagatgcataaaaccaatatccttccaataagaatgaacaatctaaatattcctatatctacttcaaatttaattcataaagaactttycacaaaataatcagttctagaatgctttagtaatg

SEQ ID NO: 148407 - DNA, 529 bp, Homo sapiens
aataaaaatacaatataaatcaattaaataaaagacaaacagaaagaaaataaaagaatcaataaagtgaaaagtttttttcaaaaatattaaaattttatgaactgctaattgaatgctgaagaaaacagaagaaaatacaaattagtgatatcagaaatgaagaggggtctccactacacatctcacaaatgttaacatgataactagtggatatttttagaactcaataccaataaatttgaaaaacaaaatggaatgcaagaatgacttaaaagatgcataaaaccaatatccttccaataagaatgaacaatctaaatattcctatatctacttcaaatttaattcataaagaactttccacaaaataatcagttctagaatgctttagtaatgaytgtagtcaaatacttaagagagaaagaatatcaacattaaataagctttttcagaaaatagaggggcaagggcttctcaattcaccgtatgagacaaatacaagcctaatagcaaaatcagacgctga

SEQ ID NO: 148408 - DNA, 521 bp, Homo sapiens
tatcgctatacctttagaaaatgtgtttcttaaatagaaagccttgaatatcaaatgacctcttgacacatgggctacagaatagattttgcattagcaggtataaaaacaatattaatctcagccaggagcggtggctcacgcctgtaatcctaccattttgggaggccaaggtgggtggattgcctgagctcaggagtttgagaccagcctgggtaacatggtgaaaccccgtctctactaaaatccaaaaaaattagccatgcgtggcagtgtgtgcctgtaatcccagctacttgggaggctgaggcaggacgcttgaacccaggaggcagaggttgcagtgagccgagatcaygccattgcactccagcctgcgtgacagagtgagactccatctcaaaataattataatactaagaagaataagaataatattaatctctttgtatatctccctcagagctcttgggtgaccatatgtatagtcaatgagcagtaatattttgaaagcaatttta

SEQ ID NO: 148409 - DNA, 389 bp, Homo sapiens
gcataataggcgtcagtatacttagcagcttgcagaacccacacattggctccctgactgataggatgagggctattatggtgggaaaggmaaaatggaagccattatagcttcctctacctagaaaaatagtaaatcaaaacaatatcatacccctcgagggattgcagagattagtgccacttgtcttgaaagacacaggggtggtgattcacaccataacacagttcaactctcctatttggcctgtgcagaagacagaaggatcttggagaatgacagtggattatcataagcttaaacaagtggtaactcaaattgcagctgctgtaccagatgtggtttcattgcttgagcaaattaacacatctggtacctggtatgcagcc

SEQ ID NO: 148410 - DNA, 593 bp, Homo sapiens
ataggtagagtataattctcaagggccctagacttttctaaatggtaaatgagcattgacttctacttaaagttaatggctgcattagcctctaacaagagagtcatcctgtcctttgaagctttaaagtcaggctttgacttctcttctctagctatgaaaattctagatggcatcttcttccaatgtaaggctgtgtcatgtacattaaaatctatttagtgtagtcatcttcatcagtgatctttgctagatcttctggataacttgctgcagcttctacatcagcacttgctgcttcaccttgcactttcaygctatggaggcttatcttcttaaacttcatgaaccaacctctgctagcttcaaatttttcttctgcagcttcctcacccctctcagtcttcataaaatcgaaggcagttaggaccttttaatgaattaggctttggcttaagggaattctgtggctgattgatcttctatccaaaccactcttaactttcttcatatcagcaataaggccatttgctttcttatcatttatgtgttcactgaagtagcacttttaattactttccaaaactcttcct

SEQ ID NO: 148411 - DNA, 593 bp, Homo sapiens
ataggtagagtataattctcaagggccctagacttttctaaatggtaaatgagcattgacttctacttaaagttaatggctgcattagcctctaacaagagagtcatcctgtcctttgaagctttaaagtcaggctttgacttctcttctctagctatgaaaattctagatggcatcttcttccaatgtaaggctgtgtcatgtacattaaaatctatttagtgtagtcatcttcatcagtgatctttgctagatcttctggataacttgctgcagcttctacatcagcacttgctgcttcaccttgcactttcacgctatggaggcttatcttcttaaacttcatgaaccaacctctgctagcttcaaatttttcttctgcagcttcctcacccctctcagtcttcataaaatcgaaggcagttaggrccttttaatgaattaggctttggcttaagggaattctgtggctgattgatcttctatccaaaccactcttaactttcttcatatcagcaataaggccatttgctttcttatcatttatgtgttcactgaagtagcacttttaattactttccaaaactcttcct

SEQ ID NO: 148412 - DNA, 393 bp, Homo sapiens
ttgttcatatggtgaatcatgcttattgatttgcatatgttgtatatccttgcatctctgaaataaaagccacttgatcatggtatattatctttttgatgyactgttggattcagtttgctagtattttgttgaaaatgtttgtatttatgttcatcagaaatattggcctgtagtttttttcattgttgttgtgtccttgcctggctttgttatcagggcaatagtggctccatagagtgagttagggaagatttactccttttcgatgtgtgtgtgtgtgtgtgtgtgtgtgtgtgtgtttaacagtttttagaggatggtgctagttcttctttgacacctggtataatttggctgtgaatctgtaaggtcctcgtttttttgttgttg

SEQ ID NO: 148413 - DNA, 495 bp, Homo sapiens
ttaaacaagtggtaactcaaattgcagctgctgtaccagatgtggtttcattgcttgagcaaattaacayatctggtacctggtatgcagccattgacttggcaaatgcctttttctccattccttttcataaggcccaccagaagcaatttgccttcagctggcaaggccagcaatatacctttactgtcctaccacagggatatatcaactctccggctttgtgtcataatcttattcagaggaaatcttgatcacttttcgcttctgtaagataccacactggtccattatatttatgacattatgctgattggatccagtgagcaagaagtagcaaacacactggacttattggtgagacatttgcatgccagaggatgggaaataaatctggcttaaattcagggatcttctacctcagtagaatttctaggggtccagtggtgtggggcctgtcgagatattccttcaaagataaaggataagttacca

SEQ ID NO: 148414 - DNA, 549 bp, Homo sapiens
atttggctgtgaatctgtaaggtcctcgtttttttgttgttgttkatgttggaaaattttttattactgattcaatctcacagttgattgttggcctgttcaaaatttccttttcttccaggttcaatcttgggagtttgtatgtttccaggaatgcatatatttcttccagtttatctaatttgtgagcacacagaggttcacagtagtctctcatgatctgttgtatttctgtggcatcagttttaattctcctttttcatttctgatcatgcctatttgaacctcttttttttttttggttagtctagctggtgatctattaattttgtttaccttttcaaagaatcaacttttaatttcattgattctttgtatttttatctcaattgcattaagttcttctctgatttttttttatttcttttcttctaatagctttgagtttggtttgctactttcttttcttttctagtttcttgaggtaccatagtaagttgttaatttgtgatctttctatctttttaatgtaggcattgaatgctataa

SEQ ID NO: 148415 - DNA, 397 bp, Homo sapiens
agtgctagctgtggtggatccatcattctggggtctggaggatggtgtccctcttctcacagctcaactaggcagtgtcaatgtagggattctctgtgggggctccaaccccacatttcccttctgcattgcctagaagaagttctmtatgagggccccacccctgcagcaaatatgtgcctgggcatccaggcgtttccatttatcttctgaaatctaggcagaggttctcaaacctcaattcttgacttctgtgtacctgcaggctcaacaccatgtgaaagctgccaagccttggggcttccatcctctgaggcaagcccctctgaagccacagcccaagctctatgttgacccctttctgtcatggctagagcagcttgggcacagggcatca

SEQ ID NO: 148416 - DNA, 397 bp, Homo sapiens
agtgctagctgtggtggatccatcattctggggtctggaggatggtgtccctcttctcacagctcaactaggcagtgtcaatgtagggattctctgtgggggctccaaccccacatttcccttctgcattgcctagaagaagttctctatgagggccccacccctgcagcaaatatgtgcctggrcatccaggcgtttccatttatcttctgaaatctaggcagaggttctcaaacctcaattcttgacttctgtgtacctgcaggctcaacaccatgtgaaagctgccaagccttggggcttccatcctctgaggcaagcccctctgaagccacagcccaagctctatgttgacccctttctgtcatggctagagcagcttgggcacagggcatca

SEQ ID NO: 148417 - DNA, 495 bp, Homo sapiens
ttaaacaagtggtaactcaaattgcagctgctgtaccagatgtggtttcattgcttgagcaaattaacacatctggtacctggtatgcagccattgacttggcaaatgcctttttctccattccttttcataaggcccaccagaagcaatttgccttcagctggcaaggccagcaatatacctttactgtcctaccacagggatatatcaactctccggctttgtgtcataatcttattcagaggaaatcttgatcacttttcgcttctgtaagataccacactggtccattayatttatgacattatgctgattggatccagtgagcaagaagtagcaaacacactggacttattggtgagacatttgcatgccagaggatgggaaataaatctggcttaaattcagggatcttctacctcagtagaatttctaggggtccagtggtgtggggcctgtcgagatattccttcaaagataaaggataagttacca

SEQ ID NO: 148418 - DNA, 397 bp, Homo sapiens
agtgctagctgtggtggatccatcattctggggtctggaggatggtgtccctcttctcacagctcaactaggcagtgtcaatgtagggattctctgtgggggctccaaccccacatttcccttctgcattgcctagaagaagttctctatgagggccccacccctgcagcaaatatgtgcctgggcatccaggcgtttccatttatcttctgaaatctaggcagaggttctcaaacctcaattcttgacttctgtgyacctgcaggctcaacaccatgtgaaagctgccaagccttggggcttccatcctctgaggcaagcccctctgaagccacagcccaagctctatgttgacccctttctgtcatggctagagcagcttgggcacagggcatca

SEQ ID NO: 148419 - DNA, 495 bp, Homo sapiens
ttaaacaagtggtaactcaaattgcagctgctgtaccagatgtggtttcattgcttgagcaaattaacacatctggtacctggtatgcagccattgacttggcaaatgcctttttctccattccttttcataaggcccaccagaagcaatttgccttcagctggcaaggccagcaatatacctttactgtcctaccacagggatatatcaactctccggctttgtgtcataatcttattcagaggaaatcttgatcacttttcgcttctgtaagataccacactggtccattatatttatgacattatgctgattggatccagtgagcaagaagtagcaaacacactggacttattgrtgagacatttgcatgccagaggatgggaaataaatctggcttaaattcagggatcttctacctcagtagaatttctaggggtccagtggtgtggggcctgtcgagatattccttcaaagataaaggataagttacca

SEQ ID NO: 148420 - DNA, 495 bp, Homo sapiens
ttaaacaagtggtaactcaaattgcagctgctgtaccagatgtggtttcattgcttgagcaaattaacacatctggtacctggtatgcagccattgacttggcaaatgcctttttctccattccttttcataaggcccaccagaagcaatttgccttcagctggcaaggccagcaatatacctttactgtcctaccacagggatatatcaactctccggctttgtgtcataatcttattcagaggaaatcttgatcacttttcgcttctgtaagataccacactggtccattatatttatgacattatgctgattggatccagtgagcaagaagtagcaaacacactggacttattggtgagacatttgcatgccagaggatgggaaataaatctggcttaaattcagggatcttctacctcagtagaatttctaggggtccagtggtgtgkggcctgtcgagatattccttcaaagataaaggataagttacca

SEQ ID NO: 148421 - DNA, 562 bp, Homo sapiens
ttttggatggagtctagaaacatgttttaaaatgttcttcaggcmtaataggtgcagttcattgttgtaaaaaataggatccatattttggtgattttacacaatcaaaatgtctttcttgctcatataacagttcggtaaatgtgtcctgggttggtgggtagctttcctctgtatcacgattcagagacccaggattctttcattttgtgccccaaagagaacaccaagtaattgcagcaatgccacagcagaaagaacctatcgttcctggggctggggaaacaaagagaagaggatgacattattgaaacttgtgagggctcccatagagcagagatgcagacatctgagaaggaggctgccattcagctgctgctgctgtccccaagcttggagtggggctccacggggctgtgactggctgaggagtgggtgttggttggctgctgctggggtctccaagaaggcacaatgaagctagttctgtgcgtgctgggaaaactgcacaccggattcaactgctgctactggaatgaactgcctctgctggagaaagatg

SEQ ID NO: 148422 - DNA, 562 bp, Homo sapiens
ttttggatggagtctagaaacatgttttaaaatgttcttcaggcctaataggtgcagttcattgttgtaaaaaataggatccatattttggtgattttacacaatcaaaatgtctttcttgctcatataacagttcggtaaatgtgtcctgggttggtgggtagctttcctctgtatcacgattcagagacccaggattctttcattttgtgccccaaagagaacaccaagtaattgcrgcaatgccacagcagaaagaacctatcgttcctggggctggggaaacaaagagaagaggatgacattattgaaacttgtgagggctcccatagagcagagatgcagacatctgagaaggaggctgccattcagctgctgctgctgtccccaagcttggagtggggctccacggggctgtgactggctgaggagtgggtgttggttggctgctgctggggtctccaagaaggcacaatgaagctagttctgtgcgtgctgggaaaactgcacaccggattcaactgctgctactggaatgaactgcctctgctggagaaagatg

SEQ ID NO: 148423 - DNA, 495 bp, Homo sapiens
actaccttggtctttcggattttggcatatgtggggaaatacgcctttgtatctgtgggtttaagatagggaaagttgacgaacaaagtgggcctaactgtgttaagtttcacaattaattgtattaagattattcatggtgcctacaaatcaatgacataactatagcatcagtaattaaaagtatgataaacacttatagtgttaaagaatctctgatcatgaccattatttgtcttctcagcaaagaaagcaaaagccagcttcactaatgacttaatgctgccccagcattgtaactaggccatagctacaaaagcatattatcatggggattttaaaaaataatataagggcggtttactatggagatagagtgaggacagtttcttttacagcctctgctgtagctcttctctctgtargataatatgacagtttagaagagaagaaataataccaatcataagaattcttaaataggagcctatgtgc

SEQ ID NO: 148424 - DNA, 576 bp, Homo sapiens
aacgataatggcatctatccgaagaacagaaggaagcaaaattatgaaactcttgttttcctttttaattagcagtattacttggggctacatgattwttttcatttgccatgaatgatatcatgttttgtgggctattgtaagtttgcagccagatttcattaaatgagaagagtgaatgttttcagttaaatttattcctcatggatcaaaccagattcttgttggtattagttttctattgctgcaagtaaattattataaactgtagtggcacaaaacaacataatttttttattttatagtttctatagcccaggctaggtcctctgttgagggtctcatcgttcaaattcaaagatcgtgatctcatctggtcctcttccaaactcacaggttgtcagtggacttcatttctgaggcccctattccttgccagctgtgtgcaaaggaccactctcctcaggttcttgccacctcctctcacagtatggccatctgctttcttctgcgtcagcaggagagaatctctaggacacttcacctaactttaaagggcttacctgtacaggccaa

SEQ ID NO: 148425 - DNA, 525 bp, Homo sapiens
agacatagaaaatatccagatgtattatatatactatctccctctttgtctatgcatatgaatacatatacacatatgtatgttatatgtaattaatatatattgtttattatatatagatgaatagattatatatacacagatatacatacttgtatataattttaatctgcaattatgattattttagtcagaagcattcagaatatctgccacactatcacatacagcagtctaacttacatttatgaaacgaacatgttcatatattataatctaaaagrttaatagttaccagctagataacattgactagtaggccatgaaataagaagaaagttagtttaactgccattagcactgtctatcattttaaagccagacaggacaaactctgaaatttgaccttctcaaatatttcttttcataatacttcataagaacaatgatttgcatttgcataccaatctcatttgcatttgctactttgatacccttgcctattctttgtggcaattaagttag

SEQ ID NO: 148426 - DNA, 595 bp, Homo sapiens
aacttgtctctacacatctgtatgtattgtagatgaatgcagcttctttcatgaaatcccataaggtgtttctgcaatgagcaacactcatttaacaagtgcactctgccatgcaggcgggacctgccaggagcaacagcatgccaggaacggaattgttgtttaatgaatatttattgattatgaatattcattaaattaacatctttatggccggccccaggctttgtaacttatgtggcagtaaagtggttaagtaaagttttcaagccagccttgaagacctttgaggttcagataactataaaaattaccaagactgttttcttctggaacagaaatcagctctgaaatattgtgatgtggttacatytggcatcaaagcctttggtttttggatcatggtaagaagtgacctgaccctttatctcagattttttagtacaatttccacagcggagtgctttagtcattagctctctgtgtttttcattttctccttcctcgtgcttactctatgaatcctaaatatcatcatgtttggcgtggattactgaaccagcttacttctctaggtctctttgaaggtaagctt

SEQ ID NO: 148427 - DNA, 548 bp, Homo sapiens
atgataaactctgaaatgttgagaacttttttcccattaatgtcacacaggtgaggtaaattatggagggtgagacaaacaataatgtagactaagctgtctgctgattgatctggccaacttaatgcatttatcaaagcagggttcatttgcaatatgcatacaacagcatgcagatcccacaggctaaaacagatttttgaggtctttctgaacacacagatcagctgaaatttacttggctgcttatcataaaagccatcatcatagatcaaaatcacactgtgaattagcattaccatttccaactagaatacaaaataaaggtacttaaagattttttgttgttgttcgttaacctttcacccagtgttttagaatacagtttacgacatagtggattctcaataaatatttattgcataaatgaatatggctattgaaacagcaattctttgagcccrcctacttctggttcctctcagtttcatcactgttagtttagtttctttgcttcagtcgcagtctaaacctacatagtatttgga

SEQ ID NO: 148428 - DNA, 613 bp, Homo sapiens
aatgttgaatacctaaagtatcgaaaagaagctattgtaagaaatggcatctccttttaccatttgggtttattacattagccatccattcagtattgtttagtgaagwgcattgcccagtacttaatcttgtttattcattcatttatttgcattcactctaaggttttctttctgttcataattttgcatctgtaccaattaaccaagtgtttaggtgagaatcaggggtcagcttagaaagctgaaatattctgcaatctagctggttaggctctaagcatagaactgtctaagcacagaacaactcttgaataaaacacaggtgaaatataaacatatataagattcactaagcatagaacaactcttgaacaaaatgcaggtgaaatataaataacatataagaacttgcgctcatataggatagatataagaaaaaaggtacaacagcagagttgaagtatgcttttcagtaaagagtcagtatgatgttagtcatgttttaccatagacaattcctcattatctctttgaattcatcatttctttgaatttttccacattacatgtatatgtgcacatgcatgcatgcaaacaccaagctagttat

SEQ ID NO: 148429 - DNA, 622 bp, Homo sapiens
  misc_feature (1)...(622): n = A,T,C or G
gaactgaagctaatgaagaagccacagatagacagcctgaacggatctatgagttgttatcaaataataaaaatggaaaatgtgtaacttgaaggaagagatcacttcttgttttggtattcgtctttaataaccagtagaacgactagcacatagagagtactaataaatattgttaaatgaatgaatgaggaattagtgcaaataaatggactyagtatctatatttaacccacagggcaagtgtgtttacctcctaataattcacacagatacattaaggtctaatgttaagatcttcactacgaatctcagtgaatatgaattagtggctacttctccaactaagacaagtaacgcattagtaactaatgagttactaatgctagttgatgattagggggatttcaaactatctactattggtttaaagttgcttgtaacttataataaacaaatgctgttaattaaaaaatgcatgcatcatgtaaatctcagaatactttctttgaggcaagactatagaatccgttcacatgacaaatttgtgtaaggaaagctactgtctatatcacaccacaggagaagccttttagtcatgacnnnnnnnnnnnnnnnnnnn

SEQ ID NO: 148430 - DNA, 408 bp, Homo sapiens
cctaaataagccacatccaataaacggtagytgagtaattttcagggtaaatgaaaacaataaagcttcaagtgcatggaataattccttattcctaggtcttatcatgctctggcaagttctagtccagtcatagtattaagaattatctctaaggtgaggtacatgcatgtaatccaaggtggatgcaaaatgatcctctgaataatagtaagaaaattttaggacttcttattatattaattttacctcaatctttaaagattttattttagggaaagtttcaaaaaataaatgatataaaagtgtagtggtacatttatgttacatataaaaatacacaagtaataggctcaacatatctggagactcctggtctataccacaataattaagctaaaggaattc

SEQ ID NO: 148431 - DNA, 634 bp, Homo sapiens
catcgaagactttcccttgagtggatgtgcggaatccaggcctgtcagtgtccaggctcagcctagcaggtagactgaggtggctcctcataaagctgctgcttgtcttttacaggtgaaggactctgccaaacagccccagatggtgttcacggtccgccacgccaccgtcaccttccagccagaaggggacacgtggcgggagcagaaggagcagcgggccgccctcatggtgggcatcctcattggcgtgttcgtgctctgctggatccccttctttctcaccgagctcatcagtcccctctgctcctgtgacatccccgccatctggaaaagcatcttcctgtggcttggctactccaactccttctttaaccccctgatctatacggctttcaacaagaactacaacagcgccttcaagaacttcttttctaggcaacactgagggagaggaccaggattgaaaaaagtttcttcccataattcagtggaattcccagttcatccatttcccatccccacccaacagccatgtggacgggatgaatcctcaccattctccagggtcatcttcagaactgcactggcckcttttccacctcctcagtaggaatatgactcctcatagagt

SEQ ID NO: 148432 - DNA, 426 bp, Homo sapiens
agagtaaaacaactgctgtaaggttgagcatttcatgaccaatgactatgaaggcacattcaccaaacacaggcactttaagggcatccttgattaatttgctaattgctattttttgttggtatgtgaattcctgctaggaggccgaggctagtaggcaatgaaaaagacagaacaatggtaaaatgcagccccrgtcctctacaaattgacagtataatttatgaggtgaggcagttaagtgatgatgcagcatttggatgatcatgtaaaaccagtgccattacacaaaacttaaaaaaaaatcctaggcaataaaactgcctgtggtctgctatgtctctgactcttcaaatgcatgaattaaagaatgatataataatctctgaattattgtaattcatgtagtatattgtatataataaa

SEQ ID NO: 148433 - DNA, 426 bp, Homo sapiens
agagtaaaacaactgctgtaaggttgagcatttcatgaccaatgactatgaaggcacattcaccaaacacaggcactttaagggcatccttgattaatttgctaattgctattttttgttggtatgtgaattcctgctaggaggccgaggctagtaggcaatgaaaaagacagaacaatggtaaaatgcagccccagtcctctacaaattgacagtataatttatgaggtgaggcagttaagtgatgatgcagcatttggatgatcatgtaaaaccagtgycattacacaaaacttaaaaaaaaatcctaggcaataaaactgcctgtggtctgctatgtctctgactcttcaaatgcatgaattaaagaatgatataataatctctgaattattgtaattcatgtagtatattgtatataataaa

SEQ ID NO: 148434 - DNA, 450 bp, Homo sapiens
gcggtagtgaaagacaagtggaagatgtccctgagtctgtattgacatcagaccatattgtagggattaattcttgataaaaaaaagcttgttatttctctcttcttttcatgaggagcatttttgcttccgtgtttgtctgttggatttgcagttccctgctcacagccaaagaggctgtagagacaacactttgccatatttctattaaagagaaaataaagattgagtccacagctcaagtgctgagtgaaagtgattgccaagcagggatttggttggcatccgggaaaaggggaatgggtggccttctcaaagcctctgtcctgtatcaggaaagagattctcctgctctgggctgctcatgggctgggcmctgatggttcactggggccgtctgtggtctgtagctgtctttcctgccttcatgaggcacccctgtcaggacat

SEQ ID NO: 148435 - DNA, 600 bp, Homo sapiens
tggctcgccaatgccctcaatggactatacctccttatgaagagtccaaagggacaaaactctctcagagaaggctcctgaagataatgaccccatttaaacagttggataactagagggtttttttttaaagttgtcatagtaaataatgcctgcattagctgacataamatattatatagcctaagctcccaggccacaacaattaacccaaatagtcatgatgaatagaatagccttcagtttccttgtggccagtcatggaagagtttaccctatagctaccatttcttgttgtacctggattaagacagaggcaaaacaatctatatttaagctagaagaaaaaggaacatagctacctaacagatacacaagaaacttttgggacttgctttcctgatcaaagctgggaagtcttgggtcaaggacagctcctcaacaaagaattgactaagaaggcactggaactaagaagaagaacttgggagattttccagtctcttcttacaatatttataattattcttgtttatctggtagtccttcagcatctgttgttcggaactttacatgcttctgcagagctctgtcctgaca

SEQ ID NO: 148436 - DNA, 600 bp, Homo sapiens
tggctcgccaatgccctcaatggactatacctccttatgaagagtccaaagggacaaaactctctcagagaaggctcctgaagataatgaccccatttaaacagttggataactagagggtttttttttaaagttgtcatagtaaataatgcctgcattagctgacataaaatattatatagcctaagctcccaggccacaacaattaacccaaatagtcatgatgaatagaatagccttcagtttccttgtggccagtcatggaagagtttaccctatagctaccatttcttgttgtacctggattaagacagaggcaaaacaatctatatttaagctagaagaaaaaggaacatagctacctaacagayacacaagaaacttttgggacttgctttcctgatcaaagctgggaagtcttgggtcaaggacagctcctcaacaaagaattgactaagaaggcactggaactaagaagaagaacttgggagattttccagtctcttcttacaatatttataattattcttgtttatctggtagtccttcagcatctgttgttcggaactttacatgcttctgcagagctctgtcctgaca

SEQ ID NO: 148437 - DNA, 526 bp, Homo sapiens
caggaggcctggtttgtaattaacccttcaacataacataaggacagaggcagccccatattatatttagagtactggattattttgggtccttttgctaagccaaggggcccatttaaaaaactgatctgggaraagtagagagagaagagagtatatatatatacatatatatatatatatatatatatatacatatatatatacatatatatatacacacacacacatatgtatatatatgtgtgtgtgtatctatataaaaagcacaaagatgttataatgctttgcttctgctatcaccaaagcagagaaatgagagtgcccttcatccttttacaggaagccttgggatggaattgtaattaactttctccttctaaagctgtgtttagggctgactgtaaattatatttgcctgaataaacatcaggggagaggaagattcataaaaggagggcccttggaggtgaccagtcttcttgttcctggtctggaatttgagtggaccctcatacacatggaa

SEQ ID NO: 148438 - DNA, 526 bp, Homo sapiens
caggaggcctggtttgtaattaacccttcaacataacataaggacagaggcagccccatattatatttagagtactggattattttgggtccttttgctaagccaaggggcccatttaaaaaactgatctgggaaaagtagagagagaagagagtatatatatatacatatatatatatatatatatatatatacatatatatatacatatatatatacacacacacacatatgtatatatatgtgtgtgtgtatctatataaaaagcacaaagatgttataatgctttgcttctgctatcaccaaagcagagaaatgagagtgcccttcatccttttayaggaagccttgggatggaattgtaattaactttctccttctaaagctgtgtttagggctgactgtaaattatatttgcctgaataaacatcaggggagaggaagattcataaaaggagggcccttggaggtgaccagtcttcttgttcctggtctggaatttgagtggaccctcatacacatggaa

SEQ ID NO: 148439 - DNA, 526 bp, Homo sapiens
caggaggcctggtttgtaattaacccttcaacataacataaggacagaggcagccccatattatatttagagtactggattattttgggtccttttgctaagccaaggggcccatttaaaaaactgatctgggaaaagtagagagagaagagagtatatatatatacatatatatatatatatatatatatatacatatatatatacatatatatatacacacacacacatatgtatatatatgtgtgtgtgtatctatataaaaagcacaaagatgttataatgctttgcttctgctatcaccaaagcagagaaatgagagtgcccttcatccttttacaggaagccttgggatggaattgtaattaactttctccttctaaagctgtgtttagggctgactgtaaattatatttgcctgaataaacatcaggggagaggaagattcataaaaggagggcccttggaggtgaccagtcttcttgttcctggyctggaatttgagtggaccctcatacacatggaa

SEQ ID NO: 148440 - DNA, 420 bp, Homo sapiens
tatttccctccctagaccacactcttcatgggcaaagacaacatctctatcattcgcttacctcttgcaccaaacccatagtatgcactccatatgcttccttaaactactttcttgtttcagagccaacaacagaaaatggggactgtgtagacttctggtctaacctaaatgtgtgaattagattcaaggaatcttccttggtaatgaagggggagcagcctgcagaatcatgagtcgtagggtcagattattaagagttaacaaaaaaacaggagtgggagaagatgagaaaagctccctcgctgttgctatagtggttgtcatgcagtaaatacctctcatagagagctrgggaattctctttcctggatttttaatttccttccgcagctttactcatgttcaggaaggcagaca

SEQ ID NO: 148441 - DNA, 593 bp, Homo sapiens
agcaaactcaatccttgcctccttggaggaaagcggccaagaggcagaagtatgtttaaggcagagggagagaccaaagcaagttttagagcaggaatgaacgtttattaaaaaaattatagggcaggaatgaaagaaagtaaagtacacttggaagagggccaagtgggtgacttgagagatccaagtgccctgttcagcycttgatttgggtttttatacactggtgtggttctgaggtttgtgtctcttctcccgcgattcttcccttggggtgggctgtctgcatgcacagtggtctgccagcacttgggaggggccgcatgtgcagtgtgtttactaaagtcatgcacatgctcgcttggggcattcttcccttaccagttgagatttcctagaggaaggtcatatactggttaagctccgccattttgcctcagttcacatgcttgagcctgctcctccaactcctgagattctttagggaagctgctgatcaccagctccaggtgttttctatctattgaagaccgtctctccctgttggcagctgctaccaattaccattttaaagagagacagcttaaccaaat

SEQ ID NO: 148442 - DNA, 368 bp, Homo sapiens
ctagaggaagttttctccttttgcctgcagtcccagctgctcaggaggctgaggcaggaggattgcttgagcccaggagatggaggctgcagagagctgtgatgtcactactgcactccagcctgygtgacagagtgagaccctgcctcttttccctcagagtttgttttgctatacccagaactttcctgacggggttagtgtcactgagattttcccttacagctttagggagcattatataattgtacactggctcaggctttcttaggacgacaacagtataagatggactccaggctctctgcaaggcttcttgctccaaaaatgcgctgtagaaattgttgcttttgccctaaaaagtcaga

SEQ ID NO: 148443 - DNA, 489 bp, Homo sapiens
cagccccattttttttcctttagaacagccttccccattcctcaaaatggaattgaggaaatcagcattccttagtagattcctggcttcagtttttatccacggctgggaaaggagtgacctgcaaggctgctttaaacaccctttggcgtggcctgaaatcaaagccgcacccacactggagtgcagttgtctcaaatgagaactcactccctcagggcaggcacatccaggaagtgctaaracacttaaaagttcctagtgctggccaggtgcggtggctcaagcctgtaatcccagcactttgggaggctgaggtgggcggatcatgaggtcaggagatcgagaccatcctggctaacatggtgaaaccctgtctctactaaaaatacaaaaaaaaaaaaaaaaaaaaattagccaggcatggtggcaggcgcctgtagtcccagctactcgggaggctgaggcaggagaacggtgtgaacccgg

SEQ ID NO: 148444 - DNA, 535 bp, Homo sapiens
tatctagttacagaaaattctccttggaagtttaaaaagacaaagaaattgttgagtgacaataacttccttggagtggctttattagatagattgtatatagttgtcattttgctttttggccaacacgagatgttcattctttcaagggtcctcctgctagcaatatattaatatatacagggatccttatctcagctctcaaatctttgagaacagaggcccttttggatgccttatctagaaagccatatcttgtattgatttatagcatttactttctaagcctatctggaaatgtctagccccatattggatattttgcaaattggcaatttcacatttcagtttattttttcttattaaattcccaaattcaggtttaagcccatttatagaaagatatgacaagactatacttcagctgktgggtatacacaaatatgctgcttgaaggttttctgaagtctattttctatctttattcagcctcccgagtagctgggactgcaagtgtgttccatcacacctggct

SEQ ID NO: 148445 - DNA, 516 bp, Homo sapiens
ttaatgtatctaacataggccttacaactcagtaataagacaacctaattaaagaataggtgtgggagatagcctgcaaataacctccagtgattccttgtctcttgctcttcctttacgtagtatcctaccacgttgtagaatagttgaccktgtgaccaatagactgcagcctaagtgatggtatgttacttctaaggataagtcataaaagccacttgaggcttgtaccttgctctctcttggattaatcattgttagggaatctagctattatatgatatattatgagatgtccaactaacagccttgtgagagagacatcttggaagtaggtactttagctccattcaagccttcagatgattgacatcttaactgcaatctcatgagagactctgagccagaaacaccaagctaataggctactagattattggccccagacactgtgtgaaataataaatatttttgtttgctgtaagtcactaagtttggagcgatttgttccaaaag

SEQ ID NO: 148446 - DNA, 506 bp, Homo sapiens
ctgtcactcaggttacagtgcagtggcgtgatcttggctcactgcaacctctgcctcccaggttcaagtgattatcaaacctcagcctactgagtagctgggattacaggcgcccgccaccacatccagctaatttttgtattttttgtagagayggggtttcaccatgttggccaggctagtctcgaactcctgacctcaagtgatctgcctgcctcagcctcccaaagtgctaggattacaggtgtgagccaccacacccagccaaaaaattattttttgttgagttagggtctcactaggttgcccaggctggtcttaaattcctgggttcaagtgatcctcctgccttggcctcccaaagttttaggattacaggcatgagccaccgtacccaactttggatcctttatttttgatacaattggtgttgtagaatcatggagaagggctgtaagatagagctggactacatgggcatccaaaatgaaattggcccacactca

SEQ ID NO: 148447 - DNA, 610 bp, Homo sapiens
gaatagtagtataataaaatagaatttagcactgaaaaacgaatcaactgtagctatctacagcatgaatgacactgaaaatcgggctaagcaagagaagccagacataaaagaatatattctgattgattccaattatataaagttcaaaaattggcaaaattacattatactgctgtggatgcattattgggtacaaaaaatataaaggaagattagtgagtaaccattraaactgcatagcctattttttgttttgaaaaatggttagggaatataacacactaattcatacaattgttcaactagttaagatacactgtatattcaactagtttcactgtatgtttaactagttaagatacattgtgtatcttccacttacaaacttgaaactaggaactttcctatatgtggggaacactactattagagtaaaaaggcattaatgccaactaccctgaacagataagatagcacacctctgtgtgtggtcattttctctgggtcatcatgcttatgccttgtttatggagtgtttgcttttgtgaaagcagggttaaccatcatgaaatgattaactcaaactaccactcaccttgagtacacc

SEQ ID NO: 148448 - DNA, 605 bp, Homo sapiens
tacagtatgtttttatataggatttgttttaaaaaattaaagtgtaccaatttggtgttatgaccaaatcatcccagacgttaattaagctagttataaactggactattttataaattttaaaatgaaattcgtcttcttacatcctcttcataaatagaattgcaagctaaaagttactggagtaaaaagaatgggaaaatattttgcrttcaaaacaaaagtgtttacggtatgggagcactgatgattgattttcattggttttctaaattgagctattaattttgtccaaattattcaggtagttaatttttgatgtaccaaaaaatgtatgtattgccattagtcctttcacagatttacattataaagcagtggcctgatattcctgattcagagacctctgagaatctttctagaaaaacgcactcatgctctaaattttacatacaataacaaggggtttacagacacaggcaaatgcttccatgaatctcaggttaagaaccccatgttttaaaagtcattaaatccctaatgacaggaaaaagatatgttctctttgtattttatttcccagggcaggacttggctaatcgttt

SEQ ID NO: 148449 - DNA, 597 bp, Homo sapiens
gtcaggatccaaagggcccctctgctcaccatggcttagctggtttctaatactggaaactagtttaagccctgtatcactgtggcctgggcgtgagagttaggacaggcacagaattttccccagaagccataatacctgtttcttttctccctatctaatttactgggctgctttcagtaactccactttgtttggcatatctgggcactgtgaaagtattcttatattattatcattctaatacttagggttcaaatagaggtttttcccccattctacccaaaggtgaggtttttttggttgcaatgctagggcctttcctgaatgggagctcaaccttgtttcctaccattattacattccgctttcatgatctasgcacacctctcttcttttcctgaacatgccatatcctatcatacctgaaaagcctttgcatatagtgttccatctgtctctaatgtcattttacttcatcattctacaagattcagatttatttattcatctgatatgtaatttttttctttaagtgttttattgaaatatatttcacataccatacaatttacttatttaaagtgtacagttcaa

SEQ ID NO: 148450 - DNA, 437 bp, Homo sapiens
cagggattagagtccttcatcttttgcgagtcaatgaaagaattcacagcaaagttctgctccaaggcttgtccagccctgctcaagttctcagggccytagaggctcccagtttcaaggcaatcaggccatcgctactgggtgccaaagctgcagaatgtccacacggccactgccatcagctcattcctggaagacaaagctgcctttcttcaagggaaatgtaaggagccattcaatctcaatctgcattcatgaccaacaagctggagtagtgccagaacagagcctgagactggccaccaactctccaacatcaacacctacaccacattagtcaaaccagtacagcaggccctactcccagcgcctcccaggtacctccagaagcatgctgggtccccacccagggagtccccacggctccgctgaatgac

SEQ ID NO: 148451 - DNA, 437 bp, Homo sapiens
cagggattagagtccttcatcttttgcgagtcaatgaaagaattcacagcaaagttctgctccaaggcttgtccagccctgctcaagttctcagggccctagaggctcccagtttcaaggcaatcaggccatcgctactgggtgccaaagctgcagaatgtccacacggccactgccatcagctcattcytggaagacaaagctgcctttcttcaagggaaatgtaaggagccattcaatctcaatctgcattcatgaccaacaagctggagtagtgccagaacagagcctgagactggccaccaactctccaacatcaacacctacaccacattagtcaaaccagtacagcaggccctactcccagcgcctcccaggtacctccagaagcatgctgggtccccacccagggagtccccacggctccgctgaatgac

SEQ ID NO: 148452 - DNA, 437 bp, Homo sapiens
cagggattagagtccttcatcttttgcgagtcaatgaaagaattcacagcaaagttctgctccaaggcttgtccagccctgctcaagttctcagggccctagaggctcccagtttcaaggcaatcaggccatcgctactgggtgccaaagctgcagaatgtccacacggccactgccatcagctcattcctggaagacaaagctgcctttcttcaagggaaatgtaaggagccattcaatctcaatctgcattcatgaccaacaagctggagtagtgccagaacagagcytgagactggccaccaactctccaacatcaacacctacaccacattagtcaaaccagtacagcaggccctactcccagcgcctcccaggtacctccagaagcatgctgggtccccacccagggagtccccacggctccgctgaatgac

SEQ ID NO: 148453 - DNA, 437 bp, Homo sapiens
cagggattagagtccttcatcttttgcgagtcaatgaaagaattcacagcaaagttctgctccaaggcttgtccagccctgctcaagttctcagggccctagaggctcccagtttcaaggcaatcaggccatcgctactgggtgccaaagctgcagaatgtccacacggccactgccatcagctcattcctggaagacaaagctgcctttcttcaagggaaatgtaaggagccattcaatctcaatctgcattcatgaccaacaagctggagtagtgccagaacagagcctgagactggccaccaactctccaacatcaacacytacaccacattagtcaaaccagtacagcaggccctactcccagcgcctcccaggtacctccagaagcatgctgggtccccacccagggagtccccacggctccgctgaatgac

SEQ ID NO: 148454 - DNA, 496 bp, Homo sapiens
agttttttaagtggttgattgtatatcacgattaaccatattttcattgctttcatattccccttgccttgattgtatttgagaagtattcttgttggactaagttgggaatagaacttaaaaggggatagataagtcattgaaattttgaaatatgattatttgtctgtaatggatgtggtagrtaatccctagtagaaaaattcctgttatggttggttgatagttttcacttgctttgccaaggaaaatgagtatatttacatcataatactttataaaagcatttttggtttccttgcaaaccaaattaagctgtgctcactggcagacattgagaatggtagtttgagtaaaatattttttgttttgttttgcttttgcagttgctgtttatagagtatgagatgttaaaggaacaaatcactgatggtctctttactcccaggacacaggactaaactatacaagggcagttacagaggaagagtgtcag

SEQ ID NO: 148455 - DNA, 496 bp, Homo sapiens
agttttttaagtggttgattgtatatcacgattaaccatattttcattgctttcatattccccttgccttgattgtatttgagaagtattcttgttggactaagttgggaatagaacttaaaaggggatagataagtcattgaaattttgaaatatgattatttgtctgtaatggatgtggtaggtaatccctagtagaaaaattcctgttatggttggttgatagttttcacttgctttgccaaggaaaatgagtatatttacatmataatactttataaaagcatttttggtttccttgcaaaccaaattaagctgtgctcactggcagacattgagaatggtagtttgagtaaaatattttttgttttgttttgcttttgcagttgctgtttatagagtatgagatgttaaaggaacaaatcactgatggtctctttactcccaggacacaggactaaactatacaagggcagttacagaggaagagtgtcag

SEQ ID NO: 148456 - DNA, 637 bp, Homo sapiens
atgtttactatttgagtggtatatgtttacatttttccatttcctcatcttaaagattaggaaatcaaaagaactaggtaaattcttttgagcattaacatacaaaattttaagttgtttgcttcctttgttggaaaaacatgaattagtaatcagaagttgtttgtttgctacacttcctcccatttatgtaataaaagtacctctacttgacttgtctctcctaaaaagctccaaaccagataatcattgtgatcccctcttggctcatagagtcctcaggatccagaatattttcagggctggtcagctttatgtgtttcttagttaataattgtaacccaggttatttatgtatttgtctatttcctcttccactcctacctcctagttcatgcgtatagactgcaggaaagagagacttcgccccttgccccttcggggtacctgagtatggcagatgtttgttggatgagtttttctttataacctaactgaaaatgtataggaaattcagtgaaatgaatttagactggctggtaaaatgtttytactgtatgagatagatagattcctgtaaaccatgtgtaaatcaagtgctacattaaaagcacctgctgggaactactgggcaaaa

SEQ ID NO: 148457 - DNA, 552 bp, Homo sapiens
ttatttgcagaggcaggcagattaaagaaatcaaacaagatatgatgtggcatgcagagacttgaaacaacaagaaatgcatcaataccccaggactaaaggaagaagggaagaaaatcatgatcctgtagcttggtgggggttgtatttatggggaacacagctagtgcgagagaagtgatgctggaacagyggaagaacagagcaaaaatgtcctaaactctttcatctgccatctcccatctcctactagtgtctccaatcagccaagccaatcagaagtgaaatggcaaggagcctggggagtcagtctgcagaagtcagcctcccagcaagataagagcaaggacagtctggcagggaggtggcaggaaaaaaaccagcaatcaggtggacttggatctcaaatctcagaactcagatcacaggttctaattcagagaatgataagccatcaacatggctgccttatcccctctggcacaagagaccaagcctcctcctctgctggggagacataatgtccaatcttacccataggcagagaaagca

SEQ ID NO: 148458 - DNA, 552 bp, Homo sapiens
ttatttgcagaggcaggcagattaaagaaatcaaacaagatatgatgtggcatgcagagacttgaaacaacaagaaatgcatcaataccccaggactaaaggaagaagggaagaaaatcatgatcctgtagcttggtgggggttgtatttatggggaacacagctagtgcgagagaagtgatgctggaacagtggaagaacagagcaaaaatgtcctaaactctttcatctgccatctcccatctcctactagtgtctccaatcagccaagccaatcagaagtgaaatggcaaggagcctggggagtcagtctgcagaagtcagcctcccagcaagataagagcaaggacagtctggcagggaggtggcaggaaaaaaaccagcaatcaggtggacttggatctcaaatctcagaactcagatcacaggttctaattcagagaatgatamgccatcaacatggctgccttatcccctctggcacaagagaccaagcctcctcctctgctggggagacataatgtccaatcttacccataggcagagaaagca

SEQ ID NO: 148459 - DNA, 421 bp, Homo sapiens
ctggtcatatgatggagtgtttcagggaragcctaaatgggctcccacctgatgaaagagccatggctcctggcaaggaccacataggattcacctgggaagggaatagggttagcctagaagatgttgagtgggtagagtggacgtcagttgaatgactccccagcatccattccttgcttcccccttccacccagtaccatgaatttgcaagccttgggtgcattcagattgccctcaccctcaactccagtatggtcttatatttatttaacatagtctgcattcatcttgcccacaataattgattctttcaagaataggcacacgaacaaagtcagccaatcagggcgaatgaaatctatttccagtatttaatttaagctatcttgaaacagattctctctttaatattgaattc

SEQ ID NO: 148460 - DNA, 632 bp, Homo sapiens
tgtggtgtggtgaaataaaacaagtaaataaaaattaaaagtaaattatttatataacatagcacagagctcaataagtggctattgttattcccaagcatccactctgggccctgacatccttcaacagacatttgtcctgggcctggtaagagagttggaaccagcagaccaggttcaaatcccaggcaaaccagttaacaactcaatggcttcaggtaaatgactaaatctctgagccagtctccccatctggaaaatagacatggccatccctgctatggagagctgtgatgacctgctctactatgaacccctagcatattactgctcccaaggacagcccccaaggacagygtcgagtaacatagattcagagaccaatcaatttgttaagaattctcaggctagtaaaggagataggcaaatgatcaggcaataattacacagaactatcagtgctgtggctgagggaagcccatgggcttagagaacacaacttcagccctaataagtgaaaaagacattcggccacaaatgattggaaagggagaggtaaggctgtcactatgtacaaataatataactgtctgcataaaatgaaacaaaaaaaaatctgtagacaaattatt

SEQ ID NO: 148461 - DNA, 632 bp, Homo sapiens
tgtggtgtggtgaaataaaacaagtaaataaaaattaaaagtaaattatttatataacatagcacagagctcaataagtggctattgttattcccaagcatccactctgggccctgacatccttcaacagacatttgtcctgggcctggtaagagagttggaaccagcagaccaggttcaaatcccaggcaaaccagttaacaactcaatggcttcaggtaaatgactaaatctctgagccagtctccccatctggaaaatagacatggccatccctgctatggagagctgtgatgacctgctctactatgaacccctagcatattactgctcccaaggacagcccccaaggacagtgtcgagtaacatagattcagagaccaaycaatttgttaagaattctcaggctagtaaaggagataggcaaatgatcaggcaataattacacagaactatcagtgctgtggctgagggaagcccatgggcttagagaacacaacttcagccctaataagtgaaaaagacattcggccacaaatgattggaaagggagaggtaaggctgtcactatgtacaaataatataactgtctgcataaaatgaaacaaaaaaaaatctgtagacaaattatt

SEQ ID NO: 148462 - DNA, 425 bp, Homo sapiens
cctgttgggcatttaaattttcttttaataaatgtctattcacatttttgcccactttttaatgagactatgtggttggggttgtggaattgtttgagtttcttacacgttttggattttagtatgttctcaaacaaatattttacaaaatattttctccaattcaacagattgtcttttcactttgttaattgtttcttttgctaggcagatgtcttttagtttaatatagttccatttgtctatttttttttttttttttgagatggagtctcactctgttgcccaggctggagtscaatggcgcaatctcggctcactgcaacctctgcctcctgggttcaagcgattctcctgcctcagcctcccgaatagctgggattacaggcacgtgccaccatgccccgctaatttttgtattttta

SEQ ID NO: 148463 - DNA, 592 bp, Homo sapiens
tgttcagcagtctgtaatctgtgtactaacaagcactttagatgactctaaaagcactctaaagctttgccttaggtcattagtacttgttcttaggaccacctgaatgatctgttaaaactctgattgctgggcccactcttaaagtttctgatccagttggcttggggtgagactcaattatttgcatttcttttttttttttttaaattttattattattatactttgaattttagggtacatgtgcacaatgtgcaggtttgttagatatgtatacatgtgccatgttggtatgctgcacccattaactcgtcatttagcattaggtatatctcctaatgctatccctcccccctccccccaccccacaacagtccccrgagtgtgatgttccccttcctgtgtccatgtgttctcattgttcaattcccaccaatgagtgagaacatgcggtgtttggttttttgtccttgcaattatttgcatttctaacaagtttccaggtgatactgacactgctgatatgggaaccaccctttgagaactattgctttaaagttgtctgtgatttttccaggtggagttgatt

SEQ ID NO: 148464 - DNA, 552 bp, Homo sapiens
ggcagaagttgtccctctgggtcacaggtttcagttggaacmagcagtcatgtctttcagccttcaggctgttttaggcttgaaggtgatgtttcaccagggacccttccctatctgcctaggtaatttgtctgcctgctgcctctatcagggagatgacaataagtatgtaataaacaaataatcaaacatcagataatgaaaatattacaaaaacaccccaaacataggggtgtaatagagagtatggggcaataggaagcaagaggtaagagaatgatgttctgtcttcagagggaacattgaaactaaaatacaaatcagaaagaaccagccaagaaaatctcttagtgggagtagggaggcaagagaacaatcctggcaaagagaaaaggaagtagaaaacctaaggtggggccaagtttggcatgtttgggaaatagaaaggaaacaaaattgtgaaacattgagtaagggaaagaggtgtaataggtaataatgtcagccttaaataatgagattcagaaaatatgattaagtacagagtttatt

SEQ ID NO: 148465 - DNA, 552 bp, Homo sapiens
ggcagaagttgtccctctgggtcacaggtttcagttggaaccagcagtcatgtctttcagccttcaggctgttttaggcttgaaggtgrtgtttcaccagggacccttccctatctgcctaggtaatttgtctgcctgctgcctctatcagggagatgacaataagtatgtaataaacaaataatcaaacatcagataatgaaaatattacaaaaacaccccaaacataggggtgtaatagagagtatggggcaataggaagcaagaggtaagagaatgatgttctgtcttcagagggaacattgaaactaaaatacaaatcagaaagaaccagccaagaaaatctcttagtgggagtagggaggcaagagaacaatcctggcaaagagaaaaggaagtagaaaacctaaggtggggccaagtttggcatgtttgggaaatagaaaggaaacaaaattgtgaaacattgagtaagggaaagaggtgtaataggtaataatgtcagccttaaataatgagattcagaaaatatgattaagtacagagtttatt

SEQ ID NO: 148466 - DNA, 552 bp, Homo sapiens
ggcagaagttgtccctctgggtcacaggtttcagttggaaccagcagtcatgtctttcagccttcaggctgttttaggcttgaaggtgatgtttcaccagggacccttccctatctgcctaggtaatttgtctgcctgctgcctctatcagggagatgacaataagtatgtaataaacaaataatcaaacatcagataatgaaaatattacaaaaacaccccaaacataggggtgtaatagagagtatggggcaataggaagcaagaggtaagagamtgatgttctgtcttcagagggaacattgaaactaaaatacaaatcagaaagaaccagccaagaaaatctcttagtgggagtagggaggcaagagaacaatcctggcaaagagaaaaggaagtagaaaacctaaggtggggccaagtttggcatgtttgggaaatagaaaggaaacaaaattgtgaaacattgagtaagggaaagaggtgtaataggtaataatgtcagccttaaataatgagattcagaaaatatgattaagtacagagtttatt

SEQ ID NO: 148467 - DNA, 552 bp, Homo sapiens
ggcagaagttgtccctctgggtcacaggtttcagttggaaccagcagtcatgtctttcagccttcaggctgttttaggcttgaaggtgatgtttcaccagggacccttccctatctgcctaggtaatttgtctgcctgctgcctctatcagggagatgacaataagtatgtaataaacaaataatcaaacatcagataatgaaaatattacaaaaacaccccaaacataggggtgtaatagagagtatggggcaataggaagcaagaggtaagagaatgatgttctgtcttcagagggaacattgaaactaaaatacaaatcagaaagaaccagccaagaaaatctcttagtgggagtagggaggcaagagaacaatcctggcaaagagaaaaggaagtagaaaacctaaggtggggccaagtttggcatgtttgggaaatagaaaggaaacaaaattgtgaaacatygagtaagggaaagaggtgtaataggtaataatgtcagccttaaataatgagattcagaaaatatgattaagtacagagtttatt

SEQ ID NO: 148468 - DNA, 627 bp, Homo sapiens
ttctatggctttcttgttttcctttacttcttaagtttctttttcttgacaaccatatatgacctctggtttacctttttttcccagaatggagtctactgaaaaatgtgaagtggtaattcaacattttaatggaaaatatctgaaaacaccaccaggcatcccaggtaagawattcactaataagtgactgaatgatgccgaggcttaaattgctcttattagaataagtacattgtaaagcccttgttgatcactgcagagttggggggtttgcttttcttaatgtgtattttcaaataatactgtgtagcaactcatctttctcaaaagctttttggtaattcttcttttgctttttgaatctctgctgctaactttctaaagtggattagaagaaaaccatagcaaagaatagttaaagaatgatgtgctggaagtgatagaattttatgactcagcattaatattaaaattccaatttccaagttacaaaatatccaaacaatgatattcacaatgaatcccacaaattgatgccagccctgaaacatttcttaccagtccatgacaagaaaagcacagaaactgagagaaagcatttagaaactagtatagcgatttgac

SEQ ID NO: 148469 - DNA, 627 bp, Homo sapiens
ttctatggctttcttgttttcctttacttcttaagtttctttttcttgacaaccatatatgacctctggtttacctttttttcccagaatggagtctactgaaaaatgtgaagtggtaattcaacattttaatggaaaatatctgaaaacaccaccaggcatcccaggtaagaaattcactaataagtgactgaaygatgccgaggcttaaattgctcttattagaataagtacattgtaaagcccttgttgatcactgcagagttggggggtttgcttttcttaatgtgtattttcaaataatactgtgtagcaactcatctttctcaaaagctttttggtaattcttcttttgctttttgaatctctgctgctaactttctaaagtggattagaagaaaaccatagcaaagaatagttaaagaatgatgtgctggaagtgatagaattttatgactcagcattaatattaaaattccaatttccaagttacaaaatatccaaacaatgatattcacaatgaatcccacaaattgatgccagccctgaaacatttcttaccagtccatgacaagaaaagcacagaaactgagagaaagcatttagaaactagtatagcgatttgac

SEQ ID NO: 148470 - DNA, 530 bp, Homo sapiens
gactgttcagcatctgaaacaagaagctttgggaagtccttatatcttagagcacattgttttttattcaaagaaataaaatatgaacttaaactatctgacaccataagtatgccaggaaaataatcctaattgctaatctaaattcatgtaaatgtgtatctcttgggtctcaaccttaatacttgctttcaataattcctattcttgaaaagttattagggcctagaaaaacagaatggagctcctcgaggttataatcaactttaagttttagatgattatatctcaagcatagaccatgctcacacccctactcattgtcccatgaaacggggaktgtcctaaagctctaaatgccctaaatctttcatctgaaagcttagttttgagacacacattaaaaatttagaggtggtgaatatgcatacttattatatatttagaaagatagataatgcttatgataaaataattttaaaaattaagtgcattttcaaaaatgtgtttcttagccaaagttattacac

SEQ ID NO: 148471 - DNA, 523 bp, Homo sapiens
atctagcaggaatcctaagacactgctctgaaaaatagtgcaatgagatctatcaaaaacaggaggcaaaaaaatactatacaaacttaaaggctagttattgtctaccgtttaaatctctagtcttttctttagcatattgagaaataataatgccagaataatgccaaaatggtaggcaacagctcaaagagattctatacacaaccagcagataggggattctgggaaggtggaatatgaagaatcaagaatttgtctccccacctggacaacaattgcacaggtagaatctgtctgatacaactcttttgtaactctgaagtatgttgaaggcttgcaacttccaggggaaggsttggatgataaattgtggttaatttcagcaaattccagcatatactcaatagcagctacccattccccaccccaatcctcgtggcaggtagctgtacgcatgctcctggagcaacctgcagatagctagtaagagtcagagtgggcaaaaaggatcacgtactcc

SEQ ID NO: 148472 - DNA, 584 bp, Homo sapiens
ctgtgcaagtgactgtcctaaatgttgtggctaaagaggaggaagcataaaaaaataaaaaaaattaaaaactgttcttacccatctcccaccccagccccaaattttaaaatctagcaaagtaaaaagctgcatgcaaatttttttttwaaaaaaaaatacaaggcagattgttttatattcatgtaacaattgtcaggcacaggagcctaagcagacacattcctggtgtggttattcataacttagctaagcaatgtctgctatttattactgcacttataggctgggggagagtctctcattgcccactggtgagtcactcaccttttcattttgaaagccagtttggccattttttttaaacaactcttttgctcaaataacatgaaaaattccaagtccctttggagttttactcttactactactgtagcagtttgttcatattaggatctcgcagactatctagaagcaatgaattattatctagtcttgcaaagatctagtataagaaaggataaataaaactaacaaattttaaaatggtatgaattcaggttttgtgactttttccttattaa

SEQ ID NO: 148473 - DNA, 538 bp, Homo sapiens
gatcatccttggactttcttttctcaaattcctcaaattctgtgcatcagaaagtgtgtagaatttacctgcaaaacagatttcttaatccacttttctttataactatcttcactaatatatccagaaggactctcctcatccattacaacagcttcccacctaattggaactcggctccatttattggccctacattttcttacagatacattttttttttttttaggcaaatcagattttgtctttccccacttaaattcatcaatgtcttctcattgtacttagcataatccyaattcacagtatgtagacccacatggcccacaaggccctatgtgatctggcccctgcctacctttccaaagtcacttcatgccattacccgctagctccctctgttgcacccacattggccctttttatttacccaggatgcaggaagctcttttttgcctgagaaacgtggccttttcaccttccttgaaaatgttttggattttattaattttgtagtactttttagtaaaactgaaat

SEQ ID NO: 148474 - DNA, 538 bp, Homo sapiens
gatcatccttggactttcttttctcaaattcctcaaattctgtgcatcagaaagtgtgtagaatttacctgcaaaacagatttcttaatccacttttctttataactatcttcactaatatatccagaaggactctcctcatccattacaacagcttcccacctaattggaactcggctccatttattggccctacattttcttacagatacattttttttttttttaggcaaatcagattttgtctttccccacttaaattcatcaatgtcttctcattgtacttagcataatcccaattcacagtatgtagayccacatggcccacaaggccctatgtgatctggcccctgcctacctttccaaagtcacttcatgccattacccgctagctccctctgttgcacccacattggccctttttatttacccaggatgcaggaagctcttttttgcctgagaaacgtggccttttcaccttccttgaaaatgttttggattttattaattttgtagtactttttagtaaaactgaaat

SEQ ID NO: 148475 - DNA, 538 bp, Homo sapiens
gatcatccttggactttcttttctcaaattcctcaaattctgtgcatcagaaagtgtgtagaatttacctgcaaaacagatttcttaatccacttttctttataactatcttcactaatatatccagaaggactctcctcatccattacaacagcttcccacctaattggaactcggctccatttattggccctacattttcttacagatacattttttttttttttaggcaaatcagattttgtctttccccacttaaattcatcaatgtcttctcattgtacttagcataatcccaattcacagtatgtagacccacatggcccacaaggccctatgtgatctggcccctgcctacctttccaaagtcacttcatgccattacccgctagctccctctgttgcacccacattggccctttttatttacccaggatgcmggaagctcttttttgcctgagaaacgtggccttttcaccttccttgaaaatgttttggattttattaattttgtagtactttttagtaaaactgaaat

SEQ ID NO: 148476 - DNA, 602 bp, Homo sapiens
atcttaactgtttatgaatatcagacaggagttaactgcatgaactaaactaatagaagtctgaaataatctttttttactttttgcttaaaacattgctgtctttgttttgttcttcagagataaggaaacctttcttttaagctatctacagcttttaagaattaagtaaggtatacmccagtgaacaaaatttggagcgtatttgtttctctctgccaagttactccagaatttggaaactatttgggaatattctaaacttatggcaatatcgttgtttgcaccagtgcagtaagaattcattttcttttgcaacatgacacaattggagaaactggttgttttaccaaggctttgattggatggatatgcttctctttgaggaatcaagcttcacttacagagccaataaaagcccattgggaaatgtggcctcctaccttgtctacataatctgtgtacggggtttctaatctgtgatgagtaaagaatgtcactatataacagtcccaggaaccacatattcttgtgacattaagaagagaggaattcactcaactcataggtatttgagggtacaaactcatggccgggcttgg

SEQ ID NO: 148477 - DNA, 280 bp, Homo sapiens
tgggctgacataagtttttcttttaacttataagtcttgttgttgtagagacctctatttaaaaggctctcggtcaccccctttataactccattcaatgctttggctaacaccacaaagtttggaatctgcagtctgcaaaaatctcacagctcctaaatgttctcttatttgcctcctggttttaggttctggtaagctgcagatgacctgctttcttgctgaccatakactgcactccccttttcaaatagtgaatcctatgtagtgtacctgctgt

SEQ ID NO: 148478 - DNA, 443 bp, Homo sapiens
tcaggaaagatataccctgtacccaacatgaacgaggtcaaagcaatgaagaaaaagctaggaaatcaaataagtctagaacaactgtgactaatatataaagatttgaggtggttatatccatttaaatggtatcaattagaaaggaaaaaaagaggccacgcacacaggctcatttctgtaacgccactactttgggaggccaacacacgcaaatcaacctgtggtcaggggttagagacaagcctggccaacacggtgagaccccgtctctactaaaaatacaaaaatatttgctggacttggtgtcgcgtgcctgtgctcccacctgcttgggaggctgaggcacgagaattgttttgacccacaargggagatagcactgagctgagattgcgccattgcattccaccctgggtgatggagtaacatccaaaaaaagg

SEQ ID NO: 148479 - DNA, 542 bp, Homo sapiens
ttcactgagttccacagccccagttagaggaatgagttctgctttttgggctgaagtgctctgagccaatggcttatcttcaacaacatcatctaagtttactactgcatatcctgcacacctttctctttgcgggttgatgaarctgcttctgtccatgtagaactcctaatctaccaatgcctatggctggtctcaaagatctggtctgctataatagacatattccaacacctctacacagttatgtttaacacggctgtctgatactgtgagcacagtggcaggatataaagaattacacacttctatggggatacattgattttcacataacaagctctggtgtgtagttaatgtagcatttgttagccaatggtgtcttttggtgttccttagagttacattagagtcagcttgggctgacataagtttttcttttaacttataagtcttgttgttgtagagacctctatttaaaaggctctcggtcaccccctttataactccattcaatgctttggctaacaccacaaagtttg

SEQ ID NO: 148480 - DNA, 542 bp, Homo sapiens
ttcactgagttccacagccccagttagaggaatgagttctgctttttgggctgaagtgctctgagccaatggcttatcttcaacaacatcatctaagtttactactgcatatcctgcacacctttctctttgcgggttgatgaaactgcttctgtccatgtagaactcctaatctaccaatgcctatggctggtctcaaagatctggtctgctakaatagacatattccaacacctctacacagttatgtttaacacggctgtctgatactgtgagcacagtggcaggatataaagaattacacacttctatggggatacattgattttcacataacaagctctggtgtgtagttaatgtagcatttgttagccaatggtgtcttttggtgttccttagagttacattagagtcagcttgggctgacataagtttttcttttaacttataagtcttgttgttgtagagacctctatttaaaaggctctcggtcaccccctttataactccattcaatgctttggctaacaccacaaagtttg

SEQ ID NO: 148481 - DNA, 386 bp, Homo sapiens
tattttaaatgaaattcaattagctacatgtctacaagaaaaggcatatattactcttttattcagatcactctcgtaaaaaaattacctgagtagcatcattgtagttctcgatatctccacttccagttttacatttaccatcattgaaatcccatccagaatatgggactgctggaaagtccctacttccagggttgaagtaacttccacaggtactgcttgttcctgcactcacagcgttaccacacatatgattaattacagcatccacataaatacgaacctagaaaacaaagtttctacttcagtgtgacttacagagaggtrgaaatttaaagcattattgatgcaagtttatagtatgtgaataaaactccaaaata

SEQ ID NO: 148482 - DNA, 540 bp, Homo sapiens
tatttgtttaactacacaggttccttgtgcctccatatccatgaggaattggttccaggacccaccatggatacttaaagcaataactactcgagtcctttatataaaatgtagtatttccatataacctttacatcatctcagattacttataatgactaatgcaacgtaaatgctatgtcaaaagttgcgatactatgttgttttgcaatcgggaagtccccaaaataacactctttctgcttacatttcacagccaaagcaaatcacttggaccttctgaaaatcagcaggatgggagtattcatttgcaaggaggatcactaatatttctgaacaatagtacactgcatatgtgagagtggaaataaaaattctaacasgaaaagtaaaagaattttcattggagtgaacatttgaaaaacaagaaatgtgagtttaaatatatatttttaagaaaaatacaatatatacagagcttctcacactcaacctcaatctcttacacctcaacctttccttcaatagcaagacattcaa

SEQ ID NO: 148483 - DNA, 550 bp, Homo sapiens
atgacacgttttgagatgattgactccagtgtttttttatgcaagccctcaagcatttatcctttgagttgcaaacaatccaattatactctaagttatttttaaatgtacaattaaattataattgactacagtcagccggttgcgctctcaaatagtaggtcttattcattatttctaattatttttaaaattctacttgtggataaaagaccattaaacagcattccatgctgaagagaaatcttttgtaaaagagttaatcagtacagcaagctttgttgtcttattttaagaaattgccatarccaccctaaccttcggtaaccacaagcctgatcagtcagcagctgtcaccatggaggcaagagtctccacaagcaaaaatattatgactcgctgaaggctcagaggaatattagctttctaagcagtactttcaaattaacgtatgtacgttggtagtttacaccatttaatgctattgcacatttataaactatagcataaggtaaacataacttttacatgcactgggaaaccaaaaaaa

SEQ ID NO: 148484 - DNA, 559 bp, Homo sapiens
aatgctaaatgaaacgtatcagccacagagggacaaataccacatgattgcgcttatatgaggtatctagaaaagtcaaactcagagatagagagtagaatagtagttgccagggcctgggaggaggggaaatgaagagtctctgtccaatgagtataaactttcagttgtgcaaggtgaataggatcagtgtacaacattgtacttacagtgcattatatacactgtgctaaaactctgcgacaagggcagaacttatgttaagtattcttaccacaacagcaacaaaatataaatctataaataaaatctaatagcagtgtatgagaatttcttctcacatgcttgtcagtgcatagtattctcatacatgttttaaaaatatcatcagtattgttctcattgtcttaatttgcattccctttatctgttgggaagcagaccctcttttaayacatttgttcattggccattagaacttcattttctgtggatttctagttcatattgttcactgtattttaatttgggttttgtctttttcttaccgattcatagg

SEQ ID NO: 148485 - DNA, 527 bp, Homo sapiens
gtagtacatgatgttttttgatcgcattttacccgcagtagaccttttatcaatgctagagyaaatcatctcaaaagctgctgctgctttatcaactaattttgtgtaatattctaaatcctttgttgtcatttcaacaatgctcacagcaacttcactaggagtagcttctatctcaagaaacgactttcattgcttatccataggtagcaactcttcacccatgaatgttttatcatgagattgcagtcattcagtcacatattcaagctccacttctaattgtagttatcttgttattcacactacatcttccaccgaattactgagcctctcaaagtcattcatgagggttggaatcaacttcttccaacctcttgttcatgttgatattttgatctcctatgcatcacaaatggtgttaaggacatctagaatggtgaatttttttgagaaggctatcaatttattttggccagattcattagaggaatcactatagctactgtagccttatagaatgtatt

SEQ ID NO: 148486 - DNA, 416 bp, Homo sapiens
ccatcttcaggaatggatatttttgtcttaagtagcctgtattcttcagtcttccttttatgtatttgtctaatatgatcaaggtcaatttccacctgcacaacatgatatagttatcaataggtttttggagcctggtgcagcaaaggcactggcagtttcgggagtagagctcctatgaagaacgccacattcccagatggccaaaagcatttgaaacatgtgtccacattcagcagaattttaggcctattaaagttttcaaaggactgctgtaaaagtatwtgctttaaattatgtagaaatattgcaagtctgtgtaaatcatttctttataaaagagatgcattatagtgatggtgtaaataaaacggaaatttttaagaaaatttttttacatatttttccacagtgag

SEQ ID NO: 148487 - DNA, 437 bp, Homo sapiens
aaaatatctacttttcccacccatcttcaggaatggatatttttgtcttaagtagcctgtattcttcagtcttccttttatgtatttgtctaatatgatcaaggtcaatttccacctgcacaacatgatatagttatcaataggtttttggagcctggtgcagcaaaggcactggcagtttcgggagtagagctcctatgaagaacgccacattcccagatggccaaaagcatttgaaacatgtgtccacattcagcagaattttaggcctattaaagttttcaaaggactgctgtaaaagtatttgctttaaattatgyagaaatattgcaagtctgtgtaaatcatttctttataaaagagatgcattatagtgatggtgtaaataaaacggaaatttttaagaaaatttttttacatatttttccacagtgagt

SEQ ID NO: 148488 - DNA, 645 bp, Homo sapiens
agcagcttataattccctgctgctcaaggtcacacaatgttgtgagagctttttgtaaagactaaggtccctgggccaaggccacttattttgatataataccattactcccttctccctatttaaatcacaacttattttgagtgccatttaagatagattttttttcccactgtcaagggaagaccaaatacatgtttggagaacaagacctttaaaaatagaagcttagaggtcagatgcagttgctcatgcctgtaattccagcagtttgggaggcggcggcaggaggatagttttgagtctaggagttcaagaccagccttgtcaacatagcaagaccctgtctctataaaaaacaatgaataaataaataaaaatgagagcttagaattgatacatgtaatagtgaagcatgcagtccagagctaagtcagatgatgtcacatatggagctcatccattatttatttttcctcagctttattgtggtataactgacaaatataatctgtatatatttaaggtgtacaatataatgwtttgatatatgtatacattgtgaaatgattaccacgatcaagctaatgaacacatacataacttcacataggaaccattgtttttgtgtgtgatgagaacaca

SEQ ID NO: 148489 - DNA, 609 bp, Homo sapiens
ttgtcagcagtaatttctaaataaggtgcatagttaggaagacaaatcccttaattcgtgaagcttttagtttaggaattaccaaatttagttgatggagatgatggagatgtacaggacaaaatgtcagcaaaaacagcagggtgtatatttaatgccacggttaagtagcagctgatcaggccttggctactgagtacatgctttcaaaccggtgagtattctgggcactcagctaatctttggtgtccaaaaaacaatatttataacacacagaacctttccaattttcatctaatgtgtgtacataaatgtaagcccaaactggtcctcgtcctacttaaatmtattttgcgtgacttcccatgtgcaaatatagcaaggcacaaaaaatttgtttgcttcttgattgagagaagctgactgcctctcttgggaagtactcttgttcattgtagaagaggaaaggcttcggctgcaaaagaaccggctgcatgattttttctgacattttgtctttatataacttttgttctaaaataatcattaaagttatagtacaattttagattgagtaaaaaatggtgaagctactacagagatctcatg

SEQ ID NO: 148490 - DNA, 609 bp, Homo sapiens
ttgtcagcagtaatttctaaataaggtgcatagttaggaagacaaatcccttaattcgtgaagcttttagtttaggaattaccaaatttagttgatggagatgatggagatgtacaggacaaaatgtcagcaaaaacagcagggtgtatatttaatgccacggttaagtagcagctgatcaggccttggctactgagtacatgctttcaaaccggtgagtattctgggcactcagctaatctttggtgtccaaaaaacaatatttataacacacagaacctttccaattttcatctaatgtgtgtacataaatgtaagcccaaactggtcctcgtcctacttaaatctattttgcrtgacttcccatgtgcaaatatagcaaggcacaaaaaatttgtttgcttcttgattgagagaagctgactgcctctcttgggaagtactcttgttcattgtagaagaggaaaggcttcggctgcaaaagaaccggctgcatgattttttctgacattttgtctttatataacttttgttctaaaataatcattaaagttatagtacaattttagattgagtaaaaaatggtgaagctactacagagatctcatg

SEQ ID NO: 148491 - DNA, 377 bp, Homo sapiens
ttccttgcctctcagactgtctcacagttagcagaggacagagccaagaatcaaacgtaggcccaagtgggtccagagtctgaacttgtaaacactcattattcctaaagcagtacgtaatttctaatacaacttttctccctttcagttttccataaatattattttagataactgtgatctttttgtcatttaaattttgacatcttaagtaaaatgcatgagatcatgtgagcttatatattttaaataaastaagttgtttttctgttatgtgtagcatcacttttgagcatttttccaacaagtaaataaaaaaatttgtaggccattacctatctaatttagtcattatccaattaaaattaatgcgttca

SEQ ID NO: 148492 - DNA, 377 bp, Homo sapiens
ttccttgcctctcagactgtctcacagttagcagaggacagagccaagaatcaaacgtaggcccaagtgggtccagagtctgaacttgtaaacactcattattcctaaagcagtacgtaatttctaatacaacttttctccctttcagttttccataaatattattttagataactgtgatctttttgtcatttaaattttgacatcttaagtaaaatgcatgagatcatgtgagcttatatattttaaataaactargttgtttttctgttatgtgtagcatcacttttgagcatttttccaacaagtaaataaaaaaatttgtaggccattacctatctaatttagtcattatccaattaaaattaatgcgttca

SEQ ID NO: 148493 - DNA, 515 bp, Homo sapiens
gcctgctccttctgaagctctgggtagaatccttccttgtctcttcctagctcatggttttggccatcaatccttggtattccgtggtttgcagctgcatcactacaatccttgcctctgtcgtcacgtgctgtctctctgggggtctccgtcttcacgtggtcttcttaaacagacaacagtcacgctagacgaggacccacctcagtgacctcaccttaattttattacatctgtagaccctgtttccaaatagggtcacactcacaggaaccaaagatgataatatttttttttggagggagggagttcaacctataaaagtcttgagcttgaatataaacttaattcaatatttcaaggctttgtactaaagccctggatttatacttaaactgtttctgagatgactgacagctttagtgacagggatctccartcttctggagcaatctcatgaccaaggatctttaatttttgtgtcttgaatcttgcagttctacacacattagtgt

SEQ ID NO: 148494 - DNA, 508 bp, Homo sapiens
gtcttaatgaattcatctattgctgttatattggtttcctattgctagtgtaacaaattaccataaacttagcaacttaaaccaattaacatttattcttttgcagttgtagaggccagatgactgaaaagggtcttacaatgtgaaaatcaaggtgtcaataaggctggttccttctggaagctctgaacytctctcaacctctggtggctgccagcattgcttggttcttggccatattcctgcagtctctacttttatggttgcattgttttcttctcttccatagtcaaatttccccctgccttcctcttgtaaggactcttattattgcatattggacccatccctacaacctagagtaatctctccatctcaaaattcttaatcacatctgcacattttctttttctaaataaggtagcattcacaagttctagggattaggatatgaataacatgttttcaagggttgggtgaagagacactattcagtctactatagttg

SEQ ID NO: 148495 - DNA, 587 bp, Homo sapiens
ttgctgctttccatcatcactgctaatcagtgccactccttgagaatatttctcatactgagtgttgccctatctccaagctttcaaaggtccacccatcaagattctattcattctctataactagagatactactgagagtaaaaaagaatgctgttgataattatgctggaacagtgggcaaaaactggatgatcttgggcagacctgatagatgatattcctacctataatcttcattacaccaaggtgtgttccatgaagaagtgggctcattgttctgttttccctattctgtgtaggcactggggaacaaaagtggtgctatttgtggctacatatcatatagaatctttcaagaaaactacttcagcagcagttttgagcatctctctttttaaagcttagacatgagttaatggggataagctggagaccattttgttcttcccattttctggcttttagattgttactgcattctctctcagcaacacacacaaagagaaaaatacagaaaaaggctataaacacacacacmcacccacccacacacacacacacacacacacacacacacatccct

SEQ ID NO: 148496 - DNA, 587 bp, Homo sapiens
ttgctgctttccatcatcactgctaatcagtgccactccttgagaatatttctcatactgagtgttgccctatctccaagctttcaaaggtccacccatcaagattctattcattctctataactagagatactactgagagtaaaaaagaatgctgttgataattatgctggaacagtgggcaaaaactggatgatcttgggcagacctgatagatgatattcctacctataatcttcattacaccaaggtgtgttccatgaagaagtgggctcattgttctgttttccctattctgtgtaggcactggggaacaaaagtggtgctatttgtggctacatatcatatagaatctttcaagaaaactacttcagcagcagttttgagcatctctctttttaaagcttagacatgagttaatggggataagctggagaccattttgttcttcccattttctggcttttagattgttactgcattctctctcagcaacacacacaaagagaaaaatacagaaaaaggctataaacacacacacccacccacmcacacacacacacacacacacacacacacacatccct

SEQ ID NO: 148497 - DNA, 599 bp, Homo sapiens
acacagtgcttacccattctgccacctgaggacacagtacttacccattcttccacctgaggactcaacaataagggaccatcttggaagcagagagtcctcactagacactgaatctgctggtgccttgatcttggagttttcagcttccagaactggaagaagcaaatttctgttctttacaaattarctagttaaaggtgtttgttatagcagcccaaatagatgaagacaatgagaaactgatgctgtattattgagtggcctatgttctgttattgtttgttactgatgctgtattatagggtggcctgtgtattctgctactgtttgggccctggtttagtagaatggccacatagtttatagaactccaaaggactgcaaaacttaccttgcaaatttgtacttttcagcagggagcaggaacagtgacagccctggctgcagtcatggtgcttctgcttttctgcattttccctagaggagtgccaaaccctcctgaggacctcatgtttgagctcattttatcttttaaaacctctcctttacattgattttcatttcaatagattcatgagaaattgtggcagctctaa

SEQ ID NO: 148498 - DNA, 529 bp, Homo sapiens
  misc_feature (1)...(529): n = A,T,C or G
ataaaaatatcacaatgagtagcaaatgaaggcaacttgcaggatgtgacttgtgccagaaataagaactccccacctggtaatggtagcaacggacctggctcaaatccccagaagtggtgagcaggtgggaggcaggagctgcctgaacagggagaagcagagaagccctcccgaccttctgacttcttccaagaggaagaaagacaggaacggagctrtgcacaccccattattcttttcaaaaggaccctttcacaggggcatagttaatgaaccaggagtgtgtttacagaaaatctctcatcatgaaaagcatgagttatggcaaagcatttctcactctaacatttgacagctccctcttacccattggttttaactattaatcctatagttgaccaccggcgtagtcatcatcctgaggggaaggaagcagcctcttcagggcagtcctgtttcatctcctccaggacactcccccaannnnnnnnnnnnnnnnnnnnnnnnnnnnnnnnnnnnnnnnnnn

SEQ ID NO: 148499 - DNA, 646 bp, Homo sapiens
ctgctactcctgtgagtaacttctcaatgtcagttgtcccagatccagatacttagccactcttcttcttctaccttctctcatagatattttcattcatttattgaattttcaacccatgtataggcccatggaagctaaatttctatctctagccatagccactgagttccaaatttaaatatgcttttgtctttcggcatatccgcttgaaattccaataaatagctcaaatttaacacaattgaagtagaacactgtaatcccttctgctctcaaacacagagcaggaaacaaaaataaaaataaaatctgctcttagctcagtattttccataccagttaataccaccccatccacctagttgttctcccccagattagaagtcattcttaaccatttacttcccttacactctgcattagtcctttagcacatcctctcagctgtactttcaaaccattctctcctatctatcaccttaccttcttctccactgctatcattctaagccaaaccacgtacatctcttacctgaattacttggtagcctgttatttggtctccttgcttctactctctcccctttrtaataaattttctatatagcagctacaggtgtatctttaaaaggtaaatctcagt

SEQ ID NO: 148500 - DNA, 309 bp, Homo sapiens
atgtctgccaaatggaagaagcttttattcataaaaaagcacatatcaaattctataaatctctctctctctctctstctgtctctgaatttttcccttcttttcatttggctggtattttaagcattctcttagtctagcaattgggtaatccaaaagtgattccaacatacaatgtgattttccttcacacagtctaattaaaacttaataaattcttgacacagcaaagaagggctgtgctgtcagtgcaacagaaatgagattaaaatataaaagagtttttccccagggattttgtcatccaac

SEQ ID NO: 148501 - DNA, 591 bp, Homo sapiens
aagtgacattctttacttaccacaaggtcagaaacattgaaaaggaaccatgtagataaagtaccaggtcagcctttccaaagggcttttcatcagttcaataaagtcaacctcaattcttcaaagcagtctggacatatctgaaaatatgtcattccagtcaaaaccttgataaaataagcagcatttctgattgtgtcctgttgcaaaataaaacatattcttatctaacttatgcaaataattatattgccataagataagaatactcataaacagtttccaaattctggagaaatcaggtagagggaaaggtaaatgtttcaattttgctyacaaaagtatactttacccaattgctgaaagctacacataactcaaaagaaaaaaaaatcttgactctggaaaagaaaacataaaaagaatccgcaatgtttcaaacaaaaagtcattaaaaatcatttatgactgccatcagttcagtcctgtgtaattaattcttgttcttcttaatgttgagttagcaatcttcatgaatcaattaggcttattttattagagttctggaagtttttatttagcccaattata

SEQ ID NO: 148502 - DNA, 591 bp, Homo sapiens
aagtgacattctttacttaccacaaggtcagaaacattgaaaaggaaccatgtagataaagtaccaggtcagcctttccaaagggcttttcatcagttcaataaagtcaacctcaattcttcaaagcagtctggacatatctgaaaatatgtcattccagtcaaaaccttgataaaataagcagcatttctgattgtgtcctgttgcaaaataaaacatattcttatctaacttatgcaaataattatattgccataagataagaatactcataaacagtttccaaattctggagaaatcaggtagagggaaaggtaaatgtttcaattttgctcacaaaagtatactttacccaattgctgaaagctacacataactcaaaagaaaaaaawatcttgactctggaaaagaaaacataaaaagaatccgcaatgtttcaaacaaaaagtcattaaaaatcatttatgactgccatcagttcagtcctgtgtaattaattcttgttcttcttaatgttgagttagcaatcttcatgaatcaattaggcttattttattagagttctggaagtttttatttagcccaattata

SEQ ID NO: 148503 - DNA, 591 bp, Homo sapiens
aagtgacattctttacttaccacaaggtcagaaacattgaaaaggaaccatgtagataaagtaccaggtcagcctttccaaagggcttttcatcagttcaataaagtcaacctcaattcttcaaagcagtctggacatatctgaaaatatgtcattccagtcaaaaccttgataaaataagcagcatttctgattgtgtcctgttgcaaaataaaacatattcttatctaacttatgcaaataattatattgccataagataagaatactcataaacagtttccaaattctggagaaatcaggtagagggaaaggtaaatgtttcaattttgctcacaaaagtatactttacccaattgctgaaagctacacataactcaaaagaaaaaaaaatcttgactctggaaaagaaaacataaaaagaatccgcaatgtttcaaacaaaaaktcattaaaaatcatttatgactgccatcagttcagtcctgtgtaattaattcttgttcttcttaatgttgagttagcaatcttcatgaatcaattaggcttattttattagagttctggaagtttttatttagcccaattata

SEQ ID NO: 148504 - DNA, 591 bp, Homo sapiens
aagtgacattctttacttaccacaaggtcagaaacattgaaaaggaaccatgtagataaagtaccaggtcagcctttccaaagggcttttcatcagttcaataaagtcaacctcaattcttcaaagcagtctggacatatctgaaaatatgtcattccagtcaaaaccttgataaaataagcagcatttctgattgtgtcctgttgcaaaataaaacatattcttatctaacttatgcaaataattatattgccataagataagaatactcataaacagtttccaaattctggagaaatcaggtagagggaaaggtaaatgtttcaattttgctcacaaaagtatactttacccaattgctgaaagctacacataactcaaaagaaaaaaaaatcttgactctggaaaagaaaacataaaaagaatccgcaatgtttcaaacaaaaagtcattaaaaatcatttatgactgccatcagttcagtcctgtgtaattaattcttgttcttcttaatgttgagttagcaatcttcatgaatcaattaggyttattttattagagttctggaagtttttatttagcccaattata

SEQ ID NO: 148505 - DNA, 638 bp, Homo sapiens
agacagcagagctttagacctaagagtaacctgttcatgctcttgagactgcacaaggaagacagaagaccccaaaatgaggattgtggtgccttcttctgtgttcctcaagaggtctcaggatcattacaagtcccttccagattctttcatgtgttatcaaagataagcactgcaggaggaggagtaaagtaaatgggagaaattttctcataagaggcaatttggggagatttttaagctttgtaaaaggtcaatgaagttttattttttctttagcaaaaatcatacccacagaaaggaagtaaatggaagcagcaagcatataactttttaaaagaggttttgattcactgaaaaaacttcccakaaacagaatacaaaatagaaaaagcagagagttattttaaaaaagaaatactcttgaatatcagcttttaataagtcgcttactgaccacagagctctttaaaaaaagaaaacttccctcaaatctcttattatcaaatcttagccaggacaaatcgacaatatttttggcttttgagctttttttgtttttgtttttaaccaaaagtaccctccaagtaactcaccagaatgaatagagcttaaccaaaattatgacttaaccaagg

SEQ ID NO: 148506 - DNA, 613 bp, Homo sapiens
acggaatttaacgcaattcagaatacaataatctatcggctttccaggccatagcaagacatggccactagaggtcagtaaaaggcaagcgaatgagaaagctttaggcaggaagcttccccacacccaggtggttcctcagattcaaggctcgtattttgaaaggctttctttcaaaaatgactaaaaagtggtattcaaggtttcatgggagaggggaacaaaataaagaatgtcgcctctaaaaaaatgaaactgtgaaaaaaaatgtttgaagaggtttcactgtagaaaacctttcttttgtgattgctacctaagaatgaaaagggatatttacctttactggccctttgggcttagattttagctggtgtgacaaagcctattgcacagtttctgtgtcttcctgcagtatyggaaggcgactccccactccggctccaacaggacattttactttactttccttaatggcatttattgcattgttaatttttcatgtatgcacccttctcttgtactagtttgcaagattcttgatgacagaagtctggtctcaagcatttaaaaattcttagtacatggacactgcttgactaaaacatggcaa

SEQ ID NO: 148507 - DNA, 397 bp, Homo sapiens
catgcagttggaataaaaaatatgttcccttttcagattggtttatttcacttagtaataagcatttaaggccaggtgcagtggctcatgcctgtagtctcagcactttgggaagctgaggtgggtggatcacttgaggtcaggagtttgagaccagcctggccaacacggcaaaaccttgtctctactgaaaatacaaaaatgagccggactyagtggcacgtgcctgcaattccagctactcaggaggctgaggcaggagaatagcttgaacccaggaggcggaggttgcagttagctaagattgtaccaccacactccagcctgggtgacagagacagactctgtctcaaaagaaaaaaaaaagtgcatttaagcttcctccttgtcttttcat

SEQ ID NO: 148508 - DNA, 579 bp, Homo sapiens
ccattgcagctggggttctggcaagaaattatgtcctgatggtagcatgcactcaagaccaatttgaaagtgagtcagtggtcatattcctggtgctatttcagctggcaagcaaggtcatggagtgtcaggaggcaactgctgtaccctagtttkgtgtttcagagtttagtcactagctttgtgggtgtcaagggaaagttatggtgatggtggtggtggtagcaatttatcttttcctggatggaacttcagcaccgtgttttctatcttcaaaatttccagtggtgtcattctgactcctaatttttcagctttcattaaagctttgtaaatatctgatttcctgtattcagttgcaatctgttagaagtactgagtacatctctaggacaaaactctgactgatgggaatttggattggttatttgactttgcttaagaaatatttgaaggcagtgatatttttgttactactgaaaaattggattctggtagtcagtggcacacaggaaaaagaattccttaaattatttattacatggcatccccagggataaagtgtctacagagtgcaag

SEQ ID NO: 148509 - DNA, 610 bp, Homo sapiens
tagtcactagctttgtgggtgtcaagggaaagttatggtgatggtggtggtggtagcaatttatcttttcctggatggaacttcagcaccgtgttttctatcttcaaaatttccagtggtgtcattctgactcctaawttttcagctttcattaaagctttgtaaatatctgatttcctgtattcagttgcaatctgttagaagtactgagtacatctctaggacaaaactctgactgatgggaatttggattggttatttgactttgcttaagaaatatttgaaggcagtgatatttttgttactactgaaaaattggattctggtagtcagtggcacacaggaaaaagaattccttaaattatttattacatggcatccccagggataaagtgtctacagagtgcaaggctttggtagactgaagggcttctatgagagactcttactggagagacaaataacacaaaaactgtggttcctgatcaaatttcttttcccttaatgcttaatggctgatataaccaaaatctggtattgaaggttgctacattacaacataactgaataattgaatttacagccttaagcaggtctttttgttgttgtt

SEQ ID NO: 148510 - DNA, 579 bp, Homo sapiens
atggctgagtccttttgaaaaagtacttgcaacattcagtaagtgtttttcctaatcctccccaagtgatttgccatttgccataacactcaaatactggaaaaaagaaaaaaaaactagttattttgagaattattgattagtgrctgtaaaaaaatgataatccttagaggtcctgttgataatccaaagtgataatctcattttggtcctcatgtcacagttatcttttttgaaaatcaggtgattaatggattaagggttattttggtattaaaagctaagtaaagatcattgaaacttctcctcctgttcaaagtagtaaatcaaaagcagtactgtgtctctcagagagagaataacagagattagtgccaccaccaaagatagaatggatatggatttgtcttagagaatgacagcacataattttaaatgtaatcaaataataattcaaattgttttatttgcaagagccaatcaacgtgatccctggtaccttgtatgcaaccgcatttctaatgtgtacttcttctctctttccctacaaacagaagcaacttgctcttaacctgacaa

SEQ ID NO: 148511 - DNA, 367 bp, Homo sapiens
atgtcagcaggtgatgagcaatgacttagagtgaccatatgtggcagcttgctcaggacactcatggcttacacctattgtggggacctgattattaacagtaccctctttcattctcaaagtgtcctgagttagacaataaattacatggtcaccctggtaatgagcctcaatgtcaaggccaactgttgtgacatttttgcccctggatagggcctagamcaccccctccccaccctctccagcccctgaccccatgccatggctccttcctccccttagatttccttaaagaatcccctgtggtataatacttcgggcctacattaagggatttataggagccatgaaacttgttgctatattt

SEQ ID NO: 148512 - DNA, 367 bp, Homo sapiens
atgtcagcaggtgatgagcaatgacttagagtgaccatatgtggcagcttgctcaggacactcatggcttacacctattgtggggacctgattattaacagtaccctctttcattctcaaagtgtcctgagttagacaataaattacatggtcaccctggtaatgagcctcaatgtcaaggccaactgttgtgacatttttgcccctggatagggcctagaccaccccctccccaccctctccagcccctgaccccatgccatggctccttcctcccctyagatttccttaaagaatcccctgtggtataatacttcgggcctacattaagggatttataggagccatgaaacttgttgctatattt

SEQ ID NO: 148513 - DNA, 537 bp, Homo sapiens
atgattacagtctgaggcatatgaccctgtggaggacagagacgggcccttgtaggttaaactaaatctagcaagaaagataagtaagaaagttctatgacgatgatctaggacatgcacctccagagtggagcaaatgactgatttatcctcatggaatatggcatagcaaatctttatgtggataaaaattggaataaaaggtaagggtggtcataccttggaggatgctgtctgcacagctgaagacttcattgtgtacacagtgaaggtaattaaatgactttaagatgaagaatcaggattttagaaccaataccctcactgctttcattagagaacactggtagcatcaagtaaagtgaagccacagcagtagtcaaagggaggactgttgtggtccactaacaatgtgtgagcagaaagggaggcttgatgggctatggaagattgggtgtcakgaaagaagaacagagagcgaagaaaaggagaaacggaatgaaagaattccatattattaagaacataccacaattt

SEQ ID NO: 148514 - DNA, 561 bp, Homo sapiens
ggtatttgagcattcatggattctgtggcagtaggcttttatctaagacacataagtgagggacaaccgagttattatctctaagaaacatagcttaatattttggattctaaaggttaaggtaccataaatcctgaattactctgagatatcacataaaaagacatttttattttattttactctattctggctcttaaaatattttatgatggcagttttcagagttgtaccatgttgtttacattcagtccctggatgcatcaaaacactgacacagcatttcttttaaactgtcgtaaaaaaagcagaaatacattgtgtgtgtgtgtgtgtgtgtgtgtgtgtgtgtgtgtgtctgcatgcacccatgtatgttgtgtctgtggtataatagggaagagagagggatgggttaastaaatgctatatttttttaaaaaagcgtactcaatttccagtttgatgagtattgatcagtgctttgattggcccttttcgtggtgggtgtcattgtgttgggctgagctgagctgatttgcccctggatgcaaagcctta

SEQ ID NO: 148515 - DNA, 566 bp, Homo sapiens
gatttcattaacttactgattatatgtattgagcaaccactttatgcaaagtcctggtccaggtgttgaggatataagaatgaacaacgacaacatcaaaatcctggccttttcaatccatctctgtggtgggaaagggttaaacccaagcttcacatcacccagaaaacttctcactgctcattggaagtgtggttcaccctcaactcagacttctcactaggttcagttgccacgatggcagctccagatgtagctttatacttttagacattgtctcaaggaattcagccattaggtcctggatcccatattcaactctcagaggtttttcgttgaagccactctcactttgcctgaggtaggagaaagccccactaggggcaggtatggagcttaacatacagttgtctccagagaaacttccctttactggctggaggtggatgatccctaatattgggrgcaatgattttgcagtctctcagcatggcagaatgtatttagggagtctttaaaaaaatgtcttttgttttctttcatgtaaccttatatttttaaattag

SEQ ID NO: 148516 - DNA, 580 bp, Homo sapiens
atgtaaacaaaaaacctttatcctgtgccaacccagattatctggtataccacctgcggcatgtgcgcggatcgttttcagaaagtgctatattcaagtgcctccctctaagaagctgaacgatggttgctggtttggaaaccctggccctagagtgcctcatggtcagctctaagcttcagaggccaggcccaagtctgcagcccgagtctgcagccaagaccagttctatgcatttgcaggggcacgtgccccaccctggcccttacctcggcagacggtgccattctcaacggcctcgaagcctgctttgcacatgcagcgcccgatgggcaccagccactcgccgtccccgttacagtagagcttgatgggtacatccacctcttccgcattggcgatgcagctgccccgggcagccacyagcgatgtgctctcagcccccgacagggtttcctggaagatggcgccattctggatgatgcgggggcacttgcggtagaagacacgcacggcgatgagggacatgcagccgccatagtcctggaaggccaggtagaagccgctgcgggacacaggt

SEQ ID NO: 148517 - DNA, 503 bp, Homo sapiens
tgtgcagctggggagtgggatgtggcactgcacggggcaggggggaccttatttcttctaagcgccttctcctgtcatccttctggcagccctgtcaggttgaaatcagcattgccaagaggctcagagaggttaaggcacttgcctgaggttatgcagccggtagcagatggggctttaaagtcaagtgggcctgactccakgttgcggaaagggactgctggaccgaaggagatggaaaggtcagagcctggggggaggacaggagaaaccgggctggcaatgatgatgggctggcacaggcaggaggcagttaaaccagatgagttgtaagccctaacccaaggctgaaactcggtggcttttgaaatgggctagaaccagcactttcccactccccctgcccctggcttccccaggaagcccaagtcctgtcagtaccctgctccccaccctctctccccaccaactggtcacagctctccaccccttgctgcctccaa

SEQ ID NO: 148518 - DNA, 582 bp, Homo sapiens
tgtgtatggttgagcgtgcctgtagtcacagctacttgggaggctgaagtgggaggatcacttgagcctgggaagcagaggtttcagtgagctcagatagcgccactgcactccagcctgggcaggagtaaaaccctgtctcmaaaaaaaaaaaaaaaaaaaaaaaaaaagaaagaaagacaaaagaaaaaaaaatccaggaagtctatgaaaagacatcaactcaacataatattactcaaggttattactataatttgtgagccgtcaatatgagagtcactctctaacctggttattaaatgcactggattcaaaacagttgtccctggcctagaataactaaaatgccaaatcaagttaattatttatctttaaaatctctaatctctctgctcttctctcccttcagtgatattgtcatagtttaatcaaagtcatcttccaccttaaatttcatctgtcatcatctcctaatcagtttcccaatagcttattttaactgttctttgcacactaaccaaagtgatgtaaagtctaaacccagaccctttcacttctttttttcgaatgcctcaatag

SEQ ID NO: 148519 - DNA, 582 bp, Homo sapiens
tgtgtatggttgagcgtgcctgtagtcacagctacttgggaggctgaagtgggaggatcacttgagcctgggaagcagaggtttcagtgagctcagatagcgccactgcactccagcctgggcaggagtaaaaccctgtctccaaaaaaaaaaaaaaaaaaaaaaaaaaagaaagaaagacaaaagaaaaaaaaatccaggaagtctatgaaaagacatcaactcaacataatattactcaaggttattactataatttgtgagccgtcaatatgagagtcactctctaacctggttattaaatgcactggattcaaaacagttgtccctggcctaraataactaaaatgccaaatcaagttaattatttatctttaaaatctctaatctctctgctcttctctcccttcagtgatattgtcatagtttaatcaaagtcatcttccaccttaaatttcatctgtcatcatctcctaatcagtttcccaatagcttattttaactgttctttgcacactaaccaaagtgatgtaaagtctaaacccagaccctttcacttctttttttcgaatgcctcaatag

SEQ ID NO: 148520 - DNA, 545 bp, Homo sapiens
ataaagaatccttataaactttagcccaaaaggaaaatgaatttaatccacttgtttttatttattctggaaacaggtattctaattagtgaattgggagctctctcatgtgcttctctgcagaaagctttcaaggaaagattcagctccacttgattatctatggaaccagagttgtgaatagatgactaatggagaatgtcttttgacttggctctcaagttgcattcatcacattcattcatggcaccagttctacggatgtcttctccagaggcagaaagtttcgccayttggccaccagctgatctggatataggcaaaccacaccatctccagtatccctttaagaaaatgtttctcttgccatctgccaagaagccagaaactgtgtttttagttgtgaaggtttggattgtcctcttttttatttattcaagaaaataatatgtactggttgcctacttcatgccaggcactctgctaagagttgatcttatgtgatgtgaggccaactacctctaggagaaagagatcattttaaa

SEQ ID NO: 148521 - DNA, 578 bp, Homo sapiens
aagtggaggtgttgtggaaagcaggactaactgagggaacatgcaaccagcaaacgttgaagggatgaaatcaaaggtataagaagaaggatctcctcctctgggaaagagatttattctggcagaaaaagaagatcaattatttggataaaaatggaaaacatacttatcaaatttgtatatgccaccaatctgtgaggagcagctaatatgattgatartagagtcaagattcaagaagtcatgttggaatgtgagaatgatgaattgaaacaaacaaaaatgaagtttagtggtaatacatgcaaaatttctcctttataccaaaatcaatcatttaaagtaaagaatggaggagaaataacttcattctatttcatgtggaaaagagtagcattttcttgtaaaagcttgcatattaatgatgccagcagggtaacacgattgctttaaagctaatgcaaccctatgtttaattgggagactatggggctgcagcaatagccgaaaattgggatactaatttaataaactatgatgcaacctcataatgaaataacctgctgttattaaagaat

SEQ ID NO: 148522 - DNA, 485 bp, Homo sapiens
gttttcatttcagctattggctatgacataacttaatgatccaaagtctttggcctgttcagtgtgacttcatggagcaactgatgttatgtctgtgggcatcagtttatcacctgtggaaagtgaagatgctgacatgaacaactcccaaatatcataagctgatctttgtgccttcttatcatgcaactcaatccaagctctctgattctatatgcttttactcccacctggaatctctcatgtgcattaacagacgcacacaatcatgtgaaattaatgtgtctaatttccctagaatttcctctctcttttgaagcagaaattaggtggaagcaagtgtgtgtgtgtgtgtgtrtgtgtaagtagaaatggaaaaaacatttgtaaaaatagacattctttatctgtatgtggactgatttcttcttctttaaccagagaaaaggaaatttagtttatagaaccagaaatggatgatttgc

SEQ ID NO: 148523 - DNA, 622 bp, Homo sapiens
ggcctctttggagcctcttttacaaagatactgatatggcttggctgtgttcccacccaaaatctcatcttgaattgtgatccccataatccccattttcaagggagggaccaggtggacgtaatcagatcataggggcagtttcccccaagctgtcctcatgatactgagtgagtctcacaagatctgatggttttataagtgtctggcatttcccctgcttttacttactccagcctgccaccctgtgaatgaggtgcctgcttctcctttgacttctgccacgattgtaagtttcctgaggcctccccagccatgctgaactgtgagtcaattaaacctctttcctttataaattacccagtctcaggcagttctttatagcagcgtgagaatggactaatacagatactaatcccattcatgagaactctgtcctcatgacctaataacctcctcctcacaaaarctccccatacaaataccattacatcagagactgggtttccccatatgaattttgggagacaaaaatattcagtctataataggccttgaaaagtatcactgccaaactcagttttaatccatcccttgaatacccttactcaaattcattcca

SEQ ID NO: 148524 - DNA, 463 bp, Homo sapiens
gattaattaatcctgttccatcaggtgatgtctcctgcattgtaatcttcattattatttaacttttattgttacttttcttttcataaattgcctttccatttagagggtaaagtccttgaagatggaagttaggggttaggttacatgtgtattttcatctttttaagtatcttgtagatyttaagtgcccaataaatgtgcagtgatttaatttaacacagtctggggaagtcgagattgggctgcagtatatgtttagggcaaggcatggcatgagagagaagcgggaagacatatttaaaaacaggggctacttagagagatagaatatttgggctgaaagggttataacccagtctctgcttatcctagctccacccctagcaagagagtcacctgatggctttgaaatgaatttttacttggatgtaataaaatacagagttacaattatgaattc

SEQ ID NO: 148525 - DNA, 463 bp, Homo sapiens
gattaattaatcctgttccatcaggtgatgtctcctgcattgtaatcttcattattatttaacttttattgttacttttcttttcataaattgcctttccatttagagggtaaagtccttgaagatggaagttaggggttaggttacatgtgtattttcatctttttaagtatcttgtagatcttaagtgcccaataaatgtgcagtgatttaatttaacacagtctggggaagtcgagattgggctgcagtatatgtttagggcaaggcrtggcatgagagagaagcgggaagacatatttaaaaacaggggctacttagagagatagaatatttgggctgaaagggttataacccagtctctgcttatcctagctccacccctagcaagagagtcacctgatggctttgaaatgaatttttacttggatgtaataaaatacagagttacaattatgaattc

SEQ ID NO: 148526 - DNA, 491 bp, Homo sapiens
aaaattatcagtggtgggagaaaaaagatcagtgagaacagtccctggagctcacatagggttaggaatgctttttccagcatccggcatagaatacttcataattcaagaagcaaaagattggagagagtacccaagagggtcttgcctcattagtgggccaaatttcacattgttcttgttcccatcaataaaacttaaaaagtaataaacaaagagaccaaattgtgtctatgcaacttaatttcattccagaaaatgccctcaataatatttatagaagtacacaaatatggaatacctaagaaagtaaaactttcaattcattctatcaaatcaaaattcagcakacatggaaagaatcaggaaagtataccacacaatgcaaagaaatatcagtagttacaatgaacatagacatgacagcaatgatagaattagtagatatggacattaaagaaatattataacttattttacatgtttaagaa

SEQ ID NO: 148527 - DNA, 552 bp, Homo sapiens
caccaaaatgaacatctttaaagcataaatctcacagggcccataaaacaaaaacacagtaaataaatttaaaaaaatgttattcaggaaacagaatgatgaatagaatagtacctcacatctcaacgttgaacataaatggcctaaatcatctacttaaaagataaagaatggcagaatggataagaatttaccaaccaagtacctactgtctttgagactcacctgacacataaggactcacattaacttaaggttaaggggtagaaaaagatagtctatgcagatggacaccaaaagtgagcaggagttgctattcttatgtcagacaaaacaaacttcaaagcaacagccataaaaaasacaaagaaaggcattacataatgataaaaggacttgtccaacaacaacaacaaaatgacaatcctaaataagtatgcacctaaacattggaactcccaaatttataaaacaattactaccagacataagaaatgagatagatggcaacacaatattagtgggggacttcagtacttcactgacggcagt

SEQ ID NO: 148528 - DNA, 535 bp, Homo sapiens
ctccccagttctattcaacatagtactggaagtcctagctagaacaatcagacaagagaaagaaataaagggcatccaaatagtatayctagaaaaccctaaagactcatgcaaaaagctcctaggactgataaatgaattcactgaagttttatgatacaaaattaatatgcacaaatcagtagctctgctatacaccaatggtgaccaagctgagaatcaaatcaagaactcaaccccttttacaatagctgcaaaaaatcacaaactaattaggaatatacctaaccaaggaggtgaaaagcctctaaaaagaaaactacaaaatactgctgaaagaaatcatagatgacacaaacaaatagaaacatatcccatgctcatgtatggatagaatcaatattgtgaaaataaccaaacaatcctaaaatttatatgaaaccaaaaaagaacccacatagccaaagcaagactaagcaaaaagaacaaatctgaaggcatcacattacctgacttcaaactatattataaggcc

SEQ ID NO: 148529 - DNA, 545 bp, Homo sapiens
tttctggctggaaaagcaacacccctaaggatcctgtgacatgaaaaaatgctcaacatcactaatgatcaggaaaatgtaaatcaaaaccataatgcaataccaccttactcctgcaagaatggccataatgaaaaaaaaaatagtagatgttggcagggatctggtgaaaaaggaacacttttacattgctggtgggaatgtaaactagtacaaccactatgaaaaacagtgtggagagtccttagataactgaaagcagaactaccatttgatccagcaatccttcactgctgggtacctacccagaagaaaagaagtcattrtatgaaaaagatagttgcactcacatgtttatagcagcacaatttgcaattgcaaaaatatgaaaccagctcaaatgctcatcaatcaacaagtgggtaaagaaattgtggtattcatatatatatatacacacacaccatggaataccatgcagccatgaaaaaaatgaaataatggcatttgaagtgacctggatggaattggagaccattattcta

SEQ ID NO: 148530 - DNA, 423 bp, Homo sapiens
aatgcattaggtgtgaagaaaatgtggagtaaaaataaccagccacacatcaaaaattataaatttgagggaaaaatgagacatcatttagtccagcactctgtagaaatcctgaatttttcactttttccttactggatgtcagagagactgagggaagccatacctgggactcactgtcacccctgctttaatcagaatggtgrcacttttgattattttgtgtattgggcttttgcactagatgtttttctaagctataatttccaagtttaaactatgtacacacacacacacacatatacacacacacacacacacacacacacacacacacgtgcctacctacatctgctagagtggtagttaagattatgattgagtgtattgttccagtaatttagttcactggcaacatttaaa

SEQ ID NO: 148531 - DNA, 629 bp, Homo sapiens
catacaaaatcatttttatggctcagattatcattgacatctttttaatgctcatatgaaaaccaaaacatatttctgtagagctggtggttctcaagtagtaatatagggactcagattccttccatcttctggctcctttgttctcaatacatgactttaaagtctcccctgctcatctgtgccaagtccgtgaaggaaatgagcattgagaatcacctctggaaggctctcatggtccaggccttcaattttcacgcatcactactgctaattttccatgtgctaaatatctgtgatttgaccgtaccctactataagaaacattgacaaatacacattcacattgatctaggaagraaaagaaatgggtttggtgagcagatattcattatatgtttcaatgacatatttttcaattaaaattagtatatgtgtatatatgtgtgtgttcacatacatgtaatattagagtgtctctctattggaattaatccttaatatatgcctatttgaattcaggaattccctggaagttcttaatggtatttttgaattcttacatttttctcccctcattgtttccatttgtatttaacttgaatataagtggaaaatatggaacacat

SEQ ID NO: 148532 - DNA, 629 bp, Homo sapiens
catacaaaatcatttttatggctcagattatcattgacatctttttaatgctcatatgaaaaccaaaacatatttctgtagagctggtggttctcaagtagtaatatagggactcagattccttccatcttctggctcctttgttctcaatacatgactttaaagtctcccctgctcatctgtgccaagtccgtgaaggaaatgagcattgagaatcacctctggaaggctctcatggtccaggccttcaattttcacgcatcactactgctaattttccatgtgctaaatatctgtgatttgaccgtaccctactataagaaacattgacaaatacacattcacattgatctaggaagaaaaagaaatgggtttggtgagcagatattcattatatgtttcaatgacatatttttcaattaaaattagtatatgtgtatatatgtgtgtgttcacatacatgtaatattagagtgtctctmtattggaattaatccttaatatatgcctatttgaattcaggaattccctggaagttcttaatggtatttttgaattcttacatttttctcccctcattgtttccatttgtatttaacttgaatataagtggaaaatatggaacacat

SEQ ID NO: 148533 - DNA, 423 bp, Homo sapiens
aatgcattaggtgtgaagaaaatgtggagtaaaaataaccagccacacatcaaaaattataaatttgagggaaaaatgagacatcatttagtccagcactctgtagaaatcctgaatttttcactttttccttactggatgtcagagagactgagggaagccatacctgggactcactgtcacccctgctttaatcagaatggtgacacttttgattattttgtgtattgggcttttgcactagatgtttttctaagctataatttccaagtttaaactatgtacacacacacacacacayatacacacacacacacacacacacacacacacacacgtgcctacctacatctgctagagtggtagttaagattatgattgagtgtattgttccagtaatttagttcactggcaacatttaaa

SEQ ID NO: 148534 - DNA, 423 bp, Homo sapiens
aatgcattaggtgtgaagaaaatgtggagtaaaaataaccagccacacatcaaaaattataaatttgagggaaaaatgagacatcatttagtccagcactctgtagaaatcctgaatttttcactttttccttactggatgtcagagagactgagggaagccatacctgggactcactgtcacccctgctttaatcagaatggtgacacttttgattattttgtgtattgggcttttgcactagatgtttttctaagctataatttccaagtttaaactatgtacacacacacacacacatayacacacacacacacacacacacacacacacacacgtgcctacctacatctgctagagtggtagttaagattatgattgagtgtattgttccagtaatttagttcactggcaacatttaaa

SEQ ID NO: 148535 - DNA, 527 bp, Homo sapiens
atacttggatatggtttgattggcgagaagtgcagggtaatggtaatccatgtttatccttgaacagcttgtaaatgcataaaataggccaggtgtggtggctcacacctgtaatcccagaacttctggaggccgtggttgggcaaatcacctgaggtcaggagttcgagaccagcctggccaacatggtgaaatcccatctctactaaaaacacaaaaatttgctaggtgtggcagtgcatgcctgtaatcctagctactcaggaggctgaggcaggagaatcacttgaacccaggatgcggaggttgcagtgagccragatcgtgccattgcactccagcctgagcgacaagatgaaactctgtcgaataaataaataaataacacgaattattataactttattggaaatgtaagtaaatttacttgaatgtaaataaactgcctcctctccagtttctgatgtgcatgactgtaatccagctaattgaaacatgatagaaacttgtgaattaaatggccaaag

SEQ ID NO: 148536 - DNA, 527 bp, Homo sapiens
atacttggatatggtttgattggcgagaagtgcagggtaatggtaatccatgtttatccttgaacagcttgtaaatgcataaaataggccaggtgtggtggctcacacctgtaatcccagaacttctggaggccgtggttgggcaaatcacctgaggtcaggagttcgagaccagcctggccaacatggtgaaatcccatctctactaaaaacacaaaaatttgctaggtgtggcagtgcatgcctgtaatcctagctactcaggaggctgaggcaggagaatcacttgaacccaggatgcggaggttgcagtgagccaagatcgtgccattgcactccagcctgagcgacaagatgaaactctgtcgaataaataaataaatarcacgaattattataactttattggaaatgtaagtaaatttacttgaatgtaaataaactgcctcctctccagtttctgatgtgcatgactgtaatccagctaattgaaacatgatagaaacttgtgaattaaatggccaaag

SEQ ID NO: 148537 - DNA, 557 bp, Homo sapiens
ttctttgtgcaaataaactctgttaaatttaatttatctaaactttaaaaaaaattaatgtactgaaagaaaatccaaaattatatcaattattactataaaataaagtagaaaaatactttaatgtaaagtataaaaatactgatgtcaaaacagaaaaatatttccccatccttatgccagtttttaattaagcaaattgttaattcaatgtttatagagtctatatggggctgccattataatagataaatttgactcacatatttatattttgtataattttatgtcatattttttcyatcaaataatgagttaagatttttcaagagagtgttttgtttattttagtattgaagaatgagctaatgttttaagagtctgatcattttacattttagtcacaaattgaggtagctttatgaatcagtgaaattttccaatttttaggggaatgctctcctataacatgtcatatctagtatatataggttggtcacaatatttcccatattttctcttaaatcctttctcttaaagcctctacactagttcag

SEQ ID NO: 148538 - DNA, 557 bp, Homo sapiens
ttctttgtgcaaataaactctgttaaatttaatttatctaaactttaaaaaaaattaatgtactgaaagaaaatccaaaattatatcaattattactataaaataaagtagaaaaatactttaatgtaaagtataaaaatactgatgtcaaaacagaaaaatatttccccatccttatgccagtttttaattaagcaaattgttaattcaatgtttatagagtctatatggggctgccattataatagataaatttgactcacatatttatattttgtataattttatgtcatattttttccatcaaataatgagttaagatttttcaagagagtgttttgtttattttagtattgaagaatgrgctaatgttttaagagtctgatcattttacattttagtcacaaattgaggtagctttatgaatcagtgaaattttccaatttttaggggaatgctctcctataacatgtcatatctagtatatataggttggtcacaatatttcccatattttctcttaaatcctttctcttaaagcctctacactagttcag

SEQ ID NO: 148539 - DNA, 537 bp, Homo sapiens
cccagggtctagaccttggtaccaggccagcctctgtgacctgagactccaagaccaccattgcagacctaggctctaagctagactctgcaaactcaggagatatatacatatgcagattcaggctccaggcctgctccagtgtcaggtcagtgtccatggactcaggctccgggcacatgccagtagacctacaaaccaggctcactccaatgcttggccagtccctacagactcatgttcaagagcagtcccagcaccacctcagcccctgtgattgtaaacttcrggctaacctcatgggctgatatagtttgcatatgtgtccccacccaaatttcatgtttaactgtaatccctaatattgggattacccggtaggaggtgattggattatgagggtggatttctcatgaatggtttagcaccatctctgtgatgctattcttgtgatagtgagttctcatgagatctggctatttaaaagtgtgtgatacctccccacccccactactcttgcttctgcttttgctatgt

SEQ ID NO: 148540 - DNA, 594 bp, Homo sapiens
ttggtgctaatttttcaatatgaaaatgtcttttgcacctccatgttctgtaatgtgattgcaaatatgaacagacttgaattatcacttggcagttttgtttaagggtatgcgatattttgtgaccaatttgaattctcacctgtgcagggaaatggtgacctagttgtacaggcgtccagtccccaaactgaatcctgagtggtgttttayttgaaagcaagcaacattcatgctacataggatgattgtttctatattcttagaaaaaaatgacattcaactatttcagaaactaaaagtaatcacagttgaataaacaactaaattgtcccttagacttcttgataacttttgtttccccctctatgtcatctctttctgaagtatttagaaaagactctggttaattaatttatacaaatgaaaaacaaagtgtgattcatctctaaagtttttctattataattgaggtgaagttctaagcttaggactcaatgaaaagaatagcaaaatgtatttaatattataagcaacttttgaaatctcagaaaatatctcaaagcagctgggtacaccaagaccagaggaaga

SEQ ID NO: 148541 - DNA, 415 bp, Homo sapiens
gttttatttcaataaatatgtgaacattatcttcgtatttcctggaagaattaacactaaaaatagaatttctgggaataatgtcaaaatgttggttaatcattattagctgayacaatgatatcattacttagaacatcattcttccaaatatggtgattttaaaagagaataaggttaaacattcacatatttatcatgattaccaaaatgtgataccaaaaataagcaagactaaacaccagggttctttaaaaatacttagtagaaatagatatttagtatttactttcaaatttgaaatgctattatttttcaatcaaattattttttctgcaacacagacccccatgattcacatttacctatgtaacaaatctgcacaagtacccctgaacttaaaagtttaaaaaat

SEQ ID NO: 148542 - DNA, 505 bp, Homo sapiens
ggcaagatgaagacatcttcagaccaacaaaagtaaacattcacaaatacctaagaaaattatacaaagtaacaataatgaagggtgactaactctgctagatacaaaacatactatcaagatacagtaattaawacagctgggcaaaggcaaaagattaagcacacacataaatagagcagactatagcaccagaaataaccccaaaacatgaaggaatgtaatttctaacgaagttagcaacaaaattcagtgagaaaaacatagatcatttaatacattgtcaagaaagttttaaaaggaattaagttggatctctaccattttacatcaaaaataaaattccagatagatcacagatctagaggtaaaaaatgaagtattaaaaatactaaaaaaaaatgggaaactttttaagatttcagaatgagaaagctgaattatgatccaaacctagaaagcataaaagaaaaataataaacttgactatgtaaaaatagaaagt

SEQ ID NO: 148543 - DNA, 452 bp, Homo sapiens
gaattctagccccattccatctcatctggggcaagtctcacaattcctcatctattcagtgtgcacaattcatatctgctgtacctgactcaggattcctgggagaatcaaatgagattattcattcggcttttcaacaaatatttgttgagtagttgctgaataacatagtrtaagggagactgtgagagataatgatgaatcagactgcgtcttaccctcagggacccaggcaatgtacaaggcgagacaagttcacattccaaggtgaaatcgtcagtccaagagaggaccagatactgggctatgggagctcagaggtaatatggattattccagcaggaggtaataaagagggctccagaacagaggctgctgtttttgggctgaatttccagagttaaaatgcaagcagtttggaaacaaaattggtacacaaatattgggcatag

SEQ ID NO: 148544 - DNA, 452 bp, Homo sapiens
catctggggcaagtctcacaattcctcatctattcagtgtgcacaattcatatctgctgtacctgactcaggattcctgggagaatcaaatgagattattcattcggcttttcaacaaatatttgttgagtagttgctgaataacatagtgtaagggagactgtgagagataatgatgaatcagactgcgtcttaccctcagggacccaggcaatgtacaaggcgagacaagttcacattccaaggtgaaatcgtcagtccaagagaggaccagatactgggctatgggagctcagaggtaatatggattattccagcaggaggtaataaagagggctccagaacagaggctgctgtttttgggctgaatttccakagttaaaatgcaagcagtttggaaacaaaattggtacacaaatattgggcataggttataaatacctaatttatgg

SEQ ID NO: 148545 - DNA, 548 bp, Homo sapiens
gcctctttgacctcgtcgcctgccattttcccttttgctcccttggctccagtttaactggcctccacattttcttcggccatgtccagatacgtccgcctcagaattttcacattgtgactyccctggctttgcatgttcttcccctcacatacgtttatctccttcaagtcatttatggcatcttttcagggaggtgttttctgaccactttctacctctgcctggcatttcttgaacaaccttcccttctttgtttttcatcacatatctacttttctatataccttccttatttatttgttcattgtctgtctctctctactaggaggcaagctctgtaggcccaagttaagagtaagtttgaggtgaggctttctgttttgtttcctactgtttccagtgcctagaacagtgccaggcttctggtgggcactcaataaacaaattcaactaactggttcaatgaactagtgaatgaaactagtggaagtcttcaaggctaggctgagtagtttggaataaatataataggagaaaatccatgg

SEQ ID NO: 148546 - DNA, 548 bp, Homo sapiens
gcctctttgacctcgtcgcctgccattttcccttttgctcccttggctccagtttaactggcctccacattttcttcggccatgtccagatacgtccgcctcagaattttcacattgtgacttccctggctttgcatgttcttcccctcacatacgtttatctccttcaagtcatttatggcatcttttcagggaggtgttttctgaccactttctacctctgcctggcatttcttgaacaaccttcccttctttgtttttcrtcacatatctacttttctatataccttccttatttatttgttcattgtctgtctctctctactaggaggcaagctctgtaggcccaagttaagagtaagtttgaggtgaggctttctgttttgtttcctactgtttccagtgcctagaacagtgccaggcttctggtgggcactcaataaacaaattcaactaactggttcaatgaactagtgaatgaaactagtggaagtcttcaaggctaggctgagtagtttggaataaatataataggagaaaatccatgg

SEQ ID NO: 148547 - DNA, 548 bp, Homo sapiens
gcctctttgacctcgtcgcctgccattttcccttttgctcccttggctccagtttaactggcctccacattttcttcggccatgtccagatacgtccgcctcagaattttcacattgtgacttccctggctttgcatgttcttcccctcacatacgtttatctccttcaagtcatttatggcatcttttcagggaggtgttttctgaccactttctacctctgcctggcatttcttgaacaaccttcccttctttgtttttcatcacatatctacttttctatataccttccttatttatttgttcattgtctgtctctctctactaggaggcaagctctgtaggcccaagttaagagtaagtttgaggtgaggctttctgttttgtttcctactgtttccagtgcctagaacagtgccaggcttctggtgggcactcaataaacaaattcaactaackggttcaatgaactagtgaatgaaactagtggaagtcttcaaggctaggctgagtagtttggaataaatataataggagaaaatccatgg

SEQ ID NO: 148548 - DNA, 528 bp, Homo sapiens
cattatatttcacacatctgtatactgatttctcttctttagaatcatttctagtttattgatatttctttgtgagttgtgagaatcataaaatgtctggcacaaaattgagccagagcatcaccacacttattctggaatatatacttctaagagagccttaaaattaaagaaatagcttctttttttcatgtatccatatcataatatgtcctcatattgatctcgtggtcaattaaactccttaaagctttccatgtagggtgctttaagccacagtgtcattcctgcaatccacagatggactatttagactcaaaagtaagtcatcatatttgtcatttttatagtttgcaggtcrcaaaagtataatgggaatgagttgagtcctctgcgaattttcaattgaattcacagtcactttaagcaatagctactgcttttctaagaactcacaagtcaaccttaaaaatacattattttggattttatctggcctagtggcaagtttacttgtatacacaggtc

SEQ ID NO: 148549 - DNA, 482 bp, Homo sapiens
gctgtcaatcatgctcaagtcacaacaacaaaatgtgtaaaaaagtaagcagaaactatggggatgaaggaccactcatatgcttacgtaagtgttgaaagagacataaccaaaaatgacaaacaggtaatataaaaagagaaaagtgagcaaaggcccaaatgatggttgcaataatgaaatcagattacgaaatgaaatgtgataggaaccctaacgaactrtataaaagctgagaggttgagtgtcattatgagtcctgggtcaggattttttagaaagattccatattgatgagaaagctattgatgctttattgtctcataaacaaaagtgtggctaatcatgcatgcacaaattaaggccatttttcattcatgaggatggaattaattaactgaagttaagcaaggttttccattggtctattatgcatagttatgatttgtatatattctccatccttgatctcagagaaagtt

SEQ ID NO: 148550 - DNA, 567 bp, Homo sapiens
gtaaaaaaaaattgatcaaaattgccttagaatcttgataaatgttgaatctagttgatgagtacttgggacctcactgtattattctattttttaatatttggacactttcattaaatatggataaatgtgccctttaaaatccattttagaaggaacwtattgaaggaagtcaacatgttatctttctagaaatccaacacagctagttttttctactgggctgaaatagatcattttttctttgtttaagcaccagataaaaaaaggactgatcaatctgataggtaaaaaaattgcaattttctcttttaaagtgtatttctctgaatattaatgaagttagccttgttacttcttacatttattagttctgtgaatgccttcaattcatatctttggcatatttttatagggtcatgcatcctttttattattgcctctaaggattctttatacattatagatattaactttattgtataatacatgtgcccaagtgttctcatttttgtctaattattaatcacatatagaagatgttaacttttttcctatatatatatt

SEQ ID NO: 148551 - DNA, 606 bp, Homo sapiens
tggacctccaggcatttctatacatcctctgaaatctaggtggatattcccaaacctcaattcttgacttctatgcacccgcaggctcaacaccatgtggaagctgctaaggcttggggctttcaccctctgaagccatagcctggactgtaccttgtccccctttagccatggctggagcagctaggatgtaggacaccaagacactaggctgcacacagcagtgggagctctgggtctggcccatgaaactggtccttcctcctaaacctccaggcctgtgatgtcagggsctgctgggaagctctctgacatgccctggagacatattccccattgtcttggcaattaacattgggctcctcattatttatgtaaatttctgcagcaggcttgagtttctccccagaaattgtgtttttcttttctatcacgttgtcaggctacaaattttccaaacttttatgctctgtttcctcttgaacactatgctgcttagaaatttcttcctctacatacattaaatcatctctctcaagttcaaagttccacagatttctagagcaggggcaaaatggcaccagtctctttgcatagaaagagtga

SEQ ID NO: 148552 - DNA, 580 bp, Homo sapiens
ggcacttcttacatggcggcagcaaaagaaaaatgaaagaaatgcaaaacyggaaaccccttataaaaccatcagatctcgtgagacttactcactaccaagagaacagtatggtggaaaccacccccatgattcaaattttcttgcaccaggtccttcccacaatccatgggaattatgggagtacaattcaagatgagatttgggtggagacacagagccaaaccataccacttagtataataacagcagcagccccaacagctgctaataatttttattgaacacttactgtgtgctagtgggaaatgaatgagtgctgaacactcacatgggtcatttcgttttattctcacagaaatattttgtgctaagtgctgttattatcaccaaatttttttaaaaaaaggcaactgaggattatagtggctaagtaattttccaattgcacatataccagtttagtggtagggcattgttagactccaaatctatcatctaaactgctacaagattctatacaataaaatagcaaactctgagacgcatttgttgggcatcaccaggaaaggcaaaaggc

SEQ ID NO: 148553 - DNA, 518 bp, Homo sapiens
taataggatagatgtatctataaaggggagtttattaaggagtattaactcacatgatcacaaggtgaggtcccaaaataggcaagccaagctgaggtgcaaggaagccagtccaaggcccaaagctgaagaatttggtgtccaatgtttgagggcagaaaacatccagcacaggagaaagatgtaggttcagaggtgaagccrgtctagtcttttcacgttcttctgtctgcttttaatctggctaccctggcagctgattagattgtacctacccaaatttatgttgggtctgcctttccaagtccactgactcaaatgttaatctcctttggcaacaccctcacagtcacacacaggaacaataatttgcatccttcaatccgatcaagttgacaatattaacaatcacagtcactaacgtcattcatgagggctccactttcacagcttaattacctcccccaaacccctcctccttataccatcacattacaggttaagatttcaacgtgaaa

SEQ ID NO: 148554 - DNA, 518 bp, Homo sapiens
taataggatagatgtatctataaaggggagtttattaaggagtattaactcacatgatcacaaggtgaggtcccaaaataggcaagccaagctgaggtgcaaggaagccagtccaaggcccaaagctgaagaatttggtgtccaatgtttgagggcagaaaacatccagcacaggagaaagatgtaggttcagaggtgaagccagtctagtcttttcacgttcttctgtctgcttttaatctggctaccctggcagctgattagattgtacctacccaaatttatgttgggtctgcctttccaagtccactgactcaaatgttaatctcctttggcaacaccctcacagtcacacacaggaacaataatttgcatccttcaatccgatcaagttgacaatattaacaatcacagtcactaacgtcattcatgagggctccactttcacagcttaaytacctcccccaaacccctcctccttataccatcacattacaggttaagatttcaacgtgaaa

SEQ ID NO: 148555 - DNA, 608 bp, Homo sapiens
cagctttctttttgaattaagtaataattcttgagtatctttctgcattacaacacatggttctactttttgaaaaaccacctggtgttccatgatgtggatgtactgaagtgtatttaaccacttccatgctgatgaatattagtcgggcttccaagttttgcagttacaaataatgttgtaaagaagattttaaaatgtgtgttttggggggtagttgtgggaatacgaataaatttatataagtaaaatatgaactttttaaaaggaaaaatcaaattgctcttcaaaaagattatcaatttgtcttcctatcaatagtatgtgattactgatttctccagggtactataaattttttgagaatatttacctatataaaggcaaaactaacattcagttataatgttgcttaatrtagtgagaatgattgttttttcaaatatttattcaccataattatttataaatttcctatttatgtactgtgtatttttcaatttaaattttttcctattatttacaagagctcctacatattatggataccaattatttgcttgttaaacttgttgaaaatctttacttccaatctgtacttttgcctt

SEQ ID NO: 148556 - DNA, 580 bp, Homo sapiens
actagtgaaacccgagagtaaaagccacttccactgcccccttccaggaacagaaaccraaacataacatcagaaaatttccaatcaccaccccactcccaaatacacgtagagtgattattccagttctctgaactggggagggcgcatctttagcctagacgcccctctgggtgactaatgacaggtgagcacattgaacaaggtgactcctaagacaaggctgtatgtagccaacatcttgagagcaatctgaagttggagattttactacagccaaggagaaaacggagaaaaatacttgagaaatgtgttagctgtgttgttattcttaataaacggtaacgctggtcaaccacctgaacactgcagtgggcccaggtcaagcttgacaacatgtaaattttgccctctctgcccaatgcctctccagggctcccagccccaacgtctctctgattacagccccagtgagacccaccttcgcttcctctagagattgaatggcccctacatcctccaggccttcctgaagctcaaaaatgtccaaggtcccatccttgttatagtccaggtacca

SEQ ID NO: 148557 - DNA, 580 bp, Homo sapiens
actagtgaaacccgagagtaaaagccacttccactgcccccttccaggaacagaaaccaaaacataacatcagaaaatttccaatcaccaccccactcccaaatacacgtagagtgattattccagttctctgaactggggagggcgcatctttagcctagacgcccctctgggtgactaatgacaggtgagcacattgaacaaggtgactcctaagacaaggctgtatgtagccaacatcttgagagcaatctgaagttggagattttactacagccaaggagaaaacggagaaaaatacttgagaaatgtgttagctgtgttgttattcttaataaacggtaacgctggtcaacsacctgaacactgcagtgggcccaggtcaagcttgacaacatgtaaattttgccctctctgcccaatgcctctccagggctcccagccccaacgtctctctgattacagccccagtgagacccaccttcgcttcctctagagattgaatggcccctacatcctccaggccttcctgaagctcaaaaatgtccaaggtcccatccttgttatagtccaggtacca

SEQ ID NO: 148558 - DNA, 499 bp, Homo sapiens
actgggttagttttgattactagctaataacaaggtaatttgatacacttacctatttatcagttgtccaaaatttctcargtcctcctgtctgctgaaaggtagaaggtatatttaatgaatttaaatacaactggcttgaagccaaattaaaaagagaaatatacactcccttcagtagagcagaaggttcttgggtggaggaggctggcatttagagttccagatttagcaaataaaaatataattgtatttagcataaaaacttatcaggtaatatttgggatgtactttatttttataaaaatattatctgaaattaaaacttaactaaggatcctttatctggcaatcctatttgtatttctcctagtcatctcttgctcacattttctgcttccaccaagttcttccttgaggtatttcatctttcatgaatatttttcttactttgctcttggtcaacctaaagggaacagtttctttttcttatttcaat

SEQ ID NO: 148559 - DNA, 499 bp, Homo sapiens
actgggttagttttgattactagctaataacaaggtaatttgatacacttacctatttatcagttgtccaaaatttctcaggtcctcctgtctgctgaaaggtagaaggtatatttaatgaatttaaatacaactggcttgaagccaaattaaaaagagaaatatacactcccttcagtagagcagaaggttcttgggtggaggaggctggcatttagagttccagatttagcaaataaaaatataattgtatttagcataaaaacttatcaggtaatatttgggatgtactttatttttataaaaatattatctgaaattaaaacttaactaargatcctttatctggcaatcctatttgtatttctcctagtcatctcttgctcacattttctgcttccaccaagttcttccttgaggtatttcatctttcatgaatatttttcttactttgctcttggtcaacctaaagggaacagtttctttttcttatttcaat

SEQ ID NO: 148560 - DNA, 620 bp, Homo sapiens
gatgactgggttagttttgattactagctaataacaaggtaatttgatacacttacctatttatcagttgtccaaaatttctcaggtcctcctgtctgctgaaaggtagaaggtatatttaatgaatttaaatacaactggcttgaagccaaattaaaaagagaaatatacactcccttcagtagagcagaaggttcttgggtggaggaggctggcatttagagttccagatttagcaaataaaaatataattgtatttagcataaaaacttatcaggtaatatttgggatgtactttatttttataaaaatattatctgaaattaaaacttaactaaggatcctttatctggcaatcctatttgyatttctcctagtcatctcttgctcacattttctgcttccaccaagttcttccttgaggtatttcatctttcatgaatatttttcttactttgctcttggtcaacctaaagggaacagtttctttttcttatttcaatgaaataagatgatgatggtttggaggttgatgtcaggtttgtgtgacactgcagcagagcccagagagtaatatgaaatagaatattagctgtccctgttcatcaagatggaccacc

SEQ ID NO: 148561 - DNA, 490 bp, Homo sapiens
aagaaaaagcaaacagaatatgatgtttctttgtctttaatgacagaatttttatgcaatgcrtgatttattaaaggaatttgagctcgttaaatcaggacaagagagaatgaaaattcatatcctgtttataatgaagctttgaaaatgatgccaattcatcaaacagtcacttgatgaatatttattaagaagctactatactccaggaatgctactatgtcggatacattagtgaattaaataaatatacttcctaccctcgtgcagtttgccatctaatgtggggtacaaataacctaccatgtgaacagtctgctgggagacaagagggttaaggaaaattctcccgtaaaaatatcataagacctttgttcttaatgaatatagggttttaataagattcacttatgtgcaaaatgtcaagtgccagacacattctcttttagcttagatcatgggaatataaagtcaacagacacaatagttt

SEQ ID NO: 148562 - DNA, 498 bp, Homo sapiens
ggagtaaattcttcctccacatgaaagccctttaaaagaaccaaagcattccctcaagtcttttcggaatgaacatctctgttcctcacaacagcagtagcagcaaacactgcattcctacgtttcactgtttgctatgacccaatcagtgttctaagccctttagaactattaacttaccyaatccttacaaccactctatgaaatagcccctctgagacacagtgaggctgaacaactaacttgccaaggtcacacagcaaataagcaacggaaccagaattcaaactcaagcaataggctccagggccatgctttagccactgtgtgctagtccatgtccccaaggtgacagacctcagttcccagaccactctccccagtacgcacagtaatatgactgggcattgtccgactgtgcagggcatggaatgtcaaatcacttcttctgggtacttacttctctaatgtggctactcgaaaatttcaaattacaga

SEQ ID NO: 148563 - DNA, 525 bp, Homo sapiens
gtaaattcttcctccacatgaaagccctttaaaagaaccaaagcattccctcaagtcttttcggaatgaacatctctgttcctcacaacagcagtagcagcaaacactgcattcctacgtttcactgtttgctatgacccaatcagtgttctaagccctttagaactattaacttacctaatccttacaaccactctatgaaatagcccctctgagacacagtgaggctgaacaactaacttgccaaggtcacacagcaaataagcaayggaaccagaattcaaactcaagcaataggctccagggccatgctttagccactgtgtgctagtccatgtccccaaggtgacagacctcagttcccagaccactctccccagtacgcacagtaatatgactgggcattgtccgactgtgcagggcatggaatgtcaaatcacttcttctgggtacttacttctctaatgtggctactcgaaaatttcaaattacagatgtggctcacagtatatttctattggacaa

SEQ ID NO: 148564 - DNA, 525 bp, Homo sapiens
gtaaattcttcctccacatgaaagccctttaaaagaaccaaagcattccctcaagtcttttcggaatgaacatctctgttcctcacaacagcagtagcagcaaacactgcattcctacgtttcactgtttgctatgacccaatcagtgttctaagccctttagaactattaacttacctaatccttacaaccactctatgaaatagcccctctgagacacagtgaggctgaacaactaacttgccaaggtcacacagcaaataagcaacggaaccagaattcaaactcaagcaataggctccagggccatgctttagccactgtgtgctagtccatgtccccaaggtgacagacctcagttcccagaccactctccccartacgcacagtaatatgactgggcattgtccgactgtgcagggcatggaatgtcaaatcacttcttctgggtacttacttctctaatgtggctactcgaaaatttcaaattacagatgtggctcacagtatatttctattggacaa

SEQ ID NO: 148565 - DNA, 466 bp, Homo sapiens
tatggtcatctttttatatttttcacacaaattttttttctggcaaggatgcagggatgttcctgtgagacatattaataatcaacctgagaaatgagataatgyggacccaaaataaggctctagagaaatgggaatggagaacagctggcagttgtgatacatatgagagatagtacagacagtttgggagacttcatacaaaggtcttcaacattttttcacttatgccttccacaagcaatgttgaaatacttttatctgtctttctatgttattacattgattcgtatatttttatgtttaattcataaaaaaagatagaatagcatttttaaaggacattcaaaaaaactgttcattactgtaaaatgtatacagtagaatctaaattccatagcaaattgattccaacaattactcactttaaatgcattaaatactgttctttaacagttgtaaattt

SEQ ID NO: 148566 - DNA, 466 bp, Homo sapiens
tatggtcatctttttatatttttcacacaaattttttttctggcaaggatgcagggatgttcctgtgagacatattaataatcaacctgagaaatgagataatgtggacccaaaataaggctctagagaaatgggaatggagaacagctggcagttgtgatacatatgagagatagtacagacagtttgggagacttcatacaaaggtcttcaacattttttcacttatgccttccacaagcaatgttgaaatacttttatctgtctttctatgttattacattgattcrtatatttttatgtttaattcataaaaaaagatagaatagcatttttaaaggacattcaaaaaaactgttcattactgtaaaatgtatacagtagaatctaaattccatagcaaattgattccaacaattactcactttaaatgcattaaatactgttctttaacagttgtaaattt

SEQ ID NO: 148567 - DNA, 635 bp, Homo sapiens
gaatatgttttaactacttaacatttgtttagtataattttggttaaattcatataggacaaaatgacagccatgcaatcatcaaaataatgtaagtaatatgctgttgtaaataaaagtaatacattttagatttgagtaaattttcttctgttttgttctaagaagagttgcttctactcaagttttagggagaaagattgactaattcatcccctgctataaccctttaatagcaaatgatcatagaggatcagatgaaagaagtagcttcacggaacaaccactggagtgggacaagagtaaaagagaacattcaaaagccattgcaagctgaaagtctccagtggattggctcctgggaaattcaccgccttggggcagaaggaagaataggaaaatttactatttgatagcttttcttcctagtgtaagcaggaagctgtttaaagctaaataaccatggagacagaggagtgtaatttataagagtaaaattgtaattagctacagaaacttgaaaactaacttctgtgtacwtttgaattggttgtgttttttattgtcatctcccttaaaaatttcacataaatgatggaatgtaattgaagaatgctatttgaacagaataaatg

SEQ ID NO: 148568 - DNA, 581 bp, Homo sapiens
gcttaattcctatcctctttgaatatttggttttgcttttatatactatgttgttgggttctatttggaatagatgtgtcattgttttgtttattttctctctcatttttttttcccttaaatttatttgctgttgcttctctttgattaaaaaaacacaaaaatcccctcaggacctgatatataatatcaatwaaaagacaattgtttcttttggaaaaagtggtaacaaattctgaaaatctcacatcgttctttgccctccatgcccttaaagcaatccccatggcatctcaattaaatcctagtctctgagtttccttttagctttaaaatacctacacaaacgtcaaataaagtcttttgacttctcaataaaatttatttttttctttttttactatcataaaatacacattttttctcaatcttagtaaacttaaaaaaatgcatttgttatccaaattgttaaaacaaaaaatatctgaaactacttactgatgttctgaatgcatctctgtttgtgttaataatgcctaactccctggtaatcaatcacaaactatatgactccagaataa

SEQ ID NO: 148569 - DNA, 478 bp, Homo sapiens
tatactattatatacagtattatatttaaataaacacatattcatatgaaaatatatgtyatattatatctaatgaggtgtgtgtgtgtgtgtgtgtgtgtgtgtgtgtgtgtgtgtgtaaattatgcatacatgatttcctagaaggaactggcttatgtgattatggagacagagaagttccatgatctgcaatggacaagctgcagacccaggagagtatatgatatatttccagtccaagtccaaaggcctgtgaaccatgggcggtaatggtgtaagtttctagtccaagtttgagactgaagacaaaagaagatcaatatccaagattgaagatggtcaggcagggaaaaataattctttcttactcagccttttattctattcaggtcttccactgattggatgaggtccacctacactggggaggtcaatctgctttgcttaatctactgattcaaatgttaatctcata

SEQ ID NO: 148570 - DNA, 478 bp, Homo sapiens
tatactattatatacagtattatatttaaataaacacatattcatatgaaaatatatgttatattatatctaatgaggtgtgtgtgtgtgtgtgtgtgtgtgtgtgtgtgtgtgtgtgtaaattatgcatacatgatttcctagaaggaactggcttatgtgattatggagacagagaagttccatgatctgcaatggacaagctgcagacccaggagagtatatgatayatttccagtccaagtccaaaggcctgtgaaccatgggcggtaatggtgtaagtttctagtccaagtttgagactgaagacaaaagaagatcaatatccaagattgaagatggtcaggcagggaaaaataattctttcttactcagccttttattctattcaggtcttccactgattggatgaggtccacctacactggggaggtcaatctgctttgcttaatctactgattcaaatgttaatctcata

SEQ ID NO: 148571 - DNA, 479 bp, Homo sapiens
acaattatactattatatacagtattatatttaaataaacacatattcatatgaaaatatatgttatattatatctaatgaggtgtgtgtgtgtgtgtgtgtgtgtgtgtgtgtgtgtgtgtgtaaattatgcatacatgatttcctagaaggaactggcttatgtgattatggagacagagaagttccatgatctgcaatggacaagctgcagacccaggagagtatatgatatatttccagtccaagtccaaaggcctgtgaaccatgggcrgtaatggtgtaagtttctagtccaagtttgagactgaagacaaaagaagatcaatatccaagattgaagatggtcaggcagggaaaaataattctttcttactcagccttttattctattcaggtcttccactgattggatgaggtccacctacactggggaggtcaatctgctttgcttaatctactgattcaaatgttaatct

SEQ ID NO: 148572 - DNA, 478 bp, Homo sapiens
tatactattatatacagtattatatttaaataaacacatattcatatgaaaatatatgttatattatatctaatgaggtgtgtgtgtgtgtgtgtgtgtgtgtgtgtgtgtgtgtgtgtaaattatgcatacatgatttcctagaaggaactggcttatgtgattatggagacagagaagttccatgatctgcaatggacaagctgcagacccaggagagtatatgatatatttccagtccaagtccaaaggcctgtgaaccatgggcggtaatggtgtaagtttctagtccaagtttgagactgaagacaaaagaagatcaatatccaagattgaagatggtcagscagggaaaaataattctttcttactcagccttttattctattcaggtcttccactgattggatgaggtccacctacactggggaggtcaatctgctttgcttaatctactgattcaaatgttaatctcata

SEQ ID NO: 148573 - DNA, 522 bp, Homo sapiens
aaatgattaaatatatgtaaaatacttctgatgaaagaacagtactgccttatttctagaaaataatcttctgttgtgttgttacttattatatttgtgtaacttcattattcctataacttcaaattccagttacaacaaaataaccattgttgccttgctttacaaaatgctgtttggtatacataaccgttcatttgtctttctggttttctttctctagattttatctttctgggatttgaataaacacrtaaaagttttaaaaattaaaaatatatactaaacgataagataaaaaggatcaattgatacaattgagaaggtccaattcctcacagatatgagtaaataaaacaactatcaaagaacaacagcaacaaaggagaattgcttcaaagtaaaaacttaaatcatagatggaaagggccactgtgcaccaattacaatgaaggaatatcattcagtactgcacattcttgtaacatgtaatattataattgatgaaataatcatcaaaaa

SEQ ID NO: 148574 - DNA, 496 bp, Homo sapiens
agatagatagacagatagacagacaggacttaatttgagatttargtgacatacgtatgggagccaagaagccccacaatgtactgtgtgcaagctgcatgaccaggaaagtctgtggtataattcattctgagtctgaaagcctgaagactgaggatgctgaccactggctgaatgaaatagacatcccagctcaataagatacagtggatttgacctttttccattgttttgttctatccaggctcttgaggggttggatgattcctgctcccattggtggaagtggatcttctttattcaggctactgctaatctcttttaccctcgtagaaaaactcagaaaagatgtttttctagctatcatataagtttattttaggcttaggggtacatgtgcaggtttgctatgtaggtaaactgcagtttatgggggtttaacgtatagattattttattatcaaggtaataagcatagtacccaacagtcattttt

SEQ ID NO: 148575 - DNA, 496 bp, Homo sapiens
agatagatagacagatagacagacaggacttaatttgagatttaggtgacatacgtatgggagccaagaagccccacaatgtactgtgtgcaagctgcatgaccaggaaagtctgtggtataattcattctgagtctgaaagcctgaagactgaggatgctgaccactggctgaatgaaatagacatcccagctcaataagatacagtggatttgacctttttccattgttttgttctatccaggctcttgaggggttggatgattcctgctcccattggtggaagtggatcttctttattcaggctactgctaatctcttttaccctcgtagaaaaactcagaaaagatgtttttctagctatcatataagtttattttargcttaggggtacatgtgcaggtttgctatgtaggtaaactgcagtttatgggggtttaacgtatagattattttattatcaaggtaataagcatagtacccaacagtcattttt

SEQ ID NO: 148576 - DNA, 586 bp, Homo sapiens
ttcaaataaaaatacaattgaatttttcaaataaaatagagggaacgactggaggtattttcatgtagtatattctatttagtttgttattttcctttaaatgctattatgggaaaatcaatactactctattcttctactatgccacatttttctgtatcaacatagatatatcccagaattgtgtttcccagtatctgtttttctgtatggttctgagttatatttggccaaaggaaaacttacagaagaatgaagtaatagccattattcttggaatgttatcacagtcagatgtggtgacagaatcacaaggtagctggaatatcactctgtttcatgactttccaatgattctttctctgactgttgagtctgttgtccaaaaatattctgggatccttagatgagaagcagtagatacatagacataayagcttcccataggcctttcaacaagctctggtttgtgaattcactgcagggacaagaggtaataatgggtgcctcatatttccctgagagtcttatctgtctacttgtaccagtgcttcagtcaaattgttggtaactctgatcctggtaa

SEQ ID NO: 148577 - DNA, 535 bp, Homo sapiens
gcctttgtatttattgcatgatgaaaatttgtttactacaaaaaaatcagatacattgccccattcaaggtacagggaaaaaaatttctatatgcccataaaagtgtcacactctgaggatatagtctccctcttagttctcctttgacaacaaattacaacattggtaattgaaatgctatataattttttcagtaaaatagcttattacttatttccctgtatagtttatttacattgcacaaagcttaatacctgtcagaatatatatatactagtacatttatgtagttgaaatattttttaaaactacttgatgactcttcttgctgtgaaagaatttttaatgttctgtatctttaaatcccaagtctcccaagttaattaaacaattcattttcagataatcttcacaactattaaaaggcatttacatgtgtatttttacatgtgcaaaaaatgaataaatccagagatgactgtttttaaacytaaatatttgatcaaataatatatatgaataggcataaattat

SEQ ID NO: 148578 - DNA, 600 bp, Homo sapiens
ctaatatgtacttgcttattaatcatccaccgacacacaattacataattattataaataaatcttattgttccagtggctaagcaagaatgaaagaagtaagacaaacaaatataaaactctaaaggagacagtaacagatcaatttttagtcatttgcctttcctaagtttatgaaaaagataygtgatgtgtatatacatataaacacatttgtataatttaattctttcaataggagttgaaagaatgcagttgctgcctacagaggagaatttacaaaatgatcagaaaaagtatcctgaaaaatgctgtttatgtctctaagaattgtttatccttccaatattggcagaacacctacagcttagagactgcttttaataattttgtacacttataggctgtcaaaaaaagaggaaaaatcaatctcttcaaaaagttttataaaatggtcactttgctttttgaaatagaatacaaaacaacaacaaaaagtaggccttactttctagccagggcaatcaatggcaataaatgaagcaaaacacaaaaatgtgataattctcattctgagaatagagagaagtttgatgaagt

SEQ ID NO: 148579 - DNA, 537 bp, Homo sapiens
tcttgtttaaaataaacttactagtatataaaatgcataattattctagatagtaaaaaataacacaggctaccatagaaaagaagtgataaaaattggggaatcaataaattactcaaaatgaaaattgagagaaaaataaaaagtttgataaatagccaaaagcattcttatacattttgcagcttgtcttcaaggacatgtataacatattgcctgattttctcatcactaaaaataaaaattttactactatggtaataagcttgtcataaaatagaatgaaaatctactattctgtactttctaaatgagaatgttcctttattaaaatttgctcttgaaattttgaggytacataaaaattaattttgagttttgaaccaccatgttttgtatgaattatgtcttattaaaattttctaaattgctaaatttaaacatatataaatattgtatgaatttttgcagtagcaagtcttcaaattacatatttagagtttcaagagcatcttttttcagatgtatattagtttc

SEQ ID NO: 148580 - DNA, 607 bp, Homo sapiens
caagcttttatacatgtctaagattagttttgattgaaatattataacagttatgtttcaaatgatataatataaatcaaygtggccagagtgacctaattttattttttgaacaaacacatgtcacatgtctactcctgaactaacaactgtggttatggagtatttgtgctctctgacacatgccagggtcacatacagcaaacttggagctacaggtacagtaccatctggaatatatgaactcaaagtgggcaagatatagttcccaaaagatatttcagacactcctactaggaaatggaatcactgttagaaaagcaaaatcagtatatgatcaccttagtaagatattgaggtagttaaacaaaacctattagtttaaatttacaagtatattaatatgtattataaattttaatggaattcaaaattggtaaagtgtgaagttaatatatttattacatgtcaaatttaaatatatgcttatgataggattcattattctttgctaaatgttcaattttccttcctgtcttgctcttttttgaagcaagattacatagacctgccctggagacttcagggttgacttgtttggccaatg

SEQ ID NO: 148581 - DNA, 607 bp, Homo sapiens
caagcttttatacatgtctaagattagttttgattgaaatattataacagttatgtttcaaatgatataatataaatcaacgtggccagagtgacctaattttattttttgaacaaacacatgtcacatgtctactcctgaactaacaactgtggttatggagtatttgtgctctctgacacatgccagggtcacatacagcaaacttggagctacaggtacagtaccatctggaatrtatgaactcaaagtgggcaagatatagttcccaaaagatatttcagacactcctactaggaaatggaatcactgttagaaaagcaaaatcagtatatgatcaccttagtaagatattgaggtagttaaacaaaacctattagtttaaatttacaagtatattaatatgtattataaattttaatggaattcaaaattggtaaagtgtgaagttaatatatttattacatgtcaaatttaaatatatgcttatgataggattcattattctttgctaaatgttcaattttccttcctgtcttgctcttttttgaagcaagattacatagacctgccctggagacttcagggttgacttgtttggccaatg

SEQ ID NO: 148582 - DNA, 464 bp, Homo sapiens
agtcgggaatgtcaagattttaacaccttctccaagtcaggatcaggaaaggctgtcccagcactgacctatattccctatgcttcctcccacaaaacagcttagggtgactgccaacttgtgggcagagaccctcacttccaatccccacaaggggctgggcagtggggaggatgaggccccctcctctgactgtctcctccaagaccctgttttctgaggaaggtcactctgggaactgttggcctctgcagatgagggcctggaccatgtggaaagacgatgtgaaggtcacacctggcaggcaccagcactggagggcaaacctcacctttaaaactcacagtttttttwaaaatttatttctatttttaatttatatgagtacatggtaggtgtatatatttatggggtacatgagatagtttgacacaggcatacaatgtgtgataatcacatcaggg

SEQ ID NO: 148583 - DNA, 506 bp, Homo sapiens
tctaatttttcttcagaaaccagtactcaaaatgtctggtttggaggtcagttacactgctgtctttgtataatcagccattaaaaaatattttggggacatttctcagaagtctcatccccatatttttgttcttaacacatctcaccacaaactctaccacacctatggtttgcaaactttgggaaatgtcagtatatgccattatcatggttattagtactattatttgttaaaagcactttgaaggcaatttatgtgacttatatatagttagtattttaatctggacattctccagttatatgcaaagattaaaactcggcagcttcattttatagaattggcatcttttatatggctatggrgactgcttggtgtctataaattattataaattattatgtatatttgttggactgaaatcaaacttaaaatcttccacatttcaagtgtttttattctgagcagtacgtacaaaaaataatgccatagttgtgtctaat

SEQ ID NO: 148584 - DNA, 506 bp, Homo sapiens
tctaatttttcttcagaaaccagtactcaaaatgtctggtttggaggtcagttacactgctgtctttgtataatcagccattaaaaaatattttggggacatttctcagaagtctcatccccatatttttgttcttaacacatctcaccacaaactctaccacacctatggtttgcaaactttgggaaatgtcagtatatgccattatcatggttattagtactattatttgttaaaagcactttgaaggcaatttatgtgacttatatatagttagtattttaatctggacattctccagttatatgcaaagattaaaactcggcagcttcattttatagaattggcatcttttatatggctatggagactgcttggtgtctataaattattataaattattatgtatatttgttggactgaaatcaaacttaaaatcttccacatttcaagtgyttttattctgagcagtacgtacaaaaaataatgccatagttgtgtctaat

SEQ ID NO: 148585 - DNA, 554 bp, Homo sapiens
ttggtaaaggaagaaacataatatgaaaggagggaaataatgaggtaaaagatgcagagactgctttccagacaaagtaagaatgaacttcactttggaataacaaagcagtgcttgcttggcaaggtgagtcttagaatctgactaacatcaacagggcagagtctcaggtaattaacaaaaccaggaaggaacagggagcagcaatgctaaaacacaagaaaccaggttactttgtcctacttcatagttgttattttcctaatcattggagataagctatgattaacagaaaaactacccatgtaaaatattgtcacccaacttttaagaaaaacaagaaagaagatacaaaacttagcaaacagaataagtaatttcagagaatcagaattaagacaagaaacaaatgtaattacagtaagtgtaattcatatcttcagagacatgcaagargaggttgcattttagaaaatactgataatagctcttggattaaaaactcaacagatgttctgaagagaacaatagacatagttaaatatagatctagc

SEQ ID NO: 148586 - DNA, 257 bp, Homo sapiens
aaactacctgtcattagagctaatttcttagcaaattattcataaaagtttataactttgtgaggcattacagacaccaaaagtaatgatttggcatttccrtggccctatttgtctaaagaactatcttttacactttactgttttttaataggcaatacagtgctcaaaaagtattttataccaagtccagtaggttgataacattgagtataactgagcattgctttgtgtctaccctcaggcaaatctggaga

SEQ ID NO: 148587 - DNA, 495 bp, Homo sapiens
ttgtgatctaaatatctcctctgtgtaagtgagatgaccgcacatcttactcagaatcatcatctattatccttgttcaaagcatatctgatgtgggaggaaaggacccagggattctcacagtgctatctgaccttaccttgctccacctgtacctcacaataatttttatccataaaattattagttaagtttgcataagatctccgatgcatgtgagtctsatttgataatctaatactttgtgtatttttaaccacaataatgtgtttttatttttcaatttaatatgtattggaaatcttagtgattcaacacatgttaatctttatcatttctttaactcttagatatatcatatttacttagccatttctctattggtggacatttaatctatttaatgggcttttgactatttttaaaaagctgtaattgacatcctattgcatttttttgcacatatgttagtatttcgtaagacagatgatgagt

SEQ ID NO: 148588 - DNA, 495 bp, Homo sapiens
ttgtgatctaaatatctcctctgtgtaagtgagatgaccgcacatcttactcagaatcatcatctattatccttgttcaaagcatatctgatgtgggaggaaaggacccagggattctcacagtgctatctgaccttaccttgctccacctgtacctcacaataatttttatccataaaattattagttaagtttgcataagatctccgatgcatgtgagtctcatttgataatctaatactttgtgtatttttaaccacaataatgtgtttttatttttcaatttaatatgtattggaaatcttagtgattcaacacatgttaatctttatcatttctttaactcttagatatatcatatttacttagccatttctctattggtggacatttaatctatttaatgggcttttgactatttttaaaaagctgtaattgacatcctattgcattttwttgcacatatgttagtatttcgtaagacagatgatgagt

SEQ ID NO: 148589 - DNA, 287 bp, Homo sapiens
tgttctattataaagacacacgcacacatatgttcactgcagcactattcacattaacaaagacatggaatagacctaaatggccatcaatagtaaagactggataartaaaatgttgaacatatacaccagggaataagatgtagccataaaaaggaatgagatcatgtgttctgaaggaatatggatggcattgaaggccattatccttagcaaatgaatgtaggaatgaaaaaacaaatgccacattctctcacttgtaagtgcaagctaaatgatgagaacac

SEQ ID NO: 148590 - DNA, 287 bp, Homo sapiens
tgttctattataaagacacacgcacacatatgttcactgcagcactattcacattaacaaagacatggaatagacctaaatggccatcaatagtaaagactggataagtaaaatgttgaacatatacaccagggaataagatgtagccataaaaaggaatgagatcatgtgttctgaaggaatatggatggmattgaaggccattatccttagcaaatgaatgtaggaatgaaaaaacaaatgccacattctctcacttgtaagtgcaagctaaatgatgagaacac

SEQ ID NO: 148591 - DNA, 287 bp, Homo sapiens
tgttctattataaagacacacgcacacatatgttcactgcagcactattcacattaacaaagacatggaatagacctaaatggccatcaatagtaaagactggataagtaaaatgttgaacatatacaccagggaataagatgtagccataaaaaggaatgagatcatgtgttctgaaggaatatggatggcattgaaggccattatccttagcaaatgaatgtaggaaygaaaaaacaaatgccacattctctcacttgtaagtgcaagctaaatgatgagaacac

SEQ ID NO: 148592 - DNA, 324 bp, Homo sapiens
tggttgttaattagcacaagcacctataatagtgcctgatatatttagtactcaaaatatatgttaaattaaaaacaaatgtataaattaatggttgaatatcataataattactcaaaatgtaacataattccaaaggagaaaacttttttctaaaaggctctctcaattgctctttctgatttactattttccccaaatctgtagttgcttcattattgtttggaattttgcattagttgtcaataaacaaaaaatatggatcatakcacagctctttcattgctttcatttcttgagatatatgaatgtatgtgatatctt

SEQ ID NO: 148593 - DNA, 587 bp, Homo sapiens
aagacaggtcctcaaataaagttgttttattcaatgttgttttgctataatgtagatgagaataaatattgattcctggacagggctaccatctgtgtagggtctgcatgttctccccatgcctgcatgggttttctccaggaactcctgcttcctctcacatccccaagatgtgcatgtctggttaattggcatttccccactgtgtgtcccaatgtgagtgaatgtggttgtgccctgccatggaatagcatmctgtgcagggtttattcctgcattgcatgctgagtaagaataggttcttgccacccgagactctgaactggaataattgggtaaataatcatcttacttgtttttattaatctttttaaaaatgtatgtatacctcacacttatttcagtgttgaatgttataagtgttgttttagtctccatttagaagtacagtgataatattgtgaccagaaatatgcagtaggaacttatatcttgttgtatcaattggcctatggtaaaatttgtttcattgttcaccattttgctgatagttgcagtttccaataatctactgatattaaatgtgg

SEQ ID NO: 148594 - DNA, 478 bp, Homo sapiens
tgtgtttgtatgtatgtatgtatgtatgtatgtatttattttgagatatagtcttgcctgtcacccaggctggtatgcagtggcacgatctcggctcactgcaacctccgcctccygggttcagacaattctcctgcctcaacctcccgagtagttggaactgcaggcgaccgccaccacacctagctaatttttttctttttagtagagacgaggtttcaccatgttggccaggctggtcttgaactcctggcctcgtgatccgcctgcctcagcctcccaaagtgctgggattaaaggtgtgagccaccgtgcccagcctcacagatgtcttaaaattcacctgataaagttaggagcctcaagaaaaattagcagaggaaaataataggtagttactatttagggtaaactaaactgttctaaggaatagaaaataaaaattccatgtcttcaaaaataattcttccctctcaat

SEQ ID NO: 148595 - DNA, 478 bp, Homo sapiens
tgtgtttgtatgtatgtatgtatgtatgtatgtatttattttgagatatagtcttgcctgtcacccaggctggtatgcagtggcacgatctcggctcactgcaacctccgcctcctgggttcagacaattctcctgcctcaacctcccgagtagttggaactgcaggcgaccgccaccacacytagctaatttttttctttttagtagagacgaggtttcaccatgttggccaggctggtcttgaactcctggcctcgtgatccgcctgcctcagcctcccaaagtgctgggattaaaggtgtgagccaccgtgcccagcctcacagatgtcttaaaattcacctgataaagttaggagcctcaagaaaaattagcagaggaaaataataggtagttactatttagggtaaactaaactgttctaaggaatagaaaataaaaattccatgtcttcaaaaataattcttccctctcaat

SEQ ID NO: 148596 - DNA, 478 bp, Homo sapiens
tgtgtttgtatgtatgtatgtatgtatgtatgtatttattttgagatatagtcttgcctgtcacccaggctggtatgcagtggcacgatctcggctcactgcaacctccgcctcctgggttcagacaattctcctgcctcaacctcccgagtagttggaactgcaggcgaccgccaccacacctagctaatttttttctttttagtagagacgaggtttcaccatgttggccaggctggtcttgaactcctggcctcgtgatccgcctgcctcagcctcccaaagtgctgggattamaggtgtgagccaccgtgcccagcctcacagatgtcttaaaattcacctgataaagttaggagcctcaagaaaaattagcagaggaaaataataggtagttactatttagggtaaactaaactgttctaaggaatagaaaataaaaattccatgtcttcaaaaataattcttccctctcaat

SEQ ID NO: 148597 - DNA, 422 bp, Homo sapiens
tagtggaacctcacgggtgcgttcatacaccaaggcctcatttgctatttctgctccctgaaaatatgttctctcaattatgctcttggctcattctctcataacyattcattgtattcagatgataccacccagtgaggctttcagtaaccatcttgttcagtatccagcacctcttgtgcccagaactctctattccccttctttgccacattttttagaatagtacttaaaccctctggcatacaacacatgatactttgtggtattaattactgtttttctcccaacactggaacaacagctctgtgaagccaagacattctgaatgttattttcactattttttccccagtccctacaaatgggcctagaatatacatagtagatgctcaataatttgttggggaacaaatgaaagt

SEQ ID NO: 148598 - DNA, 422 bp, Homo sapiens
tagtggaacctcacgggtgcgttcatacaccaaggcctcatttgctatttctgctccctgaaaatatgttctctcaattatgctcttggctcattctctcataactattcattgtattcagatgataccacccagtgaggctttcagtaaccatcttgttcagtatccagcacctcttgtgcccagaactctctattccccttctttgccacattttttagaatagwacttaaaccctctggcatacaacacatgatactttgtggtattaattactgtttttctcccaacactggaacaacagctctgtgaagccaagacattctgaatgttattttcactattttttccccagtccctacaaatgggcctagaatatacatagtagatgctcaataatttgttggggaacaaatgaaagt

SEQ ID NO: 148599 - DNA, 401 bp, Homo sapiens
tggatgataaactaaaattttgaaatatttagaagcattgttatgaactcattaaaattatcagaatcaattcatataaaatgatatttaatattttcttatacataaattagtgacattaattgttttatamtttaatttgattatgaaaactttctatgtgtttttgaatttgtgtaaccttagacagattgctaagcccatttcatcatgcattaatagaataggattagataatctctaagggtccttttggctctaagattatatgattgtaattaatggcactgcagatcttgtagagggacattaaaatggacccatacctgaagttacttttcaattgaattagtacttagggagttgagacagtagaaacaaggaaggcaaaacagtctttc

SEQ ID NO: 148600 - DNA, 194 bp, Homo sapiens
tgacagtgacccatgagtagaatcataagcaacaccaaggacatgtgaaatgagcaacttatgawtgaattgatataggctcctgacatttagaaattgttttgttatcactcagcttagtttttctgatgtaatttaattgctctaaggaaacagtatctgctgtgatttgttactgtctcttactgcccagt

SEQ ID NO: 148601 - DNA, 537 bp, Homo sapiens
  misc_feature (1)...(537): n = A,T,C or G
ccattctggttttcttatgtccagtctcggatcctcttctactctaaatccattctccaggatcctcctcacttgagtgatctttatataatccgaaagtagttgaacttctttgaatcatccttgatcaagccctacctacaatagactcatctccgtacacggtcatatctcctcctcaaactgatcctactctgaaagccttgctgaacaatatagcatttacggaagattttgtggggagaggaggagacggttacatcccaccaagctgggcaaatcttccgaaaaatctcctgtaaacaccaaacttgtccccacattcctcttttcacctgtggcwggtggcgcaaattccctttaacatgtctagcgcaaataaaagctaacttaacagaaaccagagctcccacctcctcactcctcccactcaaccctacagaaaataatacgggctgcctttacgctctataaatcacattacacccactgcccacaagtagtgaaagctgcctntatagactaaatggacataaa

SEQ ID NO: 148602 - DNA, 574 bp, Homo sapiens
cattctaacatgacactattttgtttctctgagaaattatgtggacatctctaaaaatgttgcttttgaaggtggtaccacacaggaaatgctgataacacaatttcttaacacacatcaagtacataggttacacaaaagcagattctattttagcttttttgagaggctgtttaaaagttaagttccccttaatgaaacagaaaggaaaagggctttgctttgcttttctcagcatcccaggttttccctctttgtggcttatgatgttttccttctttcttgtgttatctgtgtttcctgctcatytcaacttgatgacatgttgctgagacaactaaatcgctaaccttcttaacttggcttttgttatgtgcttgcgtgtgtttaggagggatattttcatttctcttagaaggctctgtgtctgctctgggaggctattagacctggaggtggagaacaagggaggcttcttaagtgcttcctattcaaatcgcctttttactccctttaaacccaccatttgcatgtggcagagcactggtggaagcttccctgcctcctatggtca

SEQ ID NO: 148603 - DNA, 575 bp, Homo sapiens
ggggaggggaatttcatttgtatcccaaacacaggtaaatattatagggataagctacatgtaatagtgatgggaacacagtttttggaatgacttgggttcaaatcctgatgcttcacttaccagttaagtaagcttgagtggactcaagttgaygacttaagcttctggcttagtgttatcacctgtacaatggtgatgataacagataaatggagagcatgatatttaatgtacataaagagtaggacacaacacctggcacagagtgacattcaatcaatagtagctattttttagttcattatttttttcatccttaataagaaccaatgccatcagtaggataaattaccttgtgaaacaaacgtagtgtttagttgtcaccacatccccatctgtgctgtcatcctgtctttcagtgtctactccctcacccagaccctagccctggccacttgttttggccaatcccaatgtcaagaactgcccctcacactgttctccatagcagtatatatttacatgtcattctctccaacagtcctgctccctgcttctctaataaggaatat

SEQ ID NO: 148604 - DNA, 395 bp, Homo sapiens
cctaaacttttcctcctaaattttaatcatttctcttctattttccatctcatctttctgttctacttcaagacatagcctctcaacttaaaaaaaaaaacttttaaccttgaaaatgaggttttttttttgtcatcatctttttaatttccaaaggtccttttycttattttaaaaatgggatctttttatcaattcgtgcatatacagcattttctcttatgtctataatgatactactaataattttaaaagttttattcttccacatggaatatgttttattcaaataacttttttagctcctgtttttcaattacagaacttcttcaaatgcctggggatcttgggttgtcctctcatagttgagtaggttcctaagcttggttgcttct

SEQ ID NO: 148605 - DNA, 373 bp, Homo sapiens
acaccagcaatatttaagagccaaaattttgcagttacaaagaagtgtatgcattaatgtgcttgatggggcaatgggaggaagctgtgggaaggtttaaaagggcatctgttctctctcttagcaaagaccaaacagagatatgcacacacttcagcccaggaatcaagattagacacctcactgagagggaggaacgcggacttgtaaagtccatctgcatggatgcaatcaagtgtttctgaaagccagctccctgcaaggcactatgctcagggctgtgaatccagagatgagcaaggctsagagcccctgccttcatagaacttagagtggaagtcgtgagaaagaagtgaataaattatcatggtgc

SEQ ID NO: 148606 - DNA, 359 bp, Homo sapiens
atgcatctgtatagtgtgaggctggagttaagaaacagctggactgaacccaggagtggacagtgccctgagcaaggggctggctgagcagggatcatgcgggacacattggtaaaaacatttctcttggcctttggggaatactagggcatgggaacctgacggaaggacagacttcatggagtcgcccaggaatggggcttgaactcttgagatggaagttgttggtgcattgcagagctaactgstttctgcttttcccatccagattctgagaaatagacctaggagttgagatgcaatattgggggtcctatcagcaaagaaggagggtgaacacaactagcaccagaatgaga

SEQ ID NO: 148607 - DNA, 441 bp, Homo sapiens
atatcttgcatctttgcatgtcttgccagcagaggcactggctgcctttgttctggactatcttttcaagggtgtttgtatagctaacagtttggaagacagtgcctccctcaaacaaaattcargcaagcttactgtccattataaaatatctgggttccctaaactaggggtccctctctggtgactcactccaatatgtgtacatgcatcatctggcccactttgccgtgtcctgtgggaagtggggctcaggaaaatgatgcaaatgagaatacactgactgctgctactgaattctcttatcttctaccaggatccatgaaattatggcagcctaactcctcacttgttagctcacaagtaggataaaggcacacttttaaaccaggctcagactcatcacagttcatgccacttattcatgattttatccattta

SEQ ID NO: 148608 - DNA, 441 bp, Homo sapiens
atatcttgcatctttgcatgtcttgccagcagaggcactggctgcctttgttctggactatcttttcaagggtgtttgtatagctaacagtttggaagacagtgcctccctcaaacaaaattcaggcaagcttactgtccattataaaatatctgggttccctaaactaggggtccctctctggtgactcactccaatatgtgtacatgcatcatctggcccactttgccgtgtcctgtgggaagtggggctcargaaaatgatgcaaatgagaatacactgactgctgctactgaattctcttatcttctaccaggatccatgaaattatggcagcctaactcctcacttgttagctcacaagtaggataaaggcacacttttaaaccaggctcagactcatcacagttcatgccacttattcatgattttatccattta

SEQ ID NO: 148609 - DNA, 353 bp, Homo sapiens
gagacagcacaggaccccaggcagagtatctcatacccttggacacagtgtgtaggactggattcttatagggattaatttatgattaggagctgtaattatcatgtaagcytgaggctgctagagggctaactgtccgacccctgggagaggctcttacacagaatgctgtcagcacagtagaaaacaatggagagctagagagagagagaaagagagagagagagagagctgtcccttatgatatctttggaccaatcaggattcaactgtgtttgatgctgacccaccccttgacttttcagttatgtgagcttaaaaattccatccttgtttgaagtactttggtttct

SEQ ID NO: 148610 - DNA, 353 bp, Homo sapiens
gagacagcacaggaccccaggcagagtatctcatacccttggacacagtgtgtaggactggattcttatagggattaatttatgattaggagctgtaattatcatgtaagcctgaggctgctagagggctaactgtccgacccctgggagaggctcttacacagaatgctgtcagcacagtagaaaacaatggagagctagagagagagagaaagagagagagagagagagctgtccyttatgatatctttggaccaatcaggattcaactgtgtttgatgctgacccaccccttgacttttcagttatgtgagcttaaaaattccatccttgtttgaagtactttggtttct

SEQ ID NO: 148611 - DNA, 353 bp, Homo sapiens
gagacagcacaggaccccaggcagagtatctcatacccttggacacagtgtgtaggactggattcttatagggattaatttatgattaggagctgtaattatcatgtaagcctgaggctgctagagggctaactgtccgacccctgggagaggctcttacacagaatgctgtcagcacagtagaaaacaatggagagctagagagagagagaaagagagagagagagagagctgtcccttatgatatctttggaccaatcaggattcaactgtgtttgatgctgacccaccccttgacttttcagttatgtgagcttaaaaattccatcyttgtttgaagtactttggtttct

SEQ ID NO: 148612 - DNA, 608 bp, Homo sapiens
aaacatagcaatataaaacaaaagccaaaatgtcaggccaccttcataaactgttaatgaaagtataaatttgcacatgatgaaatgtgcaaatacatttcaaatacatttcacatttgccacaatgtggcaaaacacatcaatgatcttaaacatttgacccagcaatttcccttccaaaaatttatcttaagagaatgattagataaataggcaaaggcatttgtgcaaaggatgatcatcacaacgttattcatgacaattttaaaaattgaaatgaagctaaatgtttgaagagagaataggttaaataaatgatggtatctatccattcaaagaacatgtaacaggattaataaggatgatatagacatagatttgctgacatcaaaaatacattcttgactgttgttaagtgagaaagaaggttaccaatatgtataaaaatattatcatatttggtacagatataaccctcttcttctatgtatcaaaatgcctgacaagctattcatctaaaaaataatcatacatgtatacrtattatgtacatataattttttaaaaataaatatacatttatatatccaaatatagaaacttaaatg

SEQ ID NO: 148613 - DNA, 573 bp, Homo sapiens
cattttaaggacttcattgggaagcgtgatgaaagctctgtagcagctaaaccactgggcctcaatagcactctagagaagcctatggtagaggcgggtggttttgagatgggaggcaagaagaatggaattgaggagggagatgatagagagaaacaagaggggtgctagacagagtgaacaaaacctccattgaccacctgggtctgccatttggggatgggggcaacatttttacactttaggcaagattgtgaagcagttgctatttgtagcacaatcggggcaatggggaagactctgtgttcctatactctatctggaacatgtggtggaacccagaatgatacctaatttgcgaattaatttaaatgtaatacttttgrtggtatgcaaatgagattttagtttgttttgcagtgtaaaaagatcaacatttattgaaataatatcattgatttattgtattgcattaaatcaattcgactgtccaggaaaatcttggcagtaggaaggtctttcacctccctccccataagccctcacctccccccagccctcacccccaggcct

SEQ ID NO: 148614 - DNA, 579 bp, Homo sapiens
ttctaccactttagctatattagtcagaatagactaaggtgtgctgcagtaacaaattaactctggaatcttaatagcttaataacatgaaggtttattttacaatatcaacatcagtcatcagagggggttttacttcacgtagtctctcagggatccaagctgacaaagatcacactatcttgtaactgcacaatctgaaatgcaaggtctccaagagctctgcagaaaaggaagagagacagagaaggtacacaggagtttaatggccttgaatcagaagtgacacctgtcactcccactcagggtcacttgttctaaactagatacatggcgcaagycttgcaagaaagcctgagaaatataagagtgcctgggatatgtgctgagcactatttactctgctacactagctataacctataaaaattgtaaaaaatgtaaaaaagtgtattttcctttggtttaagtgtcaagttatcctcgacaaatgaatttgttcttcctcatgttagttctcatcacaattctctgcttcagagtcactcatcatgaaagatctcccacactcctttcagt

SEQ ID NO: 148615 - DNA, 591 bp, Homo sapiens
gaaatattagcttaatgttctaagagtccctaatatgatctatgtcatcaattaaactcaaaaagttttactgggaaaaacagaaacaacctattcagtttctgactttgggytaacattaatcagctaatgcatattatcataggtacccaaactagatctgtagaagcaaggacaattatgagtgccttttttatttgaatcatttattattttattttaaattactattacatattaatttcataaaaactcattattaccattataagtgttattagagtgaaaaggataaatgaactgtgatccttattatgaaatgccaagtatagaatttagatgtatttttggaaataaaagaagcactgatgttattaatgaataacacagacaggtaggaaagttaggccgagaaaaaaacaaaacaaaataaaacagcaaagaagaacaatcaagatactgatccatcgatgagcccattgttctcctgtgctgtagcattacacggacctgattgacacttgagttagaatatatttaattgcgaaaagtactcttatgttctatatttggataaaagtccatatgaaa

SEQ ID NO: 148616 - DNA, 581 bp, Homo sapiens
tctcactatccattcagtctttctcaaagtcagatagaattagtcattacctttttaagaaagtttaatgtttttgctttttgactgttattttttcctaccatatataattttatttcattttttatataaggtgtatggtaaccataagtttcgtrcatacatataagactagttaagaccaaacttagcaatgacaggcactaatgtgttgaaaatagttttgtttaatatgtaataaagattctgtagtttagacatgcagtgtattaatgaaattaacttaaatccatctcaaagcatgtgttctcaagtatggatgaccaagacacattgatctagatgagaaacacttattattcgtaggttctcctttcctagttctacgaaatgttaaatttgtcttctctgtcaccctggagccaaatattattcagacagatcctacaaggatgatgtattagtcatttctcacactgctaataaagacatacccaagactgggtaatgtataaaggaaagatgtttaattgactcacagttcagcatggcctgggaggcctcaggaaacttacagtcat

SEQ ID NO: 148617 - DNA, 660 bp, Homo sapiens
ttcccaagtcatattcttcattttgttgttacctataaatcgtctaaaatttaaattttatgcatccacctcctgggttrcatctttctatctttctaccttattccttccagtacatcaattcactctaaaaatgcttaaaccccacaagttcttgcaaagcattaattctaccaattttttatgtccttcacccatctgacatcctctctacccttcttactcagattaaattctattgccagtcattggaattactcccttgcatacatcctttactcctttcccctctcaccaccatcatctctcaccaccatcatctctcacctggattactgcattagtctcctaacaggttccccagcttctatctttctccatctacagtctattgtcaacatggtagccaaaaggatccttttaaatgtaaatatggacctgtcattcacctattcaatactctcaagtggcttccatctcactcagagaaaaaccaaagtccaagcaatgccttacaaagccagccatgaaccgcacccccttatgtctgatttcccctcctattctcatctgctaactcaatccaggaagttaaactgggcccctcactgttcctctatcccattagacaagctcccacctcagagcctttgcactgac

SEQ ID NO: 148618 - DNA, 529 bp, Homo sapiens
ctagtaaatttttgtaacttaatcatgtttaccagtgaaaatttcctattgtaaatgtacacacattacaggagggagaatcttttagcccatgtaagtcattttttcagaacaaaagcagagcaatgagaacttcagtatctggtcacacatagaatcatcatattaaacacataatttcaggtgtttatagcattttgcaaaacacactrcttaaacaaattatttgaaagtcagttaagtgaatttggggggcatcataaggccaaaagatgatgcaggtccccttatttataaaatcatcatgttctcttttactaatccttcttatattggttccagtaacagcagagaaagctcaactttcttagatgtattcatttattcatttaaaaagcatttcttaagtgtctactatgtagcaggaaccaatagctgctgggaatttgaagattatacataatcccaacctctttagagcggacagaagatataacatggcacagatgatttccgatttgtgtttaac

SEQ ID NO: 148619 - DNA, 572 bp, Homo sapiens
gattcagacttaaagaagatgagtgagtacccaagcgaatatttgggaaaaaattctccctggatgaaccactgaaaacgccaagaggttagagtgcgattggtgggttcagaggccagtgtggctggagtagaacagaagagaaaagcagtgggaaccaacatcagaaagaaaatggtaggccaagacataatgggaatgattggccattatgaggaattggctttgactctgartggcaaagagaaccacagaagtgttaaagcagaagtatgacaagataagacttaggttttaattaatcatcctgccaggtacattgagatattctgtggggtaggaagagtgcaagtgagccacttaggagacgatgaactaacccaggtaagagatattgctggcttaggccagagtggtagcagtggaagtgatgagaagtgtccacttacaggatgtaaggtgaggtagagcaagaagactccctgatagattgaattctgtttttaagaaatagaagattcaaggaggaccttaaaattttggcgtttgtgcaatggaagaatagaattgcc

SEQ ID NO: 148620 - DNA, 478 bp, Homo sapiens
agttattgcctaaagtaagatccagagaaaaagagcaatatcctggcaatgaaatctctaatcttggagcagttactcaattacactgagccttagttttgccttctttaaaatagaacagcttacctgcttccacctacagagaaacatgacaatagatttaacagtgttgtctyactcagcttcctcatatgtaaaattggctttctggataatgtatttaaagccaatagcctggtacttagcatattcattcattcaacaaataatctgttctggctgctacaaatataacagagaacagaacagaaaagccccaggccccactgtggttaccttatagtatgggaagatagataataaacagactaagtcaaatagatagtggcagtgccagcttcatagacatgtaatgtgtgcaattgcataaggtcccaagcccagacacccagtgcttggtttaatgccctgctattgc

SEQ ID NO: 148621 - DNA, 311 bp, Homo sapiens
cacaaaactggcagaacaaagtatatttagcaatatatacatagattataaaaaagcaagcaaatgacacaaatgtcaggatactggttttccttaaagaaaagagaatgtattgtagtcatgggagcttcggggyattgtaaatgatttattgacttaggtggttgatatttgggtgtttgcattgtaatccttaaatgatatacatgttttatgtgataacaacaacagtgacacctcagcgtcttagctctagagcccatgctccattacacccatagtgtgagctaagcagaagtcaggtgattgcc

SEQ ID NO: 148622 - DNA, 366 bp, Homo sapiens
tacatgtcaacttgacagggccatggggtggccagatatttggtaaggcattactctgtgtgtagtctgtgagagtgtttttgaatgaaattaacatctgaatccatagactccgtaaagcagattgtcctccctactgtggatgggtctcatccaatcagttgaagacctgaatagaacaaaaaggctgaccctcccatgagtaagagrgaacatgttctgcttgactgtgtgagctggaacatcaatcttttcctgctttcagactccaacggaaacatcagctcttcttgggtttcaagtttgctggctttcagaatggaacttataccactggctctgctgattcccaggcctttggactca

SEQ ID NO: 148623 - DNA, 564 bp, Homo sapiens
caggtgattgcctgtccccatggctgagtactactcatcactcctgacctaccttaaatatcatctctaactctcccattttagtaggtcctcccaatctttttaccatcatttattgcttagcacttgtgatggttaattttacatgtcaacttgacagggccatggggtggccagatatttggtaaggcattactctgtgtgtagtctgtgagagtgtttttgaatgaaattaacatctgaatccatagactccgtaaagcagattgtcctccctactgtggatgggtctcatccaatcagttgaagacctgaatagaacaaaaaggctgaccctcccatgagtaagagggaacatgttctgcttgactgtgtgagctggaacatcaatcttttcctgctttcagactccaacggaaacatcagctcttcttgggtttcaagtttgctggctttcagaatggaacttataccactggctctsctgattcccaggcctttggactcagacaggagtcacaccatcaactctcccaggtctccagcctgtcaactgcagaagga

SEQ ID NO: 148624 - DNA, 620 bp, Homo sapiens
gcatgaacttaaggcaactacagagctagtaataggaaataataaaagcacggtgttttttaatccactcaagatttttagggaaaacactaatttattttcaggggagggtagaacgctattatgtagcatttggaatttgtaatataaaaatataatttaaagttaattgcttgaaaaacaagagtcatctcattcatagtatggatttggttattctcaatatttttcttacctgtgtagttactaattaaaacacaaaacacacacacacacacacaaaatttggtattattgcttacagatatattgttggggtggacttgagctgacaagacaatatrcttccatgggtaaggtgggcacagcaggtaatcagaatccttcatgtaactttgtccaaatgatgcttaattttatttttgtgagctgcttattacaatgttaaattcaatctcaatttggtgcaaaatgagaaactcatgtatgtgagtgatactaagcaacctcagtatttgaaactagaacagacaaaaaagtctctagctattacattaacacagatacttcgacttcgggaactttttctcataggaagtcctatttcagggttcattgac

SEQ ID NO: 148625 - DNA, 620 bp, Homo sapiens
gcatgaacttaaggcaactacagagctagtaataggaaataataaaagcacggtgttttttaatccactcaagatttttagggaaaacactaatttattttcaggggagggtagaacgctattatgtagcatttggaatttgtaatataaaaatataatttaaagttaattgcttgaaaaacaagagtcatctcattcatagtatggatttggttattctcaatatttttcttacctgtgtagttactaattaaaacacaaaacacacacacacacacacaaaatttggtattattgcttacagatatattgttggggtggacttgagctgacaagacaatatacttccatgggtaaggtgggcacagcaggtaatcagaatccttcatgtaactttgtccaaatgatgcttaattttatttttgtgagctgcttattacaatgttaaattcaatctcaatttggtgcaaaatgagaaactcatgtatgtgagtgatactaagcaacctcagtatttgaaactagaacagacaaaaaagtctctagctattacattaacacagatacttcgamttcgggaactttttctcataggaagtcctatttcagggttcattgac

SEQ ID NO: 148626 - DNA, 661 bp, Homo sapiens
gccccttgcttaactattgtaagacctatttcaaagagacaggtagaagatttgctaattkttctttggataccagcagaaaaaatagcttaagttttctaatgtttagcatttcaaaagagagcagaggtgagttataaaaagagaatgaataccatctcatcttgttctctcagaactccatcctcaagacactaatgtggttgatttgcctaggtagctgagggtgtgctataggaactgaacagaggttcacagagagcgaaagtcaccttatgtggaggtatttgtagtttaaactttcttgaagattaactttgtatagctagttcatgcctttcatatctataagaacattcatcacaacatttcctgtatttaaaaaatagagatctgttctgatttgtgttagagtttgtattttcaaagtgaggaaggtaaataagctttttttaaaatttttatttaattttttttttggtaaaaggaattgtagtccagtgactacagaattgcattattgtggaattgtggaatgcagtttgtggacatgaagatctgacactaagaattttcctttttttagaagaatctgaaaaaaaaagtaaaaacaaaaattattaaaaggaaagaaaaggaaagtaatagacacatactcaag

SEQ ID NO: 148627 - DNA, 605 bp, Homo sapiens
tgtctctattaaccataacagttgatacatcaaaccacctggtgttcatttggataacacagaattttctatgtgaatagcattcattgtgcaaatggaaagacagcaaaatataatttggttaatcattaagatgaacacttyggtgtctctgtatctgcctttctatcaaaggtgccttttctaaggctgcatactaaatggattccattgcaatagaaagttcccaggagtgttgaataaaggttaacccaaactatatatagaatacatatttctgtttcttcaggtaaactttaacagataaatgaataagaatttgatggtaggaaatggctcctggatttattcataactctgagtagatagatatatagcccaattattatggttattagtttagattagcatcaggaattagactactatttcatgttaagattttaaggaaatatttaatagtaagagattataaccaattttaccttctacaaatagccaggacaactttcatgctgaaggaccaccatagagtcaagtcactagggctgtgtggcaggcggaataacggtccccccaaatatgtccatgtcctaatattcaga

SEQ ID NO: 148628 - DNA, 643 bp, Homo sapiens
agggcagaggacaggagacaaagtctaaagcccacccaaagtgggtcattttagagactaaaagcctgtatcctcagtgaaggagtaaaatggtaaaaatccattgtgcaagaaagcaaggcaagactcctgacccccagaaactgtgaaacaataaatgtgtgtaattttaagttactaagtttgtggtaatattgttctgaaacaatgataactgatagctaatacagatcctcaaaaacttgagatacaggaattatcagacataaaattataaaaatattttaatatagtaggaagaaataaaagwtcaaattaaaatataaatgaggaacaagtgaccttgaaactgagtatacagaattgaaaaatgaatagaacatctaaatgaaaaataaaaattggtattaaaaacttaacgaacagcctaaacaatagacatagctgaaagtggaatttgtggcctacaagaagcactgaaaattattcaagataaacttatcatgactcctgctgttgactctgcctggaatacttttcttcaggtggccacatggcttgctccttcatttctttcagatttctgctcaaataataccttattctggagccctttcctgaccatgtattataaaacagcaac

SEQ ID NO: 148629 - DNA, 643 bp, Homo sapiens
agggcagaggacaggagacaaagtctaaagcccacccaaagtgggtcattttagagactaaaagcctgtatcctcagtgaaggagtaaaatggtaaaaatccattgtgcaagaaagcaaggcaagactcctgacccccagaaactgtgaaacaataaatgtgtgtaattttaagttactaagtttgtggtaatattgttctgaaacaatgataactgatagctaatacagatcctcaaaaacttgagatacaggaattatcagacataaaattataaaaatattttaatatagtaggaagaaataaaagttcaaattaaaatataaatgaggaacaagtgaccttgaaactgagtatacagaattgaaaaatgaatagaacatctaaatgaaaaataaaaattggtattaaaaacttaacgaacagcctaaacaatagacatagctgaaartggaatttgtggcctacaagaagcactgaaaattattcaagataaacttatcatgactcctgctgttgactctgcctggaatacttttcttcaggtggccacatggcttgctccttcatttctttcagatttctgctcaaataataccttattctggagccctttcctgaccatgtattataaaacagcaac

SEQ ID NO: 148630 - DNA, 576 bp, Homo sapiens
ttgttttaccagcctacatatctacctagaatcctaagtacttgcatgatattactttaccttgcctatcaaaacacttataactccatgatgagcctatattttttctgttactatacatctttataatgtgccctccatatcatcaactgtattgaaccacacatatcatctcaatgcctgcctcattccagcggggtmgcctgtaagcataatctatcctggcaaggttaattgtgctacatccagcccagtcttaaacacaacctgtgtggtgaccattccttggatctgccccaatgcaagaccgtcagcaccctgcctttcctccccttctgtagggtcctcatcatcagaacttaataatttctaaagatcactatagttttataaaataaaaattatatcttcaataaaagggggatagagatgtcagccacagataacaaggacaaaagtaacatttataagtagttatttttcattcctaaaacagaaatgtaaaatatgtcattttaattcacaatattttaatgtatgtattaaatcctgctgtatttaagaagaatattttca

SEQ ID NO: 148631 - DNA, 605 bp, Homo sapiens
gtgaagatttgtgtagactgccttcttcctaaaggtttttaagacaaacttcctatacattatgtcttatttgatttagtgctgcttccagcaggaagatgtactctgtgatggctcatggttttagcttcttctctccctcatgtgaatctctrtctccaaagacatgaaaagatgccctaccactgttctgagatgaactcaaataaataaaattcagctctattcaccagggtctctagaggcttataaatgaagatcaggataaaggaaatttggggatgtggtttgctttccttgccaggggagcatttgaaatctcaagagctaagtaaggccaaaatgctcaagcggaggcatgagttgatgtatcagattcactcataaatggggataatgatagcttctatttcatggcaccagaatctataaaagtactcaccaaatagctgttgttgaatgaatagtgttgtaaagattaaattagttttcatgcattagtttttacaaaatgtttgtggctcataatgagcactatatgcatgttaggttttgtttcagttattttgttgtgttttttctgagtgctggaattaggactcata

SEQ ID NO: 148632 - DNA, 605 bp, Homo sapiens
gtgaagatttgtgtagactgccttcttcctaaaggtttttaagacaaacttcctatacattatgtcttatttgatttagtgctgcttccagcaggaagatgtactctgtgatggctcatggttttagcttcttctctccctcatgtgaatctctgtctccaaagacatgaaaagatgccctaccactgttctgagatgaactcaaataaataaaattcagctctattcaccagggtctctagaggcttataaatgaagatcaggataaaggaaatttggggatgtggtttgctttccttgccaggggagcatttgaaatctcaagagctaagtaaggccaraatgctcaagcggaggcatgagttgatgtatcagattcactcataaatggggataatgatagcttctatttcatggcaccagaatctataaaagtactcaccaaatagctgttgttgaatgaatagtgttgtaaagattaaattagttttcatgcattagtttttacaaaatgtttgtggctcataatgagcactatatgcatgttaggttttgtttcagttattttgttgtgttttttctgagtgctggaattaggactcata

SEQ ID NO: 148633 - DNA, 576 bp, Homo sapiens
caaagcctgaattcactgtacttcatcaaaacagtagttcccatctaaaaaatattgtggtgtgccaaatagcaaaacctaactggctggttaaaaatgcaagagcaggtaatttttatcgtaaatttattctggagcaaagtgaagaatgataatgcttggacttaataatgggagaaaacaagtgtatggggcaggccacagttctaagctatttctcagatattctgaattcatcataatcacataaccttttctcagcattggagactgtgaggacttaatgggatctgcaattcatatgggtctactatacttgtctgcttcgtcacagcaatgctgcttgtggttattcattatccragatgacttttccttgtgattgcttgacacagttgttaaaacattttttttgtggctcatttcctgcataagctggttaaccctatcccatctggagacctcagaagacctactcccatagctttgctcactaatgcctgctccaagctgcgtggggcaccacctgggagagatgagggcttggtggaagttcgtcttcttaaatggagaaag

SEQ ID NO: 148634 - DNA, 619 bp, Homo sapiens
ggacaaccatttatcatatggtaggtgtcactgaccaagacagaaattttaggttcttatttgrtctttgaacccctgaggtgtgctgccttactgaatcaaacctgagccaagcccagctttctcttaagggcagggccctcatctttgtcttgttcgcacaaatacctacccaagaaagtgcatcaataaatgtctgctgaatgaatgactatctggatgactgtgaatgaggaaatatagaaataaattcacactccttttttagactgagtgtcattgtttaccttctccaaagaactctttgcaaaatgttttgagctatgtgaagaaaggcttcatctaaacttattcatgaagcaggccaactagattgtgtcagagggctactaaagtcattctcttattggatgaaaaaatactctagtcataattaagaaacattaaactatatttataatcaaatattctttaaggggattggctttttcttctgggttgagtgggttttgctctcacgcacccagaaaaggccagacagtgtgttgtttgatctattttgttaaccttctcctctggcttatgttaccttaagttgacctttcaagtgctttgtctt

SEQ ID NO: 148635 - DNA, 521 bp, Homo sapiens
ctggagcattctcttttgaagaraaataccaccctgcgtgtgatgacctcacctgattcatcacctgatacctgatgggggtcaatgggtgcagagaagatcctgagcctagggctgggagcgggtgttgtccacatattggctttgctgtgaactggatgggggtcaggtttgcatgagggacatgttagacatgctggggttggcctggattagaaaggacatgattttgatttaacttttgttctcatgactttgaaggtaaatctgaggttgtgtcatgtagatgagaagtttctaagttcaaagtcgagaggcctgggttcaactcagggttaagagattgtgagcaagatacacaaactccccatgtctcattgttattattttttaatctgtaaaaagagaccaataatgggatgctgggaacatggtagagtaggaagtaccagaaatttgtttccctacctagacaactattacactggcagaatttgtatgatgtaactattttggaattc

SEQ ID NO: 148636 - DNA, 600 bp, Homo sapiens
aaatgagtgtgtgtgcagtcatctataagttgtaaagtactagaaaatggtgaaactttgggatttgggctatttaaggctgaatgctaaaaatgtcaggcattgtggagaaaggaatttaaatataagattgattgactgggatttaaagacaaatgaaggcacacacgcaagtgcacacmcacactgacactgcacagctcccgttggaggcatatcctgaccatgcagacctggggctctgcctgtccaagtgcactcctttactacataaaccctccttctcttttggggctgtcaccccaccagagctggcaccgagcccttgctgctgcgcttccctggggtgtcagcttttgacagggtgtttcctccctctgcaggagccttaacatcccttggacttccttccccccacccacccccagcagttttatctcttcctaactcgggaccctttttttcccacacaaagtttattgtcagttgctggtttcatctgtttgagcggctgcaacaaaataccatagactgggtggcatatgcacgacaaaaatttatttctcacaggagaagtcaaagattaatgcaccagcagat

SEQ ID NO: 148637 - DNA, 600 bp, Homo sapiens
gagctggaaagtggtataatgagaattcaaaccagggtctcttgactcaaaatctaaggatcataccatttctcatgataatatgagtattattgttatctctatcccatagacaaagtgttaacactgaatgagcagtgaaatagtctcagaattttttattttatttagcaattcacttgtcatttctggtcctcagtttattcacgagtaaaataaaatagttggactagataatttctatagtacattcttacacaaaaaatctatgattttgttatttttaatgtgatatactcatggcactcattcacctcattttcccagcctgcctcactggtcattacttctctgtgttctttacaggctccccctcctctacactgccattaaatattgaaacacctcaaagctttacttatgtccmcctctcctctgacactatcattctgtctagatgatcccatacatacatgcccattacttcaacctgtatttatacgccaatgattcactatatttccagcctagacattcttttgtactctagttaccagcttgatatccttacatggctgtttcaaaacaactcaaatatat

SEQ ID NO: 148638 - DNA, 600 bp, Homo sapiens
gagctggaaagtggtataatgagaattcaaaccagggtctcttgactcaaaatctaaggatcataccatttctcatgataatatgagtattattgttatctctatcccatagacaaagtgttaacactgaatgagcagtgaaatagtctcagaattttttattttatttagcaattcacttgtcatttctggtcctcagtttattcacgagtaaaataaaatagttggactagataatttctatagtacattcttacacaaaaaatctatgattttgttatttttaatgtgatatactcatggcactcattcacctcattttcccagcctgcctcactggtcattacttctctgtgttctttacaggctccccctcctctacactgccattaaatattgaaacacctcaaagctttacttatgtccacctctcctctgacactatcattctgtckagatgatcccatacatacatgcccattacttcaacctgtatttatacgccaatgattcactatatttccagcctagacattcttttgtactctagttaccagcttgatatccttacatggctgtttcaaaacaactcaaatatat

SEQ ID NO: 148639 - DNA, 578 bp, Homo sapiens
aaaaatgatgggtttctcaattaaaaatttcaatcaaggaaggatatgagctaacataacatttttttaaaaagatcagtctggtaaggtagaggtgcataaactgaaaaggagcaaaagtggtggaattcagttagaaaattattgtaactgtactgatgtcaaatgatgaaaccatgaactaaagtagtaccaaaaggagtgaggaggatggaataattcaaaagatagaggacagatgtgcagaacctggagattataagatgtgaaaggaggagtttgagaaaatttcagattttggaagtggtgtcattttrctaaaaggatataataagtagcaaattttggataaagttgggtcccactgagtttgagatggctgttggacatgcagagaaaactgtcttgtatgctgttcttaaattgaaatagacagacctttaccctctgatactgacatattttcctttccaggctcaccctccatttccctaaacacaacacatgcactagctctccttactttattgctccacaaacatcttacacctccaagcatttgtgcccactgtaccttc

SEQ ID NO: 148640 - DNA, 475 bp, Homo sapiens
tttgaattccttaacctctattaccaagtctctaactaaaagctggggataatcataatagcacctaactttttgggtactaagaaaagttaaatgaagactaaatatatcaggcacatggtaaacaacaaagaaatctcatctatttcactattattaatgtagaccatggtcactcgtgttaataactttaacctcaaccttttaactgctrtgaaggattaaataaaaaattaatcactatattataaaaattaattgatatataataaatgaattttaagagatacgtaataattcatggactccttgaagatagaaaatttatacaaaatcctagtaatttgagtcacaaaagctcctacaataatgaaacagtatgaatgaaaaagaaaagaaataactattatatttggatctagcccataatttttaaccaaatgcacaaaaacaaacaacaaatatgaaattctca

SEQ ID NO: 148641 - DNA, 513 bp, Homo sapiens
cagaaattaaatattcttttagtctggagttttaaaaaatcaatctgtttacttgagtaatttgttgctgttttcatgggtgaattgtatacagaaggataagaattattcttcgcatcaaaaggtcactgactttcatatttagtgctcatggtctttaaaaartggataaaaagtagttctcacatttcatggaaagcccccaatccatgagcacatttcccaaaatgaaacatttttatcaactgcaagttgtgtgtaggtggagatttgtttttcaattgtcaagatactgttaattacccagtcctttatctccttttggtggagatgtctctgtgctaggaaacccttcttgctctccttcctgtttctcttttactactggccctgaaacaacaaattctcaagtttcatgacagctttccaaagaatccatcaatcaaataagcaacacaactcgacactgacaattccagacctactaagagcattaattaagacttaaaaata

SEQ ID NO: 148642 - DNA, 565 bp, Homo sapiens
gagcatttatgttgattccatgtctttgctattgtgagtgctgcaataaacatttgcrtgcatgtgtctttgtggtagaatgatttatatttctctaggtatatacccagtaatggggttgctgggtccaatggtagtcctgcttttagctctttaaagaattgctacactgctttccgcaatgagtgaactaattcacactcccaccaacagtgtataagcattcctttttcttcacaacctcactagcatctgttacttgtttgctttttaataatagccattctgactagtgtgagatggtatctcattgttgttttgattgtatttatctgatgatcagtgacattgaactttttttcatatgcttgttggtcataagtatgtcttcttttgaaaagtatctgttcatgtcctttatttttaaagagataatcatactatgaaaatcaagaggacacaagatatctatttctaatgatgtatgttgatatagagacactcatagatatgtttgcactattctattttacctatagaaagtggtgagccagaatttaggtct

SEQ ID NO: 148643 - DNA, 366 bp, Homo sapiens
tttacaaattgctaatgctattaggttgtatagataacaatagatttataacaacctggcacacarctttaaatatataagtttctctgaaacttctgggaacttggaatgccagaacgttggcaaaaagaatgcttctaataatgaaagccatcatctgccatggaaacaatttcagggtctttagaaagctagtttatacataagctccattctacaataaaacttatgttcatgttttttctgattttcctcctgctgtaaattcattttatcagaattctttttaccagtccctctgccccatttctcaaagcgttgtcctcagactacctgtatcacctaaagattctaaggcctcctccg

SEQ ID NO: 148644 - DNA, 517 bp, Homo sapiens
gggggtctttacaggggaaggagttagggagatgctggtcaacaaattcatatttgcagttaggaagaaaawgttcaagagatctctcatccatcatggtgactatagctgatgatatatcgtattcttgtattagttttttataaatgtgtaacaaataatcacaaacagttaaaacagcactcatttatttttatctcactgttttcatgagtcagacgttcagacacagcttagttgagtcctcttctcagggtctcaccaaactgtaatcaaggtgtcagctggggttgtggccacatctgtggctcctttgaaggtctcctcaaggtttgctggcagaattcctttactcgcagctgtagaatgcatgccagcttgctgctttaactctttaggaaagtgtctcaactccagcaaggctcgccctttttgaaatggctcagctgattaggtcaggcccacctttgataatctccttttgatgaattcaaagtcaaactcattagaggtctta

SEQ ID NO: 148645 - DNA, 507 bp, Homo sapiens
atgatctccgagaagccagagtgaaaatcataagtgaygatgtctgcaagcaaccacaggtgtatggcaatgatataaaacctggaatgttctgtgccggatatatggaaggaatttatgatgcctgcagggtaagttggagggatttttttatattactaactcaaaaatttgtatctggctcagaatatattatatgttctttacataaggacaaaacatagatatcatgtcagctcaaaaaagttacaaatgcaaatttcacagcacaaaatacttttaaatgttttattaagataaatgaagtaagagtttctctgatgctatcaaacaaacaaaattagaatttcttaaccagaaatccaaagattaataaagcagtttattttctcaagcggctcacattcaagaaagaaaataatcataaacagagaagtataaagtgatgttatgaataatataatgaaaagcaaatatttttcttgaaggaaacatttttggaacaag

SEQ ID NO: 148646 - DNA, 507 bp, Homo sapiens
atgatctccgagaagccagagtgaaaatcataagtgatgatgtctgcaagcaaccacaggtgtatggcaatgatataaaacctggaatgttctgtgccggatatatggaaggaatttatgatgcctgcagggtaagttggagggatttttttatattactaactcaaaaatttgtatctggctyagaatatattatatgttctttacataaggacaaaacatagatatcatgtcagctcaaaaaagttacaaatgcaaatttcacagcacaaaatacttttaaatgttttattaagataaatgaagtaagagtttctctgatgctatcaaacaaacaaaattagaatttcttaaccagaaatccaaagattaataaagcagtttattttctcaagcggctcacattcaagaaagaaaataatcataaacagagaagtataaagtgatgttatgaataatataatgaaaagcaaatatttttcttgaaggaaacatttttggaacaag

SEQ ID NO: 148647 - DNA, 253 bp, Homo sapiens
tgcatataacacatggggctataacatataacatatagtatgttttctcttttggaccactttgttatatgtggtccacaagagaaaacatactccatcagcaacgtgtytcctgaagtcattaggagagtaaggctcatgtatttcgtaatacaattaaattaaggctttatggaagcaattattctgcttggcaatgcctgtgaaatattatggtctgcaggctggggagtcatttactcatttagcccaa

SEQ ID NO: 148648 - DNA, 563 bp, Homo sapiens
atatgcttgatattattttcataaggtacatagttgcttaactgaattttttataaaacaaccacaaaaatacttagcttagcgttatgacaacatatctttaaataaggaagtggttttgtttctcatgtgcaacatttcgaaaagtggtgtgtggattttaaaattgcaatcagtaaacaattcttgtgttgtttggaacttttcgaggattctgtgttttgacttccattacagttttattgctagctattaaataaatatgccataaatcctaaagtacacttttagaaagtaaagacggtatttttctactttttatatagttgtagaattattttcaagaaagttcttgctaacatttaagagaaaataatctctctctggttttctttttagttaatgaataagtattttcctatactttcacataaagaaagmaaaaagttgtgagataatcaagtcacacgttaacatctcaaaacaatgaaataattatgtaacttggtatgtttatgtgtgcacttaagtgtatatattatgcatattatttttctatgact

SEQ ID NO: 148649 - DNA, 435 bp, Homo sapiens
ccattgaaaaaacatggcattaggcctggtgcattggctcatgcctgtaatcacagcagtctgggaggctgaggcaagaggatcacttgagatcaggagttcaagaccagcctgggcaacatagcgataaccccatctctacaaaaaataaattaaaaaaaatgagccgggcatggtgatgtatgcctgtggtcctagctagttaagaagctgaggcaggaggatttcttgaccccaggaatttaagcctgcagtgagctattacagcaccactgcactccagcctgggcaacagagtgcgacwctgtctctaaaaagaaaaaaataattaaaagaaaaaagaaaaaacatggcactgcaattataattgctttaaatttacatattagttttagaagaattcacatttctattctttcttcctgtgtaggacaa

SEQ ID NO: 148650 - DNA, 495 bp, Homo sapiens
ttatgacttttttcatttccaatgtgccattaaattcattcaataaacgttttaatttatttattgtaattttcaatttcagaatttccatttgttcttttttataactcccaattctctgcggagattccctattttgtcactcattatgacsatattttcctttagttctttgaacatattatcatattttagtgtttgtctgctaatatttaggttacctctggattagtttctattgcctaaatttttcttgacaatgggtcacatttttctggtttatttttcctatagttagtaattttttatttgctattgtgtgtcagttctctaagtgtgtcaatgacatgctttagaaactatggagtctgttatttacccgtgaagaacattaatttttggtccagcatacacttcagtcactagctgatccccttgaacttgtcttgactgtattttatgctttgttatggcaaatctgtgaaaaacccagac

SEQ ID NO: 148651 - DNA, 403 bp, Homo sapiens
gttgagaatagatctttcaaagcaatctacggaccacctgcctcccgtgaccactatagtctgagtggccactctctcttgcctgaaatgttgcaagttgcaagtcctaattgatttatgtaatttgctgctttgacaaccacttcttccacatctgttctcacatcacaggtcaaacttttccaatggacaccttcagtgtcttcctctgctcttggaataaaagacaagccccttccccttccttaggctccaaacctgtcctagtctgggtrtcctgcctcttcagaccctcttcccacctcacctcacctgggcaccccccaacttctagctccactaacttctttctgccacagtgctattactgcccctttgtctggtcagcccctactcagcctcc

SEQ ID NO: 148652 - DNA, 630 bp, Homo sapiens
tagttcttcctccttctaccatttgaggataaaacaagtttgctgtctataacccggaagggagccctcaccacaacccaaccatgctggcaccctgatcttggactcaaagcctctagaactgtgagaaataaatttctgttgtttataagctgcctagaatatggtactttgttatagcagcctaaactaagacactccctataaaacyagtttatgctattgtgaataatgctgggcttaatacataggtcatgggttgataggtgcagcaaaccactatggcacatttacctacgtaataaacatatgcattccgcacacataccctggaacttaaaaaaataaaaactagtttatgttcttttttatgatggtgtccagtgaagaacccaattagatttcgaggataatcaggtatcaaggatgaggggtccttgacaaactgacttagcaaggctcttgataaaactggatttttcaaggaagtgcaaagatgggcctaggagaagtttcaggaacctaactaaagtttagtcaagcaaaaaatcttgttcgagaaagaagagacattcttcttttccttgaacaatataggtccatttaacaccttaacctcaatatctgatc

SEQ ID NO: 148653 - DNA, 630 bp, Homo sapiens
tagttcttcctccttctaccatttgaggataaaacaagtttgctgtctataacccggaagggagccctcaccacaacccaaccatgctggcaccctgatcttggactcaaagcctctagaactgtgagaaataaatttctgttgtttataagctgcctagaatatggtactttgttatagcagcctaaactaagacactccctataaaactagtttatgctattgtgaataatgctgggcttaatacataggtcatgggttgataggtgcagcaaaccactatggcacatttacctacgtaataaacatrtgcattccgcacacataccctggaacttaaaaaaataaaaactagtttatgttcttttttatgatggtgtccagtgaagaacccaattagatttcgaggataatcaggtatcaaggatgaggggtccttgacaaactgacttagcaaggctcttgataaaactggatttttcaaggaagtgcaaagatgggcctaggagaagtttcaggaacctaactaaagtttagtcaagcaaaaaatcttgttcgagaaagaagagacattcttcttttccttgaacaatataggtccatttaacaccttaacctcaatatctgatc

SEQ ID NO: 148654 - DNA, 577 bp, Homo sapiens
aaaggagtcagacatggaatttcatgagacattgtaccatttaaaatataatactttgataatcctcttggtttttcctaaaattattaagggctaagttgttttcctcaacaaaackaattcctaaatgcttgttggtctgttcatataacaaaggatcagacggcagtggcccagcctggaacagagggtggccagtgatgacaggcaagggaatggacagtctgtccctgcgcaggaaacagtggtcgtctgatcagtctgattgctttatccttgtgctgcctcccttcgaatgagtacattcagtattaactttcctccacacttcccaggggcagatcacacaaggggcccacatcagtcaaggcttccctctgctaagaaaccagattgctcttttgttgaaaagctcagtactgaagaactgaatcaatcatttcaggcaaatagtatctcctcttgctcacaaagttcttcccgggaaagcaatttcacaacctccattgataatctgttctattcttaacctcctgctgccagagagactccctagttacggccagctaaagagatc

SEQ ID NO: 148655 - DNA, 467 bp, Homo sapiens
cttcttaaaaagtttcttatgaagatgatcctcttcttttagtctagtttctagtcaagtatggaatcttgccaaggaaaactgaatgtgcagtattgatgattacatgagtctgctattgctgccataatgaagtaccacagactgggtggcttaagcaatagaaatttattttctcacagtctggaagctagaagtccaagatcaaggtaatgctgaggctgatttcctctgaggccttaccactttggcttgcagatgcagtcttcttyctgtgtcttcacgtcgtcttttctttgtgtgtctatgttccaaactctttttataaggaacccaatcatattagattaaggcctaccctagttacccattttaccttagttccctaaagtccttatttccaaacaaagtcacattctgaggcattaggaattagggcttcagtgtttacattttgggaagacaca

SEQ ID NO: 148656 - DNA, 431 bp, Homo sapiens
acctctgtggaataggtcttaagatggttcaggattttaaccttcaaaaaaatttggtattcagtgattgataatagcgccagttttctggaagcctattttgcttgcccaggatgagttttgtagaaagcattaggtttcatcaactagacaacaccatttggaaggaatgttcttttattcgttgactgttaggttgtgataagccattttgcttttggaagtgatctagttagtgtagttccctatcaattaaggtagcagccaggtgtctcatgccgtggttctgctttgataacyacataagagcaattctggcttgcttatgaggccaaagagcaaggaagagccacttacaagacagatacttatactttattataacaaaatgtcctaaaagaaaatgttggctatactaattgaagtaaatg

SEQ ID NO: 148657 - DNA, 431 bp, Homo sapiens
acctctgtggaataggtcttaagatggttcaggattttaaccttcaaaaaaatttggtattcagtgattgataatagcgccagttttctggaagcctattttgcttgcccaggatgagttttgtagaaagcattaggtttcatcaactagacaacaccatttggaaggaatgttcttttattcgttgactgttaggttgtgataagccattttgcttttggaagtgatctagttagtgtagttccctatcaattaaggtagcagccaggtgtctcatgccgtggttctgctttgataaccacataagagcaattctrgcttgcttatgaggccaaagagcaaggaagagccacttacaagacagatacttatactttattataacaaaatgtcctaaaagaaaatgttggctatactaattgaagtaaatg

SEQ ID NO: 148658 - DNA, 604 bp, Homo sapiens
acagaaaaaatattatccatgtatttagaccagtgtttttcagtgtggtgcccaggaccaaccccagaccatgaagtagtgctgggatgagttggtaactggacatcagaaattacctgtaagttaccaggaaattttaatgtgcagcaaggattrcaaaccaatgatttaataaaacatataattaagagcttttctttcaattcttccatgatattaaaataggagcctgagctatcaaccaaactacctcaacacccaatacactgcataggacagcagtggaaagagaatagctgtccgaagtaccttgctggtgtagcgatcataaggagatcatccacaaacgttaataacatggtgaagtgcagtagtgattaattagaaggtgctgcagcctggttgtgggtgtcacagaagcatgaacatagttatagcctagttttggacagagatgcacacatatataacaatacaaatctagattttaggtcatggcactgggactcttaagagctgatttaaattagtggccattcaaatattatacagattattgactagtttgttcaatattctaaaataatttataaaatgtaccaaa

SEQ ID NO: 148659 - DNA, 459 bp, Homo sapiens
aaaacaaaacaaaacaaaacaaacaaaaaaaaacatacattggggaatggacaccctcttcaataaatggtgcttggaaaactggatatctgcatgcaaaaaaatgaaaccagactcyagtctctcaccatggataaaagtcaacacaatggattaaagacttaaatgtgagacccaaaactataaaactaatagaaggaaataaaggtgaaatgcttcagaacattggtctagatgaagattttatgactaagacttcaaaggtatagacagcacaaacaaaaataaacaaatatgaccacaataaactaacagcttctgcatgtctaaggaaacagtcaacagagttgaagagatactctgtataacgtaagaaaatattttcaaactattcatctgacaaggaacaataatcagaatatacctagaactcaaacagctcaacagcaaaaaacaaat

SEQ ID NO: 148660 - DNA, 392 bp, Homo sapiens
ggcaccagaacaaggacgttgaagtgttttttaaarccagaaatcttcaaaaaggctcatagttttacaatcacactatgtattgaatgaatactaaaaactcaaaaacaaaaacttgccatgcctaatatgatttgtaggcaagttttttaacttcataaaacagactatttctatcttataccaaatattttaaacagtagaataaaagaagggaaactacagaacttgtttaatgagactgttagaatatttcatccaaatatggtaagggcaatacaggaaaaacaaaaactaccaaccattgtaacacataaagatagaaatacctcaaacttattgcaaattaaaatagtaacaacaatagaagtactattgcatgattagcagtc

SEQ ID NO: 148661 - DNA, 392 bp, Homo sapiens
ggcaccagaacaaggacgttgaagtgttttttaaagccagaaatcttcaaaaaggctcatagttttacaatcacactatgtattgaatgaatactaaaaactcaaaaacaaaaacttgccatgcctaatatgatttgtaggcaagttttttaacttcataaaacagactatttctatcttataccaaatattttaaacagtagaataaaagaagggaaactacagaacttgtttaatgagactgttagaatatttcatccaaatatggtaagggcaatacaggaaaaacaaaaactaccaaccattgtaacacataaagatagaaatacctcaaacttatygcaaattaaaatagtaacaacaatagaagtactattgcatgattagcagtc

SEQ ID NO: 148662 - DNA, 392 bp, Homo sapiens
ggcaccagaacaaggacgttgaagtgttttttaaagccagaaatcttcaaaaaggctcatagttttacaatcacactatgtattgaatgaatactaaaaactcaaaaacaaaaacttgccatgcctaatatgatttgtaggcaagttttttaacttcataaaacagactatttctatcttataccaaatattttaaacagtagaataaaagaagggaaactacagaacttgtttaatgagactgttagaatatttcatccaaatatggtaagggcaatacaggaaaaacaaaaactaccaaccattgtaacacataaagatagaaatacctcaaacttattgcaaattaaaatwgtaacaacaatagaagtactattgcatgattagcagtc

SEQ ID NO: 148663 - DNA, 459 bp, Homo sapiens
aaaacaaaacaaaacaaaacaaacaaaaaaaaacatacattggggaatggacaccctcttcaataaatggtgcttggaaaactggatatctgcatgcaaaaaaatgaaaccagactctagtctctcaccatggataaaagtcaacacaatggattaaagacttmaatgtgagacccaaaactataaaactaatagaaggaaataaaggtgaaatgcttcagaacattggtctagatgaagattttatgactaagacttcaaaggtatagacagcacaaacaaaaataaacaaatatgaccacaataaactaacagcttctgcatgtctaaggaaacagtcaacagagttgaagagatactctgtataacgtaagaaaatattttcaaactattcatctgacaaggaacaataatcagaatatacctagaactcaaacagctcaacagcaaaaaacaaat

SEQ ID NO: 148664 - DNA, 583 bp, Homo sapiens
catatacttttcatcttgctcctctctaacactttgctctcttgcaaatttagccttgtatttccaagtaattagtaagtatctctacctgcttatagtggctttatctcaaactttgtgtttacaacttaattatttttcatgttaaatatcaggaagctatggcacctattctatgttaatgtcatcaccattatcaaattttaaaatattattctcccttatcttgttgaattatttatataacctttcttccacatcacactgaaagtttcataaaggtaatgtatatataattccttttggcattcttcaaaattctgagcattttgacttacaaggagaagacactcaataaatatttatggagtacaaatattatagataaactatggatacctactagatatggatggyataatatttggttttgcatatatatcattacctaaactacagtaatgaactactttattgtaaaaagaaccagtgaatatttaaatatacatagattggaatatacaaatatacaaagattggaaggtaaaaatctcaaactcctggcttagtaaattcatggtaa

SEQ ID NO: 148665 - DNA, 495 bp, Homo sapiens
ttaagaggaaattagacacttttattgcaagagaatgttacaccgaaaatggattaagagaacaaggagtagggaarcaggtgaagctgatttattatgtgggcacaggagcatgggggaagtggccattttctaccacgtagttacttatgtctcactggaagaacccacatcaaaagataattatatacagtcatggaaatggtgacagctgcattttggcaagttggcatgcaaattactggctctattcaggttacgtaagcatgaatcgctgagaaatttgagatgaaaagattgtcaacggtttctggttggaagacctaatgaacattgtgaaacttagtgcaaaagacagcactgtcttcaaaagtcctagagttctgaattcaaataaatctggacttttatatcatattcataaaatagttcagaggatatacatttacagagaacaggacattgttaaatatcccaatttctcaatttctcaaa

SEQ ID NO: 148666 - DNA, 491 bp, Homo sapiens
tattaccatttgattggacctcatttgtctaatcacacttctctacaactatccatttcttcaccaaactaaatgtaaaaaaacacaggtttccctgtttatttgggtcttgatttctgaagcctcccaaattacataaaacttatataaaataaatgtctatgcttgttaatctgtcttttgttataggtgccttagctatgaacctagtaatgagtagggaaagaaatctttcctcctctacagagttcaaacccagatcctctgagaycagagaacttgctctttccttgataccttgaacctaaatgctgacacttgagggcatgaagacatagagtaaaagggaaagaggtgatgatgcatgagtcactagcttctattttcaaattcatggtggattgtctgggatgttcatttttagacaaatttcatttgtaggtggtgggaaaaatcattacaagttcagatgctggcttaaatatcaaaca

SEQ ID NO: 148667 - DNA, 501 bp, Homo sapiens
aattttggatctgtaatccacatgaaattaattttctctggctgaggtggggcgaagattaatgtttttccatatggatatcccatggatcccaggccatgtgttgaacagatcatcacagctttgtgtacgtgtgtctgtttctgggatctctgttctgttccattggtcttgatttgcattttcctgatgactgaaaatgttgagcatctttccttgtacttattgaacactcgtacatcttcttttgtgaaatgtctgttcaaatctgctgcctatttttagctgagctttttctcttccgttgagttgtacacaggctccatgcaagtcctttgcsagatacattcactgccttttcgttttctgaggaaaacgaaagctcttaaggccagtgttttaaattatgagaacttaaatttatcagttttcgttctatgatccttaccttctgtatcctaagaaaactttgctgccctcgaggtgttaaagaagttctcc

SEQ ID NO: 148668 - DNA, 504 bp, Homo sapiens
taagcctttaattttggatctgtaatccacatgaaattaattttctctggctgaggtggggcgaagattaatgtttttccatatggatatcccatggatcccaggccatgtgttgaacagatcatcacagctttgtgtacgtgtgtctgtttctgggatctctgttctgttccattggtcttgatttgcattttcctgatgactgaaaatgttgagcatctttccttgtacttattgaacactcgtacatcttcttttgtgaaatgtctgttcaaatctgctgcctatttttagctgagctttttctcttccgttgagttgtacacaggctccatgcaagtcctttgcgagatacattcactgccttttcgttttctgaggaaaaygaaagctcttaaggccagtgttttaaattatgagaacttaaatttatcagttttcgttctatgatccttaccttctgtatcctaagaaaactttgctgccctcgaggtgttaaagaag

SEQ ID NO: 148669 - DNA, 365 bp, Homo sapiens
cataatgatacatcaaaaagtcaaagaaagaaaactaaagcaaaaagcaaacaaaaactcatctgccaccatcagagacagcccattgcacaaaccccttaccctgaaaattggtaattagagagaaagattcmagcttttctcctgcctcgccagcaagaactacacatatgttgcaagtattgccgactcaattccaggccgctgcaatgtcacataaatgtttcagctttccagtgcatacaaaagtatctttatactttacgtagtctagtaagtgtacaataccattaagttgaaaaaaaactgtacgtaccttaattttaaaatatcttattgctaaaaaatgctaataatcatctgag

SEQ ID NO: 148670 - DNA, 443 bp, Homo sapiens
tgtgaagacggccgatcagggccctctcctgttgccccatggcacctgtcgcctgtcacctgtgtgctgatcatccagggaacccaccccatgtcagctgggggcagtgccacattcatgcctaattcttgcccagaagctgaccctggcygcctcctgtgctatgcaatcttcctgctgtcccagctcagtctcaggtccttgttacctcctaccaggccacagggcagtactttacccctgcgcctccctgcatgtcactcttcatgctcacagccgcccatgcgcccctcccaccatctcctgggtgtacacaatgagccccgactgttccaaggtcctgggtctccagggtgagcaggaaaccaggtgagctaggcctggccatctcacccctcctgcaatacttggtctgagggtgggctccagactccagcccagaa

SEQ ID NO: 148671 - DNA, 483 bp, Homo sapiens
gtgttacattttactctgaactttttctttttactacaacctcagacacaactttttaaataatttctttcagttttttctgcctatattcatggaattgcatgccacgcatgcacacacacacacaaacacaccccatttgtaagattgttacttaatcttttgctccctgatttgacctaaactttatccaatatatgcatagtgtgaatggaacaatatatgacattttctctaaatatgatttttaaatcacatawgctcctcctctattgtaccacataattttccatttttgagtaaaattaagaatctgtaataataatcacaatatcatttatccttcttttgatgctcaacactatctggtcaacaggagtcctgtggtctgtctcctttctttttggcactccacagcatctgtgagagcaacaaaggtgtccaggcacgccttaattttccttgttgcttttcatcagggag

SEQ ID NO: 148672 - DNA, 574 bp, Homo sapiens
ctgaacttttataaaactttaaaattcaactttcatagcacttcgtggtaagattcaaatcagttcatatattatttaaaattctgataagtggcttaaaattctaaattatgcttaaaatgtcttytgaaatatctattacattacaatttttcagtggataacttaagtgctactttagaatcaaggaacaataccttgaggtgtgttaaactttggaaatttacttggaacccaagtgcattaataaaacaaaatccaaactagcagtcaaatcaggcagagcaagactccagcagtttcaaaaacatttgcatgagaactttgcattcgttaacatgaacaaaattgtcctttcagccacatggttaggaatgagaattccatcatgagcaagaaaataagtattaaaccagagagtaaaaatgaaccttcatcatatttattatatttggctcaagaccattctagacaatgactactttgatagagacattttgaaatggttcagaccttaaggaagtaaaaaattaacataatgacacccaaataaagttaaacaagttaaacataa

SEQ ID NO: 148673 - DNA, 574 bp, Homo sapiens
ctgaacttttataaaactttaaaattcaactttcatagcacttcgtggtaagattcaaatcagttcatatattatttaaaattctgataagtggcttaaaattctaaattatgcttaaaatgtcttctgaaatatctattacattacaatttttcagtggataacttaagtgctactttagaatcaaggaacaataccttgaggtgtgttaaactttggaaatttacttggaacccaagtgcattaataaaacaaaatccaaactagcagtcaaatcaggcagagcaagactccagcagtttcaaaaacatttgcatgagaactttgcattcgttaacatgaacaaaattgtcctttcagccacatggttaggaatgagaattccatcatgagcaagaaaataagtattaaaccagagagtaaaaatgaaccttcatcatatttattatatttggytcaagaccattctagacaatgactactttgatagagacattttgaaatggttcagaccttaaggaagtaaaaaattaacataatgacacccaaataaagttaaacaagttaaacataa

SEQ ID NO: 148674 - DNA, 574 bp, Homo sapiens
ctgaacttttataaaactttaaaattcaactttcatagcacttcgtggtaagattcaaatcagttcatatattatttaaaattctgataagtggcttaaaattctaaattatgcttaaaatgtcttctgaaatatctattacattacaatttttcagtggataacttaagtgctactttagaatcaaggaacaataccttgaggtgtgttaaactttggaaatttacttggaacccaagtgcattaataaaacaaaatccaaactagcagtcaaatcaggcagagcaagactccagcagtttcaaaaacatttgcatgagaactttgcattcgttaacatgaacaaaattgtcctttcagccacatggttaggaatgagaattccatcatgagcaagaaaataagtattaaaccagagagtaaaaatgaaccttcatcatatttattatatttggctcaagaccattctagacaatgactrctttgatagagacattttgaaatggttcagaccttaaggaagtaaaaaattaacataatgacacccaaataaagttaaacaagttaaacataa

SEQ ID NO: 148675 - DNA, 345 bp, Homo sapiens
ttttttaaattactttgtgttgtaccacactttaaaaacttgacaaaagaaattatcagactatcctagcatttttcatcataatttacactctacccaacttgaactctataggacatttttctttacactttcattttaaagtggttattttccttaaagataaaaacagggaaaaacataaaagaaagcagtgtttcatrtttctcctgaaatagctgaacacttagtcattttcctaagaagccacttcaatacagaacaaaagaaaactttggattagacagatggctttatttacttaggtaaagttcacatctgaggatcttgtccgacttgtaaaac

SEQ ID NO: 148676 - DNA, 609 bp, Homo sapiens
gggggtgaaaccttcgtgagtggcttagtgctgttcttacggcagtgagtgagaccgtgattggttctcacaaaaataaattattttgacctagcacatggcccccatcaggagctaagcaggtactgggacaatgcttctcatacttcccagcctacaaaacttgagctaaataaatttcttttctttataaattacccagtctcagggatkctgttacagcaacacaaaacggatgaagactctattctaggctacacgatacacaatagtagaacccacaatatgtcaccattatgccaacttcatccagagatccatgtttctaagattctgtgggacctgattaagtaggctgtggtcaaataactttgggaaacactggcttaaatgccattaaggagatatatttactgcaggacttctcagtgcttttaatgtgctaatacatgttgatcttatacaagaaaaaaacaatacctgcagcaaatcccaaattgaattgaccatgggactcttttgccataggcaattaatattccaatgcactctgcagaatgctaagctagttcttccagcgccttaatgattaaagagtgatcattcggc

SEQ ID NO: 148677 - DNA, 580 bp, Homo sapiens
tagtagaacccacaatatgtcaccattatgccaacttcatccagagatccatgtttctaagattctgtgggacctgattaagtaggctgtggtcaaataactttgggaaacactggcttaaatgccattaaggagatatatttactgcaggacttctcagtgcttttaatgtgctaatacatgttgatcttatacaagaaaraaacaatacctgcagcaaatcccaaattgaattgaccatgggactcttttgccataggcaattaatattccaatgcactctgcagaatgctaagctagttcttccagcgccttaatgattaaagagtgatcattcggctacttttttaaattttattttatttttattatttttttaatttttattatttttatttcaatagtttttggggaacaggtggtgttttgttgcatggtaaagttctttagtgttgcttgctgagattttggtacacccgttacctgagcagtgtacactgtccccaatatatactcttttattcctcacttcccttttacccttccccctgaattcccaaagtccattgtatcattatta

SEQ ID NO: 148678 - DNA, 351 bp, Homo sapiens
ctagacataattattcccattccacatatgtggaaactgagggtacaaacagttgaaagaatgatcacaaggcacgtgacaacatcctcatagccttgcagagtgtggcctctaggaagcatgcaatgcatatttgttgaattaaaaattatggagggatagatgggtgggtgggtggatggatggatggatggatggatgaatggatgtgtgggtcsggggggtggataaatatatctaagactagttctgcattccagtctcgaaaaatgtgaagatatactggtttgatgatacactgaaattaaaaacaaatgggaacatttaatgagagcaatagaagctattcat

SEQ ID NO: 148679 - DNA, 454 bp, Homo sapiens
ctccatttttcttggatttgttctaaccatgctccgtgagtccgtgtgactccaggaagccaaatctacccccatatctgaggtggacctcrgtgggtcatttatcctgttggtcattggttcagcattaggttatgctgcagttagggctaattagaccagtagagggccttccaagaaggatcatattagttcttctgtgaaagcttcaggggaccactcttctttggacaccacaggaaagcctggagccttagcaaatggctggatatgatcctgagagccgcaggcaaagtgacacgaaggatggcggtggaaagagtcaggaagaccctcatccttataccaggctgagctgctgggtgaatcagttctggaggtgctcctgcctctggaatcctgatttcatgagccaatggatacctttcatgtttaagccactttgagttgaatt

SEQ ID NO: 148680 - DNA, 453 bp, Homo sapiens
gaattctctgtgggtctgctctgcatccattcctgtctccatttttcttggatttgttctaaccatgctccgtgagtccgtgtgactccaggaagccaaatctacccccatatctgaggtggacctcggygggtcatttatcctgttggtcattggttcagcattaggttatgctgcagttagggctaattagaccagtagagggccttccaagaaggatcatattagttcttctgtgaaagcttcaggggaccactcttctttggacaccacaggaaagcctggagccttagcaaatggctggatatgatcctgagagccgcaggcaaagtgacacgaaggatggcggtggaaagagtcaggaagaccctcatccttataccaggctgagctgctgggtgaatcagttctggaggtgctcctgcctctggaatcctgatttcatgagccaat

SEQ ID NO: 148681 - DNA, 456 bp, Homo sapiens
tctccatttttcttggatttgttctaaccatgctccgtgagtccgtgtgactccaggaagccaaatctacccccatatctgaggtggacctcggtgggtcatttatcctgttggtcattggttcagcattaggttaygctgcagttagggctaattagaccagtagagggccttccaagaaggatcatattagttcttctgtgaaagcttcaggggaccactcttctttggacaccacaggaaagcctggagccttagcaaatggctggatatgatcctgagagccgcaggcaaagtgacacgaaggatggcggtggaaagagtcaggaagaccctcatccttataccaggctgagctgctgggtgaatcagttctggaggtgctcctgcctctggaatcctgatttcatgagccaatggatacctttcatgtttaagccactttgagttgaattc

SEQ ID NO: 148682 - DNA, 559 bp, Homo sapiens
agttccacaatatatttaagcagacagaacaaagaatcagtgagcttgaaaataggtcaaattaaattacccagtttgagaagcataaaaaaataagaatttaaaaaaattaacagaacttaagagtacccattgacatctcagaaaatgaggagggaggccacgcatggtggctcacacctgtaatcccgcactttgggaggccaaggcaggaggatcacttgagctcaggagttcaagaccagccttggtgacatagtgagaccctgtctctattaaaaaaaaattaattgaaaaaaagaaagtgaggacagaaagaggcagaaaaatatttgaagaaataataattgaaaacattccaaatttgataaaagacatgaatctacacatccaagaaacctgatgaactcaaagtaaggtaaattcaaagagttccacaycaaaacagcttgatattatcaaattgtcaaaagagcaaatcttgaaatcaacaagagagaagcaaaacatacaagtaaccttcaataagattttcagctgatattgcttcaggaaccat

SEQ ID NO: 148683 - DNA, 568 bp, Homo sapiens
gaatctcaaaaacaatgctgagtgaaaaaaagcctatgcaaaagaatacaatgtgtttgattccatycatatgaatttctagaacagcaagcctaatctatggtagaaaagaatcaccacagtgattacctctgagtgttaaagacggggattaactgggaagaagtaggagaaacttcctctggtaaaaacagtgtttcctttagacaaatcgaggtgtacattttcccaaattcaactagtgtgcacttaagatttgtaaatgtatctgtaaattatacattaaaattatataaatattattacataacatggtgtatattataatatagtttggatatttattcccacaaacctcatgttgaaatttggtccccactgttagaggtggggcctaatgggaggtattgggtcatgggggcagatttctgagtatatgaatccccttccttgaggtgggagggtgagaaagttatcactctatttgttcctgagagagctcgttggtaaaaggagcctggcagttcccctccctctcacttcctctcccttcatgtgatctctgcac

SEQ ID NO: 148684 - DNA, 438 bp, Homo sapiens
cattgaaagatacatttatacttggatccagccagactgtcatggaactaaagacatttgtatcaaaatagtagatacratattgttggattcttcctagaactgacatgatgctctacagggcactgaaggacattataagaaatgtgtatgaaattcaatattgtaaatattaaaagatgttgctaataccatagtccaatatcattccatgtcctcattatataagaatgagaagtatccatttcattgttttcagtatcaggaaaagctttacttaccctgagtgaccagcgtatttatacatggatggcatgacttttaccgtcacgccatctcagtttcttgcaagggagctcagagccaaatttctagtgcaccactagaagcgacccttagataaacatcctagaatcataaaactcccctgccctcatt

SEQ ID NO: 148685 - DNA, 592 bp, Homo sapiens
ttcttctctagtttttcaatgtttgcaagggcttttagtcatgttgtatccaaaatgccttcaaaatagttatagtattagaaaaatacaaaagtacttcaaaatgtgtggaaacagtacatgtaaacaacagatcaaaatatcttaaaagagtttacctcttcatctttctcacttagtgtacacaggcaacatagaacatttggttatgtggtatgcaattcaaatttgttccatgtgatattctctgattagaaactactgtgttgagtgtgtctttcttaactaattttattttattagttatactaataaaataattatttttattaataaattaaaaataaaaataatagttatactaataaaataaaaytagaaatactaattttattgtgtattttgtaaatttttgattaataagttcttatgccatgaaaagaagttgtcttaaaactggcatcattttccaagtcattatggcaaacaactaaccaaataggtatggggggaaagtcagtagagcagcagaagcaatatgtcattccagtctgcttcttaatggcattctcccctctcctatgcacagggc

SEQ ID NO: 148686 - DNA, 614 bp, Homo sapiens
aaatatagacacttttgtcctctgctttgacaagactacaaaatgtaaacaaatgcagaacccctcattgctacgacaacctctaatgatctatccctctaaagatcatgccaaagatactcaaaccctgaagcacaggaattcatctagggtccaaagtcaacatagagatatggttccatttgaatgrgagatctaaaaatgcaaattatctggagcatttttcacatagtttgtgatatacttccccagcttatttttggcttttgttacaagaacttagggaacggcccactgagggctcaggcatagacagatgccttggaatgtgcctgcacagtgacagaatttctgacaagtcaggatctctaacactggaaacagggttcctactgattcattcactcctaatatagctccagggggttcctacaggatcccaaagccccccactccctccgccacactgcagagtttaaggatatgccctcatagctacatagctctgacccaaagcccttccatgtggaaaacactaatccagctagttgccatgtttctctcactgggatgtgttcccatttctcctcttgtttagtgttttagaagatatg

SEQ ID NO: 148687 - DNA, 614 bp, Homo sapiens
aaatatagacacttttgtcctctgctttgacaagactacaaaatgtaaacaaatgcagaacccctcattgctacgacaacctctaatgatctatccctctaaagatcatgccaaagatactcaaaccctgaagcacaggaattcatctagggtccaaagtcaacatagagatatggttccatttgaatgagwgatctaaaaatgcaaattatctggagcatttttcacatagtttgtgatatacttccccagcttatttttggcttttgttacaagaacttagggaacggcccactgagggctcaggcatagacagatgccttggaatgtgcctgcacagtgacagaatttctgacaagtcaggatctctaacactggaaacagggttcctactgattcattcactcctaatatagctccagggggttcctacaggatcccaaagccccccactccctccgccacactgcagagtttaaggatatgccctcatagctacatagctctgacccaaagcccttccatgtggaaaacactaatccagctagttgccatgtttctctcactgggatgtgttcccatttctcctcttgtttagtgttttagaagatatg

SEQ ID NO: 148688 - DNA, 614 bp, Homo sapiens
aaatatagacacttttgtcctctgctttgacaagactacaaaatgtaaacaaatgcagaacccctcattgctacgacaacctctaatgatctatccctctaaagatcatgccaaagatactcaaaccctgaagcacaggaattcatctagggtccaaagtcaacatagagatatggttccatttgaatgagagatctaaaaatgcaaattatctggagcatttttcacatagtttgtgatatacttccccagcttatttttggcttttgttacaagaacttagggaacggcccactgagggctcaggcatagacagatgccttggaatgtgcctgcacagtgacagaatttctgacaagtcaggatctctaacactggaaacagggttcctactgattcattcactccyaatatagctccagggggttcctacaggatcccaaagccccccactccctccgccacactgcagagtttaaggatatgccctcatagctacatagctctgacccaaagcccttccatgtggaaaacactaatccagctagttgccatgtttctctcactgggatgtgttcccatttctcctcttgtttagtgttttagaagatatg

SEQ ID NO: 148689 - DNA, 409 bp, Homo sapiens
tgaattctttgtctcttccttgaacacctatgagccaggcatggagctagatactgaggatacatragtgagagtgagagtgggagagaagagaagagaagacgtcttaccagggcacaataggccaggacaaaccagacttagcttggcaagggccagggacacctgagggtatcgttgcatggaaaggggtatcaatgaacccaagatggcaaaagagaaatgaggaggagctgaagcatcccagaaacaaaatgcacatgccccaaaaaggttgcatgggtaggccagatctctcactcactcataagcaccagctgagaaatcacaggataccatgctgggcactgaaagttacaaaatgccaaaagggtgagcttcccacactcaggatgctcaccacaaaggg

SEQ ID NO: 148690 - DNA, 409 bp, Homo sapiens
tgaattctttgtctcttccttgaacacctatgagccaggcatggagctagatactgaggatacataagtgagagtgagagtgggagagaagagaagagaagacgtcttaccagggcacaataggccaggacaaaccagacttagctyggcaagggccagggacacctgagggtatcgttgcatggaaaggggtatcaatgaacccaagatggcaaaagagaaatgaggaggagctgaagcatcccagaaacaaaatgcacatgccccaaaaaggttgcatgggtaggccagatctctcactcactcataagcaccagctgagaaatcacaggataccatgctgggcactgaaagttacaaaatgccaaaagggtgagcttcccacactcaggatgctcaccacaaaggg

SEQ ID NO: 148691 - DNA, 482 bp, Homo sapiens
cccacatgtcacctccccaccttcatttctacacacatcttcctaatagagttttatcatcattattatgaccatgtaaacatagtccattgctgaaccagggagcatatgatgactgcttttttggtttcttagacttcccctcccagagttaactctttttccccccaccttatttggctattkgaatcacatacaaagtcttcctataccctaaaactgctttgtaaaatgcttcccaatttcattttctgcttggataaattaaataaacaaatggttctattttttctctacaagcatcccttggggagcattttagatcatacttggcagtgacttgaattcccctgattataaaggtaaagacctgtaaacctgtttcccaggccttgcatcagaagtctgttttatagaaaaagaatgccatgatgcagaaattctaaagatgcttattcttcagcctagaaaaataattttgg

SEQ ID NO: 148692 - DNA, 561 bp, Homo sapiens
ggtagtactccaggtttgtgtccccaagccaagatgtagtgtcttattcccagccaaagctcatagtgtcacattgaggctgatggctgcatgcggcagggcctggctccaattcctgtgcagatgtctcttctctctcccagaaccacaagcaatcaggyccaatgatcagtagttagtggagttttttcatgttcaatttactgttagaagctgtgaatactgatttcggctttctctgagaagtccatcacacgtgttctgccttttgtggaataagcaatgccttcatcagcaaatggtcttagaagctgtctccaatatttttgtgtctctgtgtgtgtgtgtgtgtgtgtgtgtgtgtgtgtgtgtgtatacgcttagtatatgtgtatatatatgtcctgtgtgtgtatacacatttagtatgtgtgtgtggatatgttctgtgtgtttcttatgagctaattgcctttagcctctgttcactactataggtttctgttccagatcatgaattaatgaataaaattagaattcaggagtccagtagataagcag

SEQ ID NO: 148693 - DNA, 583 bp, Homo sapiens
gtgaactttcaaggacaagtcttcccatatggaaaggataatggcatcatgccagagcacgtgcagtaaagaagggctcagggtgtttcacattttctcttccaatgggttccaaacgttctgatggacaatcttattcttcccctataaactttctgctcyatatcccgctatagctgttaatacacttttcaattttcctcaggtccccaaatagtgggaacagcacgaacatcggcatgaaggcaagaaaataggaggcatgtactggggagagcaaatagttcagttggagaaagggcacatgaggagcagtagcagcaaataagaatgaccaggagtttgggatcagacacgtgggaccatgagtaccaggtcaaaagttcaaactttatttgatgatgaagcaacattaaacactaaaggtcaagtttcaggaatgtaactaattcagaagaaacacaatgacacataaaaaaagaaatagagccaaacacaaaaattagcaaaatatgaatgcttcacctcagcgatggattcttatgactgaacactgggagccagacattaaaggacaaacggg

SEQ ID NO: 148694 - DNA, 671 bp, Homo sapiens
atgggggcagagagaagatactcgtgaaagggtgcaacatttcacttatgagaataaattcaagagatctgttgtacaacatacactggaaaattactaagagagtagactttaagtattctcagcccctaaaaatgataagcatgtgaggcaatgcatgtgataattagcttgatgtagccattccacaatgtatacatatttcaaaatatgttgtataccataaatatattcaayttttattttttaattaaaaaattttaaaaattgagaatgtactcatggctttggaaccatgtgaataaggtttctttgttaagggactaatgaatatttttgtttatgggcccagatggttaggtggactgaggaatgccatgaaaacgaaatacttgaggagaactgagagcacaagggagattgatgtggctgacccattgttgtcctttgctttagtccaacctagagattttcattatttatttttcacactgagaaagacaacctacagtgatattagagatgtagcgatggtgcaaaattgctggagaaaataacctgaagacaactggaatattacttgcttctcacagatatcaaattcacatttacccaccaagtaatttcagatcagatgtcttttttctgcatttcctttgcttttctacaag

SEQ ID NO: 148695 - DNA, 671 bp, Homo sapiens
atgggggcagagagaagatactcgtgaaagggtgcaacatttcacttatgagaataaattcaagagatctgttgtacaacatacactggaaaattactaagagagtagactttaagtattctcagcccctaaaaatgataagcatgtgaggcaatgcatgtgataattagcttgatgtagccattccacaatgtatacatatttcaaaatatgttgtataccataaatatattcaacttttattttttaattaaaaaattttaaaaattgagaatgtactcatggctttggaaccatgtgaataaggtttctttgttaagggactaatgaatatttttgtttatgggcccagayggttaggtggactgaggaatgccatgaaaacgaaatacttgaggagaactgagagcacaagggagattgatgtggctgacccattgttgtcctttgctttagtccaacctagagattttcattatttatttttcacactgagaaagacaacctacagtgatattagagatgtagcgatggtgcaaaattgctggagaaaataacctgaagacaactggaatattacttgcttctcacagatatcaaattcacatttacccaccaagtaatttcagatcagatgtcttttttctgcatttcctttgcttttctacaag

SEQ ID NO: 148696 - DNA, 583 bp, Homo sapiens
caatgaccctggttattcctgctgatgacgcctcacacagaggactcactctgagtaacagcaataaaattgacaatagaattttactgtcacaatgtgagagttgcctttatagatcattttattatttgttcattttcagaaaaaatagattgggccaacttctgaaaacaatattactatttttcctagatgcactccaaatttagggttgccaggctgtcaactgacctgcagcctttgacacagtgagcatggagcagtgggacccagattagtgatgcctgcttgtggctgtcagggcctgtcatcgtgggtggttaggcttccaagcctcccaggcaatccgtgagacatggacttacctcaaaccacccacgcttgtctggctcctgcaggttggcatgctytgacagccactgggtgcctgggccaccaggaagtcctgctgctgctctgccactggcactgcctctccccatcctcatctacatccatagagatggaagtgatttgcatgggaatcccaccctgttcatcctctaaattcatgtgcattctcaggagctaaacaagcaaagga

SEQ ID NO: 148697 - DNA, 619 bp, Homo sapiens
atcagaagccaaaacaattatttagctttattcttattccccttttcatcagcgttctctcttatgctaatttgaaatagagactttgacttaataggaggcccatggcagctgacctattggaggaataccctaaccargacttcagatcaaaacgcacttcatggtggaatacagtcaaccaaagttctcacaaggtttttgaacaccaatttaaatggctttcattataacctttttaggatgatggatgtaacactgaaattttgtcttctaaccatacaatttcaccagcaatattcaagaagattttccagacatctgtttctatttttctctttatttttctcagattccctctaagctcattggctgaccttgacatcacagccaagccctaaatgaaagcattttatcactctccatttttttccaaagaaggtcttgagattttattttccaagcaataacagattccattcctgagacttcttatcatatctttagccacatcataaataactcgaattttatattgacaaagaaagttctattgtactttttttttttaagaaacatggttaacaagctgaataggacccctcattactttatataa

SEQ ID NO: 148698 - DNA, 552 bp, Homo sapiens
aggtggcaaatgataggccaagaacatctgatagtttttgctactctgtaaagttgaggtttagcatccaaaagtagttactttcctttcaatagagagggaggaagagcagagtgaataaaacaggagctggagtcttgcccatgtagttctatgaacctggacaagttgtttcacccctctgtggctcagtgtactcatctacaaataagggttacaatagtacctacttcaagagttgctaacrggacttaatgagttaattaatacatgtcaaaagcttggaattgtgcctggcacataacaagggctcaagatatgttagctgtgatcatcatagttatacgcttggtttagctataaattcttattttgaaactgcattcgtttcagtgtaagtgaaatatcaggaaacaatttgagcataatgtaaatgccaagtttactctctgcaattttatctgcaaaaagtattagatgaacccaggaaactgcactcagctgaattgagctatgtgggatccacaaaatccacacattcacaaacctgag

SEQ ID NO: 148699 - DNA, 607 bp, Homo sapiens
caacctttggggggaaagtaagaatccagaattttgacatcatctatttgctaaaatgactggttttcaacaaaatatcatgagataggcaaagaaataagatggtatgacctatattcaggaaaaatatcagtcaacagaaactgtcttggagcaggccctaatgttgaatttagcacakgaagaaacaatccaaaatgaagcaaaaaaaaaaatgactgaagaaaatactgagcagagcactagaggcctatgagaaaacagcaagctgtcattggactctgtactcggtctcagaagaaagtgataggaaaaaaaaatcaaaagtctgtgggaataacggccacacattgtaagcacataacaacacattctgaaaagaaagaatatcctaaaaacagacaaataaacaatatgtagaagtacaataataaaaaaaaatggctgattttcaggaaaacagtgcagcctcatttcaaaacacacacacacaagggtctgtcaacctagagttctctatatccagaaaaagaacatatatctagtaataatatccttcaaagcaaagatgaaatgaagacatattcatatcaactaaagctgagaa

SEQ ID NO: 148700 - DNA, 423 bp, Homo sapiens
aaaaagaaaaatgcaaaatgaataagtaaaaattcacagtgaagaaatataaatgccccttcactcccccaaaaaggaaaaacaaaaatgcccaaaataactgataaagaaatttaaattgaagcaatgagatatcacttcattggcaatctatcaaagatttaaaacagggaatgattttaaaaaagttagtactatattaaatgttggagamaatgtagagatatgagcatgcagaccttttgcaagctaatcaatttgtagaaaaatcatgaaaaatatgtatattatttaattcagaattcaaattatattaatatatattttaaaacagctaagaataaatgcaaagatttaatcaaaatgtttattgtagtattatttataaaaattacatagtctaagtacccaacaacaaattat

SEQ ID NO: 148701 - DNA, 447 bp, Homo sapiens
atcttcccaccaaaatctgtcctcccctcaactcaggacaaagacctcactgtaggagaacaaaggaagtggaaatctaacaggtggcagktcacctacaaaaccttagtgtcatgcaagagtgctgtcctgtgcggtcatgctcagtattgagccaatgtaatgaagaagcgtgtagtgtgtggtgggcattttccattatgttttggtggccccacatggctggacttcccaggagcttcccagagctcctgctttggttaatggtgagcatttaggccagacgaccttgcaaatatctttcctacatgggacacactgttgcagccttgctctaaggcatagcctgccttttttttttttttttggtatgataaaagaaatatagaatattaatatattctccctggctttcaaagattcccagtgcatttttctaatacagca

SEQ ID NO: 148702 - DNA, 447 bp, Homo sapiens
atcttcccaccaaaatctgtcctcccctcaactcaggacaaagacctcactgtaggagaacaaaggaagtggaaatctaacaggtggcaggtcacctacaaaaccttagtgtcatgcaagagtgctgtcctgtgcggtcatkctcagtattgagccaatgtaatgaagaagcgtgtagtgtgtggtgggcattttccattatgttttggtggccccacatggctggacttcccaggagcttcccagagctcctgctttggttaatggtgagcatttaggccagacgaccttgcaaatatctttcctacatgggacacactgttgcagccttgctctaaggcatagcctgccttttttttttttttttggtatgataaaagaaatatagaatattaatatattctccctggctttcaaagattcccagtgcatttttctaatacagca

SEQ ID NO: 148703 - DNA, 447 bp, Homo sapiens
atcttcccaccaaaatctgtcctcccctcaactcaggacaaagacctcactgtaggagaacaaaggaagtggaaatctaacaggtggcaggtcacctacaaaaccttagtgtcatgcaagagtgctgtcctgtgcggtcatgctcagtattgagccaatgtaatgaagaagcgtgtagtgtgtggtgggcattttccattatgttttggtggccccacatggctggacttcccaggagcttcccagagctcctgctttggttaatggtgagcatttaggccagacgrccttgcaaatatctttcctacatgggacacactgttgcagccttgctctaaggcatagcctgccttttttttttttttttggtatgataaaagaaatatagaatattaatatattctccctggctttcaaagattcccagtgcatttttctaatacagca

SEQ ID NO: 148704 - DNA, 370 bp, Homo sapiens
catacctcttttcctgtgctgtttaaatagatatgcatataagaatatgtgaagtgaaatggcatgatgtctaggattcaatgtaaaaacttcagcaaagataaaaatacaaacaataaagataaaatgttgcaagattttggtaatgaatctaggtgacaggtatttggaggtgtcatatagtattctatgtgagtgcttgaaattttttaattttttaaaaagagagatagagattgagagaggcagatcctcttgcctaataagattggcaacttcatamtttctcactcccctttccccacccaggctgttgcaacattggcttgtgcttacattttggtgttcagatccatcttcatttttttcc

SEQ ID NO: 148705 - DNA, 586 bp, Homo sapiens
actgcactcccgtgttcattgcagcattattcacaatagccaaaatatagaatcaatccaagtgttcatcaacagataaatggatttttaaaatgtgacatatatggacaataaaatattatttacccatacaaaataatgaaattctgttatttgcaacaacatggataaaactggaggtcattatattaagtgaaataagccaggcacraaaatataaatatcatgtgttctcactcatatgtgagagctacaaaagttatctcatggaggtagagagtacaatggtggttaccagagctgggaagggaagagggaagaggaggttgaagagaagttggttaacgggtacaaagacacagttagattgaaggataagttctactatttgagagtgcagtagggaaattatagctaataataatttattgtgtatttcaaaatatccaggagaattgtaatgctcccaacacaaagaaaataaaaatgtttgaggtgagggatatctcaattacccaaatttgatcatttcaggttgtatacagacatcaaaacatcacgtctatccctagaataggtacaattg

SEQ ID NO: 148706 - DNA, 629 bp, Homo sapiens
tttatttttccattttgtattgagcccccttccatctgtattgcatatggaccccctagtgggtcaccatcagtgcttaattctgtaaaatgcaatcatggctccgatgatatccataatgtcttctggatcttatgtcttatgattctgtgactttgagataaataagcccattaagtaggggaaggaaaagttctatccctgatgatgtcctattcagcttacaaatgtaaatagcttatttttaacatgaggcaagtctcaatctttgaaggtttcaaagtataattgcttttttggaaaaggctatttgagagcaggaaaatgttcttttgaatttgggtgaaaacttgaaggcatagcatctatgatttattagaactactggaataaattataacttgagatattcctttctcctatgaaatttttagtgtaataactatttctagaatacactcccataattaaaactaaaataagattaaagtactataaaacaaytgatcacaccaaatttaaacatttttattagactgagggaagttttcttgcttctaagagcacacagtagttttcaattaatttacaaacaaaaaaatgttatcccttctaaataaatttttatt

SEQ ID NO: 148707 - DNA, 557 bp, Homo sapiens
taggtataacagagattgattattgctgaaatactggtgcacacagattgctaaggaagctcagcaacaaggcaccaaactcagcccggatgtggggagaagcagggaatcttctatccaggggcaatgcctatgctgagccctagagacatgctcatgttgtatgcagaagaagtaggcaaagaaaccaggaaaggcagccatggccaaaggcatagaaatgagaaagctggtgtgttaaaaaccgcagaaagctctttcatattgaaccaaagagcaacaggaggagtacatcagaggccacatcataaatgtggcatgctcttgagaattttatatttaaaaatggtgaactattgaagaattgaaaacatgatcaaatttacactactgaaagaatactctaatagtgcattggaaggacggtagacctgttcataggatgttgcaaaggttcagggcaagatgytgtgggcctgatccaaattagaggcaatggagagagagagagagaaggggataaataatggatacaggggcagaatccatgggtctta

SEQ ID NO: 148708 - DNA, 557 bp, Homo sapiens
atgtgctctcattattcagttcccacttataagtgagaacatcagacagcatattaacaaaaagtaggaaaacattgatacaaaactgtctcatccttgcaaaaaataatattgatccttgaatacttaaactactttaaaaactctatctcattaacagatgtatttccaataactttaatatgtttaataattatttatcattttataatgcactatattgttttgaccaattgaatgcaaatattaataataacaaatccagtccagaaaaaaatactgagtacttaaaatttatggtcagaagactttttaaaatttaattttaatttctayatttcattgcatagattgctcaaaaaaaaagatttccaaacatagacacatattacaatgaaattctatagaagaaatcagatgaaaataagattacaaggagaaaaaatggcatagaatttccaactgtttaagaacttgttcatgaatattttaagtgaattattggatatcagatggtgatttttttattgattccactaggtatagtttaaagaagc

SEQ ID NO: 148709 - DNA, 510 bp, Homo sapiens
tatagctgtgatttctggtttcatctggtttcgagtttgacacaccttccaataactttttgatgactgcagttctcattcctccttcttttgctctttttctacctttgatacggtcttcagagagatgattgttcattcaaggcatatgtatgaagaaatctaggagtttacagactttaaatgggattgacttaatatgtgaccacatcaacaaataatgcagaagcaaccccaccctttctacagagttcccttttctggcataaataaaaacttgagatgaaaaaagcggtaatgactgcctgatgaactttatctgtgttgctctcttttgaactcttgctccttttygttcactctttttatttgcccccttggtctgtgctccctaaaataaagacatgaagccaaaattacaaggtacccaaaggaaaataaaattggatgaaaatgtacccagggacactgaagagagaaatagctaagaaaatacatataaagataaaa

SEQ ID NO: 148710 - DNA, 613 bp, Homo sapiens
ttactgcactgcagacagcctggggtggggtaagaccattctttgaaatgtattccaggactcacagagaggacagtggcctcttccaaggacacttattctgagatgcccctgctttccactcctgacttaaccaaagcgactcctcagaattaaggatttgaatctgatacgaccaagaaactgtttcaaagaagcaatggttttaatatttaatacggaaaagttaatagcatttcttttatttatttatttatttattattatactttaagttttagggtacatgtgcacattgtgcaggttagttacatatgtatacatgtgccatgctggtgcgctgcacccactaactcttcatctagcattaggtatatctcccaatgctatccctcccccctcccccaaccccatggagctaagttgccaccgttttctaaataatgtaagtttataataagttcattcaaaattacaaagaaacatagaaatttagaaacatcccacccattgaattttctaagaggttgtaaaaacctaagyccaaatcaatactccatatgtttaaattactaccaaatgcagctgagtgaacccagctcgctacctgttt

SEQ ID NO: 148711 - DNA, 516 bp, Homo sapiens
agtgtggatggactggaacaagcaaaggagaaaaatagtaagtgatggggtcagtgacatgggtggggtttacagcccatattatagtactgggattttattttatgtgtgatagaaagacatggattgggttggaagaaatctgactagagagctaaagggggaaatgataggaattgggctggattcatatatattttagaggtagacacacatgctttgctgaaggattagaaattaaatctgagggaaaataaggaatcagtcaaattgcaggggtttctctttttttacatgaatcattgaaggaagagtggtttggggaagatggaatcaaaagtttgaactgaaaaggttatgtttgagataggtttcrgacctcaaggagaagatgttgatggggggttggacttaagagtctggagctttggagagagctcagaaagaggaaaaaatattaggaacatcaccacgtataggtattcaagagatttaatgggatcagctagagagaag

SEQ ID NO: 148712 - DNA, 425 bp, Homo sapiens
tatactttgaattacaatcaaatattgttttatttattttattgctcaaaatgtcccagttttsgccactaggaactctttcagttggttcctgtgcatctttgacatatcctattattgtggggttttggtggggaagggaggaaagttccttgatttctaacgctgccagatgctctagcttcatctcgtatatttcttgccccagtcctagaatcagccagttctccaaagccttggttcctttcgtttgagaatgttattagaaaccaagttctggctgctggctatgctcgttgccactgggatgcttcttgctttttgaaaatcaaaggtgacagcaaaaaaaaaaaaaaaaaaaggaagaagttctgattataacattactttatccctgcagactttaactgatatgtccaattttt

SEQ ID NO: 148713 - DNA, 574 bp, Homo sapiens
tcttatacaccaacaagagtcaagccaggaatgcaatcctattcacaattgccataaaataataaaatacctaggaatatagctaaccagggaggtgaaagatctctgcactgagagctgcaaaacactgctccaagatatcagaagtgatacaaacaaatagaaaagcattccatgctcatggatatgaagaatcaatatcattaaatggcgatactacccaaagcaatttatagattcaatgctattcctatcaagctaccartgatattcttcacagaactacaaaaaaaactatcttaagattcatatggaaccaaaaacagagacagaataaccaaggaaattttaagcaaaaagaaaaaagctggaggcatcatgctattcaacttcaaactatatgctactgagctacagtaaccaaaacagcatggtgctgggacaaaaacagacacaaagaccaatgaaacagaatagacagcccagaaataagaccacacacctacaaccatctgatcttccacaaagctgacaaaaacaagcaatggggaaggactccctattcaatagtggt

SEQ ID NO: 148714 - DNA, 518 bp, Homo sapiens
acctaataaatgtttcagtcctggaaataacatgttgagattagcttaaagtaaatgcttgtctaatctacatcatcttccactgcagtttgctatgctatcaagttagttttaatccatgaatatctataagtctgtaaagaaataaattctttgtactgagttctgaatgtatttaytgtaaacttaataactctataatttaatctctgcgagatcactttgttgaccctgcttggttttgatcagacatctgagagaaattccactgttagactctgatgtgatacaagaaatgagctctcttacttctaaagtactggccaaattctgactcacaattgataagaaattctgtactacttttcatatcacagaactgtcatccatacatagttagcaccttattttaagttaggactttgtcttcaaaatacaaactataactgcctttaatagtgccaatattcatgtagttctttataactatcctaatcctttgtcagtgaggaactact

SEQ ID NO: 148715 - DNA, 581 bp, Homo sapiens
agtggccaagtcatgtacaagccacttcaatatctcccaattatattatcttgaaaattacagcctcaaatattcattctccaaatagccaggttcctagagggcattcaatgagatgatgaagcgtctcttcaaaataatccatctcagaaactgtgggcttttaacagaaaaactgtacttgtccaaggagaacacaggtctaaaattatttttcacttgttgtattatcactgtatttataaaaatcgatattaaaaataattatagtccaggtagacgcaatttatcatatagagaggtttttgaaatcctaatgctttgataattctataaattaaatgcttaaaatggcaacataaataaatattttaaataactcaggaggagcaaaytgaccacctgtttctcagaatccagaatccattttcactattctttttctctgaatgtctatctgattgtactcattttttccatgcccctaaaaccaacatctcactagaacatgctagatataaaatagattgagaaaactgagcctttatcaaggctttttacatattgatataagctgtaaa

SEQ ID NO: 148716 - DNA, 393 bp, Homo sapiens
taatctttattttcattgtatggatgaggaaggtgaagtatcatgcccaaattcacataatttcctagagtaaggtcaaaatgagaacgccagtttgcaaatttctaatccagagtgctctctactaycatattttatttctcaaaaagagcttctcctaagagccgtagggactctccttgtctggatattcccacaaggtatcacagcaaagaggagactcaaaagtgacctcaatctgtcagtacaggttgactatcccttaactgaaatgcttgagaccaagtattttagattttggaacactcgtatcatacttaaaagctgagcatccctaatccaaaagtcccaaatccaaaatgccccaatgaacatttcctttgagtgcaatgt

SEQ ID NO: 148717 - DNA, 562 bp, Homo sapiens
aatagccacaataaataaataaataatcgaggaatacagccarttagggaggggaaagatctctataagtagaactacaaaactctgccaaaagaaatcacagataacacaaacaaatggaaaaatattccatgctcattgataggaagaatcaatgttgttaaaatggccataatgcccaaaacaatttacagattcaatgccatattcctgtcaaactaccaacagcatttttacagttaaaaacaaaactgttctaaaatttatatgaaaccaaaaaagagtcccaaaagtcaaagcaatcctaagcaaaaagacaaaagctgaagacatcatactaccccacttcaaactataccatgagggcacagtaacaaaagcagcatgggactggtacaacagcagacacatagaccaatggaactggttagagaacccagaaataaagccgcattcttacaaccacatgattttcaacaaagctgatgaagaaaaagcaatggggaaagcactctctggtcaataaatagtgctgagataattggttacccatatgcagaag

SEQ ID NO: 148718 - DNA, 578 bp, Homo sapiens
aatcgaatctataaatcaatttgggaacaactgacatctcgacaatattgagtcttcctgtctataaacatggaacattatttcatttatttagtttttcttcaatgtttgtcagttttgtagttttcctcatatagatctttcctagtatacatttgtgtacttttctacggacagcaagagctgataaacaagtttgcctctctctcataagggctttaacttagatttttaactttctttttgcgtttcatgttttaaatagagtcccttttatcttagttataaagcatataagaatacaagtacatacagtgaagtgcatcaacaaatgagaaccacagttatttctcaggttcatcattgtaacaaaaatagagatgaatttaacattatatccaytgttaagaacattcttagaatcttccttatgagtttcaatcaacagagtaaaattcttacaatagcctgatgaaataactaagaatatagcataagtctattgtagagtagctaggacattgtggcacatctgaatgtcaagttaagagagtttcaaagccaggaaggttgaaaag

SEQ ID NO: 148719 - DNA, 578 bp, Homo sapiens
aatcgaatctataaatcaatttgggaacaactgacatctcgacaatattgagtcttcctgtctataaacatggaacattatttcatttatttagtttttcttcaatgtttgtcagttttgtagttttcctcatatagatctttcctagtatacatttgtgtacttttctacggacagcaagagctgataaacaagtttgcctctctctcataagggctttaacttagatttttaactttctttttgcgtttcatgttttaaatagagtcccttttatcttagttataaagcatataagaatacaagtacatacagtgaagtgcatcaacaaatgagaaccacagttatttctcaggttcatcattgtaacaaaaatagagatgaatttaacattatatccactgttaagaacattcttagaatcttccttatgagtttcaatcaacagagtaaaattcttacaatagcctgatgaaataactaagaatatagcataagtmtattgtagagtagctaggacattgtggcacatctgaatgtcaagttaagagagtttcaaagccaggaaggttgaaaag

SEQ ID NO: 148720 - DNA, 604 bp, Homo sapiens
tgattttatttatttggaccttttcactttttagttagtcagtttggctaacaatttgtcagatttgtttaacttttttcaaaaccaactttttaattgatcttttgtattactttttcatctcaatttcatttatttctgtccggattttattatttyttttcatccactaattttaagtttcatttgcttttgcttttccagttctttaagatgtatcattagattgttcatttaagatttttcctcttttttgatgtagccacttacaactataagcttcacttttagtactgcctttgttttattccatttggtatgttgtatttccgttatcctttgtttcaagaaatttttcaatttccttcttaatttcttcattgacccactaatcagtcaggagaacattgttcaatttccatatatttgtataattttcaaaacttctcttgctattaatttccagttttattccatcatggtcagaagagaagacgtgttttgtgatataacacatagtctatccttgagaatgatccacgtgctaaggaaaagaattactattctgcagaattactattctgcaggttttggatgaagtgtt

SEQ ID NO: 148721 - DNA, 604 bp, Homo sapiens
tgattttatttatttggaccttttcactttttagttagtcagtttggctaacaatttgtcagatttgtttaacttttttcaaaaccaactttttaattgatcttttgtattactttttcatctcaatttcatttatttctgtccggattttattatttcttttcatccactaattttaagtttcatttgcttttgcttttccagttctttaagatgtatcattagattgttcatttaagatttttcctcttttttgatgtagccacttacaactataagcttcacttttagtactgcctttgttttattccatttggtatgttgtatttccgttatcmtttgtttcaagaaatttttcaatttccttcttaatttcttcattgacccactaatcagtcaggagaacattgttcaatttccatatatttgtataattttcaaaacttctcttgctattaatttccagttttattccatcatggtcagaagagaagacgtgttttgtgatataacacatagtctatccttgagaatgatccacgtgctaaggaaaagaattactattctgcagaattactattctgcaggttttggatgaagtgtt

SEQ ID NO: 148722 - DNA, 601 bp, Homo sapiens
tatgctcatgacaataaatttagcactgatattgagactaacaattttttcatttcaattgttctactagggcttatgtttcttgtttctaatttgtaataaaatcagaataaaatcagaactgagttttctcaaatatatttagagataatcataaatagaatggcagtttatattaggtatagatatgagaaacaaagtggcattttcttcaagtcatttaagataaaatggcaataattggtatttcaataaaacctcattttcctaaatacatttattygacaatttctccattttaggctgaagccatgtgtagacaataatggaaaaaaatacatttatttggccaaaatgatgttataccattcatgtataaaacttattagctgtggtcagagaatactttaggctttatggagggctaattctctttataatttgtcacgttttctatttaattttttgtccatagaagattagacatattgtgattaacaaaatgaatgacattgttataacaacatttcataagaggtagccaataacttctagaagaaaaataacataaaggagtctttggaataatagttacagccct

SEQ ID NO: 148723 - DNA, 629 bp, Homo sapiens
ccgccactacgcccggttaatttttttgtatttttttttagtagagacggggtttcaccgtgttagtcaggatggtctcgatcttctgacctcgtgatccacccgtctcggcctcccaaagtgctgggatacaggtgtgagccaccttgcccggccctttatgtaatttttacactgttatgttttctctattagtcaatagatttatgcctattgatagaatgaatcagttcctacctcatcatcttccctatctctctagcctgtctagttttatcaggtatccatttcctaaccaaacccatgacaacagctgctgagtccaagggtcagtcccaggtacacaggtcacaagttgtgccttgggcagtctacttagcagctgctctgcacagatggaatgagcatcatcaccaaaaacatgcttctctgcagctaatgttgtgaagaaatagtgctaggcaatcccacagctcctrtgggatacactatgtagaagtaccactcttcagggaagattaatttgtcagttcagtcgtatatttcaatagtatgtttccctgcactacctgaatattttattgctttatagcacaatatagacattcagtactaacaaaatgacagaa

SEQ ID NO: 148724 - DNA, 590 bp, Homo sapiens
cccagagccagaacttaacctcaggttgcctgactttgagttcttttctgatgaagttcattgcttcataagatgtgcaaaatttgcaattcctcaatgtctctctggaatcactggagtctggccctttctcaacatgtgattccctttctagaaatccatgctctccaattccactcaatctagatcctaggctaagatccttggccaccagtatagggaactgtgacagatgcttcctgaccagcgtaccaagccaggccctcagacacttccacctgtagaatttttcttgtttctcaattaatttttcttcttttcttggttactgagtcccacattcagctctttgtctattgttcaacaacctctaactacttctttccttttgcacattttaggttcctatcacataaaatcrctgtttatttgcctagaatggacaaaatgtgacatcaagtttacaatcaaacaacatttaaaaatttacacacaaaaacacaaagccacaaagctagtgcccctcctctctcgtctctgttgacactgctacaggtgagggtagcaccacaagctgtagtacttacttc

SEQ ID NO: 148725 - DNA, 693 bp, Homo sapiens
tttaagtgcgctcttttgcatatcttgagttataaatcttcctcttgggtgtgaccatttctgttattagttgttgatttctctaagaattttccttctcttaaaaaataattaaaattttatttttatgtatttaatatatttttttaacttcactaatgatgaattttggttcaagagaactatagtgtagcaggtccattttgaaaccaaatgcagagctgcatctttcccttaaatattttcagacaagtcatgctgattcttaacgcctttaaggaacaaggagagcatttgtttctagatttttcatgatgattttatttatacatgatttttgatgcccattaaattcattattatctcattcttgttcttgttttccacytttttactcccccttctttgtctcttccttcttgttcatttcttttttttttctttcagtactgatggatagatcttgctatattggttcctttctgattattgttaatgttgtcccggtacttgcctccatatttaatctctctaattagttatcgctatataagcaattagaaatgtgtcaattttctttaggaaaatctctaacatttcccagagctgagagggtgtgtttatctctctcacttccattattgattaatactagattgatagaacttgtttctctacatttgcacatttgtg

SEQ ID NO: 148726 - DNA, 595 bp, Homo sapiens
acatgtcatcaggacatcctgagtctgtctcatgggcgtgcatctttaactttggccaaataaacttcctaaactgatggagacctgtctcagatatttatggttcacacagttattgcttagaaaaatttttaaaaattgagaaaaataatcatattttatatgattttttttcttttgtccaaggaacttccttctagtaaaaggtatcctgttgccaatagatttcctcagtttttgcttgtctgagaaaatctttatttctccatcttttttttggtttgttttttcaaaatattgtcactgactatgcaattctggattgcagggtttttcttaagctcttaaacttgttactttgtcrtcttgcttgagtgattcctgaacaagaagactgctgtaagttttaagcttatgtaaaccaaagagaaaaccctaagcctcccaactgactgaacagacaccctcttggccaaaggaaccgtgcagtaacctgaaaaactaaattcctggccatgactgaaaggcaggttagatacacctcactacacttccttctttttagagttcagtcacaactgacaaacattatgat

SEQ ID NO: 148727 - DNA, 563 bp, Homo sapiens
tggttttctttacaggcatctctctccctgcagatttcaacattgttttttgccctacaacctcagttctcccaagtgtccaaagaagtgtctatagttcagcttgttcagccatttcctgttacaagggctggagagactctctttccaactctctacaaatccaacacgacatagaaaataatatgatgattttaaaaattgaaattaaagaaaagcaagtagaaataatgaggcaacaaaaggcaatgacttcagaaaatagcttgtacatctagggttcggggaaaaaaaagaagagattggggttattagaatctagaactttgggaaagtggtctaacagttacaggtctcagagctaggagtagatggcactaccctgcaggtgctgttttctgagcagctaagaggagtgcccatgtggagacagaacttagacctctcaggacaaggcccttgctcactagtgctaatgcccgaaaagrgttgtactgaggctagctagaagtacaggaaaaaaataaacaggaagctaaaaaactgctgccatttttattacc

SEQ ID NO: 148728 - DNA, 494 bp, Homo sapiens
caaatctggtttggatccacgggaagcagtgaacattggagccaggctgcttgggttccaaatcctaattcttcattttagtatctatttaatttaacacagttactttagcttcttatatctctgattttttcattcctaaaatgagatgtgaataaaaacctgactgagttttttgtgaaatgaatttttaaatcacttagagcagtgccttccatatagtaagcactcaataaatrctcgccattatctattattttccgtggtggtggtagtaatagtaacagtagtagtagcagtattagtaatagcagtagtagtagaagaagaagaaaacgggaacaagaaataaaatgaggagtgaaaatttacttaagtgtagggaaatgctgaattagtaaagtcagagggggaacagggtaagcaaagactacttaaaaaaaaaaaaagtaaattcttgtattagttttctgtggccacagtgataaatacca

SEQ ID NO: 148729 - DNA, 494 bp, Homo sapiens
caaatctggtttggatccacgggaagcagtgaacattggagccaggctgcttgggttccaaatcctaattcttcattttagtatctatttaatttaacacagttactttagcttcttatatctctgattttttcattcctaaaatgagatgtgaataaaaacctgactgagttttttgtgaaatgaatttttaaatcacttagagcagtgccttccatatagtaagcactcaataaatactcgccatwatctattattttccgtggtggtggtagtaatagtaacagtagtagtagcagtattagtaatagcagtagtagtagaagaagaagaaaacgggaacaagaaataaaatgaggagtgaaaatttacttaagtgtagggaaatgctgaattagtaaagtcagagggggaacagggtaagcaaagactacttaaaaaaaaaaaaagtaaattcttgtattagttttctgtggccacagtgataaatacca

SEQ ID NO: 148730 - DNA, 490 bp, Homo sapiens
tgtattcttactcgtccctcagaatgccatccatcttagacctcctgggccaccataaaagaataccacagactgakctgcttaaataacattttttttttttttctcacagtgctggatgcagaaagtccaagatcaagatgccagtgggattggtttctggtgaggcctctctttctggcttgcagatgctgccttctctctgtttcctcacatggtctttcccgtatgtgcacactctcctgatgtctcttcctcttcttatgaagacaccagtcctatcggatgagggttccaatcttgtgacctaatttagccttaattatctccttaaagaccctatcttctggtgaaatcacattggggattagggcttcaatatataaatttggaaggggaaccctgtttggttcataacaccacctaagcactacttcctcaaggtttctcaaacacatacagtttagtcagaactacctgttgtacagtt

SEQ ID NO: 148731 - DNA, 570 bp, Homo sapiens
ctcagcttctcatttactcttttactacagtgagaggccttgtaccacatggtgggaaaacacacgtaataattygacagccaactgaagctctagtactaaatccaggctagccacagactcaccacttgattttatttggtcacttcaatttgggcttcagtatccttgtttgcttaataagggcatttatttggaaagcaacctctcttaattctgatgtcctacggtattttcaaacaactgaaattagaactcactttttataaaaagtttttcctgagtgtccatggagtggatctaatttgtgtatttatgaccatagaaagtgcttctttcatcaatgctaaaaaggtacatggtctctaagacagaaggaaagatagcttatttttttaaagtgagagaagttacttagagaatagtgaaaattgagtttagtaatgtttagtacatactagaaaagcctcaaaaacaggtttgcaaaagttattaattcccacaacacagtggaatgctttggaattatcatcaaatttatttatttttcttttatacaatggttgtttc

SEQ ID NO: 148732 - DNA, 579 bp, Homo sapiens
acagctttctcaccttttgcttttatgagcttatgagcttatgtactttgggaggctatacgacttggtatattacctatgaagtggcataatatcatccctacaaattatctgtatagtatttawtctattcatttctatgaaagtttaatctttatcaattcagtaaaataaagtaactaacacaatcttagaaagcagccaggttatgagcatcattgaaggtttattacaacgtactttccctcagctgtcaggacgtggcccattctaatgaacgaatgaaccaagcaaggcatgtggctctaagaatctatccaactcaaataaaacataggccaaccaccttaacatataacaatgagggattttcttttcattttaaaaataatttcctaagaaaagtattggccataaaactaaaaatatatgtaggatacacttaaaataataagtttattcagtacaggcaataaaacgtatcatatagggacaataaaaatgtgtcaagtagctaccgtgtaccaggcttttgtctaataattgagggtgtaagatgtattagacaagctgctttaa

SEQ ID NO: 148733 - DNA, 478 bp, Homo sapiens
ttttaaggaaatggcattcaagtggaggagatagataataaataaaaccaaaaagtaaaaatatatagtatttcagatcatgataagggctgagaagaagaaaaagataaaccaagaaacatagctatgtaatgtatatgtttgggggtggggtgatggggctttgaaattttaagaatggtcagaaaaagtatcactaagaagatgacttctgaataaggatatgagggaattcaaaatacaaagcctttttagcttcttgaccttctcccctctaatagtctgttgcctaccctacctcagcmgtatgtccccatagacacaacttatatcttcttgataccaagaaatgtacccttccgttctctcagttccaaacctgccactctgtgatcaccacccctatcattccaacccctacctttgcgcattctagctcatacagtccttcattcccactggatctagggttagttag

SEQ ID NO: 148734 - DNA, 478 bp, Homo sapiens
ttttaaggaaatggcattcaagtggaggagatagataataaataaaaccaaaaagtaaaaatatatagtatttcagatcatgataagggctgagaagaagaaaaagataaaccaagaaacatagctatgtaatgtatatgtttgggggtggggtgatggggctttgaaattttaagaatggtcagaaaaagtatcactaagaagatgacttctgaataaggatatgagggaattcaaaatacaaagcctttttagcttcttgaccttctcccctctaatagtctgttgcctaccctacctcagcagtatgtccccatagacacaacttatatcttcttgataccaagaaatgtacccttccgttctctcagttccaarcctgccactctgtgatcaccacccctatcattccaacccctacctttgcgcattctagctcatacagtccttcattcccactggatctagggttagttag

SEQ ID NO: 148735 - DNA, 535 bp, Homo sapiens
aggtgtctttttcatataacggcttctttttctctgggyagatacccagtagtgagatttcaggatcaaatggtagatctacttttagttctttaaggaatctccacagtgttttccatggtggttgtactagtttacattcccaccagcagtgtaaaactgttcccttttcaccacatccaagcaaacatctattattttttgattttttaattatgaccattctcgcaggtgtatgatggcatcacattgtggttttaatttgcatttccctgatcattagtgatgttgagaattttttcatatgtttgttggccatttgtatatcttcttttgaggattgtctattcatgttcttggcccactttttgatgatactacttttttttttctcactgatttgtttgagttccttgtagattctaggtattagttgcttgtcagatgcatagtttgtgaagattttctcccattctgtgggttgtcagtttactctgctgattctttcttttgctgtgcagaagctttttagttt

SEQ ID NO: 148736 - DNA, 535 bp, Homo sapiens
aggtgtctttttcatataacggcttctttttctctgggcagatacccagtagtgagattkcaggatcaaatggtagatctacttttagttctttaaggaatctccacagtgttttccatggtggttgtactagtttacattcccaccagcagtgtaaaactgttcccttttcaccacatccaagcaaacatctattattttttgattttttaattatgaccattctcgcaggtgtatgatggcatcacattgtggttttaatttgcatttccctgatcattagtgatgttgagaattttttcatatgtttgttggccatttgtatatcttcttttgaggattgtctattcatgttcttggcccactttttgatgatactacttttttttttctcactgatttgtttgagttccttgtagattctaggtattagttgcttgtcagatgcatagtttgtgaagattttctcccattctgtgggttgtcagtttactctgctgattctttcttttgctgtgcagaagctttttagttt

SEQ ID NO: 148737 - DNA, 502 bp, Homo sapiens
ggtttgggtttggtttgatcttatttctctggttccttgaagtgtgaccttagactatctatatgtgttctttcagactttttgatgtaggcatttaatgctatgaaccttccttttaacatcgcttttgctgtatcacagaagttttcataggttgtgttattgctatcattcagttcaagtaattttgaaatttccattataatttcattgtttaccaaaatataattcaggagcagattattttatttcaatgtatttgcatggtttgaggattccttttggagttgatttttaattttattccactgtggtctgagagcatattaatataattttgattttcttaaatttattgaggcttgttttgtgcctatcatatgatctaycttggagaatgttccatgtgctgatgaatagaacatatattctgcagttgtttggtagaatgttctgaatatatctgctaagtccatttgttctagggcatagtttaagtcca

SEQ ID NO: 148738 - DNA, 371 bp, Homo sapiens
aggtgttctatttctagttttgcagcatcttactgaacaccagcacacactgaaaatagatcacatatttccctggcaaacaatttacratttgaattttcaatgagtccagcgttgatggacttgtgacaggacatgtgattatttggtggattcagaatgaacctattaatagcttttcagataattcatctaacgtggctgtaggagcttcacaaagtaataaagaagtcgagatttcagttaagagagtatcagacaatatgactcctgatggactgggcataccaacttctaggaagctttagcagagatttcattgcaaatggtagagagagttagcctctctcctctttcccttcgcactatgt

SEQ ID NO: 148739 - DNA, 559 bp, Homo sapiens
actgaatgtgtgtgtgtgtgtattctccagagcctgcaatttctcatcttctctgatgatatttctataaaaccaataaacaaccacttctactttcwtaattttgaagtccatccagtagacaaatcaccattctttctcttctatttggcctttagtgaggcagtcatgtacttggaccaaccaagaagtaagtgactaggatcattttcaggacctggttagatctacagaaacaaaagcaaaatgtgttgaaattcccagtgtgaaaacagtgcctttaaatagagagcctgctatcaatctcaaaggaataccattatttccgttgtctctatctgggctattgcagcatttctaccaacccatttactcttgagaagagtcctctggtgatttccatctcacaggctgccttaggattttccttattagttaatcttgcattaaatattgtagcataatagtttccttgagacagccactttggactaggataagtttttaagatttcatttcaatcataagactaagtatctatctggcaaaaaatacactg

SEQ ID NO: 148740 - DNA, 556 bp, Homo sapiens
gtgacctggctttagagatagaggagattttactacaaaaatacaatgatgaggagaaagagggagacataaaagacaaaacattrtaataggcaaaatattatccaaaagaaggaaaagtccatgcttaaatgctctattagcttggtgggctacaggagaaaaattttagaagacagatccacagctagtcagaggtcagattttgggggattttaaatgccatacttggtgtcaggaccgttatctgtagacattatagaggtgggaaaggtttttgaacaaaggagtggcgtgactacttgtcatttggaaggaagactctgattaaggatgaagaagaatttataacggagaaataatggagaccaacagacaggtagttgttgaattatttgaataagggtacaggatgctgtggtgtaaggcaatggcaatgagaatacaaaaggagaagcagagtcccaagactttagcaaccagtgagctttaacatcggtatcagggtggacagtgatgctctcaattaaactagagagcacagaaagacagggaa

SEQ ID NO: 148741 - DNA, 585 bp, Homo sapiens
gtccattttgataaatcaagtcctgcattcataatttttatctttaattcaacctatctgtgccttccacacagttgatcacttcttcttgtagtaccctgttcatttggcttccaggacactattctccttgttcctctttcatcttatttactgtacctggttattttacttttctggtctcctatcatcttataataatgaaattttccagggcttaatcattagacctctttcctctttttggcaaaacccactgactttcatttcaccctatggatgtgaatactatgcctatactgacacttgcaaacattcatatttccattcagtacccttccttgaactccagattcttactttcaactagtcactttacctctcctcttagatatctaatatataactcaaatgtaacagctgcaaagrtgacttcatttattttcttcttccttccaaaacgattttgtttttccgaatcagtgacaacgacttcctttaaattgctcaagtcaaatttcttggggccattttcacttttctctttctctcatactctaaactgtgaaggaaaaaaatgctctg

SEQ ID NO: 148742 - DNA, 486 bp, Homo sapiens
ctacctttttatatagcatgatgaacatacagttctcacacatagcataacagtagaaacaaatgtccaacaactaataacatgtccatagttatgaattgaccacataaataaacagactgtccattttcctgttcccattttatgaatgtatgattcaattttacttcctttgatgtcaacccttaatttctcctctagtcttctctagtccacatcatcttgcttttcccattttctcacttgcctacatgcatgcaaaagaaattcatagtaagagccagcatttatgcactttatgctacaggaactgttactttctttatagaccatatcttttttcccagtagcgctaaagagagctactattattatcatatctatataagacatgargacactagggctgactaaggtttagctatttattcaagttcacacaggcagggtgtttagattattgttcagcaaaactctcttcccttc

SEQ ID NO: 148743 - DNA, 367 bp, Homo sapiens
aagaggcggagtgccaaacctaaaagctggttggactctccctccttttacttcgattcataacactgtttcaagacatctgttgtcaaaagaggtttaattgactcacagttttgcatgactggaaaggcctcaggaaacttacaatcatggcagaaagcraagaggaagcgaggcacttcttacacagcagcaggagagagagagagcgtaggggaaactgccacttttaaaccatcagatctcgtgagaactccctcactatcatgcaactgcccccatgatccaatcacctcccaccaggaccctcccttgacatgtggagattacaattcgagatgagatttgggtgaggacacagagtaaa

SEQ ID NO: 148744 - DNA, 367 bp, Homo sapiens
aagaggcggagtgccaaacctaaaagctggttggactctccctccttttacttcgattcataacactgtttcaagacatctgttgtcaaaagaggtttaattgactcacagttttgcatgactggaaaggcctcaggaaacttacaatcatggcagaaagcaaagaggaagcraggcacttcttacacagcagcaggagagagagagagcgtaggggaaactgccacttttaaaccatcagatctcgtgagaactccctcactatcatgcaactgcccccatgatccaatcacctcccaccaggaccctcccttgacatgtggagattacaattcgagatgagatttgggtgaggacacagagtaaa

SEQ ID NO: 148745 - DNA, 580 bp, Homo sapiens
tttataaccacgctgactcctctctcccactatccccaaccaacccctggcaacaactactctgttgtttataatttttcattttgagaatgtaagaaaccaccagtttacgataattcatttctatggactatgcagtcattaacttcagaaacctatttattgcttgactttggagatcaatggtcatgatcctttaaaatttggatctcaacaccattcaccatccatagccataaaataatgtatcaattgggtacttcaaaagtaattgctactatataaatggtaaattttagtctgaaaatatatgtcatagttaaaaatagatataagatacttacagatacatattcaggaatagaaagctgatcttcaggaaaagcttttaatttaayatattgctcttctgtcaactcaaagtcacgcaggtttcgacgaacatctccagctttttctcttagctgaagatttgtctcttctagttgtttctgtctcaacaaaatggtttccatttcttgtttcattaattcttgatatttgctacattagaagagaatttatggcaggctttaaaaaa

SEQ ID NO: 148746 - DNA, 517 bp, Homo sapiens
attgatttatgcatatacatcactcattacttagtagatgttcattcatctcaatttgccctggagtaatgaaaactgctaactaaaaatattatcaattgaactatttgcgaattacacaaaatatttgcatcagattcctttcaactggtgttgaattttttaaaaatcctgtataaatatataaggctagttggccatataaatgcaaagtgttacagacactttggaaggaagtttcttacaaaactaaacatatgtataccatatatacaatccagcaatcttcctcctttttatttaccctacaacattgaaaatgtatgtatacacaaaaaaaatacrcacagatgtttatagcagctttattcataattcccaaaacttggaaacaactgagatgaccttcaggaggtgaatggacaaatagtggaatgttgttcagggctgaaaaggaatgagctatcaagccatgaaagatggaggaaacttaaatgcctattataagtaaaagtaa

SEQ ID NO: 148747 - DNA, 507 bp, Homo sapiens
gaattcttgtatgttttatatataccttatacacatagcctgaaggtaattttggttttttccctcagggatgctgaatgaactgtgtattgtgcacctgcattttgactttgatccattatatgaggtgtggaattttccactayggtgttatgtcagtacttaataagttttggattttgcggcatttcacatttcagattttggaattaggagtgttcaacctgtactgatcatatggtaggcactaaagaaatagtttttgattacaggcgatttgtgaaaataggaagtaaaaataggtgtccatttgaaaagaaggcttaaagaagaaaccacaaatgagatggactaagaaaacagcattgagttatatgaagggaggataaaaggcagaggagaaaagcaagaacaaaggcatgaagtcaggaataagcatagcctttatacgtgggggggtctaccatgaagagaacaaactggaaactggagagagaagggagagaa

SEQ ID NO: 148748 - DNA, 512 bp, Homo sapiens
aatgagataccactagatacctattagaatgtctaaaattttaaatacagaccataccaagtgtcaacaaaaatgtggagtaactggaactttcatacactgccaacaggagtggaaaatggtacaaccacttcagatacagtttggcagtctgttaaaatgttaaatagacacctgccatatgatctagccattgtatccttctatttaccaaagagaaattaaaacttatgtctatacaaaaacttgcacatgagtgttcatagtttcatttgtaattgcaaatatgtcattattatcatttctattttaccatagaggaaacttgaattcatatggattaagtaaagtgctcagaattcaaaacaacccaaatgtcccccaacagggtaatatattcatacaatacaaacgagccacaaagggatatactgctgatgcacagaatgacatggwtaaatctcaaaatgattatgttgtgtcaaagaacccagataaaaaaagagtacatg

SEQ ID NO: 148749 - DNA, 172 bp, Homo sapiens
ttggctgaaaaacatgacctacgttgaagtgagtctatttagtgtcattttattgtacttggtgctaatatccatttgttttgctccataaatattaacacatttgatcacaggatgctatcctggatccyactgggatgttttataatatatggcatatattcctttttac

SEQ ID NO: 148750 - DNA, 443 bp, Homo sapiens
aaggaacttctttagaagttctgactttagtcagaaggggatagcaataacatstaacactaacgtagcattactatgtgccaagtcctattctgagacctttacatgttttactttgttgaatttttacagcaatcctgtgaggtatgtgtactgttatccctgttttacagatgaggaaactgagggtcagagaggttaagtaaattacctaaagtttctatacaactagtaagtggaagagctgagatttgatcccagcagtctggctttagagtccatgttctttaatccaaaagttaatactgacttataataatagctaatacgcacatagtgttttgatataccaggcactcttctaaccactttattaattcatttaattctcacaccaactctataaggctttagtgttgtcagttttggcatgctgaagttaa

SEQ ID NO: 148751 - DNA, 580 bp, Homo sapiens
atgggaggttactgaacatgagcatatgtcagacttacctggaaaatctccacaactgttgagcctgtatggaggttattagggatttggggttggtttaatgctcctatcaccccattagtacacataggcttagaaaactttggtgatagagcactctatgatacctgtttttgttttgtcttattttgttttgtcatgggggtttcgtttgtttggttggtttcggttttcttgagtcacggtcttgctctgtcacccaggctagagtgcagtggcataatcatggctcaytgcagcctcaaccttttgggctcaagtaatcttcccacttcagcctcctgagtagccaggactacagatgtgtgccaccactctcagctaattatttttttttttgtagagacagggtcttgctgtattgtccaggctggtctcaaactcttggccacaagtagtcctccaatctcagcttcccaaagccttgcaattacaggcatgagctaccacacttgacctgtgatgcctgttttgatggactcatgcacagtgtggagcaaagtcaaggtgccctgagagg

SEQ ID NO: 148752 - DNA, 580 bp, Homo sapiens
atgggaggttactgaacatgagcatatgtcagacttacctggaaaatctccacaactgttgagcctgtatggaggttattagggatttggggttggtttaatgctcctatcaccccattagtacacataggcttagaaaactttggtgatagagcactctatgatacctgtttttgttttgtcttattttgttttgtcatgggggtttcgtttgtttggttggtttcggttttcttgagtcacggtcttgctctgtcacccaggctagagtgcagtggcataatcatggctcactgcagcctcaaccttttgggctcaagtaatcttcccacttcagcctcctgagtagccaggactacagatgtgtgccaccactctcagctaattattttwttttttgtagagacagggtcttgctgtattgtccaggctggtctcaaactcttggccacaagtagtcctccaatctcagcttcccaaagccttgcaattacaggcatgagctaccacacttgacctgtgatgcctgttttgatggactcatgcacagtgtggagcaaagtcaaggtgccctgagagg

SEQ ID NO: 148753 - DNA, 367 bp, Homo sapiens
aagaaaaaacactttgatgtgagcctgacctttcatgatgctttttayttcaaagtctttgcttattcttaagaatagcagggtcaagtattcatagtgctgagccaaaagcagcagttaaaagacaaaaaggcacaccaaaattcatcagttgttcacatctggaaagacaaatagagcccagagttaccacaatagccagactgagagggtcaacatctgagaaagaagaaagtagagcgaaaatataacattttgtaccattttacagcttcgaggtatttgctgaattgtaagctacgcaagtgcccaaaattaaatcaacagaaagtagcaactaccaagttaaaaataaaagaaaagcttc

SEQ ID NO: 148754 - DNA, 367 bp, Homo sapiens
aagaaaaaacactttgatgtgagcctgacctttcatgatgctttttacttcaaagtctttgcttattcttaagaatagcagggtcaagtattcatagtgctgagccaaaagcagcagttaaaagacaaaaaggcamaccaaaattcatcagttgttcacatctggaaagacaaatagagcccagagttaccacaatagccagactgagagggtcaacatctgagaaagaagaaagtagagcgaaaatataacattttgtaccattttacagcttcgaggtatttgctgaattgtaagctacgcaagtgcccaaaattaaatcaacagaaagtagcaactaccaagttaaaaataaaagaaaagcttc

SEQ ID NO: 148755 - DNA, 511 bp, Homo sapiens
ttatacagctcactgcactcacaaaaagcataatttgacccatagtattatactatctgaggtatagctgattttcctggataataatgataatccctagaatttgcctgtagtgtttctttttatttttggagctataaaagtgttttaaatacttcattctgttttctcaacacagttcattaggattggccaatttatctgtatacttaattgatggagaatcaaagggcaaccagacaaactagatggcaggctggaggctgttatagatataaacaggcatttagtctcttgttagcctgttcaatgcgtggatctcatgaaccacstttttgcctttttttctttcaccattaaatatattgactgtccttctgctagtgaaaatgactctggttatattttctgttgatgacttctgaatctataccctcgccatcatcttgcattcaagttacactccaataggtgcagcatgccgttagacattttttggagttagtctgtc

SEQ ID NO: 148756 - DNA, 493 bp, Homo sapiens
tttacatttttctctgtttttaattattacaaacagtgctgcagtggcaatacacaaaactcttagggaatatgtgtgtggagctgctggttgcattttctattttaatcatttatgttcaaagctttctaaaatatatgatcatcgtaaacagagcctattgaatatttgaactttacttgatgacctgatatcatgattatggatattgatttttgcactgcaggcaaatagataaacagtcaggccgtcagggactatttacmattaccctaagtggcccctttgagttattgcgcttgtttatattattaataaaatcatgtaattaaaaatctgttcaggacctaagaaattatcaaatgcaatttctttcctttacagattaaaatgctgaggtctacaaaactaaattcatttatataaggagacctcacagatctgtgactctaaccaaggtctcctgggtcccaggctagttttgtgtttgtct

SEQ ID NO: 148757 - DNA, 493 bp, Homo sapiens
tttacatttttctctgtttttaattattacaaacagtgctgcagtggcaatacacaaaactcttagggaatatgtgtgtggagctgctggttgcattttctattttaatcatttatgttcaaagctttctaaaatatatgatcatcgtaaacagagcctattgaatatttgaactttacttgatgacctgatatcatgattatggatattgatttttgcactgcaggcaaatagataaacagtcaggccgtcagggactatttacaattaccctaagtggcccytttgagttattgcgcttgtttatattattaataaaatcatgtaattaaaaatctgttcaggacctaagaaattatcaaatgcaatttctttcctttacagattaaaatgctgaggtctacaaaactaaattcatttatataaggagacctcacagatctgtgactctaaccaaggtctcctgggtcccaggctagttttgtgtttgtct

SEQ ID NO: 148758 - DNA, 510 bp, Homo sapiens
tactacccatattaccaatagaataataaccttcttatttaacatttactcagcacatctactaacggatcacaaagatttgtcaagaaattgacacaaagtgagaaaatggacaaaccacttacacatttgcttctaaattcttttctagtctgtaataacttctctctttcctctgaattaatcacaatattcctattcataaaaaatacatatgcactagaaataaaggtctgttgttcygcaggcttgggcatatcccagaagatactctccttgtgcacatcccataggatattgtcatactttccttgtaactaacatcatagcttgcttagtccgtgagactgccttgccattgcccccttcaggcaagtgagttgcatgcttaataggtaagtggctggccctggactgaggactctttaggtattcttctcttgacttcaagtggaatggcatccaaagttctgtaaatgaaaatgcttataaatcagaactacattccag

SEQ ID NO: 148759 - DNA, 597 bp, Homo sapiens
tgagggaatccccaaatggctccaatgcttctgtccaaaattcctctcacaggtgcaggattcagggagactgaaaagatacagaataataactacatttttctttagtaatttgccattgatattatttgttcagcatttaasactagaatgtgttcctatagagtcttggcaagataatggaacatgaaaatgtatattggaaaagccaggagcttttacaattaaaacatgaagactaaatatttttgaattatagaatctgcctccatcccatccatatttattccaaacaaatatctgtagataatccaaccattcagaaagaaaaaagcactgataataaggacaaatattatggatataggtttaaataatttttaaattgtgattttttttctgtatctttatataaacctgactgtttacaaggagtttgaaggtatgagtttcatgggtgacagacagagagcaagtaacctccattttaaaattggctttctttgaccatcctttaattgttaagggacctacatagaaattgtcttgcttgaaaaaccttttgttttcctgatttcattgatgtagaagttaaaa

SEQ ID NO: 148760 - DNA, 560 bp, Homo sapiens
tcaatagtacttgtgatggctctgccaaggttgggagtccaagtacaggaacacccaaaacaaaatttgcaagcggctggaattttgcccaacctagtttctaacacattggcctgaaatactgtgatttcagtataaaacatattatgctgaaatgaagagacattcctctaatgaggcaggacactttttgtactcagtgagaagtatcattagggaagaaactcggatggggcatcaaatgccagagtgaaatataggccaaacaagaaaccagtcataaaaaaattttacctctggtatgtaatttttcagtgtgcactaagaccacttgcaaagaggcagcttcccttgttaaaacttgtcattgcttagttctctgctcgtaaaactcagtctgctaagtttgctccttttctagttcctcaagttccttttyctagattgtttggaaatttatcactataaatttccctcttacaactgcttttgctgcatctcgtaagtttttgtatgttgtgtttccatctttgtttgtctcaaggtatttgcttaatttc

SEQ ID NO: 148761 - DNA, 560 bp, Homo sapiens
tcaatagtacttgtgatggctctgccaaggttgggagtccaagtacaggaacacccaaaacaaaatttgcaagcggctggaattttgcccaacctagtttctaacacattggcctgaaatactgtgatttcagtataaaacatattatgctgaaatgaagagacattcctctaatgaggcaggacactttttgtactcagtgagaagtatcattagggaagaaactcggatggggcatcaaatgccagagtgaaatataggccaaacaagaaaccagtcataaaaaaattttacctctggtatgtaatttttcagtgtgcactaagaccacttgcaaagaggcagcttcccttgttaaaacttgtcattgcttagttctctgctcgtaaaactcagtctgctaagtttgctccttttctagttcctcaagttcctttttctagattgtttggaaatttatcactataaatttccctcttacaactgcttttgctgcatctcgtaagtttttgtatgttgtgtttccatctttktttgtctcaaggtatttgcttaatttc

SEQ ID NO: 148762 - DNA, 479 bp, Homo sapiens
ttgagcagttaaatatacaactagattggatagtacatttaaaactcatggttttgrtatgcatagattatatgtagcaacacaataaagaatgtcactacaaaatgatgaataaaaatattttaaaaaagaaaagtatgatacagaattgataaaccttattaggtgccaagaaggccaaaattttggaggaaaaaaataaaaataaaatttcacatactagctaatgtcaattgagaaaaacgacaagtctcagtcattttaggtttatttgccaaagttaaggatgcgcacctgggagacaggcctatgccttcctccgaagatgattttgagggctccaaatttaaaggggaaagggttggatattgagaagtacacaattttcatgtaagaggagggtaggaaaaaatagtcattcatgcctttggctcagtgaatctgcattttttttaaatatatataagatgacatagaaa

SEQ ID NO: 148763 - DNA, 479 bp, Homo sapiens
ttgagcagttaaatatacaactagattggatagtacatttaaaactcatggttttggtatgcatagattatatgtagcaacacaataaagaatgtcactacaaaatgatgaataaaaatattttaaaaaagaaaagtatgatacagaattgataaaccttattaggtgccaagaaggccaaaattttggaggaaaaaaataaaaataaaatttcacatactagctaatgtcaattgagaaaaacgacaagtctcagtcattttaggtttatttgccaaagttaaggatgcgcacctgggagacaggcctatgccttcctccraagatgattttgagggctccaaatttaaaggggaaagggttggatattgagaagtacacaattttcatgtaagaggagggtaggaaaaaatagtcattcatgcctttggctcagtgaatctgcattttttttaaatatatataagatgacatagaaa

SEQ ID NO: 148764 - DNA, 479 bp, Homo sapiens
ttgagcagttaaatatacaactagattggatagtacatttaaaactcatggttttggtatgcatagattatatgtagcaacacaataaagaatgtcactacaaaatgatgaataaaaatattttaaaaaagaaaagtatgatacagaattgataaaccttattaggtgccaagaaggccaaaattttggaggaaaaaaataaaaataaaatttcacatactagctaatgtcaattgagaaaaacgacaagtctcagtcattttaggtttatttgccaaagttaaggatgcgcacctgggagacaggcctatgccttcctccgaagatgattttgagggctccaaatttaaaggggaaagggttggatattgagaagtacacaattttcatgtaagaggagggtrggaaaaaatagtcattcatgcctttggctcagtgaatctgcattttttttaaatatatataagatgacatagaaa

SEQ ID NO: 148765 - DNA, 309 bp, Homo sapiens
gaattcggggtcgggggtggcgggagaatgctgtggtttaagtgttgtgtccctccaaaattcttgttgaaatgtgatgcccartgcaataatagtattaggaggtggggcatggaagcgaaactaccctgtggaggagagaatagttttgaactgcatgagccagaaagccagaaagccagaaagccattgtatgggaaacacctttaatcatcagaggtgcccagagtggccaattggaatctcgtcaaccaaaactggaaattttctaccgtcaaggctatttctgataatgcagtgatacagttg

SEQ ID NO: 148766 - DNA, 521 bp, Homo sapiens
tgggtaaagaatcatcataacttaagcagaagcagaggaatctagaaaaagtacattttggagactagatgactaaggaaatgtaaataaagctctaattctttacttttccttttggtctttccatcttgaaaacatgaaggccagtatgattatatgcaagacaataaacatccagtatctttttctttatacaattgyaattttaaaactcacaataaaaagaaaaaactcataataaaaaggaaataaaggaaccaataatatagtattgatgccataatcatttgagctatactcacaaaagaagatagtgattctaagagcttcaaatggagtgatatggttggttgattttgtcaccatttttatggattgaaattatacagggtaatcttgaaaagatgcacaagtttcctgggagactcatctgtcaaaattcaaaagagaggatgggcaagagaggagaaactccagaggaggacacagaaagctgatgcatttagagtaaacactaagag

SEQ ID NO: 148767 - DNA, 652 bp, Homo sapiens
aatgctataagaagctttctggaaattagagttgtctaatcaaactgaattctacagaagcagacagatttctttcactagaattatgtaagtagatgttgcagctcttcagcaactaaagacatttctgtactgattggtttttgaactataatatatgaataagattatttctggacatcagatttcagtaatcatttcctaaatgttatcatgataagctttctaagagtttatggtaattacccaagttaaatggcaagagaaattggtgyttatgtcaacatggtttaagaaaaattagtgcctggtgtggggcgtggtgtctcacccttataatcccaacactttgggaggttgggccgggtagatcacttgaggccaggagacggcaaaaacctgtctctactaaaaatacaaaaattagttgggtgtgatcgcacactcttgtaatcccagcttcttgggaggctgaggtgggagaattgcttgaacctacaagagaggtggccgtgagctgaggtctggccactgcactctagcctgggtgacagggcaatgccctgtctcaaaaaaaaaaaaaaaaatgtaattaagattttcaaaggtaggtttggtgctaatattatttagtgttatctgtgggcatttc

SEQ ID NO: 148768 - DNA, 652 bp, Homo sapiens
aatgctataagaagctttctggaaattagagttgtctaatcaaactgaattctacagaagcagacagatttctttcactagaattatgtaagtagatgttgcagctcttcagcaactaaagacatttctgtactgattggtttttgaactataatatatgaataagattatttctggacatcagatttcagtaatcatttcctaaatgttatcatgataagctttctaagagtttatggtaattacccaagttaaatggcaagagaaattggtgcttatgtcaacatggtttaagaaaaattagtgcctggtgtggggcgtggtgtctcacccttataatcccaacactttgggaggttgggccgggyagatcacttgaggccaggagacggcaaaaacctgtctctactaaaaatacaaaaattagttgggtgtgatcgcacactcttgtaatcccagcttcttgggaggctgaggtgggagaattgcttgaacctacaagagaggtggccgtgagctgaggtctggccactgcactctagcctgggtgacagggcaatgccctgtctcaaaaaaaaaaaaaaaaatgtaattaagattttcaaaggtaggtttggtgctaatattatttagtgttatctgtgggcatttc

SEQ ID NO: 148769 - DNA, 544 bp, Homo sapiens
gttgagatttattagcctacaaccaggaacacaatggccattttgttctgggttctattcattagttgggtttggagtccctgttagaggtagtttttcttaagataatatctgatgctcctctctataatataacaagtagatatgtcccatatgtcttctttatagccaggatttgtgctctttgaaagaaaaactcaggaagtttatactgatagaatgaaagtagggtacagcagataatgattcattagcaatttcttgtatttgtaaagaatacaaattctttttttttttttttactggagtgctaataaaacataagtaatcatccacatcccattcctaatgtaagcaccattaactaatttataattcttggagtacaaaatgcaagaatgaatctattcaaggagtggaataatcagtggaaagtacaaacagaatgaccatttgttaaggaaacatcagcaaagagcaacataatacagcrgttggtgtataatctacagtgtcaaaattctagctttaacatagcttgact

SEQ ID NO: 148770 - DNA, 551 bp, Homo sapiens
ggggtaaagttagttagctaattaattcaatatactaaattgtttggtttcatattattggcaaatatcctctgataattgttctattataaatggttagtgggccatatgtaaacataactgaaataccaatactatatatttaaatattatcctactttgcttcacatgattgaactataagatatataggccgggcacggtggctcatgcctgtaatcccagcactttgagagaccaaggcgggtggatcatgaggtcaggagatcaagaccatcctggctaacacggtgaaaccccgtatctactaaaaatacaaaaaaaaattagccgggcatggtggcgggcacctgtagtcctagctacttgggaggctgaggcaggagaatggcctgaacctgggaggtgaagcttgcagtgagccgagattgcgccattgcactccagcctgggcaacttgagcaagactttgtytcaaaaaaaaaaaaaaaaaaaaaatatatatatatatatatatatatgtatataatgttaaacattttgtgtttgaa

SEQ ID NO: 148771 - DNA, 424 bp, Homo sapiens
gatataaaattttagtggcattaagtgctaaaagtaatgtatgtttgattctaataaaaccagaatgtgttttgtaatttctatgttaacaactgagaaatatatagctttgtctattaaagcataatgtattacatactataaggaaatatttttttctaactatatatctagcaatatgaatatagataccaaaagtcatctacaaaattatttatagcagcattattctttattgctccaaactagaaaattcttaaatatccacraatagttagatatactttgtcatatattaacacatgggtaatttataatgataagcaacatatgaataaatctcgaaaaagttgagtaaaagatgtcagatacaaaagagtaaaaacaatatattttgctttttgtaagttacagaaatattgaa

SEQ ID NO: 148772 - DNA, 482 bp, Homo sapiens
cccctgtatctgaagcatttttctgaaatgtattcgaagaacaacatggggctgggccaagggcacctactccttggcagtgtttggtcacctggttccttctcaatcttcacaggtaaggactactctatgtagtagtattgaacaagaagactgagacacagaatgctagagcttccataatatgaatatgcctcagagactccctaatttaaattaggcctatagaagtatgtgcctgcgggatttgatgattaacctaaatcaatttaacygatgagaataatcagaactctaatttatactatagaacaaattagttctataaaacttacagattagaaatccagaaccaggaaaaacatttttcttttctcattagaatattgtcatattaggtagaaatttgaaattaaggtttacacgcattttcagtagctttaatctacctagattttctggtagaatcattctcctttaat

SEQ ID NO: 148773 - DNA, 424 bp, Homo sapiens
atcatccctagtactgagaaaaaacaagacgatttcttgtaatgcaaaagttaaaacagacagaaacctatgactgtcaaaatggtgaaacttaatcagcatttagtgggactgttagccatggtggttctgaatttaaacctrgaaaaattaagatgtaataaataattatttgcaagtgggggtaacattaaagatacattgacttttttttaatttgcgttttttctgaaggttacatttttcctggtcaaaccaagacttgggtctgagattgggattatggcgtatttagattataaccataaaagtataaaataaaaagttaataataggtatgttctaatattctttgcaatattttgctgcacagcaatatggttaaaagacaagttttgtagaaaacagtagagagcaagggttt

SEQ ID NO: 148774 - DNA, 424 bp, Homo sapiens
atcatccctagtactgagaaaaaacaagacgatttcttgtaatgcaaaagttaaaacagacagaaacctatgactgtcaaaatggtgaaacttaatcagcatttagtgggactgttagccatggtggttctgaatttaaacctagaaaaattaagatgtaataaataattatttgcaagtgggggtaacattaaagatacattgacttttttttaatttgcgttttttctgaaggtkacatttttcctggtcaaaccaagacttgggtctgagattgggattatggcgtatttagattataaccataaaagtataaaataaaaagttaataataggtatgttctaatattctttgcaatattttgctgcacagcaatatggttaaaagacaagttttgtagaaaacagtagagagcaagggttt

SEQ ID NO: 148775 - DNA, 424 bp, Homo sapiens
atcatccctagtactgagaaaaaacaagacgatttcttgtaatgcaaaagttaaaacagacagaaacctatgactgtcaaaatggtgaaacttaatcagcatttagtgggactgttagccatggtggttctgaatttaaacctagaaaaattaagatgtaataaataattatttgcaagtgggggtaacattaaagatacattgacttttttttaatttgcgttttttctgaaggttacatttttcctggtcaaaccaagacttgggtctgagattgggattatggcrtatttagattataaccataaaagtataaaataaaaagttaataataggtatgttctaatattctttgcaatattttgctgcacagcaatatggttaaaagacaagttttgtagaaaacagtagagagcaagggttt

SEQ ID NO: 148776 - DNA, 424 bp, Homo sapiens
atcatccctagtactgagaaaaaacaagacgatttcttgtaatgcaaaagttaaaacagacagaaacctatgactgtcaaaatggtgaaacttaatcagcatttagtgggactgttagccatggtggttctgaatttaaacctagaaaaattaagatgtaataaataattatttgcaagtgggggtaacattaaagatacattgacttttttttaatttgcgttttttctgaaggttacatttttcctggtcaaaccaagacttgggtctgagattgggattatggcgtatttagattataaccataaaagtataaaataaaaagttaataataggtatgttctaatattctttgcaatattttgctkcacagcaatatggttaaaagacaagttttgtagaaaacagtagagagcaagggttt

SEQ ID NO: 148777 - DNA, 614 bp, Homo sapiens
atgttatgaacacctaagctgaggcaaatcgacaaggatacctacgatatccaagtgttgcgggcaattctccagggcatttctacatatctagtgacaactttggtctgggacttttttttcaagaatgtttgacaggaaattgcctgggaggctggaaatagtgtctctttctgtaacagatagtagatttatttcctaaccagtatcattatatatagagaatgcctgctttccacccttgattmtattcccaggttataaaaatatttatctttggaggagaggatgggcatgtttgatagaagacctcttattagattggaaagtttctaacctcagtgattgtcaacaataaagcagaccctcatgtgtacaaataaaactaagattgcctcagtattggccccaggagacctgggaaaggtatagaacagatgcagacataaagctcacactactttgcattgagtaacaaactgtctaaatccactggagctaattattttcttaccaactgaaactatgggagtgtggtgagtgtcttagggagtacttgactgcttgatgctaaccaagccaaaagaccaaacctgaaaatatacaagctgtaa

SEQ ID NO: 148778 - DNA, 614 bp, Homo sapiens
atgttatgaacacctaagctgaggcaaatcgacaaggatacctacgatatccaagtgttgcgggcaattctccagggcatttctacatatctagtgacaactttggtctgggacttttttttcaagaatgtttgacaggaaattgcctgggaggctggaaatagtgtctctttctgtaacagatagtagatttatttcctaaccagtatcattatatatagagaatgcctgctttccacccttgattatattcccaggttataawaatatttatctttggaggagaggatgggcatgtttgatagaagacctcttattagattggaaagtttctaacctcagtgattgtcaacaataaagcagaccctcatgtgtacaaataaaactaagattgcctcagtattggccccaggagacctgggaaaggtatagaacagatgcagacataaagctcacactactttgcattgagtaacaaactgtctaaatccactggagctaattattttcttaccaactgaaactatgggagtgtggtgagtgtcttagggagtacttgactgcttgatgctaaccaagccaaaagaccaaacctgaaaatatacaagctgtaa

SEQ ID NO: 148779 - DNA, 614 bp, Homo sapiens
atgttatgaacacctaagctgaggcaaatcgacaaggatacctacgatatccaagtgttgcgggcaattctccagggcatttctacatatctagtgacaactttggtctgggacttttttttcaagaatgtttgacaggaaattgcctgggaggctggaaatagtgtctctttctgtaacagatagtagatttatttcctaaccagtatcattatatatagagaatgcctgctttccacccttgattatattcccaggttataaaaatatttatctttggaggagaggatgggcatgtttgayagaagacctcttattagattggaaagtttctaacctcagtgattgtcaacaataaagcagaccctcatgtgtacaaataaaactaagattgcctcagtattggccccaggagacctgggaaaggtatagaacagatgcagacataaagctcacactactttgcattgagtaacaaactgtctaaatccactggagctaattattttcttaccaactgaaactatgggagtgtggtgagtgtcttagggagtacttgactgcttgatgctaaccaagccaaaagaccaaacctgaaaatatacaagctgtaa

SEQ ID NO: 148780 - DNA, 614 bp, Homo sapiens
atgttatgaacacctaagctgaggcaaatcgacaaggatacctacgatatccaagtgttgcgggcaattctccagggcatttctacatatctagtgacaactttggtctgggacttttttttcaagaatgtttgacaggaaattgcctgggaggctggaaatagtgtctctttctgtaacagatagtagatttatttcctaaccagtatcattatatatagagaatgcctgctttccacccttgattatattcccaggttataaaaatatttatctttggaggagaggatgggcatgtttgatagaagacctcttattarattggaaagtttctaacctcagtgattgtcaacaataaagcagaccctcatgtgtacaaataaaactaagattgcctcagtattggccccaggagacctgggaaaggtatagaacagatgcagacataaagctcacactactttgcattgagtaacaaactgtctaaatccactggagctaattattttcttaccaactgaaactatgggagtgtggtgagtgtcttagggagtacttgactgcttgatgctaaccaagccaaaagaccaaacctgaaaatatacaagctgtaa

SEQ ID NO: 148781 - DNA, 373 bp, Homo sapiens
gagcaaagtacattgctgtaacttaatttattaaacctcttagtatggcagatgttatgtaaaattattcctggcctgttagcatgtaaaggtaactaaacttccatagcaagcttttttcttttttttttttttttttttaagtggtcaacatagctgttgtatttaatttgtctgtccagggattatgacaaaataaaaggattttttaaaaaatttaacattaaagatgcttcctactcttgtaatttttaatattttaatatagataccaattttgctttatgttttattgtaaattaatgttccatcatttttaatcaygtatagttgtcttttatgagaattatcaacatagtaacatttacacatc

SEQ ID NO: 148782 - DNA, 630 bp, Homo sapiens
atattaccatataccatttacattaatcaartacaaatggattgaagacttaaatctaagacctcaaactatgaaactactaaaaaacaaaaaaaatcagaaaaactctccaggacattggtttttgcagaaatttattgagttaaccactcttgtgttgttgtgctgatgaagtattataatgagaagattgtccactttttttctaccatcttaattgtggctggattcacacttgtcagaggtgcaggtgcctctatatttctttctggatctctcacaaatggaattggtccatatagtaatgttgaaataggtgtattcatggggaaaaagaagggtagatattctgccttcttgctgatgtcatttctctatcaaagaattttttatcatagtaataactgagagagcttatgtgaaacatttctacattcttattgccttgaacaaatacggggtatataaggctacagcaacagtacagttttagggaaattgaattatgaatagttgcagagaaattcagctatgccagccttaatcttattgagttgtttaatcactccaagcagctgccctctttagactttccattatttatttaaaaaagcatagaccttataggtt

SEQ ID NO: 148783 - DNA, 630 bp, Homo sapiens
atattaccatataccatttacattaatcaagtacaaatggattgaagacttaaatctaagacctcaaactatgaaactactaaaaaacaaaaaaaatcagaaaaactctccaggacattggtttttgcagaaatttattgagttaaccactcttgtgttgytgtgctgatgaagtattataatgagaagattgtccactttttttctaccatcttaattgtggctggattcacacttgtcagaggtgcaggtgcctctatatttctttctggatctctcacaaatggaattggtccatatagtaatgttgaaataggtgtattcatggggaaaaagaagggtagatattctgccttcttgctgatgtcatttctctatcaaagaattttttatcatagtaataactgagagagcttatgtgaaacatttctacattcttattgccttgaacaaatacggggtatataaggctacagcaacagtacagttttagggaaattgaattatgaatagttgcagagaaattcagctatgccagccttaatcttattgagttgtttaatcactccaagcagctgccctctttagactttccattatttatttaaaaaagcatagaccttataggtt

SEQ ID NO: 148784 - DNA, 554 bp, Homo sapiens
aaaactatggggcacaatgctcagtrcttgggtgatgggatcattcataccccaaacatcacacaatatacccaagtaacaaatctgcacatgtaccccctgagtctaaaataaaagttgaaaaacaaacaaacaaaaaaaggaatgagctatcaagccatgcaaagacatgagaaaaagttaaatgcatattactatgtgaaagaagccaattgaaaggctacaaactgtttgatttcaactatatgatactttggagcaggagaaagtatggaaacagtaaaaaagatcaatcattcccagtgatggatataatagtgcatacagggtggaaacatgccattatatatttgacaaccccaagaatatacgacatcaagagtgaaccttaaggtaaactatgaactttgggtgatgatgatgtgtcaacgtgggttcatcacttgcaacaaatgtaccatcctggtgcgggatactgataatagaggctatgcatgtgttggggaaggcatcaatgaagtatctccgtacctttctcttaattttgctgtgaa

SEQ ID NO: 148785 - DNA, 509 bp, Homo sapiens
ctatccatctatctatctatctgtccacctatctatcacttgtctgtctaatctatatttctgtgtgaaggaggaaggggaaatactatattagaatcttctttcaaataaaaatattgcagaaatatttcaacttttttaaatttcaaagtcagctttatccaggattttgtaattgctcatgtcattgttattttgaagaatgtacaaattcactaatctatttaggagtgaatattaattatgcacacctattgcagatataaggtttcataatatgattccaattttgttttgaacaaacaagttagggcaaaaataatcaaaaacattaatgtgttcattcagtcacacatctttagyattcctttagaatcattataagaaagattatctgctctacatggaatatgcaaggataattgacaaattctgttgttcagaggatttacatctactgagggtgatacacatatcaatacatagctagaatatgttgtaatagctgt

SEQ ID NO: 148786 - DNA, 509 bp, Homo sapiens
ctatccatctatctatctatctgtccacctatctatcacttgtctgtctaatctatatttctgtgtgaaggaggaaggggaaatactatattagaatcttctttcaaataaaaatattgcagaaatatttcaacttttttaaatttcaaagtcagctttatccaggattttgtaattgctcatgtcattgttattttgaagaatgtacaaattcactaatctatttaggagtgaatattaattatgcacacctattgcagatataaggtttcataatatgattccaattttgttttgaacaaacaagttagggcaaaaataatcaaaaacattaatgtgttcattcagtcacacatctttagcattcctttagaatcrttataagaaagattatctgctctacatggaatatgcaaggataattgacaaattctgttgttcagaggatttacatctactgagggtgatacacatatcaatacatagctagaatatgttgtaatagctgt

SEQ ID NO: 148787 - DNA, 525 bp, Homo sapiens
gtccctattttggtttagtcaatattgtgaccaatgaggtaattttaataaaatgtatgaatatggaaatactaatttagacaagacacagctacatagtgtaatatgctttcactttattcttctgccacattttgcatctcctgaagttatttgatattttgctttttgctttcttattattttcacctacttaattactattcttactaaattgcttttcttgagtcatttcctgaattgtccctcttctccctttaagagttttgttatcttattccagtctgcactggtatgctcactaytttaaaaaaatgtgtttaacctttattttaagttcagggacacatgtgcagttttgttacataggtaaacttatgtcatgtgggtttgttgtacagattatcacctaggtattaaacctagtatcattagttattttttctgatcatctccctccttgcatcctccaccttccgataggccctagtgcatgttgttctcctctaagtgtccatgtgttgt

SEQ ID NO: 148788 - DNA, 544 bp, Homo sapiens
cattcttttctcatgatatgcctacttagagaatcacaagtcgttcctgaccaccctaaaatgagcaacatattcttacaatgttctctctgattctaccaagtgttttgatcctcatagcataaaaattataagatactgttgagttgtgatgagaggggttttccacactatgcctcacagagctaccagcgtccaygaaatatctcttactgtgctcgaggcctagaggttcccttaggctctttttccatgacctttctctaagaggctcaaaatgattttaagtgagagtgttctgggcaaaaatcattttgtccatctctgaattctgatcccttatcacttagcctcttccttgatgaagtaccttccaatttttccactcactaaattaatatctatgcatatgaatggtaataaacacccaatggaagctgcagagggggaaaggaataaattaaagaggagtgtttctctttatgcttgtcgtattaccaatcttcctaaatgtcaccaccatcatctcagttacgcgaggtag

SEQ ID NO: 148789 - DNA, 302 bp, Homo sapiens
gaattctttttttaggactcaaggacctcttacaccagttgctgagagggaaactttacactcaaatattctggggattttttgacatatgayctgtgttgatgtttatacctcaggactcaaggcatcatactgggtcccctctcaaagtggaagttcatgggggccagatgataaatggatttctaatgccaggtttagttcacagtggtcctagggcctactcactgttcattcttctgttctccaaatgtagaattggagcagatctctttgggagttggcacaagtcttacactggt

SEQ ID NO: 148790 - DNA, 394 bp, Homo sapiens
gtctctgaaatagcctccactcaaatctaaatagtaaatcwcaatactgtatcccaatgggatagaagaatttaataccacccttgaaaatgtgaaagacgtgggagcattggttcccatcatttgattcagcagcatagcacttgttaaaacaagatctatttggaaaatgactggactgcagcaaactcatctgattgtaccatctgtgacagatatggggccttcgccagagtagattaacttggtctcagatacagaatgagggcatttttttttttttttactgtgtgcatttttgtctgtttttctttcagaaaaaaaaatcagagactgtttatactcactcggatgtttggggttaatctctgccccacctcttgtcataacatag

SEQ ID NO: 148791 - DNA, 632 bp, Homo sapiens
gtatctcattgtgattttgatttgcatttctctaatgataagtgatgttgagctttttttcatatgcttgttggccacatgyatatcttgagactttgaaatattttatgtttctgttttttatttttgtaattttcaaagcaaaattaaaaattcaaacattaattcagaaggaaaaagtctacattatatgccacatatcctaataggttcattgtttgtcttgtgatgtatttattaaagtacaattgtgggtagatcttttgaagaatgagagaatgaaagaagtggataaatttaaaagattgctgcattgttctatagaggctttttgaaactgttgtgacagaagtatcatcttaacagttttatttttgccagtattgctaccagcaagtggagaattgggaagcagaaatagaagaaaactaaatataggagtgacatgatcttttaactttcagagatgcatcctgatttgtttcacgtgaggaaagaaaactatagatgatttttatttctatgaaagtgttagggggttcatacttacaatgttttatttgactggggaataagacttgtaagcacttgttttgtttttgcaaaattgttaaactaaattgagaacatct

SEQ ID NO: 148792 - DNA, 632 bp, Homo sapiens
gtatctcattgtgattttgatttgcatttctctaatgataagtgatgttgagctttttttcatatgcttgttggccacatgtatatcttgagactttgaaatattttatgtttctgttttttatttttgtaattttcaaagcaaaattaaaaattcaaacattaattcagaaggaaaaagtctacattatatgccacatatcctaataggttcattgtttgtcttgtgatgtatttattaaagtacaattgtgggtagatcttttgaagaatgagagaatgaaagaagtggataaatttaaaagattgctgcattgttctatagaggctttttgaaactgttgtgacagaagtatcatcttaacagttttatttttgccagtattgctaccagcaagtggagaattgggaagcagaaatagaagaaaactaaatataggagtgacatgatcttttaactttcagagatgcatcctgatttgtttcacgygaggaaagaaaactatagatgatttttatttctatgaaagtgttagggggttcatacttacaatgttttatttgactggggaataagacttgtaagcacttgttttgtttttgcaaaattgttaaactaaattgagaacatct

SEQ ID NO: 148793 - DNA, 635 bp, Homo sapiens
taaataaatgtggttatgatatatatcattttaatgtacatttctagctttttttgcttgagaattattacttgctgtttatatttattgtaggctatgaaaatgatgttagacaaaaagcaaatttgagaaatgttctgattcaagttcaaaatgggtcgtaaagcagcagagacaactctcaacatcgacaatgcatttgactcaggaactgctaacacatgtccagtgcggtggtggttcaagaagttttgcacaggagacaagagccttaaagatgaggagcayagtggctggccattagaagttgacaatgaccagttgagagcaatcatcgaagctgatcctcttacaactacacaagaagttgccgaaggacttaacatagaccattctatagtcattcggcatttgaagtgaattggaaaggttaaaatctcgaaaagtgggtacctcatgagctgggcaaaaattttaaaaatcatcgttttgaagtgtcattttctcttattctacagaaaatcaataaactatttcttaattggattgtgatgtgtggagaaaagtggattttatacaactaccagcaatgactggcttagtagttgggccaagaagaaacatcaaagcatttc

SEQ ID NO: 148794 - DNA, 635 bp, Homo sapiens
taaataaatgtggttatgatatatatcattttaatgtacatttctagctttttttgcttgagaattattacttgctgtttatatttattgtaggctatgaaaatgatgttagacaaaaagcaaatttgagaaatgttctgattcaagttcaaaatgggtcgtaaagcagcagagacaactctcaacatcgacaatgcatttgactcaggaactgctaacacatgtccagtgcggtggtggttcaagaagttttgcacaggagacaagagccttaaagatgaggagcacagtggctggccattagaagttgacaatgaccagttgagagcaatcatcgaagctgatcctcttacaactacacaagaagttgccgaaggacttaacatagaccattctatagtcattcggcatttgaagtgaattggaaaggttaaaatctcgaaaagtgggtacctcatgagctgrgcaaaaattttaaaaatcatcgttttgaagtgtcattttctcttattctacagaaaatcaataaactatttcttaattggattgtgatgtgtggagaaaagtggattttatacaactaccagcaatgactggcttagtagttgggccaagaagaaacatcaaagcatttc

SEQ ID NO: 148795 - DNA, 549 bp, Homo sapiens
ataaatttaaattaatttgtagatggagaaaagattacagagaaaggcatcagaaaaaaactgtaacatggtgaagaaaagttgaatattattttagctggaaattagagtgttagaakattgatataaaaaaagaagctgaaaagaaagcaagtgcagaatcatataagaatttgtaagctatatttagaaacacagatattacattaaaaatcttaaaaaccactaaatattaacatctatccatccattaatccattccatattcaatatattcaccttagaattttatgtgcttagaaagtgtgcttttgtcaaagagaaaaacatgaatatcagtgaaacagattagataacccaaaaataggccccatcaaatatacccaactgatatttcacaaagaggaaaaagcagttcaatggaagaagcagagcttttcagcaggtagaactggagattttggacatccataggcaaagacacaaaagtcacactttttacattacatgatcaaaaattgatcatggacttgaatgtaaaatgtaaaa

SEQ ID NO: 148796 - DNA, 405 bp, Homo sapiens
tgcaagatgaatgcacacatcacaatgcagtttctcagatatcttccttctaggttttatcttcggatattcacttttaaccattgacctcaatgagctaaaaaaaatccacttgtggaatggacaaaaacagtgtttccaaactcttgaatccaaagaaagttttgtctctgtgagatgaatgtgcaaatcacaaagcagtttctcagaaagcttctttctagtttttatstgaagatatttccttttttcactatagttctcaacatgctcccaaatatgccatcaaatattctgcaaaaacagtgtttctaactgatgaatgaaaaaaagtttacctctatgagttgaatgcattacatcacaaagcggtttctcaggtagctttcttcttgtttttaccct

SEQ ID NO: 148797 - DNA, 648 bp, Homo sapiens
tctagtttttatctgaataaatttctgttttaacataggcctcaatatactcccaaatatcacattgcagtttccacaaaagcagtgtatccatactgatgaatgaaaagaaaggtttacctctgtgaaatgaaggcatacatcacagagtggtttcttagatagatttcttctagtttttatcctgggatagttgcctttaggcattggccacaaagagatccaaaacgtccattcccaaaatggacaaatagaatgtatttaaactgctgaataaaaagaaagttttaactctgtgatatgaatgcctgcatcacaaaagagtttctcagaaaacatatttttagtttttatctgaagatctttaatttttcaccataggcctcaatgtgtacccaaatatcccttcgcagataatacaaaaacagtgtttccaaactgttaaataaaaagaaagagtgaactctgtgagawgaatgcaaacatcccaaagcagtttctctgaaaacttctttccagtttttatctgaaaatgtttccttttcaccacaggcctcaatattctcccaaatatccgttcacataagattccaaaacatcgtttttaaactgctgactgaatagaaagtttaaactctgtcagatgaa

SEQ ID NO: 148798 - DNA, 547 bp, Homo sapiens
tccataaatgaaaaagaaaatatcccattttaaaaactagaaggaaactatctgagaatttgctttgtgatgtgtgcattcatctcacagagttaaacctttctttacattaagacatttgggaatgctgttttggtaggatctgcaaagggatatttgggagcacatggaggcctatggtgaaaaagaaaatatcttcagataaaaactagaaagaagctttcttagtaactgctttgtgatgtgtgcatttatctcacctttctttggattcagcagtttggaaacacgtttttgtagaatctgtgaaggtatttttaggggctcattgaggacaaaggtgaaaaagctaatatcacaatataaaaaatagaaggaagctatctgagaaactgttttgggatgtgtgcattcatatcacagagttaaacctttcttttcattcagaagttkggaaaaacctttggtaggatctacaaagggatatctgggagtgcattgaagactatggtgaaaaaggaaataccttctcataaaaactaggaag

SEQ ID NO: 148799 - DNA, 574 bp, Homo sapiens
tttctcccatttgcttttgaaagaagagaaatatggctctgttccacccagctccctggcagtcagagtttaaggttatctctcttattccctaaacaattgctggcatccttttcttttttcaatatgccaagatttcatattcttcaaacacacatgctctacaatttgtgcagttaacgcaattatcacatggtcctgaggtgacatacatcctccttggcttacaagatgacaggattaagagattaaagtaaagacaggcctaggaaatcacaaggctatggattggggaagcgataagtgtccacgaaatcttcgcagtttatgtttagagattgcagtaaagacaggcatatgaaattataaaagtatcaatttggggaactaatgagtgtccatgaaatcttcacaatccacattcttctgccatggcttcagccagtccctccatttggggtccctgacttcccacaacaactgttttggtagaatctgaaaagggatatttgggagcacattgaggcctatggcraaaaaagaaatacattcagattaaaagtagagagaagct

SEQ ID NO: 148800 - DNA, 575 bp, Homo sapiens
ccttcacataaatactagaaggaagcattctgagaaacggctttgtgatgtgtgcattcatctcacagagttaaaagtttctttggattcagcagtttggaaacactatttttgtacaatctatgaagggatatttgatagctcattcaggccaaaggcaaaaaagaaaatatccrgaataaaaactaaaaggaagctacctgagaaactgctttgtgatatgtgtgttcatcactcagagttaaagcttacttttcattcagcagtttggaaacactgttttggttgaatctatgaaaggatattttgaagcacattgaggcctctggtgaaaaagaaaatatctttagattaaaactagaaagaagctttctgagaaattactctgtgatgtgtgcattcattcacccagttaatgggattcaattgctaatgggattcagcaatttggaaacactctttttgtagaatctctgaaggcatatttgggagctctttgaggccaatggtgaaaaagtgaatatcctaggataaaaactagcaggcagctatctgaataatcactttgtgatgtg

SEQ ID NO: 148801 - DNA, 601 bp, Homo sapiens
ccaaaaagcaaaatcccaggataaaaactagaaggaagctatctgagaatttgctttgtcatgtttgmgttcatctcgcagtggtaaaccttgcttttcattcagcagtttggaaaaactgttttgatagaatctacggatggatattgggagtgtattgaggcctatggtgaaaagaatatatcttcatatgaaaactagaaagaagctttctgagcaaatgctttgtgatgtgtgcattaatctcacagagttcaacctttcttgggattcagcaatttggaaacactgtttttgtagaacctgtgaagggatatttaggagctcattgagacaaaatgcaaaaaagagtatatcccaggataaaaaccaaaagaaagctaccttagaaactgatttatgatgtatgcattcatcttgcagagttaaacttttattttaattcagcagtttgaaaacactgtttttgtagaatctacaaaaggatatttgatagcacattgaggccactggtgaaaaagtgaatatcccaggataaaaattagaaggaagccatttgagaaactgctttgtgatgtgtgcattcatgtcacagagttaa

SEQ ID NO: 148802 - DNA, 453 bp, Homo sapiens
aagaagctttctgaaaaacagctttgtgatgtgtgcattcataagacagagttaaaccattctttggattcagcagtttggaaagtctgtttttgttctttctgcaattggacatttyggagttcattgaggccactgagaaaaagtgtatatgccaggataaaaacctggatggaagccctctgagaaaccggtttgtgatgtgtgcattcttcttgcagagttaaaactttcttttaattcagcagtttggacacactgtttttgaagaatctgctaagggatatttgggaacacattgaggccaacagggaaaaagcatatatcccatgataaaaactagaagaaagctatcgtagaagcccgtttgtgatgtgtgcaatcaactgacgcagttaaacctttcctttcatccatcagtttggaaatattgttttggtagagtctgcaagg

SEQ ID NO: 148803 - DNA, 600 bp, Homo sapiens
tttaatgctgtgagatgaatgaacacatcacaaaacagtttctcaaaaggattctttatagttttaatctgaagatatttcctttttcaccattgtcctcattgcgctgccaaatatcctttcacagtttcttcaaaaacagtgtttccaaactgctgaatgaaaagataggtttaactctgctggatgaatgcacacatcacaaagcagtttctcagataggttccttccagttttaacgtgggatattcactttttcaccattggcctcaaagagctccccaacatccattcaccgaatggacaaaaacagtgttaccaaactactgaatctaaagaaagttttaactctgtgagatgaatgyattcaaccaaaaccagtttctcattaagcttctttctagtttttatctgaagatatttcccttttcaacatagacctaaatgtgctaccaaatatctctgtgcagatgctaagaaaacagtgtttcaaaactgcagaatgaaaaaaaattttaaccctgtgagatgaatgcacacatcaaaaatcggtttctcagataacttctttctagtttttatgctgggatattggctttt

SEQ ID NO: 148804 - DNA, 597 bp, Homo sapiens
acaaaagtttaactctgtgagatgaatgcacccatcacaaagccatttctcagataacttccttctagattttatcctgggatattctcttttttgccattggcctcaatcacttcccaaatatacgttccaagaatggacaaaaacagtgtttccaaactgctgaaaacaaagaaaggtttaactctctgacatgaattcacacatcctgaaccagtttctcattacacttctttctagtttttaactgaatatatttcctttttcaccattgccttccatagtcttccaaatatcttattgcagattctaaaaaaacagagttcctaaactattgaatgaaaagaaagatttaactctctgagatgaatgcacacatcaggaatcactttctcaaataacttccttctagtttttatcctgagatattctattttttgccattggcctcaataacctcccaaaygtccatttgcagaatggacaaaaacagtatttccaaactgctgaaaccaaagaaaggtttaactctgtgaaatgaatgaacacatcacaaagcagtttctccaaaagcttctttctagttgttatctgaag

SEQ ID NO: 148805 - DNA, 597 bp, Homo sapiens
acaaaagtttaactctgtgagatgaatgcacccatcacaaagccatttctcagataacttccttctagattttatcctgggatattctcttttttgccattggcctcaatcacttcccaaatatacgttccaagaatggacaaaaacagtgtttccaaactgctgaaaacaaagaaaggtttaactctctgacatgaattcacacatcctgaaccagtttctcattacacttctttctagtttttaactgaatatatttcctttttcaccattgccttccatagtcttccaaatatcttattgcagattctaaaaaaacagagttcctaaactattgaatgaaaagaaagatttaactctctgagatgaatgcacacatcaggaatcactttctcaaataacttccttctagtttttatcctgagatattctattttttgccattggcctcaataacctcccaaatgtccatttgcagaatggacaaaaacagtatttccaaactgctgaaaccaaagaaaggtttaactctgtgaaatgaatgaacacatcacaaagcagtttmtccaaaagcttctttctagttgttatctgaag

SEQ ID NO: 148806 - DNA, 573 bp, Homo sapiens
tgcagattctaagaaatcagcatttccaaactgctgaatgaaaaataaaggtttatctctgtgagatgaatgcagagatcattaatcagtttctcagataactttcttctagtttttatcctgggatatttccttttttgtctttggcctgaatgagttcccaaatgtccattccaagaatggacaaatacagtgtttccaaactgctgaatccaaagaaaggcttaactctctgacatgaatgtacacatcccaaaccagtttctcattaagcgtctttctagtttttatctgaagatatttcccttttcaccctaggcctaaatgtgctatcaattatctctgcacagatgctaagaaaacaatgtttccaaactactgaatgaaaagaaatttttaagtgtgtgagatgaatgcacacatcacaratcagtttctcagataacttctttctagtttttatcctgggatatttgcttttttgccattagcctcaatgagctcccaaacgtccattcactgaatggacaaaaacagtgttaccaagctactgaatccaaagaaggatttaag

SEQ ID NO: 148807 - DNA, 588 bp, Homo sapiens
attttcactgtaggcctaaaagcgctaccacatatctctacacagattctaagaaaacaggrtttccaaaccgcagaatgaaaagaaatttttaactctgtgagattaatgcacacatcacaaatctgtttctcagataacttctttctagtctttatgctgggatatttgctttttcaccattggcctaagtgagatcccaaatgtccattcacagaatggacaaaaacagtgtttcataactgctgaatccaaagaaaggtttaattctgtgagatgaatgaatacatcacaaagcagtttctcagaaagcttctttttagtttttatctgaagatatatcctttttcaccatagacatcaatgtgctgccaaatatcctttcacagtttctacagaaacagtgtttccaaactgctgaatgaaaaagaaaagtttattcctgtcacatgaaagcacagatcatgaatcagtttctcagataacttctttctagtttttatcctgggatattcgcttttttgcctttggcctcaatgagtttcccaatgtccatttcaagaatggacgaatacagtgtttccaaac

SEQ ID NO: 148808 - DNA, 561 bp, Homo sapiens
gcctatggtgaaaaaggaaatatcttcagataaactctagaaagaagatctcttagaaactgctttgtgatgtgtgcattcatcttgcagaggtaaacattcctttagattcagcagtttggaaacactgtttttgtagaatctgtgatggaatatttgggagctcattgaggccaaaagtgaaaaagggaatatcccgggataaaaactagaaggaaactatctgaaaaaccgctttgtgatgtgtgcattcatctcacaaagttaaacatttccattcatttagcaatttggaaacactgttttgttagartctgtgaagggatatttgggagtgcattgaggcctaaggtgaaaaaggaaatatcttcaaataaaacatagaaagaatttttcttgaaactgcttggtgatgtatacattcatttcacagagttaaaagtgtctttggattcagcaatttggaaccgctgtttttgtccattctgcaaatggacattttggagatcattgaagcaataggcaaaaaagtgaacatcacaggatgaaaactagatggaa

SEQ ID NO: 148809 - DNA, 561 bp, Homo sapiens
gcctatggtgaaaaaggaaatatcttcagataaactctagaaagaagatctcttagaaactgctttgtgatgtgtgcattcatcttgcagaggtaaacattcctttagattcagcagtttggaaacactgtttttgtagaatctgtgatggaatatttgggagctcattgaggccaaaagtgaaaaagggaatatcccgggataaaaactagaaggaaactatctgaaaaaccgctttgtgatgtgtgcattcatctcacaaagttaaacatttccattcatttagcaatttggaaacactgttttgttagagtctgtgaagggatatttgggagtgcattgaggcctaaggtgaaaaaggaaatatcttcaaataaaacatagaaagaatttttcttgaaactgcttggtgatgtatacattcatttcacagagttaaaagtgtctttggattcagcaatttggaaccgctgtttwtgtccattctgcaaatggacattttggagatcattgaagcaataggcaaaaaagtgaacatcacaggatgaaaactagatggaa

SEQ ID NO: 148810 - DNA, 655 bp, Homo sapiens
tctctaatttgtatgaaagtctagtgattaaaacagctactataacaatacaaaaaaatgatgtcttcagaatacataaattgttaattagaaaaataatttgatatgctaaatattttcttcctagttaaaagaaatgtgaaatatttggatagctgtttcttaaatgcaatatttacttattttaagagccagtaataagtatatagaaattccagtgagaagtatatgtctgttgcatttttgcaactctatcccagtaagaatgtggtcatgttttgtttactgtttactgatagtgtaagcaactaattaacctgggcattcattgatataactatatttcaagtcttcaaaaagctccgttatggaagtagaagagaagtggatatataagatagtttgaataataagaacamatttgataaaaatatttcaattacaattgatttttctctctgacttttgaaacttttatttttattttatttgtttatttttattttttctttccaacttttagtttgaaggggtacatgtacagttttgttacatggctaaattgcatgtcacaggggtttggtgtacagataattttatcagccatgaaatctttatttttaaatgatgattagctgagactttaaaaaatagt

SEQ ID NO: 148811 - DNA, 456 bp, Homo sapiens
ttactagtgacgtggtgagtcctcaggttgggagattaggtattactctctttccattcttgtattctttgtattccaaagtcaggaatatatgacagtgtagagaagaggtgtgtagaagaaaaagtaaagggggccaagtgagaggaacaacagcaacaaaaagatttagagaaaawtgtctggaaaaaaactggaagatgaaagtaaatggtgaaattttgaggaaaataggagagggtcagggtagaggtacaactaacatgagtttgcacctttgtatttatccttatttttatgctttactatatagcctattgtttgggagaatgcagtttattctggaatatattgagattactcgaacattcaaataaacttattagaaactgttcagtactataaaatatataaaatgaatttagaaatatatatgcttttagattttttacaatg

SEQ ID NO: 148812 - DNA, 456 bp, Homo sapiens
ttactagtgacgtggtgagtcctcaggttgggagattaggtattactctctttccattcttgtattctttgtattccaaagtcaggaatatatgacagtgtagagaagaggtgtgtagaagaaaaagtaaagggggccaagtgagaggaacaacagcaacaaaaagatttagagaaaaatgtctggaaaaaaactggaagatgaaagtaaatggtgaaattttgaggaaaataggagagggtcagggtagaggtacaactaacatgagtttgcacctttgtatttatccttatttttatgctttactatatagcctattgtttgggaraatgcagtttattctggaatatattgagattactcgaacattcaaataaacttattagaaactgttcagtactataaaatatataaaatgaatttagaaatatatatgcttttagattttttacaatg

SEQ ID NO: 148813 - DNA, 455 bp, Homo sapiens
agctgcaggtctgttggagtttactagaggtccactccagacacttcctggttatcagcagtggtggctgcagaacagcgtattttggtgaaccaaaaatgctgctgcctgaatgttcctttggaagttttgtctcagaggagtactcagccctgtgaggtgtcagtctgcccctactggggggtgcctcccacttaggctactcaagggtcggggacccacttgrggaggcattctgcccattctcagatctcaagctgcaagctgggagaaccactactctctttaaagtctgcagaggttactgctgtctttttgtttgtctgtgccctgcccccagaggtgaagcctacagaggcaggcaggcctccttgagctgtggtgggctccacccagtttgagcttcccggctgctttgtttacctaatcaaacaactaacttggcaatggcaggt

SEQ ID NO: 148814 - DNA, 599 bp, Homo sapiens
gggaatatcttcagatacaaccagaaagaactttctgagtaactgctttgtgatgtgtacattcatttcctagagttaaacctttctgtgggctcagcaggttgcaaacactgtttttgaccattctgcaaattgacatttgggagctcagtaaggtcaatggcaaaaaagtgattatcccaggatgaaaactagaaagaagctatctgagaaaccactttgtgatgtgttcatycacctcatggagttaaaagtttctttacatacagcagtctgtaacaactggtttggcagaatccaccaagggatatttgagagtgcatagaagcctatggtgaaaaaggaagtatcttcagataaaaattagaaagaaggtttctgagaaattgctttatgatgtttggattcatctcacagagttaaacttttatttacattcagtagtttggaaacactattttcatagaatctgcaaaaagatttctggaagtgaattgaggcctatggtggaaaaagaaatatcttctaaaaaactagaaagaagctttctgagaaactgctttgtgatgtgtgcattcatctcacagatttaaaccttt

SEQ ID NO: 148815 - DNA, 599 bp, Homo sapiens
gggaatatcttcagatacaaccagaaagaactttctgagtaactgctttgtgatgtgtacattcatttcctagagttaaacctttctgtgggctcagcaggttgcaaacactgtttttgaccattctgcaaattgacatttgggagctcagtaaggtcaatggcaaaaaagtgattatcccaggatgaaaactagaaagaagctatctgagaaaccactttgtgatgtgttcatccacctcatggagttaaaastttctttacatacagcagtctgtaacaactggtttggcagaatccaccaagggatatttgagagtgcatagaagcctatggtgaaaaaggaagtatcttcagataaaaattagaaagaaggtttctgagaaattgctttatgatgtttggattcatctcacagagttaaacttttatttacattcagtagtttggaaacactattttcatagaatctgcaaaaagatttctggaagtgaattgaggcctatggtggaaaaagaaatatcttctaaaaaactagaaagaagctttctgagaaactgctttgtgatgtgtgcattcatctcacagatttaaaccttt

SEQ ID NO: 148816 - DNA, 373 bp, Homo sapiens
tctgggagtgcattgaggcctgcggtgaaaatggaaatatcttcagataaaaattagaaagaagctccctgagaaactgctttgtgatatgtgcattcatatcacagagttagacatttctgtggattcagmagtttgcaaacactgtttttgttgattaagtgaatggacatttgggagctagttgaggccaatggtgaaaaagtgaatatcccaggataaaaactaataaaaagcttcctgagacactgctttgtgaatggtgcattcaccacgcagagataaaactttcttttcatacagcagtctagaaacactgctttggaagaatctcagaagggatatttaggagcgcattgaggcctaaggtgaa

SEQ ID NO: 148817 - DNA, 590 bp, Homo sapiens
gacagcttatgaccaaggaaactagtaatcataatgtgatatggactcagagaagtacatgagaagtagaaaagaatttctgtttacagcagataactcttttaagtgttgtgagaattattattatttttttaaagagattccaaattaattgactttgatgctattaccatcacaagtttgaggcctctgagaatttccttggaatctctttaggaaactatgaactgaaacaagccaaacagagtcacactgatgttttttttctgaaaaatgaactcttattttaactagcattaaatgcagcaatgaccawggaaaattcaagaggtagtaccagacaaaaaattctaagcaaaatttacctaaatatatagattaaaaacttctttcagcattttaaacctgacaaataatcagacagcattcagtcagcttatcaaactgaatcctcttccagtcacctcactataatcccaaaggtcttaaagagaacaaactaggttgtcagcctctcttttgagcaaaatactcatgcccaaatcaaaatttatctgcttctagtccattcctcaagctcccagcagcct

SEQ ID NO: 148818 - DNA, 577 bp, Homo sapiens
aacccagtagcaaagaatttccaatatttgactgtttaggattagtagaattgtgaataagtgaatatgttaacagtctaactttttggactatttacctctgttccatccttgctgcagcctaatttagtagtcctggaactacttgcaactgccatttctgtccagaccctctgcttcttgcatttattagtctgggtcacagtccccccttacttcttccactgtgaatgagtactgatgaaaaatactggagacaggcaatggtgcagggagacagaatcaggtttgcttaagagacagaccttagatgaaatatagccaaagcaaggaatgagtagaagcacagctgggcaggaaaaaaccttctataatatggtctataacagaagaccataatagtctggaaaaccctctctgaaagggaggaaagccatatcatcaaagtccttctatataacaatctaaggtggacatggcagtatttawttaggatccattgatattaaacaacttgaaattccttgtaaaatgctttctacatgggcatatgaatatttttttgaggagaagatct

SEQ ID NO: 148819 - DNA, 588 bp, Homo sapiens
ttttaaacagtgcctcagataattcttaaactctgttgaatctggaaaccaatggattaaggaattgataggacctaaaattctgtgattggtccwgggaaaatgaatatgctccattcatatttctgattctgagatcacattccctcaatctttattagctggggtacctgagcaaatgtctttttcttcatgccttcttgactcaactattacaggctcactacttaggctttttttttcttcccttctcaatttgggttcttaattagataggattagcaggtttttgcatacaaaactcggcattttcttctggcaggattcaactgtgcaactatacttgtgacaacagagaaagttagtttgcaggttccctggcagccattggcaagatttggtataagttttgtttaagctctttaaagcttctctggcacaggaccaagaaacaggcgcttaagaagggggaaaaaatcaatgggccaatcaatatgatgaatatatggctccattagctacttcccggtctttaggatctggatgatggtttctgcattttctttgtttcaggtttttgatggaaaa

SEQ ID NO: 148820 - DNA, 575 bp, Homo sapiens
agaagtaaggtgggaaagaagttcagcattcacttattcagttgttttggctaacatgagatattaaaatttcgagtttggaaatagttggcagcagtgacacttaacattctctaccaagacatataagatgaatgacaaccatttgaacgcagattttaataacatccaaaaaacttttactgggaggtaatgtactatgatgattcaaaaccattgcaaactgttcatgatatgagagcaatggtcttcagcttagagaagatagattatacctggtagactattttcaaaaccactttggaacatcagctcttttgtgtgcttacatctccttggcatgtcaggacattttagttgcccttcctgaaatccctctgaaactattcctgaactatctctgatcatggcattaccktttctatgtcccctagactgggaaccacatagtcatctttgcttccttcccttttctcatgcaccatattcatttgcccattagattttgctggttttattattgtcccttgaatcccacctcccattctcagtctcatggctactttagaaaatca

SEQ ID NO: 148821 - DNA, 349 bp, Homo sapiens
cctcagggcctactgacttcttagcctggcactcctcaatgccaacattagactccttaatctggctctctcgtaacctcaaattactttttcctttgccattcattaccattcccatcacactacacctcttccaaaacatttcccttcatggttctcgtcaaaaactattttctccatgaagctttttctgagttcttacttttcacaccccaatttgttgtgatctctagctctttatctatgtctatatctagatcaggaatcagcaaactatagcactcaagccaaatctagcctatctcccatttctgtactrattgtcagctgaggatgattgctgtatttt

SEQ ID NO: 148822 - DNA, 349 bp, Homo sapiens
cctcagggcctactgacttcttagcctggcactcctcaatgccaacattagactccttaatctggctctctcgtaacctcaaattactttttcctttgccattcattaccattcccatcacactacacctcttccaaaacatttcccttcatggttctcgtcaaaaactattttctccatgaagctttttctgagttcttacttttcacaccccaatttgttgtgatctctagctctttatctatgtctatatctagatcaggaatcagcaaactatagcactcaagccaaatctagcctatctcccatttctgtactamttgtcagctgaggatgattgctgtatttt

SEQ ID NO: 148823 - DNA, 616 bp, Homo sapiens
tgtatcatgtgataagaaattaaaaattcaatgtccataaataaagttttattggaaagcagctatacccattgatttacatattgtctatgggtgcttttggctacaactggtagagtccagtatagcccacagagactaatttacttactaactggctttttatggaaaaagtttgacaaaccttgatctatattcatctttacatttatatctacgtataatttttgaaatacccataacactttgtttacatctctatcattgtcacttagctaaatttacttaacagttgcttgtttacttatctttttgactacccgataaactgtaagcaacttgagagcatacatattaaattttttattagtctttatttcccttgctagctagcacttagcacaagaccttgcacatataaggcattcactaaatatctttattgaagtgataacatatgatttgttatgcaaaatcacttcagtcttaactttgatatgaattatagcacattatgatatatacctttatatatacccagagacacacacagtacacatatatgtgyatagttatttatacctacatataaatatttatatgtgcacatagtgtt

SEQ ID NO: 148824 - DNA, 598 bp, Homo sapiens
tttacacttttaagaactcaagatataggccaatgtcacaagaagctgttgctatttatttctgagtgagagaaggaagagtcttgataaaaaayaaaaaataaaaaagcaaacaaaacaactacttcaaggctgatgaaggcctaccttggatgcctgcatttttctgaggcagttacaaagaaaatgtttgcattaggagagcacttcaaaatcagttcatttatccgctccctggaagatacccatatgttaagttccctaaggaaaagatcttgttgctgacaccacaagttaaagacgtttatttccattattcatcactattattctgaagagagatatcaattgaaagtcaaaggtcaatactcctgaagcagagaactcaaacaatatgtttagtacttcagcaacgcttcctcaatttttgtggatatgatgcctcatagtttaaggattattgttgtcttacatgtttctgtgaaaactatattatttatcagtcttccctgaagtaaaagtaggcatcactatcgagacgtgagactgtttttgccaacaagtcgatgacaggggaagcaataagcaattgcaggtt

SEQ ID NO: 148825 - DNA, 598 bp, Homo sapiens
tttacacttttaagaactcaagatataggccaatgtcacaagaagctgttgctatttatttctgagtgagagaaggaagagtcttgataaaaaacaaaaaataaaaaagcaaacaaaacaactacttcaaggctgatgaaggcctaccttggatgcctgcatttttctgaggcagttacaaagaaaatgtttgcattaggagagcacttcaaaatcagttcatttatccgctccctggaagatacccatatgttaagttccctaaggaaaagatcttgttgctgacaccacaagttaaagacgtttrtttccattattcatcactattattctgaagagagatatcaattgaaagtcaaaggtcaatactcctgaagcagagaactcaaacaatatgtttagtacttcagcaacgcttcctcaatttttgtggatatgatgcctcatagtttaaggattattgttgtcttacatgtttctgtgaaaactatattatttatcagtcttccctgaagtaaaagtaggcatcactatcgagacgtgagactgtttttgccaacaagtcgatgacaggggaagcaataagcaattgcaggtt

SEQ ID NO: 148826 - DNA, 608 bp, Homo sapiens
gcctcactcctgttctgcttctttcattcacgcacttccctccagatctggcctatcctggaccatcaggatgtgtgtcccgggaatgtgtgcaccaccagattcctcagccagtatctgtgcctcatcccgttcctcacttcattattgatgtctgtttttccaccaactccagtggtaatctcccctccctcaccaaggggttttctcattatttccaagagtctttgacaatatctcagggtactcatgaacgtgtctcccatatcttaaattctatctctctcagtggtaggttacctgggaagcatttgagagggctgtctcactcrggccacagtgtccagtacccaccctgaggtcatacttacctgttgtgagggtgctgcctccggtgccctcagatccacatgccttcccttagaatatcaagcagtgctgaattccctgtggtcctcacagccttgaggacacagtgtgatccatatagaaaaatcaagaaagctccccttcccatggtgtcacagcttctcacgtatccaccaactagaacttcttatctttgttgtctaccagagttctttggtttcttcctatgacacatagag

SEQ ID NO: 148827 - DNA, 607 bp, Homo sapiens
catttgtcaaacccatagaaccgtacatcacaaaaaattaattttacttatgcaaattcaaaaaattaaccaggatgccaggggaagccaagaaggaacacagaatgtaaaaacaaacgtacaatacaagaattaaaagtggtaaggaagaaaggagcagatgatggaaatttaaagaacattactttaactggatgctataagtcctttgtgcaaaagggctgtacacaaactgtttactctaattgagaaattgcttcccacagtgatatagattagcaattctaaaactagttcacaygtatactaagtttgaacaaaaaaaaattcatatagtggaaaacaaatgctatacttttcattgccagcgaatgaagtttacaaataagtagggggaagtctacaaagatctctgtggttctagatcagattcagagatatcagtatgaatttgtttgttttaatatatatatatagttaaatacacaaataattatgtatatatatatatgtgtgtttatttatcaattactgcacatacatatattccctgagagggacaggcagcagtgacaccttagtagcaagaaacatacttagtgcccag

SEQ ID NO: 148828 - DNA, 594 bp, Homo sapiens
gttagtactctttatgtcacagtgccttcctttcaaaaggcaatctaacagaggaattttctttctatttttatgctctgaagtaagcccttaagtaaaagtgccatcaaatgatttctcagaaattataaagaaacaaaaggaccataaacaagataaggtggcatgaggaaacattacaagtacctttcagagctgactggcaaagaaactcctgaggtgacgggtaaggatgagtttgcctctgctgcatgttgcctttcaggcttactgctttctagagttcagtccttgcattgaacttcagggagccattttgcacaggaaggggctgttacacccatatcattgctgtcattgatttagctaaatatatcttggggtccctcaccttcatctccayaagggcctatctgcaggaaaagagcccaccgccaagtgtaagaaaacagtggtgccctataactttgcaaccaggtaccataagccaaggacgttgagggatgatgaaaccagactgggaggtgaagcaccataggttccagaaatagaatgtacttgaaagtagaaaaattcactattgttaataaccat

SEQ ID NO: 148829 - DNA, 551 bp, Homo sapiens
ctttctacagtcatctgtaggctcaactgaggctagaagacccacttctaaggtggttcactggtattcctgagaaattagtgctgtttattggccagaagcctcatttatgccccacatgatctctgaacaggggtgcttaattgttctcatgatagggaaactggcttctcccagagccaacagagagcaggaagggagcctcaatgccccgtatgaagtagcatcagaaatcacactctgggctgggcgcagtggctcacacctgtaatccagcactttgggaggccaaggcaggcagatcacctgaggtcaggaattcgagaccaacctggccaacatggtgaaaccccatctctactaaaaatayaataaatcagccgggcatggtagcccatgcctgtagtcccagccactccggaggctgaggcaggagaattgcttgagcctgggaggtggaggttgcagtgagctgagattgcgccactgaactccagcctgggcgacagagtgagactctgtctcaaaaaaaaaaaaaaaaaatcacactg

SEQ ID NO: 148830 - DNA, 491 bp, Homo sapiens
ccaacttgactgtattagattatgtcaggtacccgtacctgcactcatcaccatggtcagcacctgtgattcacacctcagcagccttgagtcaaatgcccaccttggatttgggagtacagtcactcaactcaaaccatgtgggcttggacgtgaaggtgggatggttctccaagacaaattggaattaatttttttagaaataaggaaaatgggtgctttttagccaaaactatagatctccttccactactgagcatttttaagacgtatttagagatgaatgatccaaaaatgttacaaaaatataaccagtattccaagacattgaggcattcagccctcaatgtgacaaagcaggggmtgagaagtacctaagatggtcacagtcccagtgccaggtgcctcacctatttacctcagtgtttggggaaaatattaagtattttccacgtgttattgtattagttttcacactgccataaaaacta

SEQ ID NO: 148831 - DNA, 491 bp, Homo sapiens
ccaacttgactgtattagattatgtcaggtacccgtacctgcactcatcaccatggtcagcacctgtgattcacacctcagcagccttgagtcaaatgcccaccttggatttgggagtacagtcactcaactcaaaccatgtgggcttggacgtgaaggtgggatggttctccaagacaaattggaattaatttttttagaaataaggaaaatgggtgctttttagccaaaactatagatctccttccactactgagcatttttaagacgtatttagagatgaatgatccaaaaatgttacaaaaatataaccagtattccaagacattgaggcattcagccctcaatgtgacaaagcaggggctgagaagtacytaagatggtcacagtcccagtgccaggtgcctcacctatttacctcagtgtttggggaaaatattaagtattttccacgtgttattgtattagttttcacactgccataaaaacta

SEQ ID NO: 148832 - DNA, 640 bp, Homo sapiens
tgaagcatatatggaaaaccacaatccagtttggcgaacttgtgtattgctcagtgggtgtgccaatgccatttggtcaaatctgcagtaggcaggactgttccatggagcacttttgacccccaaccattaagtgtccccagtgacctgcatattagaaacgtctctacacatttccaaaggccccttgttaagaaccattctaaatcggagcaaacagtatataaaggccattataagaaatgtttggaagcttaggccacaccatgggaatatggccattgtctctacgaaatgagatcctttttaaaagttgagaataaggagagtggcagaatcagaggtgtagttcaggattaatgtagcagccatacatataactggattagagaagcagaacaactggaaataaggaggccagttaggactggctgttacagcagtcaaggaaacaygtatttaggaccagaactactcaaaaggtgttctgttcaacagcacactgtccaaaccaattttaaatgactccaacaaccacgtatccctagctttcatgatctgctctagtgtaatatgtcactaccattcacgtcagaagaaaaaagatttctccatgtgctgcaacaatcccccccatagt

SEQ ID NO: 148833 - DNA, 533 bp, Homo sapiens
tttggaaaggggaaagcttgagcatttgaaagcattatccctttctacctccccaaacttttctaatgaatgtgtaggaaaggagaaccctctcaatcctcccagccccttatcaggacttcaakaaagatccagtcctcagccaacctgcagtgttttagtttttatcacacaaaggtttaaataaaaggaattagaattttctgattttagccaacccactggcaaattttaggaacctgaccctctatcacaaaacactacctcccaggaccatttcaagcaaaagacctcacccaaataaccccccattattgcagagccagcccccaagctggaaaaggagctcctagaaggaacttcccttcccagccttcccagctggagtctcatccttctgaggagggtcagcctggagcatgcatcaggacggtgaggagcctgggggaagtgggaagacagggaggacaacagagacaggggaagacctcagggctttgcttccatcaactgtttcatctgctattggccaa

SEQ ID NO: 148834 - DNA, 509 bp, Homo sapiens
ccttcccatccaccagccatagtaaaccttctatggacttacagattgattccagctgtcatctttgttttttcattcattctgtttgatggcacttaactcctgctgttttctgttayatataatttctcacttgtttatgttttctatccttcttgagattgtttcttaaggcattccttactcttcggtgtgtggttggttggttctttgtgtttccggtgtgtggctggttggttctttggaaaaggtagagaattgctgtttttggaggaagctgcaagtaaatgaatacattctgtgctagaagatctaaggcctttcaagaaatagttagagaggcctcctttaagatacttatcagtgtgacatccatgatggcaaaaaagagtctagctccttttgtttcacgcatgaaagaggagggaaattttgccagtccgcccttgctgtgtggcagctgaccctgtaagtttgttcagtctggtagctcttaaagaggcccgatt

SEQ ID NO: 148835 - DNA, 509 bp, Homo sapiens
ccttcccatccaccagccatagtaaaccttctatggacttacagattgattccagctgtcatctttgttttttcattcattctgtttgatggcacttaactcctgctgttttctgttacatataatttctcacttgtttatgttttctatccttcttgagattgtttcttaaggcattccttactcttcggtgtgtggttggttggttctttgtgtttccggtgtgtggctggttggttctttggaaaaggtagagaattgctgtttttggaggaagctgcaagtaaatgaatacattctgtgctagaagatctaaggcctttcaagaaatagttagagaggcctcctttaagatacttatcagtgtgacatccatgatggcaaaaaagagtmtagctccttttgtttcacgcatgaaagaggagggaaattttgccagtccgcccttgctgtgtggcagctgaccctgtaagtttgttcagtctggtagctcttaaagaggcccgatt

SEQ ID NO: 148836 - DNA, 552 bp, Homo sapiens
agaccccatctcaaaaaataaaaataaatttaaaagatcattcaccattatcaagtgggatttatcccaaagttgcaagaatggttcaacrtatacaaatccataaacatgacacattacatcaacagaatgaagtataaaaaccacatgaccatctcaatagatacataaaaaggatttgatacaattcaacatcgcttcataatcaaaacactcaactaattagttatagaaggaccacagctcaacacaataaaggccatatatcataagcccatagcaaacatcgcactgaatgggaaaaagttgacagcctttcccctaacatctgaaacaagacaacgatgctcacttttaccacttttgttcaacagagtaatggaagtcctagccagagcaatcaggcaatagaaagaaataaaggacctccaaaatggaaaggaggatgtcaaattgtccctatttgcagatgatatcatcatatatacagaaaaccctaaaagctctaccaaaaaactcttacaactgataaacaaattcagtaaagttgca

SEQ ID NO: 148837 - DNA, 552 bp, Homo sapiens
agaccccatctcaaaaaataaaaataaatttaaaagatcattcaccattatcaagtgggatttatcccaaagttgcaagaatggttcaacgtatacaaatccataaacatgacacattacatcaacagaatgaagtataaaaaccacatgaccatctcaatagatacataaaaaggatttgatacaattcaacatcgcttcataatcaaaacactcaactaattagttatagaaggaccacagctcaacacrataaaggccatatatcataagcccatagcaaacatcgcactgaatgggaaaaagttgacagcctttcccctaacatctgaaacaagacaacgatgctcacttttaccacttttgttcaacagagtaatggaagtcctagccagagcaatcaggcaatagaaagaaataaaggacctccaaaatggaaaggaggatgtcaaattgtccctatttgcagatgatatcatcatatatacagaaaaccctaaaagctctaccaaaaaactcttacaactgataaacaaattcagtaaagttgca

SEQ ID NO: 148838 - DNA, 396 bp, Homo sapiens
gaccaggtctcagtatgttgcctaagcttgtctcaaactcctggctggcctcaagggatcctcccatctcagcctcccaaagtgctgggattataggcgtgagccattgtacctggcatacttgtttggttttaagcccacaaattagacatcatcatcattctatttagattttctcatatttaccattttctttacrtatcatttctacttccattcagagcttctgggatcaaaccgtagttcctggcattttggactggttgatagtctccaggatattcaggcagttaagtgtctccgaaagaaaatgagaaaagaaaggtcctgggaaatatgccccacccccacccctgcagtgctgccgctgctgtcccaggaccgtgggcacccctg

SEQ ID NO: 148839 - DNA, 514 bp, Homo sapiens
tgcttttgcctgctgccatgtaagatgtgcctttgttcttccctcaccttccaccgtgattgtgaggtctcccaagccacatggaactgtgagtccattaaacctttttctttataaattacccagtcttgggtatgtctttatcagcagtgtgaaaatggactaatacacggatgtagccaccaaaagatgtggagatttaaaaaagatgcatgcagggaaagggcaaaatcagggatgaatgaggattaaaaagaaaaatgttataaaagtttgtagtaaaatatttcctcactttaatgaggctaatgccattgcttataatgctgagatatcaatggggttttatctctcctttaacatttattaaggatgaaaagactccaaagtctgttgaargattgaaaacgtttattctctacaagttaaaatggaactggaaactggaaaacagtgtcctaatttattacatattggcaagcaacaacttaactttttcctgtaatttaaaaca

SEQ ID NO: 148840 - DNA, 499 bp, Homo sapiens
ctattattttcatgctgcctgcagtgggcacctaggagacattcaactcccactccttagaagacaacgctctttttcccacctccacacttaccttacacatagtggggacagggaggagcaggaagtttctactctaattggcatttttatytaaaatagattttatagctaaatcaaatgtttatgagcatggatgtacgcagttggtcagtgaatttcagaatggaagaaacaaaaagatgtcttcccaactgctcgggaatcagagtctggaaagcaagagtaaggagacagcagagagctgagaagtgtcttgatcctgtggccatggtccccccaaactaaattgatttacttcgtcaacaaatacttcttgaactagtcctagttgctgggcacacagccaggtggaggaaggcaaggagacaagcagtgatgatcaattttgatgggtgttgtggctagggatgggggctctaggaaggcaaggtgggga

SEQ ID NO: 148841 - DNA, 523 bp, Homo sapiens
aatgtgcctcctatagtatccatcctattattttcatgctgcctgcagtgggcacctaggagacattcaactcccactccttagaagacaacgctctttttcccacctccacacttaccttacacatagtggggacagggaggagcaggaagtttctactctaattggcatttttatttaaaatagattttatagctaaatcaaatgtttatgagcatggatgtacgcagttggtcagtgaatttcagaatggaagaaacaaaaagatgtcttcccaactgctcgggaatcagagtctggaaagcaagagtaaggagacagcagagagctgagaagtgtctygatcctgtggccatggtccccccaaactaaattgatttacttcgtcaacaaatacttcttgaactagtcctagttgctgggcacacagccaggtggaggaaggcaaggagacaagcagtgatgatcaattttgatgggtgttgtggctagggatgggggctctaggaaggcaaggtgggga

SEQ ID NO: 148842 - DNA, 435 bp, Homo sapiens
ataaatatttgcaaaccctccacaatctcagtttcaagtctcactctccaatgaccaccaaccatcttccagctcacttcctttagagctgagctgttcaaaacaatacccactgggcacatgcggctagaaatgtggctagtctgaattgaggtgttctgtaagtataaaatacacaacagactgtgcgtgtgtgtgtgtgtatacacacacatatatgtgtatgtacatacatatgtatgtgtatatatgtgtgtgtaaaagactgtaaaacatctcatcaataactttttatattgattataaaytgaaataatattttggatatacggaatatctaattactaaaattaatttcacgtgtttctttttagttttttaatgtggctatttaaaattacatatgtggagaagattaaaatcatatcatgtatc

SEQ ID NO: 148843 - DNA, 461 bp, Homo sapiens
gggcccaggaagtctagcttgctcaaggagcttgaaattgacttttgttctgtgtaatccaagtttcttctgagtttagaaaataagtcttatgagagaatcaggccttatgagaaaatcaggccctagcactaacrctgcctggagagtggggcttggggtccagctgctggggtctaatgccttcctgagatcatcaggatggcatcagagtagagcctcaaagtctggaattgggagtgatggttagtctaataatgtttctggaagcataagcatcagcaggtacatacaacatttatttttcaatacttatcacgcattttaagtaaaaacagaaagctccaaaatgatttgtattttataactattttaataaaacatgtatatgtatgaaaaatatctggctagttatacaccaaaatattatcagtgtttactaaatgatgaaattccaggtg

SEQ ID NO: 148844 - DNA, 417 bp, Homo sapiens
atatgtatataaatatatacacattcactgtgtrtttattgacaatgtaatctgcagcaagttgtgtgttaggcatacagtggtgacatatgatttctatcctaatggcacttaccctcatgagtgctctctagatccctgtaaaatcctctgagtaggcttcattatcaagatttcacaaatccattagcaatttttcttaatgtagctattaagcacctgtgctctaacgccagcctgctagattcaaatccttgctctgctatgaactagttgtatatatttgggcaagtaacttaacctgtttgtactttaatgtccctaactgtgaaatgagaaaaggaacagtgtctacctcataggattgctgtaagattttactgagtttatatatttatacataaaactcagaacagg

SEQ ID NO: 148845 - DNA, 556 bp, Homo sapiens
ctttaggaattccacctagctttaccactccttactctgaaaacagccaccaaatccctaaccaacatgtatttgttacatgaccctgttttcctggcaaaagctgatgctgtcaaagggaaactcatactgtagcaagtcaaacagaaaactgagatacagtcaggcagtttaggctggytggttaaacaggggagattaaagtaaacacacaaagcagaggagagatggaaatctcatttctagtcatgccttgaggcctagctacattctgaccctgggtttcttggaacccatttatctttgctagaaattcttttgcatttttcaaagctgtatcgagttagtttctagtacttaaaccccaaagtcctagctaacataacccaccttcaccttcttcatcctcttcaccttcttcctcttcatcttcctcttcctcctcaggaatactgtctactgttcgtcgatcatcctcatcctcatcctcttcttcctctacatccacatcatcttcatcttcttctccttcttcttgttgttcctcttctacttc

SEQ ID NO: 148846 - DNA, 364 bp, Homo sapiens
gcgtatacacttttattcatatcatttaaaagaaaacacaaaagtctaacttatctgagaatttataaacccttgagaatatgcccaaccatctccaaggacctaagacccacttaagaaacatttagctaacttctccaatggggaaagatttttatcactcccctgttatacctttaatcttccactcttcactacctttttcctctcagcctacaacatactacctkaaaacaaaaacacaacaaaactctctagccccctaccattcctcgagatactacttccttcactaccgaatttatttatttacttacaaactttatttacatacttactcgcattcacttcctccactggccta

SEQ ID NO: 148847 - DNA, 458 bp, Homo sapiens
cacctgttccctcaaaactgttgaaataaaaataaaaatgtaaaaaaaaaaaggatatcaatgctaagaaaatcagactgtaaaaatgacaactataaaagcactatatagtacattggttaagggagagcttaggggaaaatttatataaatacatatagtaataaataagaaatatgaataaaaataaacatcagtggtagaaattagagaacagcatataagcctaaacacagaagaagggggggggcacggtggctcacgcctataatcacagcactttgggaggctgaggcaggaggattgcttgaagccaagagtttgagaccaggctgggcaacgaagcaagaccctgtttytaaaaaaaaaaagaggcaagaatcagaaaacagaaaaatattaaaagcaataaatatcaatgcaagaacaaataataaaagataaactatagctagcta

SEQ ID NO: 148848 - DNA, 567 bp, Homo sapiens
acgggtttctgcttttgcttcttcctcattttctcttgctgacatgatgtaaaaagtacctttcaccttctgtcatgattctgaggctttcccagccatgtggaactgtaagtgctctttttcttccgagtctcaagtatgtctttatcagcagcgtgaaaatggactaatacaatagcacaaagtacaacagatttgttatagcttaagactagtttcgcaaatcctttttccaattaattaaaactttgcagaggagataaacagtgatttttaccattcaaccagtttgcacacagagagagagggagaggaaagcattgcctgaggcagggtggggaaggtgaggtgctcagagacgccagagaaagacctacccattgcagggacactaaaaattgcaggtggctacttgttgatagtgaagggatcttttccagcagtcccatcagcattcaagtttcccctttttggtgaggaaaaagctccctatgtcccatgatcctgttcatgccaattctrtcacctacagctgtcagcaaagagtgcaaggcagattatttcaaa

SEQ ID NO: 148849 - DNA, 590 bp, Homo sapiens
gctggcttctaagctgatcctaaaatttatgtagaaattcaagttacccagaataaccaaaataatcttaataaaggaaaaaggtggaaggtccacattaattgatttcaaaacttagtacatagctacagtaatygagacagtgtggtactggtgtaaagatgacatagataaatggaacagaactgagagttcagaaataatccctcacatttactgtcaattgatttttgacaaggtgccaaggcaattcaatgaggaaaaaataatctttcaacaagtggtcctgggacaactggtcacagaccacataactgtctattgtcttcctcttggcccagttcacacatttctaatacctgccttatgcctgtaggcatttgatttttcaactttgaactagtccaactagtcactcaatacttgaaatctttctaccatttctctgctagaagattttagcctattcctgatcatgtcaatacagcagggatctcccttgtattgagcaccattacttaaagcagtagttttttacacaaagaatttttaaaatatgtgatcatttttatttttcatacaaatttcag

SEQ ID NO: 148850 - DNA, 602 bp, Homo sapiens
ttttgaaaaaatgaaacttcatattacttcacctttctacatggtgtgggtagaatggaaccctgagtttagatggaaaaatagatacagattcataatcatttggcatgtgctttaagtgactaagagtctgggatgagcctaatattaggttggatcaggaagctatcacttgtagattttctrtaggttcttcaagggtgaacctgtgcattaagtaatactggcactgtttattccagtcctttctaaagaatattgcaaatgttaatttgtcagtttccacaatacctttttgggataacatgaaagacagtattaataacagttttggcttatagaatgttttttttaatctgaaaatccctaaaggcatcataaacattaataacacgaacaaaaggcctaataataatattagctgggtctcaaatagaaaagattactaacctcattttgtaaatgccgagatttaatcacaaataggctaggaaaattgactcagactaaagaagcagtcaccagccaagccagcaatagaaatcaatgctttttgattcttgtgtccccattccagatactgtactacttctcacagaagc

SEQ ID NO: 148851 - DNA, 599 bp, Homo sapiens
tctctgcctgggcgtggtggctcaygcctgtaatcccagcacttggcaagccaaggcgggaggatcacttgaggtcaggagttcgagaccagcctggccaacatggtgaaaccccatctctactaaaaatacaaaaattatctgggcgaggtggcgtgtgcccataatcgcagctacttgggaggctgagccaggagaatcgctggaacccagggggcagtggttgcagtaagccgagatcgcatcactgcactccagcctgggcgacagagtgaagctctgtctcaaataaataaaataaagtataactcttggaaccaaatgtggtggtgtgtgcctacagtctcaaccactcaggaggctgaggcaggaggatcacttgaacccaggggttcgagtccagcctgggcaacagagcgagaccctgtctccagaagaaataaaataaaaaataaaaataaattttaaaagtctaattttaattggcttttcttatgaagaatctttatgtataacaattatattttatcttgaggcaaacttatcagagtaagattactgtttttaagagtaaactaattaataatactactaagcta

SEQ ID NO: 148852 - DNA, 625 bp, Homo sapiens
agattttgggaagattgaacaatattgagaaaattctatttcatacaaataagtatttgcaaatggtaatttttagctgcttaccttgtcccctctgtttgctcttcaattaaactaatctaggaacttgaaacaagattagaagacaattttttattcagttaaatcattacaaaagtgattgacattactattctgaatataaatgtatgactgaaggtgctcagaattcctaattcataccaagctacctatgtgacaatgtagtatgtgatgaatttattactgctcaaatgactgttgctcacctgagcatcttgtttggagctcagagctckgatggagacctatgaacaacttaaggcctcagtataagtcttggtcactgctttaacaacttccagcagtcaacatgaaagatgatacccagaagaatgcaggaaaactataaagaatggacaggcgcatgcagaaaacttccaattagcatgcatagtgtccttgtgaccaatgagcactccctaaattttgcagaaatcaacatacatcaatctggatttaaattttaaaaaacaatgcagaactataattctcccaggtgatgacacatttctaatactcaagt

SEQ ID NO: 148853 - DNA, 625 bp, Homo sapiens
agattttgggaagattgaacaatattgagaaaattctatttcatacaaataagtatttgcaaatggtaatttttagctgcttaccttgtcccctctgtttgctcttcaattaaactaatctaggaacttgaaacaagattagaagacaattttttattcagttaaatcattacaaaagtgattgacattactattctgaatataaatgtatgactgaaggtgctcagaattcctaattcataccaagctacctatgtgacaatgtagtatgtgatgaatttattactgctcaaatgactgttgctcacctgagcatcttgtttggagctcagagctctgatggagacctatgaacaacttaaggcctcagtataagtcttggtcactgctttaacaacttccagcagtcaacatgaaagatgatacccagaagaatgcaggaaaactataaagaatggacaggcgcatgcagaaaacttccaattagcatgcatagtgtccttgtgaccaatgagcactmcctaaattttgcagaaatcaacatacatcaatctggatttaaattttaaaaaacaatgcagaactataattctcccaggtgatgacacatttctaatactcaagt

SEQ ID NO: 148854 - DNA, 523 bp, Homo sapiens
gctgacactcagcgattagaaatccctgctaagtagaattcttgaaagatatgtgaattatcaaatttatttgatattgccaaatttctcactaaagtttttataccttatactttcatatttatcactcttagaagcagtatatgtcaattcccattggtccatattcatgccaacacttggcactatcagattttaatttttgtcatttggctgaggtaaaatatgttattgtggttttaatttgcattttcttctgccagtctgcagtttatcttttctgtttgcatgccgtgtagtcttttaatgaatacaattttgaacttaatgtagtaacattcatcaacactttccttttgaaatgtattttgttttgtttaagaactcctcttctacctcaagttcggaaaatattgtccaacattttctttctaygaggttgaaagttttgctttaacatttagttctttaatacacaacaattgactgtttgtggggaggatatatagtatgaagtaaaggt

SEQ ID NO: 148855 - DNA, 395 bp, Homo sapiens
gaattccataccctcatgtacccacataaagtcattggatggttctctcagcaattacatcacatatcatatatccactctakattcccccctttttttctttttaacaacaaattaaattgttactgctattggattttgttacaacaaatgtattattattaaataaatattagttattgaataagattacatgtgagtcatttcttagtgaaagtgcttgtaggtttaaactgggaactcagcaaaccttctggtggagtaatgttagatgatattaactgcaaaattaagcattagaattatccagaataaacaatcaggcaatttttttaatgtaaagctatgcccccctactagtgagaaaaaagctcctgttttagaaacacaggtta

SEQ ID NO: 148856 - DNA, 394 bp, Homo sapiens
tcattggatggttctctcagcaattacatcacatatcatatatccactctagattcccccctttttttctttttaacaacaaattaaattgttactgctattggattttgttacaacaaatgtattattattaaataaatattagttattgaataagattacatgtgagtcatttmttagtgaaagtgcttgtaggtttaaactgggaactcagcaaaccttctggtggagtaatgttagatgatattaactgcaaaattaagcattagaattatccagaataaacaatcaggcaatttttttaatgtaaagctatgcccccctactagtgagaaaaaagctcctgttttagaaacacaggttacaatagatcaatgcaacctgtattgaattc

SEQ ID NO: 148857 - DNA, 540 bp, Homo sapiens
taacctaggtcaaatgtaataaccaaatgcccactgagaagaggacagacaacagacatcacagaaggaactccttacctgcaatttggtttttaactggctacaggacatcaccatctgacatcaccatcatgcctcattcactgcgcacagaaatgaaccattcatctgacctagcatggtttactggaaaaagcatgggctttcctgttagtcagactgagattcaaatcttccttgccgccctagcttcatgtgtgtgaaacctgagtctcacaaggcctcatcgttagaaggkccctgtgcttgttttaatgctgtgctattaataatttttgaacaaggaaacacaaattttcattttacactaggcctgcaaattatgtaatcagtcctacccctagcacactaatagtttaatgaccttgaacaaattatatagcttttcagaacctccattttctcatctgaaaatggatgtgctgatgattagaggtgtttgtgaagatccattgaaatatagaaatatgtgcataaatt

SEQ ID NO: 148858 - DNA, 440 bp, Homo sapiens
catccagtacacctgacatttccattagaacagtgggacccggataccactggcaggaagtccatcttcacagctgccaacccatctgtcaaacccgcagtcccctatgagagtacagatgaatggaggaggaagatttaaaagtgaattcgtgggcggcgacaaggaaacagcagccgtggccaagctgaccccagagcccttcccttcctggccctccctctgaatcatcgcgctccacttgtgacgtcgcggacgcccggctcgggcargcgtggggggcccgcgcgtcccgggagccccgaggcggcagcgcgcgtttccacgccgcggtcccgcgggaaagccgggggcggcggcctggctgaggccaagctcggatccggtgccgagccaagcggggccgtgcgtcgccggggcttcgccttcgctcgcgtgac

SEQ ID NO: 148859 - DNA, 591 bp, Homo sapiens
acagtacatttttatgctatccagctgttttacttcaatggccaaagaggacgtgtgagaataaatcatcatcatttgtaaaaagtccttgggggactcacatgatagtctaactgtcagtataatctctggcatccttacccaaaacagaagaatgttacagatatgaggataaaaagggccatcctttgtaacatamaagagactctcaatgaaaaatctggcaacctctaaaaatataaaactgcattaaaattattaataatagttaaattttgagtgtttactatttgtcagttactgggctaagcatgtaacataaattttctaatttaatttttatagctttccttgccatatcctaaaacacccttcccttaagatctgatcagctattcatctgatgaccatgtgcttccttgaaagctgactttaccccacagattgaaggacagagtgtgcattacctaggataggccagttggtatattctacctactcatacggttcaggaataagataagccagtccagtcagagtgaaccaaaccaggtgaagcaaaatacatcctaagtctcttgctgggaattc

SEQ ID NO: 148860 - DNA, 566 bp, Homo sapiens
gaattctattagtgaccaaacagtacatttttatgctatccagctgttttacttcaatggccaaagaggacgtgtgagaataaatcatcatcatttgtaaaaagtccttgggggactcacatgatagtctaactgtcagtataatctctggcatccttacccaaaacagaagaatgttacagatatgaggataaaaagggccatcctttgtaacataaaagagactctcaatgaaaaatctggcaacctctaaaaayataaaactgcattaaaattattaataatagttaaattttgagtgtttactatttgtcagttactgggctaagcatgtaacataaattttctaatttaatttttatagctttccttgccatatcctaaaacacccttcccttaagatctgatcagctattcatctgatgaccatgtgcttccttgaaagctgactttaccccacagattgaaggacagagtgtgcattacctaggataggccagttggtatattctacctactcatacggttcaggaataagataagccagtccagtcagagtgaaccaa

SEQ ID NO: 148861 - DNA, 591 bp, Homo sapiens
acagtacatttttatgctatccagctgttttacttcaatggccaaagaggacgtgtgagaataaatcatcatcatttgtaaaaagtccttgggggactcacatgatagtctaactgtcagtataatctctggcatccttacccaaaacagaagaatgttacagatatgaggataaaaagggccatcctttgtaacataaaagagactctcaatgaaaaatctggcaacctctaaaaatataaaactgcattaaaattattaataatagttaaattttgagtgtttactatttgtcagttactgggctaagcatgtaacataaattttctaatttaatttttatagctttccttgccrtatcctaaaacacccttcccttaagatctgatcagctattcatctgatgaccatgtgcttccttgaaagctgactttaccccacagattgaaggacagagtgtgcattacctaggataggccagttggtatattctacctactcatacggttcaggaataagataagccagtccagtcagagtgaaccaaaccaggtgaagcaaaatacatcctaagtctcttgctgggaattc

SEQ ID NO: 148862 - DNA, 462 bp, Homo sapiens
aaataattagccctagttggaccactgctccaattctgcaaaaaaaaaaaaaaayaataataataaatcttacaacacttgaaaatattaagatgtttcccaggaatttaaattcatctcagaagaaatctcaaaaatacttaaaagaatacaaaaatatccagcacccaacaaagtaaagtttacaatatgtacaattcaataaaaaattaccagctatctaaagatgcaggaaaatactaaccattaaaaggggatttaaaaaaataagaaccgacataaatgtaagaaccagcagacaaaaacattaacacagttatcacaaacataacctatatattcaagaagttagagacacagaaaatttttcttttcagaaaaagaaccaaatcatacttctagagatgaaaactgaaatgaatgtataagctgaaaaatacctggatgagattaagggcagat

SEQ ID NO: 148863 - DNA, 462 bp, Homo sapiens
aaataattagccctagttggaccactgctccaattctgcaaaaaaaaaaaaaaacaataataataaatcttacaacacttgaaaatattaagatgtttcccaggaatttaaattcatctcagaagaaatctcaaaaatacttaaaagaatacaaaaatatccagcacccracaaagtaaagtttacaatatgtacaattcaataaaaaattaccagctatctaaagatgcaggaaaatactaaccattaaaaggggatttaaaaaaataagaaccgacataaatgtaagaaccagcagacaaaaacattaacacagttatcacaaacataacctatatattcaagaagttagagacacagaaaatttttcttttcagaaaaagaaccaaatcatacttctagagatgaaaactgaaatgaatgtataagctgaaaaatacctggatgagattaagggcagat

SEQ ID NO: 148864 - DNA, 594 bp, Homo sapiens
ttgtgaaaagtttgtgaggaaaatgcctcaaagatatcaacagtttacaaatagataactcttttaaagaaggcatgagacaatgttcaagatgcccacagtggcagaccatccacatcaatttgtgaggaaaaaatttatcttgttcatgccctaattgaagatgattgagagttaatggcatgaacaatagccaatgccacaattcttttataattggttcagtttacacaattctgactgaaaaattaaagctgagcaaactttccatccgatgagtgccaaaaccattgcatccagatctgctgcagacaagaacagagctttcaatggaaattttaagtaagtgagatcaagatcctgaagcatttctttgaagaactgtaacaggagatgaaacatggctttaccagtatgatcctgaagataaagcacaaccacaatggctaccaagagagagaagtggtccagtcaaagcacaagcagactggtcaagagcaaaggttggcaacaattytttgggacgctcaaggcaggttgctggttgactttctggaacaccaaagaactatcatgaaaagttagccaaagctt

SEQ ID NO: 148865 - DNA, 647 bp, Homo sapiens
aagaatgggagagtggaaaagtcatggaaatcttgattgttacaaaattacatcatggagagcctgaaaaaagaagtttgtgtgyacattgatatagtaggttgccaagtcaatgtctaaactaagagtttctcccaattagtttggcatgggaaagtaatttttaaaataagggcattctcatagtaataatgtattggtggaagtgtacatagtgtgtctatggcagtattgtgaaaacaatagtttcatagtgttggatcagcaacttactatgtgccagatgtgacactagaagctggagatgctgttgtgaaataagataggcgtggtccctgccctcacattgtcccagaaaaaattatttcctgacttgtggttagtgaattgttcccgacatgcctattggaaattccagtcctatagaatgtggttagataagtagtgtttctcttatgcctttgaatattctgactcttaaatagtaatggaacaatctgagcacccatatgtacaaattacactaggcacagcaagttcaagaatcattaaaatatttggctcttgccttcaaagaaccaacaatgaaggatgtacatataccatatacataatgagagattctggaatagaggtataaaaaagtg

SEQ ID NO: 148866 - DNA, 647 bp, Homo sapiens
aagaatgggagagtggaaaagtcatggaaatcttgattgttacaaaattacatcatggagagcctgaaaaaagaagtttgtgtgtacattgatatagtaggttgccaagtcaatgtctaaactaagagtttctcccaattagtttggcatgggaaagtaatttttaaaataagggcattctcatagtaataatgtattggtggaagtgtacatagtgtgtctatggcagtattgtgaaaacaatagtttcatagtgttggatcagcaacttactatgtgccagatrtgacactagaagctggagatgctgttgtgaaataagataggcgtggtccctgccctcacattgtcccagaaaaaattatttcctgacttgtggttagtgaattgttcccgacatgcctattggaaattccagtcctatagaatgtggttagataagtagtgtttctcttatgcctttgaatattctgactcttaaatagtaatggaacaatctgagcacccatatgtacaaattacactaggcacagcaagttcaagaatcattaaaatatttggctcttgccttcaaagaaccaacaatgaaggatgtacatataccatatacataatgagagattctggaatagaggtataaaaaagtg

SEQ ID NO: 148867 - DNA, 647 bp, Homo sapiens
aagaatgggagagtggaaaagtcatggaaatcttgattgttacaaaattacatcatggagagcctgaaaaaagaagtttgtgtgtacattgatatagtaggttgccaagtcaatgtctaaactaagagtttctcccaattagtttggcatgggaaagtaatttttaaaataagggcattctcatagtaataatgtattggtggaagtgtacatagtgtgtctatggcagtattgtgaaaacaatagtttcatagtgttggatcagcaacttactatgtgccagatgtgacactagaagctggagatgctgttgtgaaataagataggcgtggtccctgccctcacattgtcccagaaaaaattatttcctgacttgtggttagtgaattgttccygacatgcctattggaaattccagtcctatagaatgtggttagataagtagtgtttctcttatgcctttgaatattctgactcttaaatagtaatggaacaatctgagcacccatatgtacaaattacactaggcacagcaagttcaagaatcattaaaatatttggctcttgccttcaaagaaccaacaatgaaggatgtacatataccatatacataatgagagattctggaatagaggtataaaaaagtg

SEQ ID NO: 148868 - DNA, 350 bp, Homo sapiens
gccactagattttgttttgctctaaaaaaaaaaaaaaaaaaaaaaaccccacaacacctatgatctcaatatgcagcagggttcagcactacttacttagatcagtttctcagtaagccttttcaattatttgaccttctgactccaacatctctttctttccccaaccccatcatgttcaccctagtcataccctaragtttgtcattataagtagcctccaatatctagtttttcatcattccactttctgatattcacagcatctctttctgactcctctcttaagtacaacatcattcaagtaatccatggacccactcccagtctttgtcctaatcatctccctc

SEQ ID NO: 148869 - DNA, 604 bp, Homo sapiens
agtaaatccatatgatagaataccatggattgacctaaaatatctaacacttaagttaaaaaaaaaaaaagaatacagagaaatttgtatggctggaaaccattcattagcatttataaaaggcaatccttacttttttgcttttataaacccttggggattatgggaaagagcacacacatgcgcatacacacacacacacacayatttgcggtgttcagttgctcagcactatatgtttctcagtaaaagttgaggcccagctcccttgacagagtgggaaaagccaacaactcactttcctagtgacaccaattgccaggcatgaatgagtgcatgatctagctcgctcaccctgactatccccctcagggctttgcacctaaggccaaagatgccaaggcccaaatcagcgcagaatgtctaggcaagggtcatcttccaagggtaaggtgcacagagacacagcgccagctccccttgtcctcgcagctggctcccctgccatagtggttgctgtggctgcttgcgtagcctcactttgggggcctgctcatcatctgagtctagaccactagtgttctcaggaataccactgccctcc

SEQ ID NO: 148870 - DNA, 580 bp, Homo sapiens
ttattaatagaattttttattacataaaaatttctgtgatgaacaggcaaacaaaaaaacaccataagcaaagtaaaactatatttgcaacattttacaaagggtttcgtttgtaatatataaagctgcaattacacaattaataatagattgaagatataaaaagccagcttacaggaaaaaaaaatctacaaatggcagttcaccttactaaaaatgctctctgttttgcataagtgaaatgcaattttttaagatgtgatatacaattttccaaaatcagaytgatgacataacccaaaatttaacaacatatactgtggaggagatcctggagaaatagacagtccaataaattcttaacagataaaatttcattcctgatgggaatgaagactactattccctgcagaggagaattgtcagtcacctgcagtattacatatgcatttacattctgactcattaagagcctccattttatttagccctccctgtgaccatgccctttggacatacatttctacactgactctgagattggcagtgggatttttctctggccaatgagtcatagcaa

SEQ ID NO: 148871 - DNA, 615 bp, Homo sapiens
tgccctcccagccattgtcactaatcacatatccacaagccagatcacttaatctctcaaagcctcaatgtccatatcttccaaatggggctaataattcaggttaactccatggaactttcatgagaaaagaccgtatgcaaaagcaactgaaaactgataaagcaccagatatgctagtratgcattagtatcgtgaaataaacagggctcatttccaaaggtacaaagaccctgcaagtataaagacttcttcctaggtctagactttccatagaaatagctttcctacccactttctgatgccgagaattttgaaagttctttttcccttaggttgagatgtaaagggcaaatctgcatgggaaaagattgcttcaatttatcagtcatgggaacctggggtaaatgcattttcagagcatttattgaaaggagaatagtgggctactgaggtagaagagttgcaatctttatgtgggctaaaagaggcaaatccaggtgcctgggaaccttgtttatagttttgttctcctacaccggctcttttgtcagaattgcttaaaaaacaaacattgtttttgcaagacctcaccctagatgtctaaacttcta

SEQ ID NO: 148872 - DNA, 403 bp, Homo sapiens
tgaacctcagtttcctcatctgtaaaatgggcttaacaatagtgccaacctcagacagttgtaaaaattaaatgagataatgaacggaaagtacttagcacagtacctagcacgcagtaattacttagtacatgtcagcttaaaagagagaagggaatgaagttgatccatctatctgtattcccagtgcttatcacagtgccaatttgttatatacactaattaaaatttgcattggattggatagttttggtcttcaattctatcaaactgagccatgatgtakccataatcccgtgtgatgtttgtgtaagagtttaatgtttctattgttaaaagtaaaaccttgaacaaattaaatttagttgaatttatttgagcaaagaaaccattcatgaataag

SEQ ID NO: 148873 - DNA, 590 bp, Homo sapiens
acagtacacctcgggagagagagaattcagggtgggctgctcataagagtgaggcagtgttggccgggcgyggtggctcacgcctgtaatccagcactttgggaggccgaggcaggcagatcatgaggtcaggagatcaagaccatcctggataacatggtgaaaccgcatcgctactaaaaaaaaaaaaaaaaaaattagccgggcgtggtggcgggcgcctgtagtcccagctacttgggaggctgaggcaggagaatggcgtgaacccgggaggcggagcttgcagtgagccgagatcacgccactgcactccagcctgggcgacagagcgagactccgtcttaaaaaacagaaacaaaaacaaaaacgaatgaggcagtgttgattattgctggagaaactccctttataggagttttacatgattattcataaggaggtgggaagagctgttactagtaagcatgttttgggtggtcctctgggtgcacatgagtagtagctgtacattcttgttcatttggcacatgtcttattagcatcttaaatctccacccaggagtgtgttttttactattataatgagc

SEQ ID NO: 148874 - DNA, 590 bp, Homo sapiens
acagtacacctcgggagagagagaattcagggtgggctgctcataagagtgaggcagtgttggccgggcgcggtggctcacgcctgtaatccagcactttgggaggccgaggcaggcagatcatgaggtcaggagatcaagaccatcctggataacatggtgaaaccgcatcgctactaaaaaaaaaaaaaaaaaaattagccgggcgtggtggcgggcgcctgtagtcccagctacttgggaggctgaggcaggagaatggcgtgaacccgggaggcggagcttgcagtgagccgagatcaygccactgcactccagcctgggcgacagagcgagactccgtcttaaaaaacagaaacaaaaacaaaaacgaatgaggcagtgttgattattgctggagaaactccctttataggagttttacatgattattcataaggaggtgggaagagctgttactagtaagcatgttttgggtggtcctctgggtgcacatgagtagtagctgtacattcttgttcatttggcacatgtcttattagcatcttaaatctccacccaggagtgtgttttttactattataatgagc

SEQ ID NO: 148875 - DNA, 416 bp, Homo sapiens
cccattctctccaactggaaatatacctgtgcctcacatggcatccactgaggtcacttgagtgcactgatggatagaaaaacaggctgaaatttatgaagttaaaaattcagttaaaaattgagctcaatgtttagcctctcagcctccttcctcataagcccctaaacaaatcatgttctgtgcactaaggtcttcggaacagtactagaaaygcagattacttgagcatctcaaaatatcttcctagactgggtcatgaaagagggcatgggacgatcttatcgtatcacgtctcccatggctgtccacatgacctctcccaaacttaaagggcaggattcattgtaaaattcagctggtttctttaggaaactgtaatatttttcataatagctgcatcaatttacattccc

SEQ ID NO: 148876 - DNA, 416 bp, Homo sapiens
cccattctctccaactggaaatatacctgtgcctcacatggcatccactgaggtcacttgagtgcactgatggatagaaaaacaggctgaaatttatgaagttaaaaattcagttaaaaattgagctcaatgtttagcctctcagcctccttcctcataagcccctaaacaaatcatgttctgtgcactaaggtcttcggaacagtactagaaatgcagattacttgagcatctcaaaatatcttcctagactgggtcatgaaagagggcatgggacgatcttatcgtatcacgtctcccatggctgtccacatgacctctcccaaacttaaagggcaggattcrttgtaaaattcagctggtttctttaggaaactgtaatatttttcataatagctgcatcaatttacattccc

SEQ ID NO: 148877 - DNA, 494 bp, Homo sapiens
ctaaatgtcacctgcttatagcagttttctctggccactctatctgaagtagccccctttattttctgctagtcctttgttttcttctattcaaaacgctttaaattttgtttacctggcttttttctctcttgcaactagctggaaactccacaagagtagggatctctatgtctgtatcattcctaattttgtyccaagagtccaacactgtgctcagcttttacagtaggaactcataagaaatttgctgtatacacttaatgaatatttttaaagcagctgtgaggaacatcactgttcatttgtggacaacttgtcttagatatactttttcaaagtaaatttttattgaaacgtaatgtataaaagtgcatatttcattaacattttcagattttgaagtatatcttattccctacaggagaatttagggaaggggaaagtgaaagtatttcccaaaggaagtggagggaggaggaggggatgttatc

SEQ ID NO: 148878 - DNA, 577 bp, Homo sapiens
ccaggcttgaatttttgcagtaaacaccatttggtcacggtgtataatttcttttatatattgctgaatttcatttactaatatttcattaagggttttttgctttcatattcatgaggaatattggcctatatagctttcttttctttcttccttttctttgctgctgtctttatctgattttggtatcttttctgaattcttttgaatatatgtttatgtattgtttttgctagcagaggtctacttcaaacatgaaaagaataactgcaataaaagattawattcagtctaaagtgttgctttatagaagtaagattttactgcatttaagtgtgtacttaaatttgtaagtatataaaggagatattttttccattaaaattttattgagggttttaaattttttccaggtaactaagattgacttaggacataaattatatcaatatattataagttgaagaggacattgtaccaaatagtttaataaaatcatagtaaactaaacgtaacttcagtaaaggtgagcatttaaggtttgtttcttagttgtaatgtaggcaagttttacttc

SEQ ID NO: 148879 - DNA, 374 bp, Homo sapiens
gaacacatctatgcagcctcgacgctcttctaaaaccccaccaaaatgccagcaaagacataaaaagtcttcaaatcactcagataacaagaataacaatagaggagactacagcaaatgaaagataacattttaggagctgtaaggctaatggatggggcttagttagcatattggaaaatgtagaaccctaagcttacatgaagggataaacggctamgtgttggttcagcagaaccccagaaagacttgggaattggaggtactgggtacctctgaagaagggtgatgggtcagggcagaagatgaacttttgggcatttttgcttttcacagtttttttttctttcatcatcttcagaaaccacaagccc

SEQ ID NO: 148880 - DNA, 374 bp, Homo sapiens
gaacacatctatgcagcctcgacgctcttctaaaaccccaccaaaatgccagcaaagacataaaaagtcttcaaatcactcagataacaagaataacaatagaggagactacagcaaatgaaagataacattttaggagctgtaaggctaatggatggggcttagttagcatattggaaaatgtagaaccctaagcttacatgaagggataaacggctacgtgttggttcagcagaaccccagaaagacttgggaattggaggtactgggtacctctgaagaagggtgatgggtcagggcagaagatgaacttttgggcatttttgcttttcacagtttttttttctttcrtcatcttcagaaaccacaagccc

SEQ ID NO: 148881 - DNA, 549 bp, Homo sapiens
ttttacatccctgtaactcccaagaaatgttgaggtaatcaaaaaattgtgggagataggataatctgaatagcaaatgttccaacttctaacatctaggcaactagtaagtcctgaaagctggaatatggctggtcaaaatcagaagttctctgaactaaaagacagtttcaacaaggtccttatccattagtgtatctacaacaaacaaagctaatgtagctatttagcactttctatacatgaggctctattctaggcacttgggcctcacaacaattctagtaggtgagttctattatgcccattttatagatgaggttaagagagagaaattgaaagcttaagtaacttgcccaagatcaacagctactaggaaacagtgctggaattaaacagagtgcacacttttcatccctgcatgaatctgccttgatacgaggagtggactctatgaggagggcagttatcttaacmttttcacccaggaacttgtgtttaaaataagcatgttaatagcatcaagggtgcattggaagaactgaaaaa

SEQ ID NO: 148882 - DNA, 601 bp, Homo sapiens
cactaaacttttaactacggtcagaatcactcatccatagtactataaaacttcattctactaaataatgtgtcatgctcagagaaaattacatctgtagagattaaacacccaccttcacaattttrtaaaaagctccaacataagagaatgagaatggaacactaaaggcttaatgcaaatatctgagacgagtgatttctaccatgtaatgtgcacgtgtgttatttagggaccttttaaaaatgcaaattttgattcagcaggtctggggtggggtgtgagagtctgtgatgctgagactgctgtgcatggaccaccttttgagtagcaaggactcagatcccccatgctgtatgtcacaactcactgcacaagtcagtttatgctctgttacaaatcttctgagattcatcatttggcgacaaaaaacaaacaaaaacaaaaacaaaaaaacaacaaacaaaaaaaaacaaaaaaaaaaccacccaagcaaaatgacataaatgggagttaaaatatcctgctaaaaaggtacagataattgctgtgaaatttacataacaatattcactgattagaagtaatgagtaatatattc

SEQ ID NO: 148883 - DNA, 601 bp, Homo sapiens
cactaaacttttaactacggtcagaatcactcatccatagtactataaaacttcattctactaaataatgtgtcatgctcagagaaaattacatctgtagagattaaacacccaccttcacaattttgtaaaaagctccaacataasagaatgagaatggaacactaaaggcttaatgcaaatatctgagacgagtgatttctaccatgtaatgtgcacgtgtgttatttagggaccttttaaaaatgcaaattttgattcagcaggtctggggtggggtgtgagagtctgtgatgctgagactgctgtgcatggaccaccttttgagtagcaaggactcagatcccccatgctgtatgtcacaactcactgcacaagtcagtttatgctctgttacaaatcttctgagattcatcatttggcgacaaaaaacaaacaaaaacaaaaacaaaaaaacaacaaacaaaaaaaaacaaaaaaaaaaccacccaagcaaaatgacataaatgggagttaaaatatcctgctaaaaaggtacagataattgctgtgaaatttacataacaatattcactgattagaagtaatgagtaatatattc

SEQ ID NO: 148884 - DNA, 601 bp, Homo sapiens
cactaaacttttaactacggtcagaatcactcatccatagtactataaaacttcattctactaaataatgtgtcatgctcagagaaaattacatctgtagagattaaacacccaccttcacaattttgtaaaaagctccaacataagagaatgagaatggaacactaaaggcttaatgcaaatatctgagacgagtgatttctwccatgtaatgtgcacgtgtgttatttagggaccttttaaaaatgcaaattttgattcagcaggtctggggtggggtgtgagagtctgtgatgctgagactgctgtgcatggaccaccttttgagtagcaaggactcagatcccccatgctgtatgtcacaactcactgcacaagtcagtttatgctctgttacaaatcttctgagattcatcatttggcgacaaaaaacaaacaaaaacaaaaacaaaaaaacaacaaacaaaaaaaaacaaaaaaaaaaccacccaagcaaaatgacataaatgggagttaaaatatcctgctaaaaaggtacagataattgctgtgaaatttacataacaatattcactgattagaagtaatgagtaatatattc

SEQ ID NO: 148885 - DNA, 484 bp, Homo sapiens
ttaaaacctatttcttttagcaatgggtagtttattctgtatgactttcgcttcagttaattggattttctgcacttccctctcttctcttcagctcgaatttatattcacaataattcctgcccatctttacaagagctctaagtgaagctggaggaccagcgtgggccaccctttatgagagaaaattcagttggctatttttcagagatggaggctgttgatactttcctggttttcaatgccctgaattttctactaacatcacaaactacggggtgctcctcctcctgtgaccctgggcatgggcttggacagggctctggaaatagatttcctatagcagctscttctgcaaggactgcagaagaagcaaaatggtagaaaagcctccaacattaaaattttatctctccgatttcactggaacatggcagggagctcccccacccaagcttcataaataaccactgcacttccagaa

SEQ ID NO: 148886 - DNA, 535 bp, Homo sapiens
ctgccctggcctcccgagtagctgggactgtagatgcatgycaccacgcctggctaatttatttttatttttgtagagacggggtctcactttgttgcctaggctggtctcagacgctgggcttcaagcaatcctcttgccttggcttcccaaagtgctgggattacaggtgtgagccactgtgcccggcctacgccaacatttttgtgagttttaagccttgttattcatatcaaacacaaggataggatctgcttctctttagcatcaatccaaggtgaaaaatcaaaatgttacccacgacactaataaacagtagtaacagtgacactgtgactatagcctacagttcatgttataataaaatcaaacagacatgggactatttctagacatggcatgatgctatcttataaaaagcattttataagtaatacgtggaaattgagaaaatgtcccattttgatgccaaattcaccacatttaataaatcatccctggctgtttccatgtggggctaccagatccatatttc

SEQ ID NO: 148887 - DNA, 431 bp, Homo sapiens
taaatgaattcaaaaatgattgctataaaaacacctgtcagagtgccaaaattttaagacctcaatattcaatgcattaamtaacttctacatattaatttgaactaaactaactttatttaatatataacatattatatatgtacatatatattacatatatatgtaatacagacatatatatatatatatatatatataaatacagatggagtccttgtacatttagattcctggaagtagagtctttacagttcagtcctaggcagtctcagccctactggttggggtccaaatctgcctccccttctctcattctgtttgtttatcttaaaacccttgccaccccatttacttgcataacacatcttatttatactaataaatattcttggttatagaacagatgattattggaatagtggctaagt

SEQ ID NO: 148888 - DNA, 507 bp, Homo sapiens
agatttatggagaggcagtattaaaggatgtttgtcaataagggtgtaatcttatttttgaaagccaagagaagtgtgtgatgaaaggaaaaagagtgggctagcataaaagaaagagaaagggagcaaggtcaaaaggagctgaaaatgaaagtcttcataatttaagtcagtgaagctattcccrttcctgaggctggaggaaaagaactaaaaatgtgtactgttgtggatacatttaaagtcaaagggaaagaaatacagggagaatgagcaactgaagtcctttgtctctaataaagattggatagttaaagagcgtaagtcctagaggcagtcttttcagatatgaatgaatcccttctctgtcacttaatggttgtgtgactggggctcaatacttagtgtctctgagtcttgactcttcatctcttattttttcttttatactttaagttctagggtacatgagcacaacgtgcaggtttgttacatatgtatacatgc

SEQ ID NO: 148889 - DNA, 507 bp, Homo sapiens
agatttatggagaggcagtattaaaggatgtttgtcaataagggtgtaatcttatttttgaaagccaagagaagtgtgtgatgaaaggaaaaagagtgggctagcataaaagaaagagaaagggagcaaggtcaaaaggagctgaaaatgaaagtcttcataatttaagtcagtgaagctattcccgttcctgaggctggaggaaaagaactaaaaatgtgtaytgttgtggatacatttaaagtcaaagggaaagaaatacagggagaatgagcaactgaagtcctttgtctctaataaagattggatagttaaagagcgtaagtcctagaggcagtcttttcagatatgaatgaatcccttctctgtcacttaatggttgtgtgactggggctcaatacttagtgtctctgagtcttgactcttcatctcttattttttcttttatactttaagttctagggtacatgagcacaacgtgcaggtttgttacatatgtatacatgc

SEQ ID NO: 148890 - DNA, 582 bp, Homo sapiens
ggtcaggctcgtctcgagctcctgacctcaagtggttcaccatctcagcctcccaaagtgctgagattacagtcatgaaccactgtgcctgactaaccttcttgattcctctattgctttctctttaattttgctgttggcacctaattgttttggattagcaaataacacaacacaggcagtataatacctcctttttttttgtgacagagcctcactctgtcaccaggctggagtgcagtggtgcaatctcagctcactgcaacctccacctcccgggttcaagcgattcccctgcctcagcctcctgagtagctgggactacaggtgcatgacaccacacccagttaattttttgtattttagtagagatggggtttcactrtgttggccaggatggtcttgatctcctgacctcgtgatccaccctcctcggcctcccaaagtgctaggattacaggcgtgagccaccgcgcccggccccaacataggtagtataataccttaagttcataactgattgatagtgatggaaattaatgaagagtgaggaaatcttgagtctttatcacctatacaact

SEQ ID NO: 148891 - DNA, 556 bp, Homo sapiens
ctgtatatttcttcagacagcatggccattttcatgatattgattcttcctatccatgaacatgggatgtatttccatttgtttgtgtcatctatgatttcttccagcagtgtttttgtagttcaccttgtagaaatcttgtaackcgttggttaagtttgttgctatatctgtgtttttgtttgtttgtcatgcaggtattgtatcctgttttaattctcagtgcggttgttgttggtatattgcagtgctattgatttgtgtacatttattttgtaacctgagactctactgaactcatttatcaatctaggagtatttgggaggagtctttagggttttctaggtataagattataacactagcaaacagaggtaatttgactttccgtttttccatgtggatacccttgatttctttctcttgcctgattgctctggctaacacttataggactatgttgaatagaagtggtgaaagtgggcatctttgtcttattccggttcttatgaggaatgctttcaacttttctctgttcagtataatgctggctat

SEQ ID NO: 148892 - DNA, 448 bp, Homo sapiens
gggacatatcactctgttagggcagaaatgcttttcccaaatcatccccatgatcctaggttagggctcactggtatgtcgtsggtctccttctagctacaagggaggagggaccttgtcaagaacatacttaaatacaatttgttgccttaataactcaccaatgatggtaattgagggagagacagaaagagttagctgtagctcacttgaatgaagcccggaggcttatacaaacttaatgtactttgaggagaaatttgactgtgattaagatctgctttagagagatggattttggcatattctggctgagagttgaaaatgcttcatcttgttcaatttctttcccaactcatcaaagcaaggctaggtggaaacttctttacttagaatgtgctattttcagctcaccctgaacttattcaaaattcattttgtcttaaaa

SEQ ID NO: 148893 - DNA, 558 bp, Homo sapiens
tatctcctttgacaataggaggaattctttcattcattcctgttaattaccattcaagttataatgaatcttgaagcactgtctctaattaaaatcctttcctgacatctatactgcttacttattaatgcctccacttggatgtttccaggacacttaaaatccagycactcgaactcaatcagtgccctccttcccttaggttacctttctcagtaaactgcatttccaccccctccctttctcagtccctctcacttgattactaaatcttagtgagtctacctcctgaacaccctgcacctctgctgcttctggccacctgctgcctccgtgctaggagctaggatactgcagccctctcaggtggcttcttcttcctggttggctccctctaatttatccccctaccacaactagaaatatttttaagggcaaaatgggtcatgttacatctctgtttaatacccttaaatgatttccttttgcttcaggaaaaaaaaatgatccaaacttcatcattgggctaagacatatcagaagtttggggatctgcag

SEQ ID NO: 148894 - DNA, 587 bp, Homo sapiens
atgtcaggtcctgtttttgacacctcactaatagatatatttttcccaacaaccctatgcagtaaaatttattattcttaaaatcaaactgtagtggcaaaataaatagtggagtgaaaatgaaggacagttcatcatttgtgtgcatgtgtgggtgagggagtgcgtacttgtgtgtgtgcatccatcagtgtatgagtatggtgtatgtgagtgtgtgtgtttgttaatgtgggagtgkgagtgtctatgcctgagtgtgtgtgtgtgtgtgtgcgtgtgtgtgtgtgtaaaatcacagtcctgctcacatcttttctttgcaggcacttcctgattgcaaagacaaatatgcctctttgggtccatcatgaggaggcatcaaggacttcttgccctgtccttgctctttagccaaaaccctggctatcttggtgagttcctgtgaaaatcagacagtcagcgatgctcttccagctacttagcttcctgattaatcagagtgccttgacatgggactccatgcccaatcataggacccagcctggccctgaatcacagagtgcatggcagggaagaaggtacac

SEQ ID NO: 148895 - DNA, 518 bp, Homo sapiens
gggaagaaggtacacctcagcctcatccaggtcccacaccccagtcctggtcctctttatttgacaggttcatctggccgggcctatggtgagaggaggacagggagctgagctaaatctcctgaccatttgtgtagatgagctagacagtattagatttcttcatactcatcctgtcctgtgggatcaatagagttcacttttagacttaggataatacccatcagaaggctaattacatggactttgagtcatctaaacctagagatagaccaggttatactaaggacrctaacaagctaaaatcttaggaacttaaaacatcataattctctttcttattcacactatgtgtgtgttcactatagtcaactgtgacctgtattccactctgttattgggcctaccccagggctaaggctcatggtgtagatgccgtgttctgtgagtgatgacagaggaaaagactgtggcaaagtccacaatggatggtcaagcctctacctgtcactgtgcac

SEQ ID NO: 148896 - DNA, 531 bp, Homo sapiens
ccggttgcccttgagcagtgtgtctctggatagtcccttctcctccccattttcccgttcccacaacctttaacattgctttatagaacttgctctcagtggcacccacatcttcctgtttttggatggggaaatctccgaaagtttttgacacctttcctgtgtctgtgcagtttcatagtcagaaaatatatcatcctctggtccctaatttgacctaaagagtgactcttaacatttcattcatctgtaccattcttttttttttcaaataaaaatctgataagaaatctccatgtgtaaaatatttataaagaatacttttatttaaatgaggaaaagaagcctgaaatctgtcacattcttttttacttcaactaaaactrccgtcctccctcaaccacatctcaccacatacttttccctctagaatttgcttgaaatcttgcttttttaagtagaagagcttgggaaccacttataggaatccagcagctatctgaggtcgaccactttgctttgatttactga

SEQ ID NO: 148897 - DNA, 523 bp, Homo sapiens
agtcacaccttacgtgggagcagccaagaggcttgtgcagggggactcccatttataaaaccatcagatatcgtgagacttattcagtaccatgagaacagtatgggggagactggccccataattcaattatctccacctggtcccacccttgacaaatggggattattacaattcaaggtgagatttggattgggacacagccaarccatatcagaggtagattgatttgtcagagctttcaattatgcttagtggctaagtgttgaccaaagttcaggtctccagaattgtttcattatggctcaccatttgtgtggacatcattgtctttatttgtccaaggaataccataggagagctggaatttaaggtaactaccatgtttaacaagcaaaactcatttttgcttccttagtatagttatttgctttcagtctgaaggttccacacaacaggtgtccaagctggaaagagaggaaaattgtaaaatttcccttaaaattaatctattttatattgt

SEQ ID NO: 148898 - DNA, 546 bp, Homo sapiens
ttgttctgtgttaatatttttactctgaacttttttctttaaaaattagaaaaaagttcatgtgcatctcactgttttacagtaaaaatcaacttacaagttgagtaaacactgacaaagttttgtccaatgtgctgcaatctaagatttctaaaatgcaaatcccattattttgctttttatcagttatcatccctattggacataatatagtagaaattacttaattaaagattatttgttttgaaatatagcttacattactcagtaaaggatctgaaatacctcatttagcatcttttttaaatttgtcaaatataaacaataacagctgcctagcccatttgcaggggtggtgagggttacatggtgtctgattctgggcagggaaaatagtcttttataataaactggtctggtgtcaaayaaactcaatgcaaatatgactcatatatatacttttttttttttgagacagagtctcattctgtcacccaggcttgagtgcagtggtgtgatcttggctcactgcaacatacacctcct

SEQ ID NO: 148899 - DNA, 619 bp, Homo sapiens
ctctgtatcctcttactaaactttcttcagggagggacttcccatcacccactgtcccatgttcttcagttcttttccagctcctccactattctgggctgagccctgctttcaggacaccagcccactctggaacacaggatttctttggtagaaaataaagtctccaaattatatcatactcttcacaattcactttaactgatcatggtctacaacttaggctgtttagctttgtcttctagccatctctcccatcaaccctcagtctgtcctcagacagcctttcttaatagactcatttctggtctcatacacaacagctggttctcaggcagaattcttcatgttgtcccttcctctctcaaatatgactcacatatgctcctggatttggtgtaccacttccagtcacaaagaaaaaaatcctcttctatctagtatatatccatctgctatagtttttcagccttatgattaattagtggtgtgtcaagccttgaactttttattgctccattttatttcttttcaacttattattkaccatctttgtacatattgtggaacacataaacccacaaaagaggcctgactggctcacagacaacagaggaaa

SEQ ID NO: 148900 - DNA, 563 bp, Homo sapiens
attagtgacatcttagggaagaggaattttggattgtgaagggtgtttttttgctccacttttttatttcccccttcactagttaaatctaagggacacttaaacttagagcctgctattatttttccttgaccactgtgtgaccttcatttcctggagctgattcagatgaagaattctagaacagcattagagtttgttgatcttttaccctctcctgcctcattacaaatgctgtgmaatttatcttgggttatctttttccaatgtataaagcctttggtatcaatcaaactggacagctcgaggatgatgcagagtgctggcatgattcactgtgagaaacaccctgagaagcttcccctttggctcttcccacatcagccgtgaccctcaacccaactcagaacggagaggaagcaatcaggcattccctaaatgtcttcaggccttgtctgattcttgatgatggtgaaagaaggatagacttgaaactacagcagttccaatacaaaccaggcacaaaggaaaggttcctttcatccaagagcgatattacggca

SEQ ID NO: 148901 - DNA, 589 bp, Homo sapiens
cctgtcctcatggaccagacaccatctggtggaagagatgagacaattgagtaataatatcaatacaataagatgtcatcacttagtgaggagaggagaggagagctcagtaatggtggtagaggagccatcagagggttggacaaggaagacagaggatctgagctaagtttgtgaagaaaagtccagatgcctcagacaagatggacaaggaggtgggaagcatgatggctgtgggtccaactagggtcactgggggagactgtttatacccagcatatgtttgtggggaggagggactgaagcctgggtgaggggagagggctcaaggctggccttaggacatggacaggatggtattgagtcacgctgcagaaggagccttcatgggcaagggggctgggggaggccctgagctcattactccaayggaaatatcaaactgcctgttagcctttgtcaaaggtatcaaagagactttttcattcaagatggcaagagaggaatctccctcttagacttctttgagatattctttcttcatgaccgtttcttgcccctggatgaatgctcacatgggagcaaatta

SEQ ID NO: 148902 - DNA, 449 bp, Homo sapiens
  misc_feature (1)...(449): n = A,T,C or G
nnnnnnnnnnnnnnnnnnnnnncctgcaggatactttcacttgtctgaaattcccataggtgcagttccccaaagtgctagggcctcagtatctgagataatagagtagaatgtagagtcctggaatacaacaatgttatgraaagataattttcagtaaagggtaaaatcatgactctcagatagatataaaaatgaatacaaattaaagattttattgaactcatacttaatgaggaaataagtagatgttaaaactgggtcaaaagagaatccaaagaacagaaaaatacatagattggaaatattaatatgactgtgaaaattgaagcaaaactgggtttcctgttagggacgattacaaagatgaagaaatagaagaaaacagacagtagaaaacatttagcatcaaaaaagaatgaccatctaagtcagtgtcaattgagtca

SEQ ID NO: 148903 - DNA, 508 bp, Homo sapiens
gaattcataaacaactttcaatcctcctagtcctttccagtttgttggggttccctcttccagtcctctgtccagaaaggtgtggctttatttcctcaatttcgccacatacttcccatgactagatccatactgggagccaagcagtggagggcagagaaaaaagccctgccctattgggaatcacatctcttctgatcaaagatgaggtttccttctttcagaagtttaggctcccgaactcccccagtgccactgctatcactgtggctgccaccaacacaaagttgcctacaggatggtacaagaaatactgggggggraaaggaaaaaagacaaatgggctatttccctatttgctctgcatgttaggaggctccttcctcacccctctagccagaggtagtgggtttctcctgaagctctctcggtccacagcgatacatacttcgggttccaggctgcattaagtctggactgaaggaaacaagttggggggaactcacta

SEQ ID NO: 148904 - DNA, 585 bp, Homo sapiens
gagaaggagagtctaaagtttcagggcaaaaaaaggagaattcaattagagctttaatagctagattggtgtcctgaaaggacagagacagtgctgaattaaacaggctgacactgatcccagaccactgggacaagggccccatgaaaagtagactctcagcaatgacacagatgtcccggaaagcagtagctttgggaggtgagcagaaggaggccccacttggaagtgtgtgggcactgggaaaggtgcaggtgctggaccctcaggctgcttctcacctgagggagggacaggtgcacaggtggtgggcagtggccactcctgtggcttcctggcctccttgcctttcttacccactctgggacaaggaggccatcatggggatgtgtatctgcttcctccctctcctgagactacctgtatctcaggtcagtgcctgcatggcaatagtgtgtctgtctaaaattggtctgtgggaagaatgtcagcaacatcagggagcttgagctgtaactttgtgagccagaaatygcctggcttgtgatcctgtccaggtcccagcatctacaggacaaaacccaa

SEQ ID NO: 148905 - DNA, 356 bp, Homo sapiens
gcccaatggggacagggctccctccaggacacagggagctgctccctctttcttctccctgggctgtctagagcctgcacccagactgccttgcttctctstgggcctatttcttcttctcagcccctcaagaaattagattgcagaaaaggaaaagattaaaaaataaatttaaaaatatttgccagcaccaggcataaattctagggcaatatgacaccaagtgcaattttgagaggagagaggggagccctaggtaggcttctgattcctaattatccttccttatttgggcactaagaggcaaataacatctttcaaagggcagggtcagcactctctaaatctgtcctgag

SEQ ID NO: 148906 - DNA, 356 bp, Homo sapiens
gcccaatggggacagggctccctccaggacacagggagctgctccctctttcttctccctgggctgtctagagcctgcacccagactgccttgcttctctgtgggcctatttcttcttctcagcccctcaagaaattwgattgcagaaaaggaaaagattaaaaaataaatttaaaaatatttgccagcaccaggcataaattctagggcaatatgacaccaagtgcaattttgagaggagagaggggagccctaggtaggcttctgattcctaattatccttccttatttgggcactaagaggcaaataacatctttcaaagggcagggtcagcactctctaaatctgtcctgag

SEQ ID NO: 148907 - DNA, 590 bp, Homo sapiens
caaaactattattttctttgctacttcctgagtcaatatacatcttctctcaggagaacaccaaggttacatagactcctcgtagagcactcaacacaataaatcaggttagggccactgggaaataaaggattagagtaaaaggaaatctttgattaaaaatgtagttcattattcaatactctttgctagacagcaaacataaaggccataaaccttgccttagctcaataattcagagcttccaaacataggataatacaaattgactcttttgaaatcatacccgacaaatgactccttggtcataagtacacacaatgtcacatttgtgtgaaacgctgtcagtgygacagcagtaagcaaaatgaaaatgaatttagtaatcctatcctatcctctgattttttaaagaagcccacgtgttccccctttttcatgcataattctgtttctcagtgcttagcaaagtcttttcaaattagaggtaaggtttgataaattcttagtctcccagcatgggacatgtacccagagcagtagtatcaaatattaactggtaatcaaaattcattctaaaatggcattaa

SEQ ID NO: 148908 - DNA, 475 bp, Homo sapiens
ttattcctacaaataaccaactcctggattcattgatcctttgtatgtttttcgtgtctcattttcatccagttcagctctgattttggttcttttcttctgctagctttggtattggtttgctcttgtttttctagttcctcaaagtgtgatgttaggttgttcatttgagatccttctaactttttaatgtgggcgtttatctgtgtcccagagattctggtatgttctatctttgttctcattacttgccaagaatttcttgattactgccttaatttccttgtttacccaaaagccattcaggaasagttgtttaatttctatgtaattgtatagctttgaatgattgtcttggctttgatttatatatatatatatatatattttattttattattattacactttaagttttagggtacatgtgcacaatgtgcagcttagttacatatgtatacatgtgccatgctgg

SEQ ID NO: 148909 - DNA, 515 bp, Homo sapiens
tatataagtgtttgagggaggatattagtttcatttctgacttttattcaactttaaaaacttaacagctagctgtgtagtttccttgaatcatctgatcttgtctccatataaatatagagattcctagaaatattactgtgaatccatgctgtatgttttggcttcctgaaaatcaactaaggcccatmcatgctgtgcagatgttgaaagtacaattctccctgtagatagcaaagggtaagcgggtaatcacacactctttcttgtcatattttcttttagggtgagagtctagtagctgttggaatttggattagtagtccaaactactagtgtttagtcttctagagtttaataggtctattgatatagaaacaaatataaatctttagtctgtgcattattatctttaaatgcttattttagaaaaatctgttggttgagtttattgggacatggaactatgaaagtcatgggtatgagctctgctactagcacttagctttgccaga

SEQ ID NO: 148910 - DNA, 389 bp, Homo sapiens
agtgttctattcaaaattattatgaagatytttttagcaatacactgtcacaaaaataatgactacatgacagctattttttacatatatacacatacataaatatatttatatattcatattctattcagtaattggacttcatttctctttctcaaaacaaggtcatttcacaaaatctttgactaaatgtaaatatttgtttttcttaaaatttaaatctataatttaaaatgatataatttgaggtaaacatatcagaaggcagtcaaccattaaaatattaattcgtttgcttactaatcataacagaatcccagcaataatctgaaaatataattgagaaaaattttacaccacaccttacatcattaggtagtgatcctctt

SEQ ID NO: 148911 - DNA, 389 bp, Homo sapiens
agtgttctattcaaaattattatgaagatctttttagcaatacactgtcacaaaaataatgactacatracagctattttttacatatatacacatacataaatatatttatatattcatattctattcagtaattggacttcatttctctttctcaaaacaaggtcatttcacaaaatctttgactaaatgtaaatatttgtttttcttaaaatttaaatctataatttaaaatgatataatttgaggtaaacatatcagaaggcagtcaaccattaaaatattaattcgtttgcttactaatcataacagaatcccagcaataatctgaaaatataattgagaaaaattttacaccacaccttacatcattaggtagtgatcctctt

SEQ ID NO: 148912 - DNA, 443 bp, Homo sapiens
gcttctcacaataaaaagaaataagtaaatacattttaaaaattgcaaagcatacaagggaacaaggtactacmgctgagaaccagatagagagtaacgtaaaatcctcaaagacttcagaaattagaactagcaaggattatagaataactatgtttaataggatttttaaatattagaagctcaacgatatgatcaaagaagcaggaagtcttaaaaataaccaagcatgctttagaaataaaaaacataattgaaaattttaaattggctgggtccagtggctcacacctataatctcagcactttgggaggctgaggcgggtggacgagtattttctaatactgttgacagcttccagtcttcagatcaatgaagctcagtggatccttagaaaaatttaaaaacaaaatagaccaatcaaagtaaaactacagaattc

SEQ ID NO: 148913 - DNA, 443 bp, Homo sapiens
gcttctcacaataaaaagaaataagtaaatacattttaaaaattgcaaagcatacaagggaacaaggtactacasctgagaaccagatagagagtaacgtaaaatcctcaaagacttcagaaattagaactagcaaggattatagaataactatgtttaataggatttttaaatattagaagctcaacgatatgatcaaagaagcaggaagtcttaaaaataaccaagcatgctttagaaataaaaaacataattgaaaattttaaattggctgggtccagtggctcacacctataatctcagcactttgggaggctgaggcgggtggacgagtattttctaatactgttgacagcttccagtcttcagatcaatgaagctcagtggatccttagaaaaatttaaaaacaaaatagaccaatcaaagtaaaactacagaattc

SEQ ID NO: 148914 - DNA, 443 bp, Homo sapiens
gcttctcacaataaaaagaaataagtaaatacattttaaaaattgcaaagcatacaagggaacaaggtactacagctgagaaccagatagagagtaacgtaaaatcctcaaagacttcagaaattagaactagcaaggattatagaataactatgtttaataggatttttaaatattagaagctcaacgatatgatcaaagaagcaggaagtcttaaaaataaccaagcatgctttagaaataaaaaacataattgaaaattttaaattggcygggtccagtggctcacacctataatctcagcactttgggaggctgaggcgggtggacgagtattttctaatactgttgacagcttccagtcttcagatcaatgaagctcagtggatccttagaaaaatttaaaaacaaaatagaccaatcaaagtaaaactacagaattc

SEQ ID NO: 148915 - DNA, 600 bp, Homo sapiens
ggattttgtccttcatttggagaaggcctatcgtccttcctgggaggtacacactttattttccatctgcacttgcattcagttggcctctgcatattcagtgctacatttaattggctttgtgtatttggcattaaactagagcacccataaaatgtaactgttaaaaacaaagaaattagatgattgtaaataaaaataaatgtttataaataaacttttcatgtaaatgttaaaattatgttatgtaaaattaaataatgcacattaaatatctggattgtagctaaataagatttcttaaaactgaaacaaattgcwaaataaacaaaacgtcatttttggcttcttaaattttataaaaagtaaatatatttagatctattaattaaaatatgaatttaggaaaaaataattttgcatgagaattttatgtggtaaatctttgtcctatgacaaaataatttgttgtttaaaaataaaattatgggactaagactggaagttttaagaaagtgataaaaggtctaaacaagtcaaagaggatttataaaagatgggcctaatgaagtaagttacatgtgtaatcagattgtctgg

SEQ ID NO: 148916 - DNA, 521 bp, Homo sapiens
tgaattcttctatgtacaattactgggcatggaattttttaaaatacacttgaaacacatcacaacctgctttagtgccatgttatactcccwcacaaaggaagaaggtgcctaggcgtatgtcctctcaaagacccggaaaaaatcagtcctttgttgaagtagagccattggcctgctggataactagaagtcttgttaatttaagataaatacctggcagtttattctagagacttaggaaaaaagacagcagctcttgactgggttttcactggatgcattttgaggtactgcacaggaagaagaaaacacgtgccttttgtctcagggaggtcaggagttttcaggagggctctgggatccatctcgattggtgacagcttttctctttcccctgcttttctcttccgctcctaattcccttagtgttccactctcaagctagctgtatctaggaagtgggtgggatgagctcttccttggaaagatgcccaagaattggactacgcttgggatct

SEQ ID NO: 148917 - DNA, 587 bp, Homo sapiens
cacttgggcctctgtccttgttctctgcatctgacacacctttagggcattgcagtgtctgagacatctagacatctcccacatgctccacccaagtcctgtgcaaatgtgatgagtggctgattgtccaggagcccaggccagacttgttccagcactgtgtccatgcagaaccctttcctgggaatcagtgagtcctttccatatggaagcatccccaggatgtagaagggaaccttttcagctccgctgggacccttttctcaggggctggagcctttattacctgtatcctggcctcttctagggcctcackgtattaggtggaagagaaaatatgaaaacttaactcctagcccatttccttgtctgtaaaatggggctgctgccacctgacatcaccaagcaggctgtgggcttccagcttttcagattttgaatgagtgttgctggggccaacacagattcaggtgcacccagttttctgggagttcttgccaactgggtttctgtcttcaaaaacagtctgcattatttttgcatattgttgcaaaagaaaacaaagcaccaggactcagcccagccag

SEQ ID NO: 148918 - DNA, 504 bp, Homo sapiens
gtgtttgattgcaagatgcagctcagactcctctgagatgtaatatgcaatatgcataatatgtgcttaattgcttctctaaaattcaaaatattctgaaatcctaaacgtatctggtcccacaggtttcagtgaagatgttctagacctgttttagcattmttatgtattatctgttatgaagacgtattgtaaattgatgcaattctgtgaaatggacccagtttcctttcaagaaaactattttttaagtcataatacaattagaagaacatgatttgcatttgagagaattatttgcactggaataattatacagagagagaagaattaggagttcaaagtagggcacaatgaaatgggaggttcttttgggtcaggctagtcagctggctttcttaaagcctaacgggtagatgacatataggaatttgtcattccagagtctggccttaagctttgcaacctttgaaatctgccagcaccttttcaagaatgggtgag

SEQ ID NO: 148919 - DNA, 590 bp, Homo sapiens
gttcgctttcaggaaccctgacttttttttttttttwaagattgaagtaactaatctgacttttccttctctgaagatggtcatgttcctcagtcctgcatcacactctcaggcaaatcaatttaccacgcaatgacaataaagactttcctctagtccacaccatgaagcctgcatcaaaggagtgatctgagcagaaaaagaacaagagcctgatgttatcccgtcatgtgtaaatatgaagtggagaatatttaaatatcctgatcaattttttttttactatcaatgaagtggaatgtaataaaaatgtgagggcattttaatagtataatctttattcaaaaaacataatatggtgaagtaacctcattaactattagctgtatgctttccaacccattaccgttttcctgctttttaagtaattttcctcatcaggtagaatgattgcctttagggaagctagtccttgtcaagaactgtgaagggcccgcggtgttagcctgcatgcaagctgacaagttagccttctcaactttcatacaagctggcagaagacacatgaagggtccaggcaaagcaggcag

SEQ ID NO: 148920 - DNA, 442 bp, Homo sapiens
ctttctgtaatgctggaaatgttctatatcagagccatccaatatggcagctaatgagcacttgaagtgttgctatgacatgggaactgaattttttttttttttttgacacaatctccctctgttgcccaagctggagtgcagtggcatgatcatggctcactgcagcctcaacatcctgggctcaagtgatcctcccacctcagcctcctgagtagttgggactacaggtgtgtgccmctatgcccagctaatttttttcttaagagatagatagggtcttactatgttgcctaggctggtctcaaactcctaggatcaagtgatcctccagtcttggcctcccaaagtgctgggattataggcgtgagccaccatacccagcaggaactaaatgtttaattctatttaatgtaatagtcacagtggttaatggctactg

SEQ ID NO: 148921 - DNA, 561 bp, Homo sapiens
tatcccgatttttcttatgctcttaattctttgtctttttcagtacgttctggacaagcccctggatcaatttttcagcacactaattagcacttatgttctattttatttcattgtttgacagtcttttatacttctgagagatctaatcacttcttgaaagaatgtcaaggagctccattaaacagcaatctactgggggtatttatacttatatttaagtcttatgtttgctatwattttctctgctttctacagtgttctgttaggaatggtgtctcccttttatggccttggtttttctcagatgctgtgtgattcttgatctgtttgcttttgtgttttgaccttccttgtttgcctgtctttggttgcctgcctctcataatgggaagccaagttggatgtgggtctgacttgtctttgggacattgggatgtagggttcttttcctacttgaaggtgataagctttctagattcccaccttttttctcctggtgtctgtgactctgagctgagtagtaaaagctctcctttctgagagcattccacagtgaat

SEQ ID NO: 148922 - DNA, 561 bp, Homo sapiens
tatcccgatttttcttatgctcttaattctttgtctttttcagtacgttctggacaagcccctggatcaatttttcagcacactaattagcacttatgttctattttatttcattgtttgacagtcttttatacttctgagagatctaatcacttcttgaaagaatgtcaaggagctccattaaacagcaatctactgggggtatttatacttatatttaagtcttatgtttgctataattttctctgctttctacagtgttctgttaggaatggtgtctcccttttatggccttggtttttctcagatrctgtgtgattcttgatctgtttgcttttgtgttttgaccttccttgtttgcctgtctttggttgcctgcctctcataatgggaagccaagttggatgtgggtctgacttgtctttgggacattgggatgtagggttcttttcctacttgaaggtgataagctttctagattcccaccttttttctcctggtgtctgtgactctgagctgagtagtaaaagctctcctttctgagagcattccacagtgaat

SEQ ID NO: 148923 - DNA, 533 bp, Homo sapiens
gaattctcagctttcttggtggtctgagagcttattttaaaaatgctttggagccatacaactaaaagtttcttgggtagggcattttaaagatgttttctacctgataggcacattaaaatttatttatttattttgccaggaatactgtgttgagaggcacactaaaattggagaaccggtggtttagtttagaatatgaytcatttccctctacttgaaatgtggagttaggaacacttatttctttagttctcatttgtcctgtttggtcttgggtgaccacagcacaaggacccttttcttttctgttatcaggtgcagtgcacagcctcagagttaagcagtttttattttgtagctacagatttcagaattgtgttgctgggtagacgactatcttgcaactttaattgcctagttagctttcaactatatgagatccaatttccctaatatttgattaaggtgaagcttttttccctctatcagctcctacatttgtgtgtgtgcactcatgagcaataatcagg

SEQ ID NO: 148924 - DNA, 558 bp, Homo sapiens
agcacacacaaatgacaaatcttcagaactactgttaaaacttctggggacacaaaaccacaaatcattcaaagagtttgctttattggctgttctcaaatgggcaagcagctgtgtgtgtgtgtttttggtgtgaaagcgcctagaaaatgtagtttattttggcatattttttctagtgttaaagcaatcagcatggatacgtaaattgttgatagtgaaagacatttcattagtttagtattgtacactgttacaccgctataggaaaaattctgtctcaactgccagattcacgtgtcccgccctaaaaaagccaaaagccctaaaaayacatgtgtatatgtatatatatacacatagatacacacacacacactatatatgtgtgtgtgtgtgtatatatatatatatatatctcaagtaattatacacttctaaatatagatactggaagtcactaaagtaaaaaaaaaaaaaggtctaatatataagagttattcagatttgtattcgcgtagaacaagccagttcctttcatattaactatgcacacca

SEQ ID NO: 148925 - DNA, 591 bp, Homo sapiens
gaattctcatgcatgaacatttccatgaagtccaccgcaatgccctaatgtctggcaataacagtggaagttctggctatcccttcttgcttgctatgagaaaaggcagtagagtactccacaaagcacagtccccggaacctgtgtctggctacttacagcaccagcaacctagcagggtatgacctcaggtaagctgtgtcacttctctatgccatgatttcattgtctgtatgattgtagtactactgttgtgagttaatccacatgcgggtcttattagcaaagtgcctggcacagttttgtgtgtgtgagctttttagatgatgagtaaatgtaactgattcaaacacacaaacacttcttgtttacactcycatcttcctatgacagggtctatagctcaccccataaggtccaaatgtgttcttgtctacaaactgacttgcccattactaacctctgacacagcatgggcagatattaaactcatctttagaatgagattgtagcagccaagttcacccaaagctactggaaaggggatcatgacagggtaagtctcttgatccccaaactggctgctgatca

SEQ ID NO: 148926 - DNA, 610 bp, Homo sapiens
gcacacaaggtgaacatcaacttcgctgaagagcatcctataatcccaggatcggggacatatcagatgcagagctgcacctgcataacccctcctaggaggcaggcactggggagacactctgcctacactatctcccaccactcctcatacctgtctgagaagacagatatttaagcagtcgaggaagaccaagttcaaagggtatgagaaacatgtaaggttgccaagctgagatgtggacttgtctgcccataaggctcaaagcttccactccggacactcaccatcctgtttctcatctccttctgtccgtttctccgaagcatgccctgaggcacctgttatactgccccatcctagatccgtggagaatttctagsgggggtgggcttagactcaggagtctttataagctccactgatggctctagagcacccagaagtctaagaacaggacagtcactgtgacagcctttgtctgcccaggcacaattactgccaggccaactaggggcttgttttccacaagagggagagactggcactgcccactatctgatttccctcaagaggaaagaaagcagcataaaacacactggctgaattc

SEQ ID NO: 148927 - DNA, 597 bp, Homo sapiens
tttctgcttagtcctgtggacagagaacggtggagcttcaccagaaagctcctctcagcacagcagtcacagcaccaactttggaatccagctacccagatttgaatcctcatcccacgctggcaagccacataaaattggacaatttatttaatgtctttgtgccttggtttccttccccacaaaatgggagttctasctaatggagttgctctgtatcaagagagctgacacatggacacatttagacccacagcaagtgcttactggcatgtaagtttctaataaatagttcgcatcattattaccttctgggcgctttgtatttgtcacttacagtgataaaaatttcagacggcaatctaagaagaggctcctagagttcgaagaaacaaaagcaataaaaccaagttcagcaccatgacacttctcactcaaaccccatggagaaggccacgacccctagaaatgggaggccgtttgatctacaatcgagaaagaactcaagggccaataacgaaactgaaggcaatggagttctcggaaaaggggttcaccacatccatgcagctactgtcagccatgctgtaaaaccac

SEQ ID NO: 148928 - DNA, 597 bp, Homo sapiens
tttctgcttagtcctgtggacagagaacggtggagcttcaccagaaagctcctctcagcacagcagtcacagcaccaactttggaatccagctacccagatttgaatcctcatcccacgctggcaagccacataaaattggacaatttatttaatgtctttgtgccttggtttccttccccacaaaatgggagttctacctaatggagttgctctgtatcaagagagctgacacatggacacatttagacccacagcaagtgcttactggcatgtaagtttctaataaatagttcgcatcattattaccttctgggcgctttgtatttgtcacttacagtgataaaaatttcagacggcaatctaagaagaggctcctagagttcgaagaaacaaaagcaataaaaccaagttcagcaccatgacacttctcactcaaaccccatggagaaggccacgacccctagaaatgggaggccrtttgatctacaatcgagaaagaactcaagggccaataacgaaactgaaggcaatggagttctcggaaaaggggttcaccacatccatgcagctactgtcagccatgctgtaaaaccac

SEQ ID NO: 148929 - DNA, 597 bp, Homo sapiens
tttctgcttagtcctgtggacagagaacggtggagcttcaccagaaagctcctctcagcacagcagtcacagcaccaactttggaatccagctacccagatttgaatcctcatcccacgctggcaagccacataaaattggacaatttatttaatgtctttgtgccttggtttccttccccacaaaatgggagttctacctaatggagttgctctgtatcaagagagctgacacatggacacatttagacccacagcaagtgcttactggcatgtaagtttctaataaatagttcgcatcattattaccttctgggcgctttgtatttgtcacttacagtgataaaaatttcagacggcaatctaagaagaggctcctagagttcgaagaaacaaaagcaataaaaccaagttcagcaccatgacacttctcactcaaaccccatggagaaggccacgacccctagaaatgggaggccgtttgatctacaatcgagaaagaactcaagggccaataacgaaactgaaggcaatggagttctcggaaaaggggttcaccrcatccatgcagctactgtcagccatgctgtaaaaccac

SEQ ID NO: 148930 - DNA, 615 bp, Homo sapiens
gttgtccactgttgttatttgtgcaccatggtctgagttggcctgtttcttgtgagtcgtcttatccttaagtgtggtataaaacccttcgtagggagagtgtgtggcctcttgtgtcctgcctgctgcagggaagctctcatgagtaggggtgtaagctatgtttttttttgttgttgttgttgttgtttttgagacagggtctctctcttttgcctaggctggagtgcagtggcgcgatcttggcttactgtaacctccacctcctgggttcaagcaattctcacgcctcagcctgggacaaatagctgggactataactgcacgccaccatgcccagctaacttttgtatttttagtagagacagggttttaccatgttggccaggctggtctcaaactcctggcctcaggtgatctgcccgcctaggcctcccaaagtgctggtattacaggcgtgagccatcgtgcccggccctggtgatgctatttttttcctggtctttttatgagaagacccaggcacagaagctgccctgattccaccatgaaaacaaaagcataggtcaaaagtgggggcttggggcrgcaccctgctctgccaccaggcaagct

SEQ ID NO: 148931 - DNA, 446 bp, Homo sapiens
ctaaaaatgcaagactgttttttctttgaatttgtctttggtgaaattcagaacttcamatatgaaccttgaacttgaattctccctctctcattgagttctgtattaggttacaattttattattaggttggcacaaaagtaatggcaaaaaccacaattacctttgcaccaacctaatagtcgtgtcttgtttagtgaagactcagagtgaataaagcataaagcagagaagagcacataagcagcagaaatagtggatgtttctccttacagactttctcagtgtgaattcatacattgggagccaacaaatagtatatcttacagtatataatagtcatatacatgataggtgtatttggggagaggctgtataacttaaatcctcttttcagagaggtttctgacacaaaaagttaaaaattaaagttcaaaaacacagat

SEQ ID NO: 148932 - DNA, 530 bp, Homo sapiens
acatgttcaggtgaggtggaaaagccaccatcaccatatgcattagataaacccaaactgccctcattgctgagcaggcttagggaattagctwctggccaaggcataggtgactggtttccagtaatacatggaaacggattaggtgtgggctcccagaattttcattgacagaaagatagaaaggaagcagacataaaacattccatttcctccaacatgccctcgaccctgacataagcagataaaactctcttatttctgataataggtgcagtagaagcctgtaaaggtaagaattgaatttagatgggaggaaattgagtggatattaggaaaatgaggttcaaaagcaaaccctgatggaggtgtgtaaatgacagtagttgaaattgcaattattgaattaagttaaaattgtccttctctctcctgtaaatcagccttatcagtttgaccatgagtaacaaactgataaggctgatttacaggataaggaaggaaagatttgggggttagggaatatttgc

SEQ ID NO: 148933 - DNA, 543 bp, Homo sapiens
acatgttcaggtgaggtggaaaagccaccatcaccatatgcattagataaacccaaactgccctcattgctgagcaggcttagggaattagctactggccaaggcataggtgactggtttccagtaatacatggaaacggattaggtgtgggctcccagaattttcaytgacagaaagatagaaaggaagcagacataaaacattccatttcctccaacatgccctcgaccctgacataagcagataaaactctcttatttctgataataggtgcagtagaagcctgtaaaggtaagaattgaatttagatgggaggaaattgagtggatattaggaaaatgaggttcaaaagcaaaccctgatggaggtgtgtaaatgacagtagttgaaattgcaattattgaattaagttaaaattgtccttctctctcctgtaaatcagccttatcagtttgaccatgagtaacaaactgataaggctgatttacaggataaggaaggaaagatttgggggttagggaatatttgcagctcactcttat

SEQ ID NO: 148934 - DNA, 554 bp, Homo sapiens
gagtacatgttcaggtgaggtggaaaagccaccatcaccatatgcattagataaacccaaactgccctcattgctgagcaggcttagggaattagctactggccaaggcataggtgactggtttccagtaatacatggaaacggattaggtgtgggctcccagaattttcattgacagaaagatagaaaggaagcagacataaaacattccatttcctccaacatgccctcgaccctgacataagcagataaaactctcttatttctgataataggtgcagtagaagcctgtaaaggtaagaattgaatttagatgggaggaaattgagtggatattaggaaaatgaggttcaaaagcaaaccctgatggaggtgtgtaaatgacagtagttgaaattgcaattattgaattaagttaaaattgtccttctctctcctgtaaatcagccttatcagtttgaccatgagtaacaaactgataaggctgatttacaggataaggaaggaaagatttgggggttarggaatatttgcagctcactcttataccacca

SEQ ID NO: 148935 - DNA, 410 bp, Homo sapiens
taaacccaagcaattttttttcttttagacacgaagtttaataggaatttgatttctccttgaggaactcaatcctttcagaatttaagcacacaccttacaaaatacattaggttaaaggaaaaagagaatgagaaagaaataagtaatatatgaactagagacacagcagcatatttcttaaagtcttttaatataaaattttattatgacagatttaatctagttatctagttacgaggcttggctaaaatcttttagaattaggtaaaatgatgaaattctacytaagagccatctttttaaaagattgctttctaaaagcaggctgtattatgatggtctcacttttatacttgttggtttgtctcagtgaatttcacaaatattgatgatgaaagtatcaacca

SEQ ID NO: 148936 - DNA, 544 bp, Homo sapiens
aggcagtctcgaaggaagtcgatgtcctgtctttgcttttcaaagttctgacacagaaagtgatgagctatcagaagtacttcaagacagctgctttttacaaataaaatgtgatacaaaagatgacagtatccygtgctttctggaagtaaaagaagaggatgaaatagtgtgcatacaacactggcaggatgctgtgccttggacagaactcctcagtctacagacagaggtatgtgtcttatttctccttaaatctgtggttggctggcttcatagtttagaacggggctcctcaaagcagctggtcaaggaaccgtctatcatcagtctgtagtgaaggaaggggttgtacactgggtataaatcatactgcttccttcattgaggaactcttgctacaaaacaaaacagacagctgaacaaaacagtgtgcttgatgctggctggtgtttctctacaaacattagaccagaacctcatgctggtgaatgttactattcctcacatgaaaatgaacatctctgaacagatgatggggtga

SEQ ID NO: 148937 - DNA, 544 bp, Homo sapiens
aggcagtctcgaaggaagtcgatgtcctgtctttgcttttcaaagttctgacacagaaagtgatgagctatcagaagtacttcaagacagctgctttttacaaataaaatgtgatacaaaagatgacagtatcctgtgctttctggaagtaaaagaagaggatgaaatagtgtgcayacaacactggcaggatgctgtgccttggacagaactcctcagtctacagacagaggtatgtgtcttatttctccttaaatctgtggttggctggcttcatagtttagaacggggctcctcaaagcagctggtcaaggaaccgtctatcatcagtctgtagtgaaggaaggggttgtacactgggtataaatcatactgcttccttcattgaggaactcttgctacaaaacaaaacagacagctgaacaaaacagtgtgcttgatgctggctggtgtttctctacaaacattagaccagaacctcatgctggtgaatgttactattcctcacatgaaaatgaacatctctgaacagatgatggggtga

SEQ ID NO: 148938 - DNA, 544 bp, Homo sapiens
aggcagtctcgaaggaagtcgatgtcctgtctttgcttttcaaagttctgacacagaaagtgatgagctatcagaagtacttcaagacagctgctttttacaaataaaatgtgatacaaaagatgacagtatcctgtgctttctggaagtaaaagaagaggatgaaatagtgtgcatacaacactggcaggatgctgtgccttggacagaactcctcagtctacagacagaggtatgtgtcttatttctccttaaatctgtggttggctggcttcatagtttagaacggggctcctcaaagcagctggtcaaggaaccgtctatcatcagtctgtagtgaaggaaggggttgtacactgggtataaatcatactgcttccttcaytgaggaactcttgctacaaaacaaaacagacagctgaacaaaacagtgtgcttgatgctggctggtgtttctctacaaacattagaccagaacctcatgctggtgaatgttactattcctcacatgaaaatgaacatctctgaacagatgatggggtga

SEQ ID NO: 148939 - DNA, 522 bp, Homo sapiens
ggaagtcgatgtcctgtctttgcttttcaaagttctgacacagaaagtgatgagctatcagaagtacttcaagacagctgctttttacaaataaaatgtgatacaaaagatgacagtatcctgtgctttctggaagtaaaagaagaggatgaaatagtgtgcatacaacactggcaggatgctgtgccttggacagaactcctcagtctacagacagaggtatgtgtcttatttctccttaaatctgtggttggctggcttcatagtttagaacggggctcctcaaagcagctggtcaaggaaccgtctatcatcagtctgtagtgaaggaaggggttgtacactgggtataaatcatactgcttccttcattgaggaactcttgctacaaaacaaaacagacagctgaacaaaacagtgtgcttgatgctggctggtgtttctctacaaacattagaccagaacctcatgctggkgaatgttactattcctcacatgaaaatgaacatctctgaacagatg

SEQ ID NO: 148940 - DNA, 600 bp, Homo sapiens
cacatccttcatacggtactttgtgctgctgggctaactctttctagtaaacggggccagtccaagatagggatttttaaattcattccttgccaccaccaaatacttatgattaaatgcaatctaaaaaacaaaatcatcttcttacatgcagtaatctgttttctatctacagtagcaaaatatagagtaacgtacacactgcatagattgtagacttgatagtggtttggatgcttctcgtctagaaagtgcacaacttcctaaaaaagaaaaacacatatcttacctatttacatgacaccaacacaagctatttcctagggggaacctaaaatggttattactttcattaatttgtctctcactagcatcttctaggggagattcggggaataacagggtatgcaaatttcaagttctaatccactgtgatttttcaaatagtccacaatgtgtgtttggctacacagttgagtctctattgtaaatacacactgtttaaarctatcacataagtaaattagctggttaactaactttaagtaaatttgttctaaatcattaattcacagttaatgtggttcttgtttaaatcta

SEQ ID NO: 148941 - DNA, 571 bp, Homo sapiens
atctcattaatggaaaacagaaaaacgttttgattaccttgatagatgcagaaaaaatatctgatatattcaacaccaattcatgattcaaaacttttagcaaactagaaataaaatggactctcttaatctagtgaagaatgactacaaaagcctatagcaaacatcatttcaaatagtgaagcatgaaattctttccacctgagtttgggaacatggcaaggccgtctcctcttacaatttctattcaatattacagtgaaagtcctagataattcaataaagaaaaaaagtataaaaagtggaaagaaagtagtaactttatgtgattgcatatatttaaaaaatccaagggaatctacaaattcattattaaaatgaatgtgtgaatttatgaaggatgctagatgtaaagtcaacatacaargccaggtgtggtggctcacacctgtaatcccagcactttgggaggctgaggtgggaggattgcttgaatccaggagttcaagaccagcctgggtcagtgagaccagagagactccttctctacaaaaattaattttaaaaatta

SEQ ID NO: 148942 - DNA, 571 bp, Homo sapiens
atctcattaatggaaaacagaaaaacgttttgattaccttgatagatgcagaaaaaatatctgatatattcaacaccaattcatgattcaaaacttttagcaaactagaaataaaatggactctcttaatctagtgaagaatgactacaaaagcctatagcaaacatcatttcaaatagtgaagcatgaaattctttccacctgagtttgggaacatggcaaggccgtctcctcttacaatttctattcaatattacagtgaaagtcctagataattcaataaagaaaaaaagtataaaaagtggaaagaaagtagtaactttatgtgattgcatatatttaaaaaatccaagggaatctacaaattcattattaaaatgaatgtgtgaatttatgaaggatgctagatgtaaagtcaacatacaaggccaggtgtggtggctcacacctgtaatcccagcactttgggaggctgaggtgggaggaytgcttgaatccaggagttcaagaccagcctgggtcagtgagaccagagagactccttctctacaaaaattaattttaaaaatta

SEQ ID NO: 148943 - DNA, 400 bp, Homo sapiens
atacaaagaagacattgctaccttatcttcaacccttgcctttaagaggcaaataaacacaaaayacaggtgcatcttgcttggttctgagacagtgaaggaatttccccagtatttaaatatattcacataaccagtcatataaatctaaatataaaccaatataaatataaatataaaaccaatctccaataagttttaagatggtactcaccatcttaaacattattaacaaagtctaatcatatctttagaaggggtaaacagtgatagcattcactgaattggaattactattaatattcaaaaaccaaacttattcatttaaccacaagccagtcttagttttaaatcaggactgcccaacaaaatattctgacagtcattcataatctgaact

SEQ ID NO: 148944 - DNA, 398 bp, Homo sapiens
acaaagaagacattgctaccttatcttcaacccttgcctttaagaggcaaataaacacaaaacacaggtgyatcttgcttggttctgagacagtgaaggaatttccccagtatttaaatatattcacataaccagtcatataaatctaaatataaaccaatataaatataaatataaaaccaatctccaataagttttaagatggtactcaccatcttaaacattattaacaaagtctaatcatatctttagaaggggtaaacagtgatagcattcactgaattggaattactattaatattcaaaaaccaaacttattcatttaaccacaagccagtcttagttttaaatcaggactgcccaacaaaatattctgacagtcattcataatctgaact

SEQ ID NO: 148945 - DNA, 397 bp, Homo sapiens
acaaagaagacattgctaccttatcttcaacccttgcctttaagaggcaaataaacacaaaacacaggtgcatcttgcttggttctgagacagtgaaggaatttccccagtatttaaatatattcacataaccagtcatataaatctaaatataaaccaatataaatataaatataaaaccaatctycaataagttttaagatggtactcaccatcttaaacattattaacaaagtctaatcatatctttagaaggggtaaacagtgatagcattcactgaattggaattactattaatattcaaaaaccaaacttattcatttaaccacaagccagtcttagttttaaatcaggactgcccaacaaaatattctgacagtcattcataatctgaac

SEQ ID NO: 148946 - DNA, 397 bp, Homo sapiens
acaaagaagacattgctaccttatcttcaacccttgcctttaagaggcaaataaacacaaaacacaggtgcatcttgcttggttctgagacagtgaaggaatttccccagtatttaaatatattcacataaccagtcatataaatctaaatataaaccaatataaatataaatataaaaccaatctccaataagttttaagatggtactcaccatcttaaacattattaacaaagtctaatcatatctttagaaggrgtaaacagtgatagcattcactgaattggaattactattaatattcaaaaaccaaacttattcatttaaccacaagccagtcttagttttaaatcaggactgcccaacaaaatattctgacagtcattcataatctgaac

SEQ ID NO: 148947 - DNA, 331 bp, Homo sapiens
gagggctgcttgcctgcaatgtcctccgcaagatctgggatgtccttcawaattccggggaattgccatttcctttcttgaattaaagctcacagagttggtctttatgtacttgcttgctatttccaaatgactgaggcatgctaaaagcctgtaatctgccatcttggaaaaaacatccttgcatccttaagagaaatggcacttggtgttgatacatggtgtttctacattgctgaattcactttgaaaatatatgtatattttaaaatctacatttatatgtgagactggtgtaaaaatatcttttattctactgtatttgtgcaat

SEQ ID NO: 148948 - DNA, 331 bp, Homo sapiens
gagggctgcttgcctgcaatgtcctccgcaagatctgggatgtccttcataattccggggaattgccatttyctttcttgaattaaagctcacagagttggtctttatgtacttgcttgctatttccaaatgactgaggcatgctaaaagcctgtaatctgccatcttggaaaaaacatccttgcatccttaagagaaatggcacttggtgttgatacatggtgtttctacattgctgaattcactttgaaaatatatgtatattttaaaatctacatttatatgtgagactggtgtaaaaatatcttttattctactgtatttgtgcaat

SEQ ID NO: 148949 - DNA, 331 bp, Homo sapiens
gagggctgcttgcctgcaatgtcctccgcaagatctgggatgtccttcataattccggggaattgccatttcctttcttgaattaaagctcacagagttggtctttatgtacttgcttgctatttccaaatgactgaggcatgctaaaagcctgtaatctgccatcttggaaaaaacatccttgcatccttaagagaaatggcacttggtgttgatacatggtgtttctacattrctgaattcactttgaaaatatatgtatattttaaaatctacatttatatgtgagactggtgtaaaaatatcttttattctactgtatttgtgcaat

SEQ ID NO: 148950 - DNA, 331 bp, Homo sapiens
gagggctgcttgcctgcaatgtcctccgcaagatctgggatgtccttcataattccggggaattgccatttcctttcttgaattaaagctcacagagttggtctttatgtacttgcttgctatttccaaatgactgaggcatgctaaaagcctgtaatctgccatcttggaaaaaacatccttgcatccttaagagaaatggcacttggtgttgatacatggtgtttctacattgctgaattcactttgaaaatatatgtatattttwaaatctacatttatatgtgagactggtgtaaaaatatcttttattctactgtatttgtgcaat

SEQ ID NO: 148951 - DNA, 443 bp, Homo sapiens
tgtccctttgttgattcttctcccccacccccaagtgtttgatccctgttgtgttccccttagggaaaatgaagattttgcattctaaccttaccccaccccattcacctaccaaacacatactgttacatacttcctgtcttcccagtgatgatcagcacgcagggtttatygtatcgtgaacatctaaatgttatttacactgagccacgtaaaggaacatttcctttctcacacatttttgcttttcctgaattttaaattcctttttgttgttgttttccttactttcccatgaacttactcaaactccacattccttactaattgtcacaatcttttctcaagctgtctgcatgcatttgtttcatcttgaagaaatgaggcctctggatggttgttcattatgcctggttatacggcttcagccttgggattttctt

SEQ ID NO: 148952 - DNA, 575 bp, Homo sapiens
gccatctttgctgttttgaaaccttagctgttcttgccttcaggctttggagagtccacagtgactaggagctggagtggacctccagcacagcacagttgccccgtgaaaaagcagccagaatggtttttcatgcaggtcccaatcctattcctcctcactagacaggaccccttgaatgggatttcctgctacccctgccagtgtttttcagccaggagcatttccaaattccatggaatggagctcccaaagggagtgatgggccatcatctatgctgtttagcagccttagctgttcttgcctttgggctttggagagtccaatgcaaatgggggctggagcacaccccaagcaaagcacaacacagctgctctaccaaaaagcagctagactgcttttttacacaggcccccattcccgtttctcctcattgggtgggctctccagactagggtctccagccacctcctgcaagtatgttctgaccagcaacagatccctacctcgctggaacagagctcccacatggcagtggccggtcgsggggggcaggttgtcatttttgcagttt

SEQ ID NO: 148953 - DNA, 603 bp, Homo sapiens
ggtttggggagtgggcagtaacactgtcccacgaaactcatgatggctctgttgttgcaaataaagtgggaacaatttaaactggtttaccagatgaactgatactcttaatgccctctgtacaggatactgatggatacccaygcttgactgaacacttcgtgctggtagattactctgtggcccaaatactactttcaggagttgagctgtgtgcttaccaagaatcaattgtgtttgttcccaaatctgtttttgtcaattgtacttgtaattttgcaatattattataatatatatttaatgagtaaagtatgagtatggcagaagagttatttctttgcaaaataataaaatattttgcaaagattggagtttgatttaaaaattgtaaaaattaagaaagtttttgcagtcagattgcgtttaaagtgccctaatgttttgcatattaaaaaaattgaaaccgccaattgtaaaggaggcattttgggagtggtttatacaaaataaactttgaggaaatttagttagtggctgctccattatatatcagaggtggatatatgaatgaatgtatacttacatatttgacatttaaat

SEQ ID NO: 148954 - DNA, 584 bp, Homo sapiens
taaaaattgtaaaaattaagaaagtttttgcagtcagattgcgtttaaagtgccctaatgttttgcatattaaaaaaattgaaaccgccaattgtaaaggaggcattttgggagtggtttatacaaaataaactttgaggaaatttagttagtggctgctccattatatatcagaggtggatatatgaatgaatgtatacttacatatttgacatttaaataaaatatttaagatatgtatttttaatagttttttacttgaaccaaattttatacttacttttttygattgtattgaaaaagaaagttttttttattgcgcattgctaaaaaagattgtgtagaaaggctaacaagtgctctctttagggataataagttttctttcaattacagtgagtgtggaataaatttctttctaacctgacagtggctttataactttagaagctggaatttgtgttcctggtgaagggggactcatgtttcctaaataaacaatatcttaaatagatcttatttcccacgcctgggaatctatttatcgcaaggtcatagaggctgttatagagagaagcagagat

SEQ ID NO: 148955 - DNA, 613 bp, Homo sapiens
acaaaatcatttgctaccatatctttgcttattgaagctatgaacaaagagggaaattacagtactttcagggagaaaaagtacctctgtagccctgtctgctggtgcagttcatgtacagaaagacaacagatctccttgaatcctgaactgcttgtcagcctcgaaagggtctttgargtggcttgtatattgattgactgaagttgcatgtagggtgcgttgtcatcaaaaggcaaggtaccaacaggccacagctgccattagtgctgccagaggacagcctatttggacaaggaaaataatccattgcttgttgcagaggaaaatgcctttgctctgtgctgccttcttctgactcggttaggaacttatcaatccagaagataatataacgtgactttgtttttctgatttggtgttattatttcagtcatttagggcattgtacattaaaaaaaaatccacagcatgcaaaaagtatacagttttattttctaaaggtgaatcacagtcactgctatttctctgagaaagcaggaggcttaactgctatcattgaccttggcctttcagaatcctctgtggccattgtggagaaaagagagccagc

SEQ ID NO: 148956 - DNA, 613 bp, Homo sapiens
acaaaatcatttgctaccatatctttgcttattgaagctatgaacaaagagggaaattacagtactttcagggagaaaaagtacctctgtagccctgtctgctggtgcagttcatgtacagaaagacaacagatctccttgaatcctgaactgcttgtcagcctcgaaagggtctttgaagtggcttgtatattgattgactgaagttgcatgtaggrtgcgttgtcatcaaaaggcaaggtaccaacaggccacagctgccattagtgctgccagaggacagcctatttggacaaggaaaataatccattgcttgttgcagaggaaaatgcctttgctctgtgctgccttcttctgactcggttaggaacttatcaatccagaagataatataacgtgactttgtttttctgatttggtgttattatttcagtcatttagggcattgtacattaaaaaaaaatccacagcatgcaaaaagtatacagttttattttctaaaggtgaatcacagtcactgctatttctctgagaaagcaggaggcttaactgctatcattgaccttggcctttcagaatcctctgtggccattgtggagaaaagagagccagc

SEQ ID NO: 148957 - DNA, 613 bp, Homo sapiens
acaaaatcatttgctaccatatctttgcttattgaagctatgaacaaagagggaaattacagtactttcagggagaaaaagtacctctgtagccctgtctgctggtgcagttcatgtacagaaagacaacagatctccttgaatcctgaactgcttgtcagcctcgaaagggtctttgaagtggcttgtatattgattgactgaagttgcatgtagggtgcgttgtcatcaaaaggcaaggtaccaacaggccacagctgccattagtgctgccagaggacagcctatttggacaaggaaaataatccattgcttgttgcagaggaaaatgcctttgckctgtgctgccttcttctgactcggttaggaacttatcaatccagaagataatataacgtgactttgtttttctgatttggtgttattatttcagtcatttagggcattgtacattaaaaaaaaatccacagcatgcaaaaagtatacagttttattttctaaaggtgaatcacagtcactgctatttctctgagaaagcaggaggcttaactgctatcattgaccttggcctttcagaatcctctgtggccattgtggagaaaagagagccagc

SEQ ID NO: 148958 - DNA, 651 bp, Homo sapiens
gtggcttattgcacttatggattttcctcctcaccaattagaaatgtcccaaagattcagctggcttgtcactgactgcagctcattgtaggggctctttgttctatgtttaattgctgattgcttttagtactgaatttcagatggagtaggtgtgtgtgtctgtgtgtgtgtacaaagctttcatgtgagagctttatttctagggaattttgtgattaagccttgaactataagattttaaacccttttagtagaggatctttcttaaaaaataaaaacttgtcttctgctaacaatcacgtttctgttatctgttaagtaagaaaatgcaaaaagattccatgacttcagtatgtcgaattaaagaagaatcataccagcaattagaagtgtgaggcaggactgtagacccttttgccctaactccaaggaccctcaattggggtgagcccacaggttgtagaaaacggatgggctggygtgacgttcttattttattttattcttttctttgctccatttatttcttttggagcacttatactgctggctgagagtacaaaatgaaggtcatggatcataacatgtcttggctggaaggaatctcaggcatccttcagccaggcacctgattttacggatgaagaa

SEQ ID NO: 148959 - DNA, 651 bp, Homo sapiens
gtggcttattgcacttatggattttcctcctcaccaattagaaatgtcccaaagattcagctggcttgtcactgactgcagctcattgtaggggctctttgttctatgtttaattgctgattgcttttagtactgaatttcagatggagtaggtgtgtgtgtctgtgtgtgtgtacaaagctttcatgtgagagctttatttctagggaattttgtgattaagccttgaactataagattttaaacccttttagtagaggatctttcttaaaaaataaaaacttgtcttctgctaacaatcacgtttctgttatctgttaagtaagaaaatgcaaaaagattccatgacttcagtatgtcgaattaaagaagaatcataccagcaattagaagtgtgaggcaggactgtagacccttttgccctaactccaaggaccctcaattggggtgagcccacaggttgtagaaaacggatgggctggcgtgaygttcttattttattttattcttttctttgctccatttatttcttttggagcacttatactgctggctgagagtacaaaatgaaggtcatggatcataacatgtcttggctggaaggaatctcaggcatccttcagccaggcacctgattttacggatgaagaa

SEQ ID NO: 148960 - DNA, 464 bp, Homo sapiens
gaaagaaggcctagctcacttttataacaatcctccctaagataatctgctcctgcaataataacattaatccattcgtgtaggcagagccctcatgacctaatcacctcttactgggtcatatctcccaacactattgcaatggggattaagtttctaacacatgaactttggggaacacagtcaaacatagtagacactaacaattccattatactaatctgacttcaataccctgttacaactgtgtatctgctttttatttctgatacctgcasaataattatatttcttgattttgatctttactattcatttactttttaaaacaaaacttagatttttgacctttggccaaaggatacaaaatttcagttggataggagaaataagttcaagagacctattatacatcatggggtgactacagttaataacaatataatttatgcttaacaatagct

SEQ ID NO: 148961 - DNA, 464 bp, Homo sapiens
gaaagaaggcctagctcacttttataacaatcctccctaagataatctgctcctgcaataataacattaatccattcgtgtaggcagagccctcatgacctaatcacctcttactgggtcatatctcccaacactattgcaatggggattaagtttctaacacatgaactttggggaacacagtcaaacatagtagacactaacaattccattatactaatctgacttcaataccctgttacaactgtgtatctgctttttatttctgatacctgcagaataattrtatttcttgattttgatctttactattcatttactttttaaaacaaaacttagatttttgacctttggccaaaggatacaaaatttcagttggataggagaaataagttcaagagacctattatacatcatggggtgactacagttaataacaatataatttatgcttaacaatagct

SEQ ID NO: 148962 - DNA, 519 bp, Homo sapiens
ggagacaaccaaaatgaggtgaatacctggtgtatctgagactgcttctatgtggactggtggctaccacagtatcatatgttccatggaacattctttgagaaacagcctaactgcactagcaactacaaataaaattaatatcgagatcagaagcttargtaagcttttaggattacaagttttcattaagctttgtatatgtagatcatggaggttcaagtgcatcagtagaagttaggccatgttcttgctatctattgcaccctagagtgaactactttaggccaaacagccaaaatggttcactgaaaaataaatgagaatacgcaccaaaagttcagagcatagcaaagtgaaataaagttcttgccaagtcaacctttgcaaaaaagaaatggagaaggaaatgtgatggtggtaaatagctctgttaaagagattttaagaaaggaagttaatgaattttctattgtaaataatgtataataaagcaggctatttgaccttctctagtga

SEQ ID NO: 148963 - DNA, 337 bp, Homo sapiens
gtcctcaccaggacttgacctgttggcaccctgatctaagacttttggcctctaaaacagtgagatgtaaatgtctattgtttaagctgcgcrgtctctggtatttgattatagcctaatgtattagttagggttcccacagggacagaaccagtaggatatatgtatatatgaaagggagtccagtagaaagaactggcttacatgattccaaggcaaaatcccatgataggccatctgcaagttggggaagagagaagcaagaaatggctccaagtccaaaagcctcaagatcagggaagtcaacagtgcagccttcggtctgtggccaaaggcc

SEQ ID NO: 148964 - DNA, 595 bp, Homo sapiens
tttttttgtagcttttagtagagatggggtttcaccatgttggccaggctggtctcaaactcctggtctcaagtgattcacctgcttcagcctccctaaatgctgggattagaggcatgagccactgctcccagctccctgtattgctgcagctcttatagcagaggtcatcctygacttcactgatatggatcccagtggcctgcttcacagaggacttcagcagcttttgccactgttgtgccactctagaacgtggataccatccctctcaatgctgtgcatgcttcagaccctggagtctcagttctgtgtgtggcagcactccaaacagccttggggctgcactgccatcatctgcacgttagacagtgaaactattgcatcagtaggcacatcagtatcccaaaccctagcactttggctcctccactggcacctgcaccttgcacaacatttccagtgttgcactggcagggcttgggcctctggcactagtgccaccaccttcatggatcctgaagcaattgtcttctcttatgtgctcacacttcatattccaggtccatggccatccatgggtgctgtgtatcag

SEQ ID NO: 148965 - DNA, 555 bp, Homo sapiens
taaaacctgctgcccagaagcaacaggtttgttttggggtttgggttttgttttcctttggtgtaactgtaaaatcatagaaggatgtatgattaagagaagctagtttaactgtttaaggtgggagggacttgttcaagatcacttgctgaaggagaaaaacttaagcataggagaaaggaagagaaaatggacaaatatcctatgctggtgggaaaaaaaaaagtgttgtacactaaagttcatcatctaccttctccaacyggcctttctacctcttgagaggtaatataacatatagtgtggtatggagcttggactttggaagcagactaagccagaccagctttatcacttatgtgaataatcttgagcaaggtaattagcctcagcttcctcatctataaaatgggggaaataataacttcttgtgtaggattgtcatgagtctcaaagaagccaatatttatggtatttggaatagcacctggaacatagcacacattcaacagtttatcatcatcatcttcttcatcatcattatcacctctgctt

SEQ ID NO: 148966 - DNA, 550 bp, Homo sapiens
aacgcatccatcaggttgttgtacatgtatattagtctgttctcatgctgctgataaagatatacccaaggctgtgtaatgtataaaggaaaaaaaaagagctttaatggactcacagttccacgtggctgggaaggcctcacaatcatggcaggaggtgaaaggcacatcttacatggtgacagacaaggagagaatgagagctaagcgaaaggggtttccacttataaaaccatcagatctcatgagactaattcactaccatgagaacagtatgggggaaaccgcccccatgattcaactatctcccaccagtccctcccacaactcgtgggaattatgggagctgcaattcaagatgagatttgggtggggacacagccamaccatgtcaatgtgttaaatgagatgatccatataaagtgtgtagcacagcatctggtgtagttagtcataaaaaaacccagccatcatggcaatggggatgttgaggatgaaaccagacagaagaaacttcagactggcaatgccaaggtagctggaggtggtg

SEQ ID NO: 148967 - DNA, 649 bp, Homo sapiens
aagcttcccaaatggaatctgcagagaaaaaaaaacactgattccaaaaagaagactgtgcaaacaatacatagttccaagataaataaatgtactcaaagcaacaaaacttcctccaggttaatcaaagactcctgcctagtgaaatatatctttcagaaaacataagatgtccacatgttkaagacttacaatcaaaatgatctttagtatctaaaaaaattcatcatcccaaaaacaacattgtacaatttatctagtcttccaaaaagacttgaacaatctttgaagatgaaaaacattttcaccacatcctacaaaatcccacctgacttcatttaccaaagactactcacccatctaacccacccctccaacccactctacagctctcactagactctgttatttgtccaataaaatgcaaaagtctggcaaaatcctcataggcaaaaagaaaaagttactgaatctcttttgactccaaggcctggtttcctttaggtcccctcactgacatttctttggccccacagcatggggtacaggccgatctgcatggctggctatacagacgtattatgaagcctttacaattgaccacacaaacacaataccacaatgtaggtcagcttatgcactcaaatgc

SEQ ID NO: 148968 - DNA, 649 bp, Homo sapiens
aagcttcccaaatggaatctgcagagaaaaaaaaacactgattccaaaaagaagactgtgcaaacaatacatagttccaagataaataaatgtactcaaagcaacaaaacttcctccaggttaatcaaagactcctgcctagtgaaatatatctttcagaaaacataagatgtccacatgtttaagacttacaatcaaaatgatctttagtatctaaaaaaattcatcatcccaaaaacaacattgtacaatttatctagtcttccaaaaagacttgaacaatctttgaagatgawaaacattttcaccacatcctacaaaatcccacctgacttcatttaccaaagactactcacccatctaacccacccctccaacccactctacagctctcactagactctgttatttgtccaataaaatgcaaaagtctggcaaaatcctcataggcaaaaagaaaaagttactgaatctcttttgactccaaggcctggtttcctttaggtcccctcactgacatttctttggccccacagcatggggtacaggccgatctgcatggctggctatacagacgtattatgaagcctttacaattgaccacacaaacacaataccacaatgtaggtcagcttatgcactcaaatgc

SEQ ID NO: 148969 - DNA, 542 bp, Homo sapiens
tttaaaaactgcgcatgtttttaattacacatgtaatccatgttcattataagaaagaaagaaaagtcaggcaaagggaaaaaagtcatccaaattcctactgcctgaaaatacctattgtgaagatcttggtgcagatttttattttatttttccaggtcaggtgtggtggcccatgcctgtaatcccagtactttgggaggccaaggcaggaggactgctcgagcctaggagttcgagagcagcctgagcaacatagtgagatccttgtctctacaaaaagtttttwaaaaaaattagccagcagcctgggtaacaaaatgagagcctgtctctataaaaaaacaaaaaaaaaaaattagctgggtgtggtggtacatgcctgtagtcccaactactcaggaggctgaggcaggaggatcccttgagcccgggaagtcaaggctgcagtgagccatgatcatgccactgcactccagcctgggtaatagagccagaccttttctcaaaacatacaaaaaagaaaaaagaaaaaaagttag

SEQ ID NO: 148970 - DNA, 550 bp, Homo sapiens
ccgtttgttttcccattgtgcttcctattgaaaacagcttacggtttttgctccaggtgagcccgcccggttagaacactgcttcctcargcaggtggctggacaggtggctgcgagcaggctgggtccctggggcagctctggcagatccggttggcacggactttctcctcctgctgcagtgcgcttttcctccggggcggattaggttcagccgttcccttcaccgtgggagccttctcttctgtcagcctttgatacctgcgatgggggaacctgaggtcctaacatgttacaaacaggtttgttgtgaagtgctccagttattcagcaaataggtaccgaacacctgctttgttccgggtataacagtagcagtagtgatgataatgatagcaatagcaaataacaattctttaataagccttctatgtgccaggcactttcttgggttagctttacagcacttgacatggttagtttattagtactggtgagaacccaataagttggatgctatcatctccgtcttttggaattggaatagaaa

SEQ ID NO: 148971 - DNA, 550 bp, Homo sapiens
ccgtttgttttcccattgtgcttcctattgaaaacagcttacggtttttgctccaggtgagcccgcccggttagaacactgcttcctcaggcaggtggctggacaggtggctgcgagcaggctgggtccctggggcagctctggcagatccggttggcacggactttctcctcctgctgcagtgcgcttttcctccggggcggattargttcagccgttcccttcaccgtgggagccttctcttctgtcagcctttgatacctgcgatgggggaacctgaggtcctaacatgttacaaacaggtttgttgtgaagtgctccagttattcagcaaataggtaccgaacacctgctttgttccgggtataacagtagcagtagtgatgataatgatagcaatagcaaataacaattctttaataagccttctatgtgccaggcactttcttgggttagctttacagcacttgacatggttagtttattagtactggtgagaacccaataagttggatgctatcatctccgtcttttggaattggaatagaaa

SEQ ID NO: 148972 - DNA, 411 bp, Homo sapiens
acgaaagagcattttctgccatcaattcttgttttctggaacttgtgtaatgtcatgagtccttataactttgtctactgtgacaaggatgtttttaaaggatagctttraagtattgtgtaacttacaagcttagtgcaaagattcactgccatttctctgatattctatgtttaatttgagacttttaatacagtctaaacaatagctcaggcttatgagccaaattttggccataatctaggtctggctttgtctaagtgtaggcctatccttgacactgtaattccacattctactgtactatcattttattctttttgggtcttagtatctacctctcttatacttctggttctgcagaatccagattagcatatcagtttgctttacatttattttaaaatatag

SEQ ID NO: 148973 - DNA, 574 bp, Homo sapiens
agtatccaattatgggttagagactctgcaaggaaattacattcacccagcacctggccagaacctaagacttgtttcagcacttcttgcaattagcagagggcagttgcctccgtggtgtgtagccagttggggtgatgagcaattctccccacaaaagcctcatgagacatctggtgactgagttcgcaatggcactgcctcagtgtgtgtgcccataaaaaggcaagctgacagtacccgtctaggacagggtwcaccaggcttgtctgtgcctgcctctgctaagatgctctcaagggactgctagattcccaccctctttatttaacagttcttccaacagagaggcagaacctacttcattcagctgctttcctctctccccagtttcagaattactataattgcccattgcagttgttcggcattcatgtcaatttcagtacaagctggagaattcaggagaagttgtaaggtgtgagggttgggagttgcatccacttgtcagggaaattgcgatgtccgaggcaggtctgaggcctttgctacttggatcgctccagcagaatgc

SEQ ID NO: 148974 - DNA, 574 bp, Homo sapiens
agtatccaattatgggttagagactctgcaaggaaattacattcacccagcacctggccagaacctaagacttgtttcagcacttcttgcaattagcagagggcagttgcctccgtggtgtgtagccagttggggtgatgagcaattctccccacaaaagcctcatgagacatctggtgactgagttcgcaatggcactgcctcagtgtgtgtgcccataaaaaggcaagctgacagtacccgtctaggacagggttcaccaggcttgtctgtgcctgcctctgctaagatgctctcaagggactgctagattcccaccctctttatttaacagttcttccaacagagaggcagaacctacttcattcagctgctttcctctctccccagtttcagaattactataattgcccattgcagttgttcrgcattcatgtcaatttcagtacaagctggagaattcaggagaagttgtaaggtgtgagggttgggagttgcatccacttgtcagggaaattgcgatgtccgaggcaggtctgaggcctttgctacttggatcgctccagcagaatgc

SEQ ID NO: 148975 - DNA, 533 bp, Homo sapiens
atctaccactcgttaaccatatcaaaaatggaaatgagtttagtttggcataactcataatgtcatttgggaagaaggcagagggagccgcgccaacattaatgtgcactgtgtgaatcatttactttaatttcaattacagcaccaggatgagatataggaaacttttcctgtaactgctgtaagctctgggatttaacttggttagcagaacaatttagatagcttagggacctaaatttggagccaagatgttatggataaggatacaaaataaatagtggtctatggtgtctgcaggcttcacaataggagaattaaaagctaggaggaaaacggcaggacaatctgtayggctggaggctgtaaattagcaacttttatgaagggcattttatgaagaatggagtggatcaaagatagcaccagagactaagtgaagaggtcagaagactctgcactcatgggagatgaggtaggcagctgagcacaagacaatgtatgttttctttttttgttttatttttgtatct

SEQ ID NO: 148976 - DNA, 583 bp, Homo sapiens
gacaggaaagaaatgcaaattaccaaaaacagtgacagaaataaaggcggcatttggtggacgtattagtagactgaacatgactgagtaaagaayttctgaatttgaagatacatgaatagaaacttcaaacactaaagaggaaatataacaaagtctgaaaaaaacagagcagaatatgcaaggactgtggacaactgtaaaaaatgtaacatacaggttatgggaataccagaaggagaagaaagagagaaagcagaataaatgtctgaagcaataatgtctttccccaaattaatgtcagataccaaaccacaaatcgaggaagttcagagaacacaatgcaagatttttaaagaatcctacattttggcatgttattttcagtctacagaaaaccaaaaagtttttcttttaaatcttcttgaaagaagctagaggaaaaccataccttacctacatagaagcaaagataatctttctcttcagaaatcatgcaagcaataagagagtgaagtggaatatttaaagtgttgagagaaaaagaaaataacaacctagaattctgtaccttgtgaaagtg

SEQ ID NO: 148977 - DNA, 316 bp, Homo sapiens
aacatgttagtctaaaagctggattccatcaaatttgtaggttaagggcgcacttacttgaaattctaagtcttgtatgccttggatgaaggaatggaaacacagtcataaaaaaagaaattcgtaaatatcagctataggctaattcacagtactaggaataaaaccaagaaagcatattcttatgcatatattsgttaaaattaataaatccttccttttttttctacttattctactattttgtatgaagaatgttgaaagtatttaattttgtaatcagtttgttgattttagcatggcccagtaagatgtt

SEQ ID NO: 148978 - DNA, 362 bp, Homo sapiens
tgatctctacaatacatatattcttattgtcccacataaatattttttggtaaatatttcatgtacacttgaagtgaatatatattattctctaattgttggttgcaagactctgtgaatattaactagctcaatcttcttaacatttaagtttgaatacttaaaatcagtgtttttattatcatttgttctatgtattctatcactttctatcatrggtgtttaaaaatttgcattaggttttgtttatttaaaatcctacactgtaatttcctcaactaaagctttatatatttagaagctgttttatcaatatttatcaaatattattgggtgcattattgtagtattttcctaaaaaa

SEQ ID NO: 148979 - DNA, 316 bp, Homo sapiens
aacatgttagtctaaaagctggattccatcaaatttgtaggttaagggcgcacttacttgaaattctaagtcttgtatgccttggatgaaggaatggaaacacagtcataaaaaaagaaattcgtaaatatcagctataggctaattcacagtactaggaataaaaccaagaaagcatattcttatgcatatattcgttaaaattaataaatccttccttttttttctacttattctactattttgtatgaagaatgttgaaagtatttaattttgtaatcagtttrttgattttagcatggcccagtaagatgtt

SEQ ID NO: 148980 - DNA, 598 bp, Homo sapiens
tattcagtacttgaactcagctctggatcaagtggacctaatagacgtctacagaactctctaccccaaatcaacasaatatacactcttctcagtgccacatggcacttattctaaaatccaccatgaataggttttttgattattgatcccatcttgcatacctggaataaatgctatttagtcatggtttataatatacattataaagtacactttgtacatttttggattcaaatagttaatattttgttgaagatttttgcatctatgcttatgagacatatttcattataatgccttgatctggtattggtatcagggcaatgatggcctcataggataagttagaaagcactccatctgcttctagcccctgaaagagattgtaaagaattgttgtaattttttccttaaatatttactggaattacccatctaggccagatgcttctattttggaaggttattaattattgactacattgatattattataaatatctatattaaatatagatataaggaatagctaacaatgtctttaatagatatagaccaattcaaattgtctatttctccttatgtgggtttggca

SEQ ID NO: 148981 - DNA, 598 bp, Homo sapiens
tattcagtacttgaactcagctctggatcaagtggacctaatagacgtctacagaactctctaccccaaatcaacagaatatacactcttctcagtgccacatggcacttattctaaaatccaccatgaatagrttttttgattattgatcccatcttgcatacctggaataaatgctatttagtcatggtttataatatacattataaagtacactttgtacatttttggattcaaatagttaatattttgttgaagatttttgcatctatgcttatgagacatatttcattataatgccttgatctggtattggtatcagggcaatgatggcctcataggataagttagaaagcactccatctgcttctagcccctgaaagagattgtaaagaattgttgtaattttttccttaaatatttactggaattacccatctaggccagatgcttctattttggaaggttattaattattgactacattgatattattataaatatctatattaaatatagatataaggaatagctaacaatgtctttaatagatatagaccaattcaaattgtctatttctccttatgtgggtttggca

SEQ ID NO: 148982 - DNA, 622 bp, Homo sapiens
gtagtggtgtcccctctttcatgtctgatacaygtaatttatgacctttctcagtttctcttagttagccagatataggcttatcaagtttattgacattttaaataaccagatttggttttgttaattctttctactgatttcctgttttcaatttcatctatttctgctctaattcttattatttcttttcttctgcttcttttggacagaatttgctcatctttttccagttttataaggtggatgattagatgattgatttcagacctttttttcttctctaatatatgcattcaatgacataaatttccctctaagtgctatttttgctatatttcacaaattttgataagctttgctttcatttcatttggttcaatgtaattttaatttcttttgaaatttcttctttaactcatgtgttatttagaaacgtgttgcttgatctccatgtattttgggcttatcttgttatctttcagttagtgatgtccagtttagtttcattgaagtctgagagcagacattgcatttctattttttaagctgtgttttaatgcccagaatgagttctatcctactgatgttccatgtgagcatgaaaagaatgtggattttg

SEQ ID NO: 148983 - DNA, 234 bp, Homo sapiens
agatctaaataaagggagagrcatactatattcatggatttgaagactgaacatagtaaagatgttagttctccccagaacgatacatcattttgatacagttccttcaagccaagcagattataaaatttatgatggaaaagcaaataaactagaataatcaatacaatttcaaaacagaaggacaaagtgggaggaacttgactacatgacttcaggacttattacatagct

SEQ ID NO: 148984 - DNA, 523 bp, Homo sapiens
cgcagtggctcccatctataatcccaacactttgggaggctgaggcgggcagatcacttgaggttaggagttcaagaccagccttgacaacatggtaaaccccatttctactaaaaatacaaaaattagccaggcgtggtggcatgtgcctgctgtagtcccagctactcaggaggctgaggcaagagaatcacttgaacccagaggcagaggttgtactgaaccgagattgcgccactgccctccagcctgggcaacagaacaagaccccatctcaaaaaaaaaaaaaaacataaaaaacttgtcacatacctcagtagtgaagcaggrattcaaatccagccagtctgaccaaagtccatgctctgaatcactatgctactgaattgcccatacttacaaataatttggtaactcttaattacatccaagcctataaacagacttctggaagtatcaggtttacaaagatacttgaaattcttagatgagataggctacacatgcatacaagcaatgctgc

SEQ ID NO: 148985 - DNA, 609 bp, Homo sapiens
aaaaagcttgcacccactctgcgtttagtttttacaaatctacagatgacatatgactagcaggcatttcagattctgccaataaaatgccccaggactctgaaagtgacctgcaacacaagcgtcctatttgattcccactaacttgtgttggtctctccaggttagcagagcaagtggcatcgtggacaactgatgggaggaccaaaaagggatctgaaaagctggccaatggcacccagtctaaagagtcccactctggattcctggtgagtggagcccctgggtttgaaatgccatttctctcagcgctctgctgagttacccaactccgctcagcccagatgaaagacaaccaatgctttctagataccactgtgttcctgatcaagtaatcaaacaggagatggtcagagttgccagtgtggcccaaccctctatagaggggcctggtgatggcagggactggcagagaagtagggatagggtgggggtaggaaagctgtccagtcartcttggtatactctcaacaaagaaacagtgatatacatgtatgtgtgtcgctgatgcatttatgaagaatggctgcaaaactccaagactactta

SEQ ID NO: 148986 - DNA, 469 bp, Homo sapiens
caagcagttgagaagaggaatccatttagtttcacaatggggctggccctaaaaaggactaggaaaattccagttgaggatttacctagtatatcttccctcacgtttggtcctaacttgttcatctttgatttcttagttgaattgtttcccctgtgaccttctattctattcattctcttgcttccttgcctctttacttcatgatgaggactaaactctttctataatgagcattcagcatcagtcaatagctaaggcttagctattgagaataactcaataggttttagttgtaatatatttcagtaaataatttattatatcattacataatsattagataatactcaatgcattctaattagtaatcttttatagaaaatgtattcaggcatctaacataactgaattcttacttcccttccattttttcctgtcttttagatttccacatctataaaatgga

SEQ ID NO: 148987 - DNA, 533 bp, Homo sapiens
ttattattgagttgtaagaacacattatttattcaggatatggtcttttattggatttattatttccaaatattttctcaatgtcmatgtgttgtcttttcatttctctactggtatttttaaagttaaattttgattctgtccaatttactaataaaaatttactgttacgcattttgtgttctatttaaaaattctttgcctaacccaaggacatgaaaattttcttctttttttttttttcctagaagctttatatttttaacctttacatacagattcagctatcttgaactaatttttttatatggagagagagataaatgtatgaattcatctttttgcatatagacatctaaatgtctcagcaccatttgttgaaaagacaattcttaccccattgcttgaaaattcattaaaaattaacggactgtcattagcttttgatggttccatacagcctgctgaatccattcaaactctccagcctgactttgtggctctcccacccccagcctcagggatacatcaca

SEQ ID NO: 148988 - DNA, 528 bp, Homo sapiens
ggtgttccaggggtgggaatctggtgagaggagggaaatatcctgaggataggtctttgagctgggtttgcagggtaaatacaccactttattcagatgacttgccttctttggtggggagggtactgatggactgttatggaaaggtagagcccccacccccactccctgcaacccaggtcttgyatctgccaccggccaacccaaagaacatccgattgtcctgctcacacctctcccaggcaccccagcttccatgccaaacaaaggatgcctgcaggatcctgtcagggcgtccttcttcctgttttggggattattattttttgattgattgactcctttattcattcaacaaatattttatcaagtgtatgcttaaggaagcagcgacgagaaagacatttacataaggcagctgccctcaaggagttacaatatttattccatgtgtgtcctgaaatattcaggccccaaacacaacttttttttttttaacctaagtgcttttaaagacttctttgaaat

SEQ ID NO: 148989 - DNA, 527 bp, Homo sapiens
tgtatcaatcccgccacttggtggcttaaaagaacaattatttatcaggtaatgattctgtggcccagtgacttgggctgggcctcgctggttcctctgcttattttggttgggcttattcattcatctgtgggcagctggtgrtcaggtagtttcatacctgcatttggcagttggctgctgattagctgagagtcagatatagttactgggggttactgggccatatgtcttttgtgcatccgccagtttgcatggtggtggctgcaggatttccaagaacagcaagagaggaatcccaatgcacagttactttttaccccttagtccatggaacattgcatcatgtttgctaatgtcccattgactaaagctagtcacatgaccaacccatattctagggatgaagaagtagtttccagttcctgatggaaggggaagaatttgtagcccttttcgcagtcgccacagttggtggtcacagacgtttcctaggacattgttgcctcattctctctcccctctta

SEQ ID NO: 148990 - DNA, 527 bp, Homo sapiens
tgtatcaatcccgccacttggtggcttaaaagaacaattatttatcaggtaatgattctgtggcccagtgacttgggctgggcctcgctggttcctctgcttattttggttgggcttattcattcatctgtgggcagctggtggtcaggtagtttcatacctgcatttggcagttggctgctgattagctgagagtcagatatagttamtgggggttactgggccatatgtcttttgtgcatccgccagtttgcatggtggtggctgcaggatttccaagaacagcaagagaggaatcccaatgcacagttactttttaccccttagtccatggaacattgcatcatgtttgctaatgtcccattgactaaagctagtcacatgaccaacccatattctagggatgaagaagtagtttccagttcctgatggaaggggaagaatttgtagcccttttcgcagtcgccacagttggtggtcacagacgtttcctaggacattgttgcctcattctctctcccctctta

SEQ ID NO: 148991 - DNA, 527 bp, Homo sapiens
tgtatcaatcccgccacttggtggcttaaaagaacaattatttatcaggtaatgattctgtggcccagtgacttgggctgggcctcgctggttcctctgcttattttggttgggcttattcattcatctgtgggcagctggtggtcaggtagtttcatacctgcatttggcagttggctgctgattagctgagagtcagatatagttactgggggttactgggccatatgtctttygtgcatccgccagtttgcatggtggtggctgcaggatttccaagaacagcaagagaggaatcccaatgcacagttactttttaccccttagtccatggaacattgcatcatgtttgctaatgtcccattgactaaagctagtcacatgaccaacccatattctagggatgaagaagtagtttccagttcctgatggaaggggaagaatttgtagcccttttcgcagtcgccacagttggtggtcacagacgtttcctaggacattgttgcctcattctctctcccctctta

SEQ ID NO: 148992 - DNA, 611 bp, Homo sapiens
ggtgcacctggagacccctaatttcttccagctgctgcactcatactgccagaaagcagccagaaaggctctgtgatttgggacctggaatcctgggtcaaaatttcttggatctgaaaccaaaaggccaagacagtagtattagttttctggggctttctgacacaaactgagtgacttaaaacaatggaaatgtacccttttaccattctggaggccagcagtccacagtcaagggttggttccttctctgagagctcctgttgcyccgtttgcattcccagtgctgggatgagagctcctgttgccccgtttgcattcccagtgctgggatgagagctcctgtcgacccacatcctcaccagcatttggtgctgttggtgttaaggattttagtcactttcataggtgtgaagtggtatttccttattttaatttgcatttccctaatagcattttatattgagcatcttttcctatactttgttatggactgaatgtttgtgatccccgaaattcctatgttgaagccccaaccccaatgtggatgtatttggagataagacccttatggaagtaattagggttaaatacagacattagaggggaac

SEQ ID NO: 148993 - DNA, 436 bp, Homo sapiens
agtaaaagccagtttattaagaaagyaaagtggtgaaaggacacctactccatagacaaagtaggatgttgccgaaagtaagaggaggaacgattccatgctaggtacatcgctcgtatatatagggagatgtgctctgctacaagagtttgtgataaataaataaattactatattttgcaagaatcaatattatctttaaagcaaaattaggaatgcctttgttctccagatatcgggatatctggacactcccaagtctgggtttgtttagtaaacactattaatttgttcccttagctgtaaacatctagaggctaagaaagcctaacttcccgagaatgcagcccagccagtctcagtctcattttcctagccctcattcaaaatggagtttctctggtttgaatgcctctgacagtaccatccagaattc

SEQ ID NO: 148994 - DNA, 619 bp, Homo sapiens
tctaaacataaaattgggatgtacagttctgtttgagggcactggaggtcatctcagggaactgatgttcttgagtgtcttcaaggttaagtaggatgttgtcaggtggggaaagggccttctaggcacagaggctttcagtagagacagcaacctttaaaactgaatatggctagaaccttgctactcagcgtgtggtccttgggtcagcagtgatggcatcaatagaaacacagagtctcaggcttacctcaaatcctgctggatcagaatcagctttgcagcagtatcccccagtgatctgaatgcttctaaaagtttgagaaacattggacttgagcgtaggaaggggtaaaggatgggagagcttggaaagtcgaccacctgcaaaggagattggatttttttttttctagcaaaaagttgataatgaagaagtgacattattagatttatattttctaaaaattgtctggaagtatatgtagagcagcatctgccaagaagctttcttgaaaccttaatwgtgtataaggtgcttcaccaaaaaaggtcctcaaataagtttgaaaaatgcaggatattatattcttctcttggacaatgtaaagtatcatag

SEQ ID NO: 148995 - DNA, 584 bp, Homo sapiens
cagtctcactcttttttggtccttccagtaaatggagctttatgatttttttttttttttttttcctgtgtaagtttgagtctataaagaactctgggctttggaagccttgctaascacagctttactttgattgttttaaagcactatgtctggtgtgtgctttacattaaaagcagagcttatatggctgatcacctttttaaaaaaaaaaaaatatggtgagtggtaagtaggcatttagtgaccaggaaactcatatagtcagctttttattattgatcaagagtggaggcaatggatttttagacttaaggaaaaagttttatttttataatagctgtaaaaaaagcagtagggctatgatagacagtttttaagaaacagcaaaattttatttatgacttcggaacagaccataagaggtagcttttgatcttttgaactgatcttttgaatttgatcttttgagcttttgatattttgtaatgtgaaggtaaaataggaatttttggaaattttgagatatttagccagtattgcttaaaaagatgattggatttcctgctgattgtcaaactaga

SEQ ID NO: 148996 - DNA, 531 bp, Homo sapiens
aagacttgtttgtgttattctaagagacttttaccacttcctgaggaggggctgtttcagatttccacaaagtcattaacctcccaaagaatgagaataataagtggagtggcagggccccaaagatgtagttggtgcaaactatcaggaatgctggaggccagggctttgcagtggagatgcctgacagtgagctgatggagggagggttggcaatggggaacagggaaatggtatcagagacccctcggaaagacttcatggtaaatggcttggagatgaaacatcagctctttgagtggttaagcaggactggcttgctgatagaatcccaagcccttaaaccatttatcctcgtagcttcctttcaaagttgggggagctctaagaaaagtaggtaaaaatgtacaacagaaaaaaattctgtatgtgtgtgygtgccggatggggccaggggagaaactgattgtaagacttttggttatctgttgttattttttagagttttttatagagagagttggagaaggg

SEQ ID NO: 148997 - DNA, 458 bp, Homo sapiens
cctttcaggtgtgccgagcttgcctattgatagaagggtatttgtggggagatgggtgccaagtagaacatttgaagagttaagtatccagttcacgttatttcccattttaccaaccttgtctttcttatagtacaccacagttttgatttcagtccrtggtttatttgagagtccaatgaattttaaaacaaatgttaaattatatttaacttggagatttaatttttatctagttaactcttgagtaccaagtatatgctaagtatcgtgaaagagggccaaacagtgaagaataatatgtgatctttacctagttttgaattggtttcgagaaacccagtgcatggcagagaattaagtgctaggttgttcgtcatatagaatataaataccaggggaattagaaagatctgggaaatataagaatctttagagaagactggacagaggcagga

SEQ ID NO: 148998 - DNA, 431 bp, Homo sapiens
tggggcaatagaaatggaacggttctagtttgcaccctttgcaagcatcaytgtgggtagcagtgggattgttcactgctgcatctacatctttactgcaacacaagtctcttcttgaactacaaaatttcttatgagaaaagaatattcacattatttgaatgagaccaggtgtgctaggttcaagacctcaagccccagaaagatgagttaaatcttgaaggaaatggcatttcacatgtgtgaaatccagatgctttgatttagacaagatataaaaacaaaaaagttgatggcatttctgcccctgaaagatttagactgatagatgagatttgtccagcttcagaaacaaaagatgatgaataatacctaagaccttgtattttaaagtttgatgtttaaattttaaaaagacatctcattaaaaa

SEQ ID NO: 148999 - DNA, 508 bp, Homo sapiens
aataaataacccaattaaaaatgagcaaaggatacaaattaacatttctctaaagaagacatacaaatggcgaataagcacacaaaaagatgctgaatatcattatgcattagaagaatgcaaatcaaagctccagtgaggtaccacttcacatccactaagatggttaaaatttaaaaagacaaaatattatgtgttgacaataatttggagaaatctgaccctcacatactactggtgtgatagtaaaatagtgcaaccattgttaaacatagatttgtagtatgacccagcaattccactcctaggtatgtacccaagagaaatagaggcatatgtccacactaaaatgtgtacaggacattttacataatagccaaaaattggaagaagggaaaatatccatcaacttaagaattagtaaatgccatgggctatatccatacaattgygtattacctagcaactaaaaaaagagtaaagtgcattctcttgaacacatgacaca

SEQ ID NO: 149000 - DNA, 586 bp, Homo sapiens
tccaccctgggagagcatcaccatcatgatggctatggaatgagagaagagaatggtcatcaaaccttgtgcttggccaggaagaggttagaggaaagtcttctaagaagggtggttggcccactgcctattggcctggaaactggactggttggggctttgaawgaaaaacttgtcaaactgagaatcatcccatttttgcctggaatttaagtctctgtctttagatctagtaaagttcctgcaatggaggatgtggctaaagttaatctagacagagattcgctgcagtctctactggtctaagctgtggcaagaacaggtaataacacaatggtgttccagcctagcagacgggaccagatgaatgggtgaattagagcccacttctgccagggtcctctttcagtgagggaattttgcttactaaacatgaatagccacgattttgtttatcctatctatgcataaagatctccagcatctttgggtaatggtactagtgaagatggctatgcagtcatttgactggttgtgttatagcttttgccccaggtcaaggcagagttcacacctgtgcagacca

SEQ ID NO: 149001 - DNA, 657 bp, Homo sapiens
accaccagctttagcaagtttgaatatgttgtccgttggcttcagatttttaagcaatctgaggatctcgcatacccctccttgagggcatccgtgtccctcatccagagataggaacatttgtgtcaagtatcaataaacaattgttctgcatctattcccatcctcaaaacataaagtgctaatttgtagagttttaaaatgttactctaaataatatttagtaacatgatactctaaatatgattrtgcaatttgcttttgacacagaattgaatatttttggaatttaaatatatttataaatgtattaggctgaaatccttgaaactgctgttattgtaggtttgaagcagttgagcattaggatttgtacatcactcaattgcacagctctagtaaatcatttttaactttaattttatattgcatgaatctatcacaatttattaatgccttttactgctggtagtcatttagggtatatctagttatcccccattatgttcccacaataattattatacatgtcaacttgggaacactgtattgaaatattctagaactgtgctgtcaaatgcagtatcactagccttatatggctatttaaatggattaaaattaaacttaaatacaattaaaaatttagatcctcag

SEQ ID NO: 149002 - DNA, 426 bp, Homo sapiens
tttctataagtataacttctactggttcaggagatttagttataaatctccttttcattttttggtggttacacttaagctttgaggatatgttctttatttcaaaatgtctaaagttgatccataatttccacttttggtcaacaagtgtaagaactttgatacagtttcttgaaactcgaattactcactctcctcattttgcatgtttcttcctacctgatgtttcagttcaccttgtttctatatttaattctttcttgcttgatatactctatcctgacaactttctttttctctgttttcatgtttgtcttaattatttcttcaggattaagtttatttyaccatgaagcatatattttgttagttctttcagtctttgagtggttaacttagcctttgctcagaaacatctttatttga

SEQ ID NO: 149003 - DNA, 597 bp, Homo sapiens
ggacctgctctatctcatcaggaaacccggactgcattttacagcttgatggtgtcagcatgtctcagcaataagtacrttacaatcaataaatatattaatctaaaaatcccatttgttcagatattgttagtggaaaataaggtttgcccaaattgtaggaacatctgaattattttgtttttactggaggctgaaggaaattaaccaaattacctaagatccccagctagcaatgtttcagtccagttatcactttctctcttctaatatccctcttcctgctcatctctctgggaaaagtaagaaatattgagacaaaaggtgaaagaaattttattaatattagaatgtgttcagctgcaagaaacagaaaattcactgtcttcaatcttaaggatatcaatcagtcacttaatagtaagttgtgcaatgggccgtttaagggtttattcaataagttcatcaaggactcagtctcttgcactatgttagatttttatcctcacataatttttccaatctaaatatatctgcagcaattccaggctgcatattcatcctagactcccagacatgcaggatgtaaatggggat

SEQ ID NO: 149004 - DNA, 597 bp, Homo sapiens
ggacctgctctatctcatcaggaaacccggactgcattttacagcttgatggtgtcagcatgtctcagcaataagtacgttacaatcaataaatatattaatctaaaaatcccatttgttcagatattgttagtggaaaataaggtttgcccaaattgtaggaacatctgaattattttgtttttactggaggctgaaggaaattaaccaaattacctaagatccccagctagcaatgtttcagtccagttatcactttctctcttctaatatccctcttcctgctcatctctctgggaaaagtaagaaatattgagacaaaaggtgaaagaaattttattaatattagaatgtgttcagctgcaagaaacagaaaattcactgtcttcaatcttaaggatatcaatcagtcacttaatagtaagttgtgcaatgggccrtttaagggtttattcaataagttcatcaaggactcagtctcttgcactatgttagatttttatcctcacataatttttccaatctaaatatatctgcagcaattccaggctgcatattcatcctagactcccagacatgcaggatgtaaatggggat

SEQ ID NO: 149005 - DNA, 353 bp, Homo sapiens
ccctctggtttctgatttaataagaggattgcttccagccaaatgcagggccagcaaggtcagcactgaacacacgcagctccactgagaaataaaggggccagatggttattacactgtgtgtgtttcttataaaaggcaaaaaaaaaaaaaattctagagtgactgcagcagaggctgttcatcagcagaggcacagttcaggcaggcctgtggcttggtgctgctcccygggggaggtgtacttgtgaggagtttcaacacgcctgcagatcccatgaagatttggctgtgggcagaagccacagggatggagagaggcacagccactttgtgaaaatggaaaacacgcc

SEQ ID NO: 149006 - DNA, 430 bp, Homo sapiens
agggtagtccctagtcctattggcttagatgtccttatagaaaggggggattttggacccaggcacacataaaggagaagattatgtagagtgcagttgtgctgccacaggccaagcaactaccagaagcttaggaggaggtctgatcaaatgtgacaaaatgtgacaaaaatggtgtatcactgatttaagaagcttgatgtctgcagccagtttttagttraaatttaggtgatcttattcaacccccaaaacagcattcctaatgcacttccatcttcccttaaacatctttgtatttagtccaagcccaggatcactcagggtccaagggacagctgccatgtttctggatttccatgtgaaaaaacatgtattttgaccctttgaccattattagaaattaatttgaaatatattatagagctac

SEQ ID NO: 149007 - DNA, 580 bp, Homo sapiens
taatgaaacagagtatattaaaatcacataaatcaatgaaaacacaaaactgaattaaaaattagaaaagcatttgaacagatacttcacaaaacaacatggtccataggaccaataaatgtatgattaggtgattacattcattatttatcaggaaaatgcaaatgaccaaaataaaaaatatggacagtctaaatgttatcaagagtggagcttttgggattgtacaacgactttggaaaatgacagtttctaacaaaaaccagttcttaccctatgtcacagcaactctccttctagctatactcctgtagtagtctgctagggctgccacggcaaagtaccacagactgggaggcttaaacagaaacttattgtctcacagtcctggaggccacaagttgaagatcaaggtgatgtcaaggccatcctccttcctgacctcttcctaagcttctwgtagttctttggcctgtggcaggacaactgcaatctaaataatattctcttttatgtgtgtgtgtgtccaaaatcccccctttctataaggacatccaatccaataggattagggactacc

SEQ ID NO: 149008 - DNA, 540 bp, Homo sapiens
tatcacacctgccctgttttcccagacgttttgtaatatgtgacaaatagcaccttttctatttaggctactgtcattggaatttctgttacttacccagacacagttctaactgatttatggagccccatatgcttggcaaggggccaaggtcctgacaaacacaggggtgttaggagttttcatgttttccatgatattacaaggttatgtacataaaacggaggtcaatatagttctatggtcctcagcttcctctcctcccacgcctccaaccccatttttgtctcatgctctagcaatttggaagtgcctgtggaacaccacgctgtgttttcttcctctttggcacacatgctattctcatctgagaagtttcccgtgcacttagaaaacacgtcatccttttcaacccagttctggctgactgctctccttctgtgggagatatggctctctgctggcaccatgcccmttatcccctctaccttgagactatagtcctgaactatatcaacttaactaaattcgaactactgt

SEQ ID NO: 149009 - DNA, 556 bp, Homo sapiens
cctggctcctgcagttctaacagactgcctctttcagctgctccaagttctgggtagcgcatacatcacttctttgcaaatggcatcagcttttcctacaggtcacccatgccattaagggtgaagactgtgagagacagatgtggggtccagtttatcctcacagattccagtgtgtctttatgggatccagtcatgcgaatagcttccagtttgtccttgcaatccctcatgtcacttccagtcttcctcctgactaatggccaggctgacttaaggctcagaaccaacacgaggcwtaaagataaaggcttacatagactgcttaaccatctccaaaaattacaaatggtccaaacctgttcattactcccttattccatataactcacagtggttctgatcctgtggttgaagaccagctgatatacacttagtaataaatacgtgatgtattcagagtgtcaaagtgctcaaataaaatactacatttcccacataccattgcagtaagaagggccaatgagatgtaagggacatcattgggtggagcttc

SEQ ID NO: 149010 - DNA, 636 bp, Homo sapiens
cctatactatcctgccttgacttatcttcagttttaatttctactttagcatctctgaattttcttcaaagggtgacctgttgtcgtattgccatatcaaggaaaacatggcaagcagagaaactgattgtatcttttttcatttctgtgttccaatatttccaaatgtgggcactgaagaatatttaacgccaatgagwgaaaaaccaaataatttcttagcttattaattagaatgccagattatattgggaggccattgaattattttaggtgggaattagtcaacatagcaagggatgcaatacagtctagggagtacaaataaaggtaactgagaaccttgtgtaagatttgaaagcaccatttacaagaatttctcatgctgcccacttgaaaggtaaagatgaaatttctcaagtcttctatatttttactcccaggttttcactggttctttaaaagtcttttcttcattactttttaaaaaattgttttatttttctggttctttaaaagtcttgtgattgaactagaaccagagcttctcagagcttccaaacccaggagaaatcagcatagatacacacctggaaagttaagagtcaagattagcccagggctaagtggagaaac

SEQ ID NO: 149011 - DNA, 631 bp, Homo sapiens
aaaaatttcctcaaatttgacagcttagaaacagaactaaatttttttctaaagaggcttttttcttaacgtgtagactgatgaatcaaagcatcatgttttactgagtaattagtccttcaataattcacatgagtaataggtcatattggggtttaacccctgcttccattatttctgaccacacagtctaccaacagatgtctcacttggggtgtacacaacagaacacccggtatccatttcacgtacatctgttcccaaacagcttagacagattaatacttagaatatactttgctctrctaagtctcacgtaatcaccaactcttgttttgaaattgttttttctcattttcatatttttgcacattatcttttaaactgctaagtgtcaagtaaatacttacataaacttaaagctcaagaaaatcattttgactctcttgtaacaataagaaacactttccagaccttattttgaagctcagccttctcagattttctagtcactgctctaattcagctgagctctgagttgtggcaggaatactcttttgaaaaaaacataacatgaaatttgtaacttgagatagtaagtatatgaaaaatagagttataagccataatt

SEQ ID NO: 149012 - DNA, 504 bp, Homo sapiens
gtgcaattttttttttttttttttttttttttttttttttacaattggagaggaaagaagtgctaaggcaacacaataactttctaagcacttttctgctggtttaaattagttaaattattttgtataaattaratataattctacttttctgatatgtataaaaattgatgaagctgcatggttttaaaataggaaatccacattataaaaagtcattaaaaattctgtacaaaatcacaacaaaataattcagcatgggaaaggtaacaagtagtaaaatgctggttgaaaaatatatatttatatatattttaattggcccattactagtttaaaaattgcatagatcctaattattgcttgtgattttgttatcccgatcagataattaatacgatctgaatacagccacaccaaattcgtggtgtattttttaaactttactgtatttttttattttttaaatagaagagctatagaaaataatacataaggtgaaca

SEQ ID NO: 149013 - DNA, 504 bp, Homo sapiens
gtgcaattttttttttttttttttttttttttttttttttacaattggagaggaaagaagtgctaaggcaacacaataactttctaagcacttttctgctggtttaaattagttaaattattttgtataaattagatataattctacttttctgatatgtataaaaattgatgaagctgcatggttttaaaataggaaatccacattataaaaagtcattaaaaattctgtacaaaatcacaacaaaataattcagcatgggaaaggtaacaagtagtaaaatgctggttgaaaaatatatatttatatatattttaattggcccattactagtttaaaaattgcataratcctaattattgcttgtgattttgttatcccgatcagataattaatacgatctgaatacagccacaccaaattcgtggtgtattttttaaactttactgtatttttttattttttaaatagaagagctatagaaaataatacataaggtgaaca

SEQ ID NO: 149014 - DNA, 504 bp, Homo sapiens
gtgcaattttttttttttttttttttttttttttttttttacaattggagaggaaagaagtgctaaggcaacacaataactttctaagcacttttctgctggtttaaattagttaaattattttgtataaattagatataattctacttttctgatatgtataaaaattgatgaagctgcatggttttaaaataggaaatccacattataaaaagtcattaaaaattctgtacaaaatcacaacaaaataattcagcatgggaaaggtaacaagtagtaaaatgctggttgaaaaatatatatttatatatattttaattggcccattactagtttaaaaattgcatagatcctaattattgcttgkgattttgttatcccgatcagataattaatacgatctgaatacagccacaccaaattcgtggtgtattttttaaactttactgtatttttttattttttaaatagaagagctatagaaaataatacataaggtgaaca

SEQ ID NO: 149015 - DNA, 581 bp, Homo sapiens
gagaacagcatgggggaaaacggcccccataatccaatcacctgtcatcatttttctcccttgatacatggggattwtaattcaagatgagatttgggtggggacacagagccaaaccatataattctgccactggcctctccaaaatgtcatgtcttcacatttcaaaacacaatcatgacttcccaacagtcccccaaagtcttaactcattccagcattaactcaaaagtccaagtccaaagtctcatccaagacaagtcccttccacctatgagccttaaaatcaaaatcaagttggttactttcaagatacaatgagggtacaggcattgggtaaatgttcccatttcaaatgggagaaattcgccaaaatgaaggggccacaggccccgtgcaagtcagaaacccagccaggcagtcattaaatcttaaaactccaaagtaatctcctttgactccacgtctcacccagggtactttgatacaaaggttgtactctcaatgccttgggtagctccctcatgggctggcgttgagtgtctgcagcttttccaggtgcaaggtgcaagctgtcggta

SEQ ID NO: 149016 - DNA, 481 bp, Homo sapiens
cacatttcccttccatactgccctagcagaggttttccatgagggctccacccctgcagcagacttaggcctggacatccagrcatttccatacgtccgccgaaatctaggtagaggtttccaagctcaattcttgtcttctgtgcaactaactgcaggcccaacaccacgtggaagctgccaaggcttgcagcttgaaccctctgaagcaatggcccaagctgtaccttgacccctgttagccacagccagagctagaacagctgggatgcagggcaccaagtcttgagactgcacagagttgtggggtcctggacccagcccacaaaaccatttttccctcctaggcctggcctgtgatgggaggggctgctgcaaagatctctgacatgccctggagacattttccccattgtcttggctattataataacatttggctccttgttacttatgcaaatttcatatccagcttgaattc

SEQ ID NO: 149017 - DNA, 479 bp, Homo sapiens
gaattctgtgagggagctccaaccccacatttcccttccatactgccctagcagaggttttccatgagggctccacccctgcagcagacttaggcctggacatccaggcatttccatacgtccgccgaaatctaggtagaggtttccaagctcaattcttgtcttctgtgcaactaactgcaggcccaacaccacrtggaagctgccaaggcttgcagcttgaaccctctgaagcaatggcccaagctgtaccttgacccctgttagccacagccagagctagaacagctgggatgcagggcaccaagtcttgagactgcacagagttgtggggtcctggacccagcccacaaaaccatttttccctcctaggcctggcctgtgatgggaggggctgctgcaaagatctctgacatgccctggagacattttccccattgtcttggctattataataacatttggctccttgttactta

SEQ ID NO: 149018 - DNA, 545 bp, Homo sapiens
ttttcgcagtttgcttatggagtttgtttttaataactggataacctatatgcagtcatacttctcattgagtttgaaattttgccatgtgggaatccaaaagaggcttatgctaaaggatggctgatgtgccctgatgatttagaatacatcagactcaaatgayccagtatttgataagctgtctgtccccaaggtcaggctttcctgctgacatttcagaggcttcctatgaatgcagataaacctgaccattacaaaagaactgaaagttggttgatccatgaatactttatttgaaggagaatatattatgttatatctggctacaaaagcccaagaaatttaattgactattctgaaacatctcacacatttcttgtgattgcttatatggtagggtaatgtttgaaacaccattgtaggacagcatggtggtggtcctggctttgatctaatgcctgatgtgtgtagaacacattgtaaacacctaagagaaagacttcttttttcagggggaaatcttagttccttgtagcacaaca

SEQ ID NO: 149019 - DNA, 456 bp, Homo sapiens
agccatggtctctgaaaataatgttgaaaacacacttacaacacagcagaagcagaaataaatgacatatttcactctgttcattcaggcagaggtgggtgcacagaacatggtgctgcaatggtctcctgaagctgaggccagctaacaggcccgcaggcaagtcaatgggatgaccagcaagtgggtggcaccagcaacagggacaagcatasggcttagagtctgaaaccctggttccaggctgaacactgtcactgactatatgactctgggcaattcatttaaattatctgaactttaatttactcagctgaaaaatggctgtaatagccaccaaataggattgttggggtatcagagaaatcacgtgtgtgaaacactgtacgctttaatactcactgagggccttgtgtgtgctacacattaggaatagaaaattgagacacagttctt

SEQ ID NO: 149020 - DNA, 456 bp, Homo sapiens
agccatggtctctgaaaataatgttgaaaacacacttacaacacagcagaagcagaaataaatgacatatttcactctgttcattcaggcagaggtgggtgcacagaacatggtgctgcaatggtctcctgaagctgaggccagctaacaggcccgcaggcaagtcaatgggatgaccagcaagtgggtggcaccagcaacagggacaagcatacggcttagagtctgaaaccctggttccaggctgaacactgtcactgactatatractctgggcaattcatttaaattatctgaactttaatttactcagctgaaaaatggctgtaatagccaccaaataggattgttggggtatcagagaaatcacgtgtgtgaaacactgtacgctttaatactcactgagggccttgtgtgtgctacacattaggaatagaaaattgagacacagttctt

SEQ ID NO: 149021 - DNA, 456 bp, Homo sapiens
agccatggtctctgaaaataatgttgaaaacacacttacaacacagcagaagcagaaataaatgacatatttcactctgttcattcaggcagaggtgggtgcacagaacatggtgctgcaatggtctcctgaagctgaggccagctaacaggcccgcaggcaagtcaatgggatgaccagcaagtgggtggcaccagcaacagggacaagcatacggcttagagtctgaaaccctggttccaggctgaacactgtcactgactatatgactctgggcaattcatttaaattatctgaactttaatttactcagctgaaaaatggctgtaatagccaccaaataggattgttggggtatcagagaaatcacgtgtgtgaaacactgtamgctttaatactcactgagggccttgtgtgtgctacacattaggaatagaaaattgagacacagttctt

SEQ ID NO: 149022 - DNA, 568 bp, Homo sapiens
ctcccagtcctctttagggcgaggcccagaactggctcagcatcacttctgccgcattctattggtcaaaggagtcatgagcctagctcagattaaaagagtggggaaagagatttcactgctcagtggaagaagcagcaaataatttatggccatcctttaatccaccacatgccattctttgtaggaacatctggcactgycatccaactaaacccctgaagggaacatctggatcttcttgaggttgcaattggttcttaacagctagaactatgctcttctgcacacaatgagtctaaaaaattttgattaattgaaagtagaaaaaccacaatctattaaatttccgtgggagaaaaagcagctagaacactcacaacagaacagagaccctgaggacatcttaggcttatcacctgtggaatttgttaaataactccttccaatcattttctttccagagaaactgtggcaatgcacctacatcgctttatgggttctctgcttctgtgcatgcccagtcttagaggctcacggatcatctacttgtctgagctgaaatatg

SEQ ID NO: 149023 - DNA, 600 bp, Homo sapiens
cgtatactggttgttatatactgtatcattaaaagtttaagaagacattttcagaagaatttaaatgaactctcctatacttatatatatttaacatcaattcattagagattttagtatacctatcagtttcctagggctgccataacaaatcaccagcaactgggtagcttaagacaacagaaatgtattatattacagttctggagacaagaagtttaaaatcaaggtgtcagcagggttgattccttcttagggattcagaagragaagctgagaattcctgtctctttcccagcttctgatgtgggccccaaatccttggggccccttgatttgtagacacatcactccagtctctgtctttgccttcacatgccattcttcctgtatgctgtgtgtctgtgtgttctgtctgcttcttatcaggacatcagtgattggatttagggcccaccgtaatccagcatgaacttgtatcaatttacatcttatatcttaattaaatctggaaagacaatatttcaaatgaggccacattttgaggttctggatggacataaatttgggagagaggtgggcaagggaaggggatactac

SEQ ID NO: 149024 - DNA, 445 bp, Homo sapiens
tgcacttattgttcgtttgtttcctgatatattttttcccctctcttagacctaagctatgaacccaatgttgattcataaaactttgcagtaatctttgctttgatctatgaggaaatttttwaaaattgattaaatgtttcaggattcatcttctcagctttgctggtacagaaagtttttcatttttcagaactgtgcctgtttgtcatctaaaaaaaaacatttttttggtcattccaagtataaatgaacaattataatagtgatatctctgctaaagcaatagattatagtttaagttgtcatttaagctataagttattagttattagtagtcatttttataggtagtttctttttttttcttttttttatgacttgtgcctttctttgtatatgtaaagaatccaggtagtgggaatttgttgtattttaatatgag

SEQ ID NO: 149025 - DNA, 445 bp, Homo sapiens
tgcacttattgttcgtttgtttcctgatatattttttcccctctcttagacctaagctatgaacccaatgttgattcataaaactttgcagtaatctttgctttgatctatgaggaaattttttaaaattgattaaatgtttcaggattcatcttctcagctttgctggtacagaaagtttttcatttttcagaactgtgcctgtttgtcatctaaaaaaaaacatttttttggtcattccaagtataaatgaacaattataatagtgatatctctgctaaagcaatagattatagtttaagttgtcatttaagctataagttattagttattagtagtcatttttataggtagtttctttttttttcttttttttatgacttgtgcctttctttgtatatgtaaagaatcyaggtagtgggaatttgttgtattttaatatgag

SEQ ID NO: 149026 - DNA, 384 bp, Homo sapiens
gaagagtatttcatcagaaactggggctgccttcaaggagatgcgaggttagactgcagcaaccaggaggacccaacagtgaaaattctgaaaatccttgtaaggctctgagcagtatttcctgcttttccagctcaagcttccaatctctactcctgcatttgtgtacagatcaaaatctgaggttttcacacgaatggtctttttgccaatgttacaagaagaaattaaaaagaaaaactgtaggcttagaagaaattaaaaagaaaaactataggcttagaagaaatatttagttcttatttgaarttagtaatttgtgaattcttttacaaatgtataacaatagacaaatgttcttcagcactccatttttcacaacag

SEQ ID NO: 149027 - DNA, 607 bp, Homo sapiens
aataataacagagatttaaggaatttgcccaaggttaaaaaaaaaaaaaggtgataaattgcagagccagtatttaaaactggcagtctaacctcagagtatctattaatacattgatactatactctatttcctcttgatgaattctttaacattttcttctctaacgtgtgtacagcagtccctccttatctgctggggatatgtcccaagagytccagtggatgcctgaaactgtggatagtaccaaacccaagcactgtggtaccgtagcagttgttctgatcaccgaggcagttaaacagtgactgacgggcatatagcataaacaatgtggagatgctgaacaaagagatgactcacgtcccagctgggacagaatgggtccatgcaagatttcatcacactactcagaacggacgatttaaaacgtatgaattattttttcctggaattttcagttgaatatttttgaaccatggataaatgaaaccatgaaaagcaaaaccaccaagaaggggaaactactgtattaagagtgaacctaagggtgaccattggtcaccactgagttatccttcccttccttatctggctgctcacctga

SEQ ID NO: 149028 - DNA, 630 bp, Homo sapiens
tcccacttctttatataccacagagggagagaaacaggaaaacttgctcaattctgtaatttttaaaaacatgtttactggccaggcacggtggctcacgcctgtgatcccagcactttgggaggctgaggtaggcagattacttgaggtcagaagttcaagactagcctgaccaacatggtaaaacccagtctctactaaaaatacaaaaatttgctaggcatggtggcaggtrcctgtaatctcagcttctcgggaggcgaaggttgcagtggagccgagatcgcaccaccgcactctagcctgggcgacaaagatagactccgtctcgcaaaaataaataaataaataaataaataaataaaataaatattcactattttccagtaatgctaagtactatcaaaaagagtagattactctgacactggttgcataaatattaagctcaagtttgatcagcacattctatgctagatgtaaaagcattttgaaaaaagtaccttacaaataaaatggtattcttagtagacttaaaatttgtttttttaagcaagttaaacatataccctgatctttttattattgttatttatgggcttagtaaaccttttcttcaacaatgataca

SEQ ID NO: 149029 - DNA, 543 bp, Homo sapiens
atggcaccacgtactttcaggaaagaggaaaaaaaagagagagagagaggtcagtcagtgctatagcaatgcgattaacaagagaaaaaacttgatccaccggttccttaagaatcgaccaaaagctaagacaagaaaactgaaagaaaagggggggggggcgggtagaggggagggacagtcaggcagaacccagctaggaaccyaggccaacttcacaggactgtttttggcccttggcaaaaaagaaaaaaaataaataaatcttaattccatctctttcgcccatactagaacctgtcaaagtgatttaactgctgcctgtttacatgtgtcataccagggtttttggtttttttttttttttaattccaacaggatctggatattaccttctatctggacagcttcaatttattccagcctacccaatctttcttcttggaattcaagttaaaacaaagcaaaacaagtccaaattcatgacagctatagagatgagaactgattaatcgattaacatcccagaaacagattacaagg

SEQ ID NO: 149030 - DNA, 543 bp, Homo sapiens
atggcaccacgtactttcaggaaagaggaaaaaaaagagagagagagaggtcagtcagtgctatagcaatgcgattaacaagagaaaaaacttgatccaccggttccttaagaatcgaccaaaagctaagacaagaaaactgaaagaaaagggggggggggcgggtagaggggagggacagtcaggcagaacccagctaggaacccaggccaacttcacaggactgtttttggcccttggcaaaaaagaaaaaaaataaataaatcttaattccatctctttcgcccatactagaacctgtcaaagtgattyaactgctgcctgtttacatgtgtcataccagggtttttggtttttttttttttttaattccaacaggatctggatattaccttctatctggacagcttcaatttattccagcctacccaatctttcttcttggaattcaagttaaaacaaagcaaaacaagtccaaattcatgacagctatagagatgagaactgattaatcgattaacatcccagaaacagattacaagg

SEQ ID NO: 149031 - DNA, 563 bp, Homo sapiens
aaagctgatatttaaaaacagctttaaaaataattttcctggcctggcacagtggctcacacctgtaatcttagcaatttgagaggctgaggcagggggatcatttgaagtcaagagtttgaaaccagcctggccaacatggtgaaacctcctctctagtaaaaacataaaaattagccagtcatagtggtgggcggctgtaatcacaccacttgggaatctgaggcaggagaatcgcttgaacccagaaggcggaggttrcagtgagccaagattgcgccactgcactccagtctgggcaacagagcgagactctgtctcaaaataaataaataaataaagttcattttaccaaaattaataacaacaataatggaagatatttattaggtgctaattacttgtcaagaattacactgagtttcacaaacattatctaatgttaccttcaaagaacccagtgaaataagtaatatatccccacctataagtgaggacactaagtcttaaaaaactgttgggtagctttggttctctgctgcattgtaagggaaaccataatt

SEQ ID NO: 149032 - DNA, 563 bp, Homo sapiens
aaagctgatatttaaaaacagctttaaaaataattttcctggcctggcacagtggctcacacctgtaatcttagcaatttgagaggctgaggcagggggatcatttgaagtcaagagtttgaaaccagcctggccaacatggtgaaacctcctctctagtaaaaacataaaaattagccagtcatagtggtgggcggctgtaatcacaccacttgggaatctgaggcaggagaatcgcttgaacccagaaggcggaggttgsagtgagccaagattgcgccactgcactccagtctgggcaacagagcgagactctgtctcaaaataaataaataaataaagttcattttaccaaaattaataacaacaataatggaagatatttattaggtgctaattacttgtcaagaattacactgagtttcacaaacattatctaatgttaccttcaaagaacccagtgaaataagtaatatatccccacctataagtgaggacactaagtcttaaaaaactgttgggtagctttggttctctgctgcattgtaagggaaaccataatt

SEQ ID NO: 149033 - DNA, 563 bp, Homo sapiens
aaagctgatatttaaaaacagctttaaaaataattttcctggcctggcacagtggctcacacctgtaatcttagcaatttgagaggctgaggcagggggatcatttgaagtcaagagtttgaaaccagcctggccaacatggtgaaacctcctctctagtaaaaacataaaaattagccagtcatagtggtgggcggctgtaatcacaccacttgggaatctgaggcaggagaatcgcttgaacccagaaggcggaggttgcagtgagccaagattgcgccactgcactccagtctgggcaacagagcgagactctgtctcaaaataaataaataaataaagttcattttaccaaaattaataacaacaataatggaagatatttattaggtgctaattacttgtcaagaattacamtgagtttcacaaacattatctaatgttaccttcaaagaacccagtgaaataagtaatatatccccacctataagtgaggacactaagtcttaaaaaactgttgggtagctttggttctctgctgcattgtaagggaaaccataatt

SEQ ID NO: 149034 - DNA, 656 bp, Homo sapiens
tggcatcattttatgtaggatggtaaaatcaagagattaccattatcctcatcttactatatgaagtgggccttgtgacctatgctactgaaggagagaatgaatattttgaaaaggccaaatataatcgaatgtgtatatgttttcccygttaaattttaaaagcagtgaagatcactgtcaagtgaacctttagtttagctatgttttatcttaaataattgatagtagcctctagtcctttgatttataaatgggaaaacatgaaatagttatttttaagagtgatttatggctacttttgaagctggttgattgatttatccaccagtacttcctacaagaattcgaattcagggtaaattcagaaaataataagagaaactaagatgcaaaggggaaagaaaaatatcaagaaatcttggttatgaaaaagccacaattgaacacaaaacttacttctgcaaacatagtaatcagataaaagaggaaacacagtgttggttacatagctcatattgtctgggaaggctgtgaaatcatcagcccagattaaaaaaaaaaaaaaaattccaggtcagtactccaagaggaatttgacccaggggatactggcaaaagtaccattggctatataattatcaagatctttcaat

SEQ ID NO: 149035 - DNA, 538 bp, Homo sapiens
aatatgctcaaaaaaactatagacaaaaacctatgtatatggaaagacaayatagtctgttacactttatttatatacagctttaattctgttaaattgctacaccacatttttatttttgcccctgaactatgctgataccatatgttataaatgaatgctttgtgattccctttaggttaacttatttagcacctactatctacatcaataatgttatcatttatctcaataaaatatattttttcttgtatgtgtatcttatctacactgctatgttagagcaattttagagaaagactcagtcaactgtttttatagtgctcttatttcttaatacagtgctttaaacagatttggtactatatttgtaataaaaattatcatagagataaaacccttcatcaataaagtgttataaaatattccactgctgtctaatcattcattcattaaaaagcactttcaatgcagtttcctttctctttttctaaattcaaataccgacgttctttttaaatttaggcctttgcacttt

SEQ ID NO: 149036 - DNA, 585 bp, Homo sapiens
tctgaggctctgcatctctgttgtaggtgtgtttkgaggcaggggtaatgaatgcagagggataaatcttcttatgattggctgatcctcataatttctcaattggtttcattcatactgtacttaggagtaattccttcaagtaattcctgctgttagctgatggagcttctttaatttctttgctgatgagaaattatactgttttgtttctattagtatttcattggaaaatatttcactggaaagacagaggagactgagtcacatattgttaactaactgctagagtgaacctaagggctctagaattaaatggaaaagtgtttttacataagtaacatatgtttattgaagaaaattaggagacagaaatgattcaaagtcataaatacatccttaccacaaaattttatcgtatattcttctggaatatgtagtttatagaataatagatgatattacctatttaaatattattatatgtagtatgttatttatgtattatgttacattatacaatataaacactgttataatttactttaaacatttagcataacgtaaacgtttttctatgtcaat

SEQ ID NO: 149037 - DNA, 553 bp, Homo sapiens
tgtggtattttgctgaattctatcaagtctgatgcctaagatcactaatgatcacactgtatctgtcccttgcatgcttcattttaactgtgaaaccgcagagttttcaggaagagaaaggacaaccctgattctgatatgaaagtcaaataactttttctactaacttttcttcaactcttttttataataaaatcttctatgactaataatgcacaaatctccatgaattaattctggaatgaaggatagaaagattgggcacacatcttgtgattcagaattacaacagtcacagcttggccaacatggkgaaacctcatctctactaaaaatacaaaaattaggcgggcgtggtggcacgcacctgtactcccagctactcgagagcctgaggcaggagaattgtttgaactgggaggcagaggttgcagtgagctgagatcacactgctgcactccagcctgggcgacagaaagactgtgtcaaaaaaaaaaaggaattacaacagacccactgggaaatggactttgagaaatcatgaactatgaat

SEQ ID NO: 149038 - DNA, 595 bp, Homo sapiens
gttgtagaagacttttgtggttacctatcagaactcagtataagtatggggtggttctgtgtttgcagaaatgataatgaaggaatgaaaataagagatatatgagaaagattctgagatttggaagactatattattctcgtcagtcatgaagctggccagactcacaaccccttctggggaaactgtctcattcacgcacttactgaaggaacagccttgtgtttattactacatgcccccsacctttctggacatagttaatttattcaataatacactttggccatgaggtcagtcaatctatatgttcaggctatgaattgacctggtgtgaaataacaagtcaatcaaagtctttctctctgaaatttaaattaacaaatgccagatgaggactgacatttggttctatggttagaaatcatagaaattgaaatggaaaagatacaccaagatagaaataagtagaatatgcataatattagaattggagtacattcattggatatattttggccaaaatgatgatggcataaataagttaaatgtttgtttctaaatcttatgtcagaccaggaattagcagtccaga

SEQ ID NO: 149039 - DNA, 443 bp, Homo sapiens
actctagggtgtctgcatgcaaccagcagagcataacatcaatgaagactaaaaaggagaaagagtgggaaggtcctcctgttggagagccagagcctagacagagtgctgaagaaaatgatcagaatgaagaatgagagaaaggaatgtggtttgaattagtgagaaagaagatgcaatactgatctttcatgctatttctatctcatttaaattttaattatttatagttattgatttcttagctcctcacccatccctctagtttcctctacctctcttcttagggtttacttatgaaattccccgttatattttactccaaatgccacacaatttcagaagtggagcttcttctcctttctcttcaggcacccgggaggggttaatttagttaattctrattacttgaaacactgtctatgcctggatgttccaaagat

SEQ ID NO: 149040 - DNA, 562 bp, Homo sapiens
ttcggctttatgtgtaactaacataattggcactgtccctgtaaattcaaattggatatcctcccaaattttatttaagcaattggcccatctttcctaagcctaatgtctaaatttgtcctgacagaggacaagcaagctttctgacagcatttcccttggagaactcagttgttaggcaaccttatcctgaacaggccttcagtctagcatggggcgcccttcctagactccaaggaaccttaatctgcgctcgargtttttactatatgtattaaagatagtagatttccttgtccttttgacagtggatgacaaattttcaagtccgtcttccccaaagtgagattctactcagttacaatgaacactgcattaggcttagtgcaaataaacttttgtcgctgtgttaaatttaatctttaatgagaattgttaaaatttactgcatccagatatagttggaacagcgttgggaggctacagactatgatgtgtaataaagaattatctatgctccatgcactccagggtatgcaaatgtcatctcttacacctttcc

SEQ ID NO: 149041 - DNA, 534 bp, Homo sapiens
ataaattctcagaggagaggatgaatatatgatctgtacattttaatacctgacagttaatatgaggccattatataacagggaagactcactgtgagcagagaaaagcaacctaactctagtgactgtacatcaaattrataggctctggagcttttgcagcaaaggagtaaaggaagacgcacatcttgatacatccagtgctaacccaggaactttggaggctgtttcagcagtcttccacggacactaaaccatagctactctgcatgattcagaccatgtattgatcaaagctctttcagtttcaagtaacaaacacgcagctcaaactcacgtaataagtcccaaatggtaatttattggcacacgtaactgggaagtcagagtagatctatctgcagacataaccaaattgagaggttgagactcagataatctctctctcccctgtgcacgtttgtgtctttgtctatgtctctcctttccaaatggcatgaaacatggccacagaagctccaagtctgtatttct

SEQ ID NO: 149042 - DNA, 534 bp, Homo sapiens
ataaattctcagaggagaggatgaatatatgatctgtacattttaatacctgacagttaatatgaggccattatataacagggaagactcactgtgagcagagaaaagcaacctaactctagtgactgtacatcaaattaataggctctggagcttttgcagcaaaggagtaaaggaagacgcacatcttgatacatccagtgctaacccaggaactttggaggctgtttcagcagtcttccacggacactaaaccatagctactctgcatgattcagaccatgtattgatcaaagctctttcagtttcaagtaacaaacacgcagctcaaactcacgtaataagtcccaaatggtaatttattggcacaygtaactgggaagtcagagtagatctatctgcagacataaccaaattgagaggttgagactcagataatctctctctcccctgtgcacgtttgtgtctttgtctatgtctctcctttccaaatggcatgaaacatggccacagaagctccaagtctgtatttct

SEQ ID NO: 149043 - DNA, 468 bp, Homo sapiens
tagacagcaacttttattgaagcagcggcgtacagcagtacaagaattactgcttcttgaagagcagagctaccccatagtcaatgtgtccagagtagcagctcagaggcaattctgcagtcatacttttacccacttttaattacatataaattaagggttggattatgtagaaatttctaggaaaagggtggtaacttctgggtcatgcggttattatcatggcaagaggtggtaacttctgggtgtagccatggcagtgataaactaagatgacacactggtagctgtgtcttatggaaagcagcttccaccaagtctctgttctagctagtcctcaatttggtccagtgttcgagccctgcctccagagttgagtcccrccttctaccttacttatatattacagatgtttcagaatatttgctgcctttacctatgaatgacaatttagtggttgtagaattc

SEQ ID NO: 149044 - DNA, 500 bp, Homo sapiens
aaagttacctatacttatctctaccccaaagttgaagagtatcagatggatagttatatctaaaagaacacattaratggatgtttttccccgacacaacctaccaatctgtcactggcaggatttttctttttttttttttaacttttattttaggttcaggggatacatatgcaggtttgttatgtaggtaaactcgtgtcatggggatttgttgtacagattatttcatcacccaggtactaagcctagtactcaatagttattttttctgctcctctctctcctcccgcccttcacctccaggtaggccccagtggcaatatgtgttgtttgtgtccatatgttcccatcatttagctcccacttataagtgagaacatgtggtatttagttttctgttactgtgttagtttggataatggcctagggataacagccttcagctccatccatgttcctgcaaaggacattatctcattcttttttatggctgcata

SEQ ID NO: 149045 - DNA, 557 bp, Homo sapiens
atgtgttgatttccttctatccctgacaacatgaatcttaaaaaataatttgggaggcttaacattaattctctctttgttaatcagtttctttttcataagaccatgctgatgctggcaccttcttgggaaatatgaggagtaaagacccagccasgctctgtgcccatggagggcacagaggcaagtcaaaatatccacagctacatccatagaattcttttctgcttaccaaggatatcatagttgcttctttgagaatggatagtacattccaattctcaccattatcattttctaatctctatcatttcattctcttttaatcactctggttgtgtttgatacaaatgatggaacactcaaattaaacgcaaggtgtgctgttggaaggaaaagtacgggatttctgtctggcagctataaaagctctatagcctgaaatgggggagaagagtgagcaggagtatcagtacttgctgcagtggatttagaaggtcagtaacttcacctgtgcattaataatttatatttttccaagtgttcttcacttacct

SEQ ID NO: 149046 - DNA, 557 bp, Homo sapiens
atgtgttgatttccttctatccctgacaacatgaatcttaaaaaataatttgggaggcttaacattaattctctctttgttaatcagtttctttttcataagaccatgctgatgctggcaccttcttgggaaatatgaggagtaaagacccagccaggctctgtgcccatggagggcacagaggcaagtcaaaatatccacagctacatccatagaattcttttctgcttaccaaggatatcatagttgcttctttgagaatggatagtacattccaattctcaccattatcattttctaatctctatcatttcattctcttttaatcactctggttgtgtttgatacaaatgatggaacactcaaattaaacgcaaggtgtgctgttggaaggaaaagtacrggatttctgtctggcagctataaaagctctatagcctgaaatgggggagaagagtgagcaggagtatcagtacttgctgcagtggatttagaaggtcagtaacttcacctgtgcattaataatttatatttttccaagtgttcttcacttacct

SEQ ID NO: 149047 - DNA, 556 bp, Homo sapiens
tccctcaaaacagacattatcctaactcccagtaccttagaatgtgaccttatttggaaattgtgttgttgcagatacaattagtttaattaagattaggtcatactggagtagggtgggtccctaatccaagaggactggtgtttttataagaagagagaaatctggacagggatgtgcacagaggtaagatgatataaagacacacagggagaagatggccatgtgacattgtgagagggagcagagaccccacttaggggactrccagtctcccctggccccctagcatggagataaaagaaaaattttgagttccttctagggagatttcaggcatctagctagccctgccacaagcaatttgaaaagtaaatataaataatccactaattaaaaaggtaataatagcttaaacgattgtcattcaagtaagttagagtcacaagatgtttggttctttatagaaattaaagatagcatctcatatccttgagctgttattcagaaaccttgaccctcaccagatgaaaaatgccaaccactgtcatgtaga

SEQ ID NO: 149048 - DNA, 463 bp, Homo sapiens
ggcaaaacttcttgctttaataggagcccactctcatgatagccaacacattcccacaataatggmaattatctgtccatgagggcagaactctcatgacctaatcacctcttaaaggtcccactttgtaataccatcacaatggcaactaaatttcaacgtgagttttgaatttaagccatagcacctgctttctcagcttttgtaagaagaataaagagtccttctttccttttaagctaattctgatgacatattcctgcttgaaattctaataagacataaatttaggaaccaggaagtaagggttttaggggagattaaaagacttgaggtagggaaacgatataaggttttatcatttaaaaggcaggtaaatgggtgggggcaaaatgaacattaatagcattgatggaagaggcccagtaagagttgaggttatcaggtcctggggacttcaaac

SEQ ID NO: 149049 - DNA, 463 bp, Homo sapiens
ggcaaaacttcttgctttaataggagcccactctcatgatagccaacacattcccacaataatggaaattatctgtycatgagggcagaactctcatgacctaatcacctcttaaaggtcccactttgtaataccatcacaatggcaactaaatttcaacgtgagttttgaatttaagccatagcacctgctttctcagcttttgtaagaagaataaagagtccttctttccttttaagctaattctgatgacatattcctgcttgaaattctaataagacataaatttaggaaccaggaagtaagggttttaggggagattaaaagacttgaggtagggaaacgatataaggttttatcatttaaaaggcaggtaaatgggtgggggcaaaatgaacattaatagcattgatggaagaggcccagtaagagttgaggttatcaggtcctggggacttcaaac

SEQ ID NO: 149050 - DNA, 573 bp, Homo sapiens
gagcatacattacttgtgtcccttctcttggggatcacagcctgttcaatgtctgagagttgcttcatatgtcatttrtccagttttctggctgtttatggcaggaggaccagtctggtaccagttatactatcataactggaaaaataagtcccaccacattcatattcaaactttgtttctgtttcttttctccccgcaaggcagtgagacccttcaaggcagtgacagggactcattcatctctgcattctcagtatctaacatatgaagcatagcatatatcaggcataataaatattattgaataaaagaataattgaccattgttaaaccaatccataatacttatggtatctatatttaagtaatttacatgaatatctaagtgcttctgtaacatgtggggtttttttaagcaactgagaataatctattaaattactgaatatatgtaagctagagatcaatgctagagtcaggttagttctatgctaaccttacataacattccttgtagctgtaagatgccagtgtccagaagcaaatatcatatgtgttcaggtatctcta

SEQ ID NO: 149051 - DNA, 586 bp, Homo sapiens
gaattcaagatgctgtcccaagcaactgaaaggacagagctgccatcaacagagattagaaaggctgcagttgaaagagtgttggggagatagataaagagttcagtttcggaagttgagtttgagatgtctgttagaccttccagtggaaatatcattaattaggcagttagcttgatgagagcctatatttggaaataaagttttgcatttagaagtcattagcataatgtcaacaagtatgtgagtatagacagggaaaagcactaaagtctaacygccgaaatactccagcattcaaaagtcaaagagaagaggagagaagagctccagtaaagtaggatgaagacaaatgggtggaggagttttgggtgccttggaagccgaatgaagacagtgtttcaaggaggagaatgttatcaactgcatgtggcagtatgatgaggattgaaaactgatcattggatttatccattggaggtcatcggtgacatgtataaaagcaacaatggtgaagtagagagagagaaagcctgattatttaggcaaagataaaatggaagaagaaaaaaacaagaaatatgac

SEQ ID NO: 149052 - DNA, 586 bp, Homo sapiens
gaattcaagatgctgtcccaagcaactgaaaggacagagctgccatcaacagagattagaaaggctgcagttgaaagagtgttggggagatagataaagagttcagtttcggaagttgagtttgagatgtctgttagaccttccagtggaaatatcattaattaggcagttagcttgatgagagcctatatttggaaataaagttttgcatttagaagtcattagcataatgtcaacaagtatgtgagtatagacagggaaaagcactaaagtctaaccgccgaaatactccagcattcaaaagtcaaagagaagaggagagaagagctccagtaaagtaggatgaagacaaatgggtggaggagttttgggtgccttggaagccgaatgaagacagtgtttcaaggaggagaatgttatcaactgcatgtggcagtatgatgaggattgaaaactgatcattggatttatcyattggaggtcatcggtgacatgtataaaagcaacaatggtgaagtagagagagagaaagcctgattatttaggcaaagataaaatggaagaagaaaaaaacaagaaatatgac

SEQ ID NO: 149053 - DNA, 630 bp, Homo sapiens
ttactatatatttcttacttagtcttttaggaaaatatctcgaggttgtgaaataatcattaaggagagataattgagacactgctaaaacattttcctcttccaactatcttctgtttgcatttataagaagatgaagtcttcaccaccccaaagagcaaatatcctctgaaggtatatatattcaaacatataaaaccatgactggcagctgaacatgtaattagaagttcatttgggttcactgaataaaatgtgtaagaaacataccaagatgattatggttatgttacaaatctacagataaagtctcggtaaggtacaagggaatatyctcatatgatgttaactcataaaaattttattgctaatgaggctattaaatgtagtcacaaatacgttatgtggaatgatgaatcatcatttcaacacattttttctcctgaatacttgagaagagtattttattgattacttacatatctagtttttatgagttttttatatagatgccattactttaactggacttgtgggaatgataaccaagtctacttccgcaatatacatgtttaccaataaagctattcgtttaataaacaaatcaatataggtgcagggaataatttc

SEQ ID NO: 149054 - DNA, 549 bp, Homo sapiens
ttcttaaggtttgatcagcacactggagagagccctgaagactaaggtcccggtgccggctcttcccattggaacgtcagtcagttgtggggtggggggaggggggagggatagcrttaggagatataccttatgctaaatgacgagttaatgggtgcagcacaccagcacggcacatgtatacatatgtaactaacctgcacattgtgcacatgtaccctaaaacttaaagtataataataataaaataaaataaataaacaaataaataaaaaacagtcagatctgtcacttcagtcactttattcttgtgggtgtaaatttgctcctctaaaaataaggaaatggaactaaatcatctttgagttttagttaaactctctcaatccctcttaaggtggatatagcacagtataaccgaagcaagtaccaggaaacatgcttagaggcaactgaattgtttttatcccggtgactgggtgaactttacaatggatggtgtttccatttttgctcttaacatctggatgcttagttctaaatattcca

SEQ ID NO: 149055 - DNA, 549 bp, Homo sapiens
ttcttaaggtttgatcagcacactggagagagccctgaagactaaggtcccggtgccggctcttcccattggaacgtcagtcagttgtggggtggggggaggggggagggatagcattagragatataccttatgctaaatgacgagttaatgggtgcagcacaccagcacggcacatgtatacatatgtaactaacctgcacattgtgcacatgtaccctaaaacttaaagtataataataataaaataaaataaataaacaaataaataaaaaacagtcagatctgtcacttcagtcactttattcttgtgggtgtaaatttgctcctctaaaaataaggaaatggaactaaatcatctttgagttttagttaaactctctcaatccctcttaaggtggatatagcacagtataaccgaagcaagtaccaggaaacatgcttagaggcaactgaattgtttttatcccggtgactgggtgaactttacaatggatggtgtttccatttttgctcttaacatctggatgcttagttctaaatattcca

SEQ ID NO: 149056 - DNA, 601 bp, Homo sapiens
ccaatttctttgatgctaggctcagaaagttaggagtccctcaaacattttttattttcttccttctgatttataaaatatttcaagtgtagggtgtaacagaataaataacgcatctcctagctttaacaaaacttaacatgattatattctttcagatatatattttttcagttttgaaatagaatgtgaatgtactgatgctctcggtcatcactttttccccagtggtagccattatcctgaactttatgttgatcacttccttgcgtgtttacttagcttaaaaaattgtaaatcttccacccattattctagcctaaaactctgaagtacttaygggtataggcacaacgtgaacaacttcttaagttgtgggaaaagcaaattcagaagtaaggggaccatggttaagccatttcatctttccacaggctgtttcctcctgggatgatgatctttgtcctacccacccaactcatgtgagatggcaatattcattcacaataatgtgaacaaaatgttctttgggaaaagataaagtgttatccatatgcaaggttctagtacttttattaatgaattccttatgtgtcttact

SEQ ID NO: 149057 - DNA, 496 bp, Homo sapiens
tcctgacagacaaaatgcggagcttgacagaagagacaaggatgcaatgtttgaattggatactttgtgggggacaacaagagtccttagagactaacaatttatcttgagaaagagtagaaaatgaaagaaatgcagaaaggtttttcttatacatacagagtgagtttgaagaacagtgttctattcttcaccagtcaagaccaggatataagttgcttttactccaagccataaaatgaaaacagcagttgtagttatggtcaattggtgtggaaagtttacaagactttgtttagggtggcttagggccgtcaagccaaactataaaagtggcattaaatgtttcaagtcacatgtaaaagaaaaaaaaaaaagactggcargatgtccagccaactggataggaagtttaggtcacatatgtttgttccacaataccccaatctaaactgaagccctgttgctcccaaaggtttaaggggacctctgtctt

SEQ ID NO: 149058 - DNA, 413 bp, Homo sapiens
aacacatttcactgttgcttctggctcttttctgtatttttcattgtttataatgtaaatatttaaatattttcttctgatctatcttccagttcactaattctctattcagctttatgtaatctcctgttaaatctatttatttagttctttatttcatttattgtatttttttacttctaaaatttctgtttctttttcagtttctaaatctgccaaatttccaatcttgtttagtttcttcaacataaacatagatattttaaatttagtttctggtatctayatgatctatatcccctctaaatttgtttctgttatctgttcctttcccctggcttctactcacatgatcatatctccttgtatgcctcccttttttttgaatgctgaaaattatttataaaaaatta

SEQ ID NO: 149059 - DNA, 354 bp, Homo sapiens
atatttttcaattgttactctattgggactactgccctaattatgagagactgatatagagcacaatagaaaggtaaatgctcactaatttgggaagcaggtaatcttagttctttgctgctaccagttgtttgagtgagcctgggtgagttactttatatatctgggccttggttttcccatctgtaaaatgaagatgttagaacacttcgaggtccagtttaaygtcttctgctacacttaaggaccctccgctaggcagccacatactattgaagtgtggcttccagattccccagaagtaatcctgggagccttcactttcaggcaattcctatatttacttcattctga

SEQ ID NO: 149060 - DNA, 436 bp, Homo sapiens
caggcacatggtgcaaactgtaagtttgacctaccattctggggactggaggttggtggccctcttctcacagctccactaggcaataacccagagggtattctggggactccaaccaatttcctttctgaactgctagagtagaggttctccatgagggctatacccctgcagcagacttctgcctggacatccaagtgtttccatacatcctctgaaatctaggcagaggcacccaaaccctaggcttctgcatatcttcaggtccaacaccacatggaagctgccaaggcttggcactcacattctctgaagcaatggccagagctgtacctaagccccttttagccacagctggaactagagtggcttagatgcagggcatatgtcctgagactgcacagagcagyggggtcctgggcccagcccatgaaac

SEQ ID NO: 149061 - DNA, 467 bp, Homo sapiens
tctcctgctctgaacacactcaaaactggcagccttttgggtcacttgataaatatgccagagtaacacacccaaatgaaraatgtgcagcctccaaaatccaaataggcccactggttggtgttcctttctttggctgtaggaggggccaaatgcagcaacttatcatccaccttaggaggaatatctcaacagaccccacagcactggaatcctagaagttgtactgaggtagaaagtccctgaattttagtcagatttgtcttgcatcctctggcacacaaatgtctcatcaataagttcagtgtgtttgctactccttgctcactggctccaatcagcataatgtcatcaatgttatggaccagtgtgatatcttgcagaagcaaaaagcaaccaaggtctctctgaataagattatgacacaaagctggagagttgatatacccctgaggtaggagagcaaa

SEQ ID NO: 149062 - DNA, 467 bp, Homo sapiens
tctcctgctctgaacacactcaaaactggcagccttttgggtcacttgataaatatgccagagtaacacacccaaatgaagaatgtgcrgcctccaaaatccaaataggcccactggttggtgttcctttctttggctgtaggaggggccaaatgcagcaacttatcatccaccttaggaggaatatctcaacagaccccacagcactggaatcctagaagttgtactgaggtagaaagtccctgaattttagtcagatttgtcttgcatcctctggcacacaaatgtctcatcaataagttcagtgtgtttgctactccttgctcactggctccaatcagcataatgtcatcaatgttatggaccagtgtgatatcttgcagaagcaaaaagcaaccaaggtctctctgaataagattatgacacaaagctggagagttgatatacccctgaggtaggagagcaaa

SEQ ID NO: 149063 - DNA, 467 bp, Homo sapiens
tctcctgctctgaacacactcaaaactggcagccttttgggtcacttgataaatatgccagagtaacacacccaaatgaagaatgtgcagcctccaaaatccaaataggcccactrgttggtgttcctttctttggctgtaggaggggccaaatgcagcaacttatcatccaccttaggaggaatatctcaacagaccccacagcactggaatcctagaagttgtactgaggtagaaagtccctgaattttagtcagatttgtcttgcatcctctggcacacaaatgtctcatcaataagttcagtgtgtttgctactccttgctcactggctccaatcagcataatgtcatcaatgttatggaccagtgtgatatcttgcagaagcaaaaagcaaccaaggtctctctgaataagattatgacacaaagctggagagttgatatacccctgaggtaggagagcaaa

SEQ ID NO: 149064 - DNA, 467 bp, Homo sapiens
tctcctgctctgaacacactcaaaactggcagccttttgggtcacttgataaatatgccagagtaacacacccaaatgaagaatgtgcagcctccaaaatccaaataggcccactggttggtgttcctttctttggctgtaggaggggccaaatgcagcaacttatcatccaccttaggaggaatatctcaacagaccccacagcactggaatcctagaagytgtactgaggtagaaagtccctgaattttagtcagatttgtcttgcatcctctggcacacaaatgtctcatcaataagttcagtgtgtttgctactccttgctcactggctccaatcagcataatgtcatcaatgttatggaccagtgtgatatcttgcagaagcaaaaagcaaccaaggtctctctgaataagattatgacacaaagctggagagttgatatacccctgaggtaggagagcaaa

SEQ ID NO: 149065 - DNA, 455 bp, Homo sapiens
aaaatctcatgtgaagttgctaatattctgaaaactctcattgttatggacagaatttttaaaagtgaaagatggacaggtatattggtgactatcatgtttcacaatgtttttgatattttsatttaattatacagttatagaaatcttataagcatatacataaaaaccttaagtattcattttatcaataaaatttaattcaaataagtatctctaacagacctactgtgagctagataatgtgctacatactgtgaaagctataataaatgaaacttgaagtagaaatctaatacaggaaacacacacaagcaaatatattcatggcaatgtgataagtacaagaaaaggcatataaatttttgaggggtgttacaaaagaaggagccatcaattctgattcaaaacatcttacacagattcagagaggagagaatacttaggttcaggga

SEQ ID NO: 149066 - DNA, 550 bp, Homo sapiens
tgcctatagttccagctacttgggaggctgaggccggagaattgcttgaacccaggaggtggaggttgcagtgagccgagattgcaccactacactccagcttgggcgacagagtgaaactccatctttaaaaaaaaaagaaaaaacaaaacaaaaaaaaacagaatatctacaagagaaagcctttttaataagtgttcagatataccattccacmtattttcttatttctcagcatgctaatgtgggaacaagtcttaagctgaaacttaaaatttctacacttctggatcattttattctttcagattttgctgtattttatgactcatcaaagatcattttagttcaattccaaaaagtatatgcaacattatttcaagtagtgataacaaggttctttcacatctgttaaataactcaaaagtttattgggcaaactttccagattaaaagtggttattaatcttacatatgttagtattaaactcttttcctctttctgttagagtaacagtatcatccagatgccagatttgtgtcccaagta

SEQ ID NO: 149067 - DNA, 486 bp, Homo sapiens
gaaaactaaaaagggaagtcacgtgggaacacaaagcaattactgaagatattaaggtaagatttcatgatacattttcatgattgctttgctcatagaaacataaactaaaaacaagaaaacctgaagtcatttccctgctctacctcttatgagttggtatgacmttggttaaataataaaacttaaaaaaattatttttcgttcaattatcttcctcttttcctctttctttagtgcctccttcccattctcttgaccaccaaactgacttaaatatgttacctctttgaataatgttttccagaaagcaatgcttaatgtaaagaaatgattcactaacagagtttcaggcagcaggactcaggtagtctgggagggatttctgcatggagatatctccactgtccttaagtcataccaaggagaggccatcaaatccttctatttgtgtggttggctctgttagagcagatactattgtta

SEQ ID NO: 149068 - DNA, 503 bp, Homo sapiens
aataactctacataagcactgctgattttttaacttgactctaagcgttttcttaaaagaccttcaagcaacccaggaataattacctaaacgataatgaatactatactagacaaaacaatataaggaaaatgatatatttcaagggttaaataaaattcactttaagatcatgacattttrtatgattataaaataccacatgatgtaattttggaaataaataaataagtgtttatttggaaataaagaatttaggaaaagtcttttaatgagagagaagcttgctgtaatctgaacctgaaattaaagtgtctttaattgaagttgaggaaaaattatactatcttgaggctatagaatggatcttgccataagaaagtatttttaaattacgaatctttaagactgaaaacattttgatgtttttttctgtaacacagagaagtagcagtttcattcttcatttatcttttcaaaccgagacagatctttttaaagtt

SEQ ID NO: 149069 - DNA, 503 bp, Homo sapiens
aataactctacataagcactgctgattttttaacttgactctaagcgttttcttaaaagaccttcaagcaacccaggaataattacctaaacgataatgaatactatactagacaaaacaatataaggaaaatgatatatttcaagggttaaataaaattcactttaagatcatgacattttgtatgattataaaataccacatgatgtwattttggaaataaataaataagtgtttatttggaaataaagaatttaggaaaagtcttttaatgagagagaagcttgctgtaatctgaacctgaaattaaagtgtctttaattgaagttgaggaaaaattatactatcttgaggctatagaatggatcttgccataagaaagtatttttaaattacgaatctttaagactgaaaacattttgatgtttttttctgtaacacagagaagtagcagtttcattcttcatttatcttttcaaaccgagacagatctttttaaagtt

SEQ ID NO: 149070 - DNA, 563 bp, Homo sapiens
ccacagccaaaagttggggtttcttttaaaatttcccaagtgtcatgtctggtcctgttaatagctgtgcactgtctcagaggatgatgagcaataggtgacttgtccacctgctgctgatacagactctgagatttccaaagtccatctactccaggcctaggaccagcactgcttagccatttgcccttgctggaacgatatatactacacataggtaatyaaaggattcatcatttatcttttagacatcacactggaaagatatttgcaaggatatttttggaaaagtcacaatatagaagaatacgtggtgatatccaaggagatgtgggcaaatagagtttaatacaatggagagttaagcgtctagccttttctaagtaaaaataaatgttcaggtaataattcttcagccatagtagaaatatatcttaatataacatgatgtaagtaaaattatgcatataattggttgaattgttaaaagagaaagcataaattttgggaaactgatttagccttgtattcatgattctaaacattaatcaggaatcctgatg

SEQ ID NO: 149071 - DNA, 599 bp, Homo sapiens
tcatgtaatatagccatgtcacaaacctgcacttgtaccctctggtcctgaaattttaaaaataatttaattgaaaaatggagtatgtaaatagaaaaaaatgaagaaaattwtaagttgtctataatatcattcccaccccaatatcatctttatttacatttaagtgttatctcttcatatattttatatgcatataaatgcattattttgaaaactgaattttttgtacagattgctagtagggataaattacaaaggagcacaacaaacacttgtggaatttatatgtttgtatcttgattggcttatattatagtgttcaataatgtcaaaaatgatcaagttgcacactttaaatatttgtaagatattatatatcaatcatatcttattaaagctgctaatgttcttgaaaaagaaatatttatggaaatcaattctacataagtgtgcaaaggtaattgaatgaatttttatgcatcaatttgagtaatgaaaggaatttttaatgagaacaatgcttttcctcagtattatgtgaataaataatttgcttatcactttagatgccataaattctaaataaacaattttat

SEQ ID NO: 149072 - DNA, 599 bp, Homo sapiens
tcatgtaatatagccatgtcacaaacctgcacttgtaccctctggtcctgaaattttaaaaataatttaattgaaaaatggagtatgtaaatagaaaaaaatgaagaaaattataagttgtctataatatcattcccaccccaatatcatctttatttacatttaagtgttatctcttcatatattttatatgcatataaatgcattattttgaaaactgaattttttgtacagattgctagtagggataaattacaaaggagcacaasaaacacttgtggaatttatatgtttgtatcttgattggcttatattatagtgttcaataatgtcaaaaatgatcaagttgcacactttaaatatttgtaagatattatatatcaatcatatcttattaaagctgctaatgttcttgaaaaagaaatatttatggaaatcaattctacataagtgtgcaaaggtaattgaatgaatttttatgcatcaatttgagtaatgaaaggaatttttaatgagaacaatgcttttcctcagtattatgtgaataaataatttgcttatcactttagatgccataaattctaaataaacaattttat

SEQ ID NO: 149073 - DNA, 471 bp, Homo sapiens
atagaaaaaaatgaagaaaattataagttgtctataatatcattcccaccccaatatcatctttatttacatttaagtgttatctcttcatatattttatatgcatataaatgcattattttgaaaactgaattttttgtacagattgctagtagggataaattacaaaggagcacaacaaacacttgtggaatttatatgtttgtatcttgattggcttatattatagtgttcaataatgtcaaaaatgatcaagttgcacactttaaatatttgtaagatattatatatcaatcatatcttaktaaagctgctaatgttcttgaaaaagaaatatttatggaaatcaattctacataagtgtgcaaaggtaattgaatgaatttttatgcatcaatttgagtaatgaaaggaatttttaatgagaacaatgcttttcctcagtattatgtgaataaataatttgcttat

SEQ ID NO: 149074 - DNA, 599 bp, Homo sapiens
tcatgtaatatagccatgtcacaaacctgcacttgtaccctctggtcctgaaattttaaaaataatttaattgaaaaatggagtatgtaaatagaaaaaaatgaagaaaattataagttgtctataatatcattcccaccccaatatcatctttatttacatttaagtgttatctcttcatatattttatatgcatataaatgcattattttgaaaactgaattttttgtacagattgctagtagggataaattacaaaggagcacaacaaacacttgtggaatttatatgtttgtatcttgattggcttatattatagtgttcaataatgtcaaaaatgatcaagttgcacactttaaatatttgtaagatattatatatcaatcatatcttattaaagctgctaatgttcttgaaaaagaaatatttatggaaatcaattctacataaktgtgcaaaggtaattgaatgaatttttatgcatcaatttgagtaatgaaaggaatttttaatgagaacaatgcttttcctcagtattatgtgaataaataatttgcttatcactttagatgccataaattctaaataaacaattttat

SEQ ID NO: 149075 - DNA, 515 bp, Homo sapiens
atattctgtcattaaaatttatattaatacttgtcaagattctatgtattattataactttcaatagtgattaaaaattttcaaaataaattcatattcattatctcatttttaccttacaacaacccagtgatcaggargtgattcttgtcttcagtttgcaatggcaaaaagagtctacaaaagacacaaagtatcacactatgaattgtaaatccaagattagaacacaggttactctacttacttagatcacttcttgtcaccatgcaaactataccctactgtccatgtgacaaatgtagcagagacattttataaagagaaaaatagaggtagaagttccaggaatgaatttggattgcttagggagacctacataaaacggaggggtggaaattgtaaagagattattagagatcaaatcttggtagctgtattttataggaaagagagggggaaagggggacactttccagaagcaagaggattacaggggcaccctcttgacttct

SEQ ID NO: 149076 - DNA, 627 bp, Homo sapiens
gtgtgcatatctaagtcaagaaatgtgtgrcagtgtatattgggtctatggccaatgaactatcagccatgttttgtaataaaacaactagttggggaattaatatcttccaaaagcaagaatatacatttatgttgtttgatttttcccttcagaacttcatgactcaagaaaaacatcaactatgtgtgactaaaataaattcacaagaaatagtctaaaaggggatagatgctgttgtttatgtacttaatgctattctaattttaaaaaatgtggtctgcattccattaaaccaattttataaaccaataatgtgtcatgtcttatattaataatcctgaggtctaggtgtgtcagtgtgttcaaggagttttcaactaagaggtatgtctactccttagaatctcttttggaatagtggatcttagctatttctttattcaataaaaactgaggcattcaggtgtagaagtccatggatatattaatggcatcaaataaaatgaagtatttaaaagagccttcctgtatgcagcaatcgtatctcctatttttttcattttcattagaaaggtgattatcaagctaaaataacctaggtagtagcgggtgaacaaaaataaa

SEQ ID NO: 149077 - DNA, 627 bp, Homo sapiens
gtgtgcatatctaagtcaagaaatgtgtggcagtgtatattgggtctatggccaatgaactatcagccatgttttgtaataaaacaactagttggrgaattaatatcttccaaaagcaagaatatacatttatgttgtttgatttttcccttcagaacttcatgactcaagaaaaacatcaactatgtgtgactaaaataaattcacaagaaatagtctaaaaggggatagatgctgttgtttatgtacttaatgctattctaattttaaaaaatgtggtctgcattccattaaaccaattttataaaccaataatgtgtcatgtcttatattaataatcctgaggtctaggtgtgtcagtgtgttcaaggagttttcaactaagaggtatgtctactccttagaatctcttttggaatagtggatcttagctatttctttattcaataaaaactgaggcattcaggtgtagaagtccatggatatattaatggcatcaaataaaatgaagtatttaaaagagccttcctgtatgcagcaatcgtatctcctatttttttcattttcattagaaaggtgattatcaagctaaaataacctaggtagtagcgggtgaacaaaaataaa

SEQ ID NO: 149078 - DNA, 612 bp, Homo sapiens
gtggcagtgtatattgggtctatggccaatgaactatcagccatgttttgtaataaaacaactagttggggaattaatatcttccaaaagcaagaatatacatttatgttgtttgatttttcccttcagaacttcatgactcaagaaaaacatcaactatgtgtgactaaaataaattcayaagaaatagtctaaaaggggatagatgctgttgtttatgtacttaatgctattctaattttaaaaaatgtggtctgcattccattaaaccaattttataaaccaataatgtgtcatgtcttatattaataatcctgaggtctaggtgtgtcagtgtgttcaaggagttttcaactaagaggtatgtctactccttagaatctcttttggaatagtggatcttagctatttctttattcaataaaaactgaggcattcaggtgtagaagtccatggatatattaatggcatcaaataaaatgaagtatttaaaagagccttcctgtatgcagcaatcgtatctcctatttttttcattttcattagaaaggtgattatcaagctaaaataacctaggtagtagcgggtgaacaaaaataaaagctagattat

SEQ ID NO: 149079 - DNA, 570 bp, Homo sapiens
attacattttttaacataaaatattcatgttacttcaattaaatattatatttgtcattttcattttcctgcactatttttgccttctgtttccattttcattttaggtttgacatgaaaatgaaatagctactgatttatgcagtaagagtggcatcattttagcagtaggagaaacaaggtctatggtgtttgatatgaaatttacaaatagayggcaaagctggaatattgatttttcaaaaggtaaataaaaaatggaatcaggaactctgagcaagatgataagagctgggctttaaaaaatatttgaatcaaaaaaggttgaagctgaagaaagcctgtagtacatctagtccagcggtcagctaaccttttttgttaaggggctagataataaaaataatggccttgtaggccatatggtctctgtcacaactcctcaactctgccattgtagaggaaaaacagccataaacaatatatcaatgaataaatgtggctgcgttctaataaaagtgtgtttacaaaaacaagtggtagaccagatttggcctgtgagctacagtt

SEQ ID NO: 149080 - DNA, 570 bp, Homo sapiens
attacattttttaacataaaatattcatgttacttcaattaaatattatatttgtcattttcattttcctgcactatttttgccttctgtttccattttcattttaggtttgacatgaaaatgaaatagctactgatttatgcagtaagagtggcatcattttagcagtaggagaaacaaggtctatggtgtttgatatgaaatttacaaatagatggcaaagctggaatattgatttttcaaaaggtaaataaaaaatggaatcaggaactctgagcaagatgataagagctgggctttaaaaaatatttgaatcaaaaaaggttgaagctgaagaaagcytgtagtacatctagtccagcggtcagctaaccttttttgttaaggggctagataataaaaataatggccttgtaggccatatggtctctgtcacaactcctcaactctgccattgtagaggaaaaacagccataaacaatatatcaatgaataaatgtggctgcgttctaataaaagtgtgtttacaaaaacaagtggtagaccagatttggcctgtgagctacagtt

SEQ ID NO: 149081 - DNA, 471 bp, Homo sapiens
tataggtcaaatttagaggctgtattcacaaaacagacaaacaacatattatgggacccttataaaaayttaattctctactcagcatatgcttatagattgctaaatatttatggtgcacgcacacacacacacacacacacacacacagagtccccatcaatgacctaaatgtgacacaaataataatacaagaatatctgtgataagagtcaaagtaaagcacagatgcaattctctaagagcttcaacaagagcccacttttgtttacaaggaattataaaaggcttcatcaaagacttgacagatggagagtggaagacagaatcagagactaacagaagcaaagacctagaggcaggctattgcactggatgtatacccagtctcccaggaaatattctatttgatgatagctgtgaccccttaaagttcttgaaggtacagcaattgcacacacatcagtagtt

SEQ ID NO: 149082 - DNA, 649 bp, Homo sapiens
acagtcattgtccccagtgtgggactttggctcctgctgagccaattttattcacaaatgtttgtctgttttaaccatctgaagactatctgaagaactgatcccaagtgttctttctatttcactgaacacagactgcagtcaggttggaatagcagcagcaggcattgtcctaaaatactataaggatagcaacaacttacaatcacctagaggaaaattatattacagttgagacatgcaattgactacctaaatcctggaatgaaaagctgtagagaatttctctggaaaagtaggacagacaaaagcacccacctacactggagtatttaggcagacatttgcacacctaaaacaagatgcacactcagggaagaactgagaagattgtaaactttcacctcttgctaatataaaggcccagtacaagcccggataactgtggaagaagtgcccctgcagagagctaatctacatagactggaagaggtttggtttttgstttttgttttgtaactactggcactcaaggagatctctgacaaaacactggctaaacacaacataaataatcagaaacttcagtgatcacactcaatgaggaacacaggctttgcaaaaattgttttcaaaggtcactaaacaa

SEQ ID NO: 149083 - DNA, 498 bp, Homo sapiens
gttattatagtgtaaaacagaaaggaataatttagtgtatttgacagctttcacttgttaattttaaggatggtttgtagaatctctaggaagtcctgttataaaggaagattttggggtcctgacctagacttttaaactragtagcttagagtggtaaagatcgtgccatctgctttgaacaaagatccagaaactaattgatcatcgaaatcatctttaatgcattttaaaatgcagataacaggccctagctccagagactcgattctaaaatttgtagaaagaccaggaaatatatagttttgaaagagtctgaaatgaaactagtgaaataccaccatagtagaagcttgaattaaattcgtttggtaaacaaaaacagtgggcaacattagacagctggctgcttatgggatctcattgtggcatattgtgaaaaaaatagcaaaaatattgcttttggaatatagttacaaagctgttatcaatgagtgt

SEQ ID NO: 149084 - DNA, 463 bp, Homo sapiens
atattggaaaaagaaaaaaagaaagacgaatgaagcaatgacctcgagaagagcagtgacaaaactttaatgaggacaatgactaaggctagatttcagtgccacttaaaaaacacaaactacgtgcaaatctgggagtatgcttctggaaaaatccttgcggaagctacaaytgtagaacacttgaaatggagactttagacagctgtaacactttcaggaccataatctattacagtatatccaagaagttttctgccatggcatgaaattctatgtgggtactgaattggtattacattaactcgcccatttaaacaatattgcttctaataataagttattagaattgaaagataaatccccccctataagtatacctttaaaattatttttcctgtactaaatctagaattgtgatgccaagtgtgaaaagaagtaattacttaagtaaaacaagtag

SEQ ID NO: 149085 - DNA, 463 bp, Homo sapiens
atattggaaaaagaaaaaaagaaagacgaatgaagcaatgacctcgagaagagcagtgacaaaactttaatgaggacaatgactaaggctagatttcagtgccacttaaaaaacacaaactacgtgcaaatctgggagtatgcttctggaaaaatccttgcggaagctacaattgtagaacacttgaaatggagactttagacagctgtaacactttcaggaccataatctattacagtatatccaagaagttttctgccatggcatgaaattctatgtgggtactgaattggtattacattaaytcgcccatttaaacaatattgcttctaataataagttattagaattgaaagataaatccccccctataagtatacctttaaaattatttttcctgtactaaatctagaattgtgatgccaagtgtgaaaagaagtaattacttaagtaaaacaagtag

SEQ ID NO: 149086 - DNA, 433 bp, Homo sapiens
cgttaaaccaaccaaataagtaaaatcaaagtgaatcacaatatcaagccaaagttgatcatgtaaagaagtatagtctgccccaaagatgaggctgagagaatatttgctaaccaatgtaccaatatattacagcaggcacttatatatttgttgttgaaggtaataatcgcaacaggtaacataaaycttttattgatcatttaccagagccaagcactgggctaagacacttgtcatttaatttgattctgaaaagacccctttgaggaaatactataattatccacagtgtacatataaggaaattgagatacaggggatgtaagtcatttcccaattacatgcaggttctaagtgtccaagacgatatttggacccagatggtctcactccagaacagtgtacaaaccactaggatgataacatgtgc

SEQ ID NO: 149087 - DNA, 536 bp, Homo sapiens
agacttagcctctcctcctgatagttctcaggaatccaggcagcccagacaagtgggcttccctccagcaaaacacaccctttccaccaagggacaaagtgcttcattaaacgggtcccactccctgtgccacccaactgggtgagaccctccaacaagggttgtcagacaccctatacaggagtgatcctattggcatcaggttggtgcccctcaaggtcagaggtctcagaagaaggaaaaggcacccatcttttctgttttctagcctcctggagtgacatctgtaggcacaggagcaagwcagatgaacaggggctgaagtgaaccccagaaaactgcaatagccctatctatagaagaaggacctgactattgaaaaaaacaaacaaacaagctgaaagtgtcaacaacagcatcaccaccaccaacaacaaaaggccgcacaaaaacgccattcaagggtcagcagcctcaaagaccaaaactagacaaactcacgagaagagaaagaatcaatgaaaaaatggtgaaaa

SEQ ID NO: 149088 - DNA, 597 bp, Homo sapiens
caacaagcgaatacacagaacagtggaaaagaatagagaaacaagatataaattcatgcacttacagccaactcatgtttgacaaagtcatcaaaaatatacattggggaaagaacagtcttaaatcaatggtactaggaaaactgtatatccatgcagaagaatgaagctagaccccatcttttaccatatacaaaaatyaactcaaaatggattaaagacttacacataagacataaaactatgaaacttctagaagaaaatattggggaattaattgctacaggacattgatctgggccaagagtttttaggcaagaccacaaaagcacagacaacaaaaccaaaaataaaataggcaaatgggattacatcaagctaaaaagcttttgcgcagcgattgaaacaattaacaaagtgaagaggcaacacacagaattacaggaaatatttgtatgtcttaaaatacccctacctcatgttaatttttggaagatatttttgctggttatagaattccaggtggacagggttttttttttaaaattcatgtcagcactttaatgatactgctgttttatctcttgcattgtttat

SEQ ID NO: 149089 - DNA, 597 bp, Homo sapiens
caacaagcgaatacacagaacagtggaaaagaatagagaaacaagatataaattcatgcacttacagccaactcatgtttgacaaagtcatcaaaaatatacattggggaaagaacagtcttaaatcaatggtactaggaaaactgtatatccatgcagaagaatgaagctagaccccatcttttaccatatacaaaaattaactcaaaatggattaaagacttacacataagacataaaactatgaaacttctagaagaaaatattggggaattaattgctacaggacattgatctgggccaagagtttttaggcaagaccacaaaagcacagacaacaaaaccaaaaataaaataggcaaatgggattacatcaagctaaaaagcttttgcrcagcgattgaaacaattaacaaagtgaagaggcaacacacagaattacaggaaatatttgtatgtcttaaaatacccctacctcatgttaatttttggaagatatttttgctggttatagaattccaggtggacagggttttttttttaaaattcatgtcagcactttaatgatactgctgttttatctcttgcattgtttat

SEQ ID NO: 149090 - DNA, 597 bp, Homo sapiens
caacaagcgaatacacagaacagtggaaaagaatagagaaacaagatataaattcatgcacttacagccaactcatgtttgacaaagtcatcaaaaatatacattggggaaagaacagtcttaaatcaatggtactaggaaaactgtatatccatgcagaagaatgaagctagaccccatcttttaccatatacaaaaattaactcaaaatggattaaagacttacacataagacataaaactatgaaacttctagaagaaaatattggggaattaattgctacaggacattgatctgggccaagagtttttaggcaagaccacaaaagcacagacaacaaaaccaaaaataaaataggcaaatgggattacatcaagctaaaaagcttttgcgcagcgattgaaacaattaacaaagtgaagagrcaacacacagaattacaggaaatatttgtatgtcttaaaatacccctacctcatgttaatttttggaagatatttttgctggttatagaattccaggtggacagggttttttttttaaaattcatgtcagcactttaatgatactgctgttttatctcttgcattgtttat

SEQ ID NO: 149091 - DNA, 591 bp, Homo sapiens
atgaggtgggaagattacttgagcccaggagtttgtggttacagtgagctatggtcatgccactgcactccagcctgcatgactgaaagaaaccctgtctcttaaaccataaataaattaaaatataaaataaagtccagtttttcagaaaaggtagtggatgtttaaataggaaaccactcttcagtccttggcagtaacaattagcatatacaatttaatgtgtcctatgtggaaaagaaaaataactaggcaatctactgaaatttagtttacaaaaagcagtaaagactttrccgtgtacgaccaaccagtttgattgacatgcataggaagtactactatggctaattttagttctgtagtccactccctgtaactttcagtcctattcaccagccaaaggataaggtgggaagagagaccctcctacaaaatgtatataactttttatcaaaactactcaagcagatttctcaaagaacttaaaacagaactaccattctgcaccagcaatcccattactgggtatatatccaaaagaaaataaattgttctacccaaaagacacatgcattcttgtatgttcat

SEQ ID NO: 149092 - DNA, 590 bp, Homo sapiens
tttcagtcctattagtggatcatcattatcttcactcaacagataagcaaccaagatactgaaaggttaattcatttgcctgtagtaatagggtcagctctcctaatattagactacaaaagatttgaattcccaaagagaacttttacttcctcacaccaatacactcccagccttctaaactaatctccctttctagcattaattttaatatgtttattttttacaataacccayggcaattgatagattttcaaaggactgaagttgaagccataactaacattttgggggataaattctttttaatccgtattcattcctagtatttcttacactcttctgaaatgtggaagtggaaacctttcaattacccaggggtcaatcagcatagctcaaaaacaaaaaacttcttgacatgacctctcaggccctgcctggtctgtctctcacctgtttttactttgtcctctcccaacacacaactttcccacctctctgctccagtcacacctgttctatttcagtctcttgtatttgtcatgttccctcctgccgcaggcttttgcacatactacttcctctgcttg

SEQ ID NO: 149093 - DNA, 566 bp, Homo sapiens
tccaaacatattggatttgcttgaactgctagattttcaaaactatacagcttctccaggaggagagcaagacacaagtgactctccaagtcttcccattccttcctgctcagaattcttgataaaagcaagaataatcagtagcatattgcaaagataatgaggaaaaaacatgaggctgtaaagctctcaaatccttacttctcttctaacatggcttttcatcagtatcactatcctgagatggcaaaactgttaaatccagaagactttttttaagtgttattttagtttcatgggtacatatgcaggttgattctatagataaatttcatgttgcaagggtttgatgtacatattatttcatcagccaggtaataagcacagtacacaataggtagttttttgaccctcagcctcctccctccggtcatcctcaagtaggctctgatgtctattgtttycttcaacgtgtccttgtgtgctcaatgtttagctaccattgtaagtgagaacatgtggtgtctggttttctgtacctgtgttagttcacttaggataatggc

SEQ ID NO: 149094 - DNA, 588 bp, Homo sapiens
ttcagatgtaacttttgagggcagctgtatgaatttatcattaattattgcctaaacatggcaaaagaaaaaggacgtgctcctttctcccctaaaaacttcccaaattagaatacaatactcttcgcctaattcctgcctgttattcaacaagatagaaatagtgggttttaaaaaaattgaaccaactgggatttttgagaaataagtcgctgaaaaatgaattaattcttaattaagaattaaaaggaatctagcaaagtttgcaaaagaaaataatgaayagaaattcaaaatactatttagagaacaaacacaagagtctacatacctgtttcacaaaatacttgttaagacaaatggggagaaaatgacaaaatttgatggcattacatatctccctaaccaatgttcttaaagatgaccagtgaactcttacttgcccccatcctactcactttatgtgcagcataagatgccactgacttcctttttcaaactcttaccttccctgattttttgtggcatttttctcttttagatctgtctctctaattgctacttctcagttccttttcttatgctatg

SEQ ID NO: 149095 - DNA, 517 bp, Homo sapiens
tttgaaagagctgagggagaattttttccatgctctctctcccagcttttggtgatcaccaacaatcctttgtgttttctgacttagcaatgtagtgctccaatttctgccactgttgtcacatggcattctccttgcgtctcttctctgtcttcaactaggcttttttaaaaaaaattcatactgttctgatttattcatcatcagtgtacctgagagactcggcagacataaattaactatatgtaaattactatattcatgagcagatgcaaaaataggaaaggcagcgttactggcttgtagttgataggccactccagcacttaggcttcttataaagaccccagtcactggattgagggcccaacctactccggtatggcttcatcttaacttaaatagttaaatctataaagactcgattttaaaataaggtcacattctgaggttccaggtggacayaaatgttggcagaatattattcaatgtagtacaatgaccaaacatggaattc

SEQ ID NO: 149096 - DNA, 573 bp, Homo sapiens
taatgtgacatacttggagatcttgattctgagacaggaccgtttacctttgaaagaagtataaattgtaccatgataataagaaggtaagagagaaaaacatgggtagtctgggaacctgtaaacatttatagatgtaatatatctgtgggccatgtagggaaggggttcatggagaggggctcatactcaatactgagattttcttaagtggaatctacaagttgcccagatgcgctgtgaaccccatgggctgccacttggaggtgagatgggaagggcagatatgagaagagtatggatggagcctacatgggctcatgtagacccaatgtcagacattggaaggaagatagacagtgagagctctgagggaaatctgtgaagaagctcaggtcttgatgaagtatcctaatgtctactctaygctccatgctaggctgtttgtgtattttctcagaaaggaagttcattggctggggacggaggctcaagcctgtaatcctagcactttgggaggccagggcaggcaaaccacctgaggtcaggagttcgagaccagcctggccaaca

SEQ ID NO: 149097 - DNA, 501 bp, Homo sapiens
atatgggttgtatactttgtcttgtctacaaaattctagcccccaattmatgtagcatgatgttgtaaaggtttgcaaaattgtttttactcccgcttctttcttgttctcatatattcaaaataaaaattattaatagaagagaagcaattgtttagataacatggaacgttcctttcctaaaacataacgttttattgcccataattattttctaagtactttgttctctgagaaataggcagaggtcaggggttatttaggtttacccaattggagtgaactctagcctctcacttcaaagacaattctttagtggcctcagagtttgtttaaaaatacaaatctgggtttaggtctcagactatccttgttggaaatctacaatgattacatccctttcaattgttttttttttaatctccgactaattttctttattaaatattgccacatacttaggcatattcataaaagatctctatgctgctttgatgaatt

SEQ ID NO: 149098 - DNA, 569 bp, Homo sapiens
cacacacacacacacacactcccctactatctatcagactctgatattttctattctattattctctatcttctttcatttaaaaatgtattgacttactaaagaggtttttcagcttaaaaatttttatttagaccaattcatggggtactcatgcaattttgttacatgtatacaatgcatagtgatcaagtcagggtgtttagggtgtttattactcgagtacaatacatgttttgaaactayagtcaccctactctgttgcaaacgttgaatatattcttactgtatgtttgtatcctttaatccacttttctttatgcgctcctctccccaccactcacccttcccagtctctgttatctttccactctctgtctctatgtgatcaaaatttttagctcccacatatatgtgagaacgtgtgatatttatcgttttgggtctggcttatttcactaagataatgaccttcagtcccatccattttggtgcaaatgacatgattttatccttttttatggccaaatagcatttaccagccattgaatgggttatgacagcttcaa

SEQ ID NO: 149099 - DNA, 608 bp, Homo sapiens
ctttcactggtaggctgctgtcattgggggcggtataatcctgtgattatgagcaggagttttggagtgagaccaaactggggtcaagrtctagttccataccttgttaaccatataaacttaggcaaattacttcaccatctatgtatttatctatttatttttagagacaggatctcactctgtcacccaggctagagtgcagtggtgcaaccatagctcattgcagtcttgaagtcctgggctcaagtaatcctcccagttcagcctcccaagtagctgggactacatgcacagactgctgtgcccagctaattaatttttttttttttttttatagaggcagagtttccttatgttgcccaggctggcctcaaagtcctgacctctagccatcctcctgccttggcctcccaaagtgcaggaattacaggtgagagcccctacacctggtcattacttcatctttttatgctgaattttcctcatctgtaaaactgggtgaaataatattaaacgtgttatagaactgctgtgagagttcaatgagataattcttgtatcacagtatctgacacagcatgaacactaaataaattctggctaat

SEQ ID NO: 149100 - DNA, 602 bp, Homo sapiens
aaatctacataaccatgtcatacaatttactcaaaatgatgccataaaagactttgccaaatgctttgcttaaataccaaaacactgtctatagcactcctctaacaaggtctatttgtaatttctaggtcaggaaactaattcttttctggcatgaattgttttttagtgagctaatgctgcctcctagtgaccaattcctaagtactcacaaaccatctttttattttattttattattttatttttttgagacagagtccccttctgttgccaggctggagtgcagtggcgygatctcggctcaccgcaacctccaactccctggttcaagtgattctccagcctcagcctcccgagtagctgggattacaggcacgcaccaccatgcccagctaatttttgtatttttagtacagatggggtttcaccatgttggctaggatggtctcaatctcctgaccttgtgatccgcccacctcaacctcccaaagtactgggattacaggagtaagccaccgcactgggccacaaaccatcttttaataatgcaatttaaatttatttcagaatcaacatcaagttgactgtcacaatttgtg

SEQ ID NO: 149101 - DNA, 568 bp, Homo sapiens
gcggcctggtgaggtcataaagttaactgcttgttcccactgtaaggtaggcaggggtagggaagtgtggcaagaatcacagtatctttccttttacattaattactgttggttgtgatcaagttacaacatgcactaatattttaaactatgcagcatagtttctttcaatgttgggggaaagaagatgaacctatcaacatgactscaataaaggcttagtaatacaaccatatttgggaaatattcatatagcaaaacagagattggcaaaaaaaatgtaaaacaccaaattatgagaaattgtagatagagaaactaaagcatagagggttttgtaagtttcccagaggtcatgcaggtaataagaggcataatcataatttgaatcactgtcaaccaaatcttctggagttcatgaatggaaccatctccctgggtgtacgggaagcacttaacacagtggctgggatgggtgcatgcatcagatctctgaatgagctaatttttatgtttaggctgtctttaaaaagaagtatatgctttagacattttcatttctaggctc

SEQ ID NO: 149102 - DNA, 572 bp, Homo sapiens
tctatctctgtctgactctctctgtaactctctgtctccctctctctgtctctgtttacctctgtctctctgttttcttctgtctctttctgtctgtccctgtctktctgtctctctgtctctcttccttgctccctttctttccctatttctctttccttctgttgctacctccatccctcccagactcccagaacaggcacagagaagactcaatccataatgagaaaaataacatttctctgaagaaagcataacttgcagagatccaacgttgtctacaccaaggcaattttatatgttatacccagagcagtttagctctttgtagctgctagcctcaaatagttctacttcagaagagggtctttatatttaaaaactgaaagggctattacgttgattttcccagaacacaagcaaaaccctgctctcgaaacagcattcaaagtgtattaaatgttgcttttaaaagcaaaaattttccagatactttaatatttaaatatcttttcgggcttagttttaacaatagccccccaattccttgtgggagaagagtgaaatagtgt

SEQ ID NO: 149103 - DNA, 358 bp, Homo sapiens
gtcaatctcttaaaaaaaaaaaaggatggatcctatagattgcttccagtcttaaattattaagattattgagtatttctcaaaataaaaaaacctccagctcatttcaattaatttcaaatcatagaatataaacaaaatagtgatttgcttgattcaaatatatgcagaattattasatgtggtttcctttataggatccattattatagctgaattttaaattcattttctctgtgtaggatttcattatgaggtacacattctgatttctttcattctttggagctttgtaatgcccaaggcttttttcaagtagatattttttgaaacaaacaaaaatcatttcaactataac

SEQ ID NO: 149104 - DNA, 567 bp, Homo sapiens
ccagccaaaaatgagaagttagtgtatgagtccatttatataaagttcaagtacaagcaaaattcatctattgcataagaagccaggatataagttacccttggggaactggtgattgaaagggagattaagggagggagaggttccaggttgttcatattctttagtaactgagtgctggtttggtgggtttatgcactttgtaaaaattcattgagctgttctcttatagtttatgyacttttctatgtgtgttaactataattaaaaatataatgttttctcaaaaacaccatgttttccattgcaaattacaataaactaatttcatccaagtcattcctttttcctccaatagcttctgcctcaaaataaggaggaaaaaaaatgtacctgtctaaggtaagcataatcagtattatgcaacccactttctgtgtaagaaaatttacatttcttttaaaaagcctaaaataaaagaagacacatttaatctcatgtcctttagatccatttgggcttcttgcaccaactcttgccaagagtcaaacatatctatgatggctg

SEQ ID NO: 149105 - DNA, 567 bp, Homo sapiens
ccagccaaaaatgagaagttagtgtatgagtccatttatataaagttcaagtacaagcaaaattcatctattgcataagaagccaggatataagttacccttggggaactggtgattgaaagggagattaagggagggagaggttccaggttgttcatattctttagtaactgagtgctggtttggtgggtttatgcactttgtaaaaattcattgagctgttctcttatagtttatgcacttttctatgtgtgttaactataattaaaaatataatgttttctcaaaaacaccatgttttccattgcaaattayaataaactaatttcatccaagtcattcctttttcctccaatagcttctgcctcaaaataaggaggaaaaaaaatgtacctgtctaaggtaagcataatcagtattatgcaacccactttctgtgtaagaaaatttacatttcttttaaaaagcctaaaataaaagaagacacatttaatctcatgtcctttagatccatttgggcttcttgcaccaactcttgccaagagtcaaacatatctatgatggctg

SEQ ID NO: 149106 - DNA, 517 bp, Homo sapiens
catcacctaacatgttagttgaaatggatagtttgctatacatcttggggtagccatctctggagcgtggcccatctgataaaatgttagcccaccatctttggagaatggattctttataaacacaattgattgtttctggaactaaacattaaaccagttggcacatacagagtactaatactctactttctctacactgaagtattatatactattaaaaacatggtaatgaaatataatgcatttgagttaattaaaaatgagtagctcttgagcacctatgtgtatgagccctgctaaaaacttggggaggataaaaaggataaacaagcactttggtatttagccattcattacaccagcttcagtatccttgatttatcaatctagagatacayatgactgaatcattcatcaattgtttccagcctcttgttaaatgttcttcacatccaaattcattttcaagaatctgatttgtcacttggccagaattctcattttcttgagacca

SEQ ID NO: 149107 - DNA, 599 bp, Homo sapiens
gaattctcattttcttgagaccaatagataaagcctgtttataaatttattgtttaactaatattgccttacctgtttcctggggggaaaaagcagctatctttcatctcagtccaagaagactataggaacttaggcctgtcctaaagaataaaaatrctatctttaaattatgccccagccaagatcaattttccagttgaaatgagcttcaacaatctaagtagcaggattatgatctacattgtatctttccctctttgtgagaatttaacagttttgtgtgggtctactcctcctcttgctttcatcctttgtgaacattttaaaactaacacttaatagaatgtggcctcttcatttcacacaatgttaacacaaggggctacagtgtgaagtaatgagacttttgggctcttggtagtagatacaactgtatctacatatctactactttttgaccatttacaatgagccagatgttttgctaagtactttacaagcatgtcatttaatcctcacatcctatgagggggcttttataatctctattttacagataagatactgaggtattagaaatttaagccacttaccaa

SEQ ID NO: 149108 - DNA, 607 bp, Homo sapiens
gataaagcctgtttataaatttattgtttaactaatattgccttacctgtttcctggggggaaaaagcagctatctttcatctcagtccaagaagactataggaacttaggcctgtcctaaagaataaaaatgctatctttaaattatgccccagccaagatcaattttccagttgaaatgagcttcaacaatctaagtagcaggattatgatctacattgtatctttccctctttgtgagaatttaacagttttgtgtgggtctactcctcctcttgctttcatcctttgtgaacattttaaaactaacacttaatagaatgtggcctcttcatttcacacaatgttaacacaaggggctacagtgtgaagtaatgagacttttgggctcttggtagtagatacaactgtatctacatatctactactttttgaccatttacaatgagccagatgttttgctaagtactttacaagyatgtcatttaatcctcacatcctatgagggggcttttataatctctattttacagataagatactgaggtattagaaatttaagccacttaccaaagttacacagttagtgaatgatggaagtgaattc

SEQ ID NO: 149109 - DNA, 468 bp, Homo sapiens
agtgtttggatgttatttacaccacattaatattgccaacccaagtcaagaaatccccaaagtctgtccattgtgtgtgttgctcaaggtaaaccacaaatgcaatttacactgttgtagattcacattgaacactcactgagcacctctcaggagccacattctgtccaatccacctcatgtgcacgttgcctcctttcattagataacataaggaatgagtttttgtccattttaataaaaattttactcagattctttgatgaaccttatagcactttgttttaagtaaatagattattttcattcaggtaaaaataaaagataaatatgagtsataattttgagcaataaaaatcgtttttaaaattgaaatagtagattttgtaaatataaaaggcctctgtctcagtttgttcaggcagctataacagaatgcctttgactgcctaacttacaaacaacagg

SEQ ID NO: 149110 - DNA, 574 bp, Homo sapiens
atttgcactcagtaatatatggcatatgtttttcttacctggaaatgatagactattaagaagagaagaagaggtggtaaaggagctttcaaaggaaaaaaaggaaatcaccttagagtgtgctgaaattccttagataggtgctcacagtcatgccaaccagatttcccaggtgcactgtgcccatcagcacagagggtctcggcctagggcaattccacctcgttttcaaaacccaattcaaatatctcctccttcctagccactcccctgcagccctctgccgtgcccctcactactccaagaagtcagaatcagaattaatttctcccttctatgataaagtattgctaatacaggatgtatcataatgccttatgagaggtgcctttacagtttatttttccttgtcccactctccaatctattcctaccattgggaactttaagcagagaaagggcaggtagaagagggccrtgacactaattatttagtccctactatttatcaggcaccatctttaataaatgcttttacttatactaccttatgttactatcccaataatctcaa

SEQ ID NO: 149111 - DNA, 601 bp, Homo sapiens
ttatagtggaagtattggactcccagagaggttacacaattttctcaaagtagcacagctgttgcaataaactgaattttatcttcccaaaagttcatgtgttgaagccctacacccccagtgtaatggtatttagagatggaacttttaggaggaatttaggtttagttaaggtcatgagggtggtactttgtgatgggatcaatgctcctataagaggaaacaccagcattctggctctttctctttctctccccactgtgtgaagacacatggagaaggcagccagaaagagtcctcaccagaacccaactgcaccagcaccctgatctcagactgccagccactggaagtgtgagaaaataaatttcccttgttgataagccacccagtctgtggcaatttctttttatggcagcccaaacagactaatgcagcctgttgaccaagcacttacagcctgacttatttttcccctgtaatactgtgatgcctcacaatgygaactgttcatcagttgtctttataactccagtttctatcagagtaactggaatatagtagaaatctaacggattggcattgagtgttagatgactga

SEQ ID NO: 149112 - DNA, 309 bp, Homo sapiens
tactatttttcatgggggttgtgctaacttacattcccaccagaagtgtatacgtgttcccttttcaccacatctgcgccaacatctattgttttttgtctttttaattatggccattctcattgggrtaaggtggtatctcattttggttttaatttgcatttccctgatgattagtaatgttgagcattttttttcatatgtttgttagctgtttgcataactgcttttgagaaatgtctattcatgtcctctgcccactttttgacaaaattatttgttttctttttgctgatttgtttgagttac

SEQ ID NO: 149113 - DNA, 535 bp, Homo sapiens
gctaacttacattcccaccagaagtgtatacgtgttcccttttcaccacatctgcgccaacatctattgttttttgtctttttaattatggccattctcattgggataaggtggtatctcattttggttttaatttgcatttccctgatgattagtaatgttgagcattttttttcatatgtttgttagctgtttgcataactgcttttgagaaatgtctattcatgtcctctgcccactttttgacaaaattatttgttttctttttgytgatttgtttgagttacttgtagacgctggatacaagttttttgttgaatgaatagtttgcaaatattttctcctattctgtgggttgtctgtttactctgctgattatttattttgctgtgcagaagctttttagtttaattggtcccatttatttattttgggttttgttgcatttgcttttgtggtctttgtcataaattctttgcctaggccaatgtcttgaatagtttttcttaggttttcctcttaggttttatggttt

SEQ ID NO: 149114 - DNA, 634 bp, Homo sapiens
tcactggggggtaaagagttttgaagagtttcttctgctattttccttagtgtcccaggcttttttttttttttttttcctcagcagcctgagctcatttacacttggcaaatttagaagcagctgggatagagcctaggtttactgagggtaagtggaaaagcttaggctgatggaaaaacacaagccaaacttcagtctgcacaaaaggaggccaggcttgacactaccaaagatgccamctgtttctgggtagcccaaacctgcatctatcttgcctttcaggttattgtctatgtacaggttcaattggctctgagtcctgagaaataatacataaatgcatgataatgtcagtcacctctggaccctacaaataccccatgtgaaattatttttccacttaaacctgtaagaaacctattctctaggagcttgttaaaaggaccctagatcataatgaaaacatgggagaattatttctagcagtaggaaaaactgatgtttactcattaccagaatatatttgaatgaaattagtggtgaatgcttaaccaagaaagccatttaataactacctctggaaagtttcattcaatgtgaagaactcagcataagctataccctcacctac

SEQ ID NO: 149115 - DNA, 628 bp, Homo sapiens
gtcttccaatggaatgaaggcaaataaaacacttgacccatggaagacatgccaaccaatggcaggagaaagcctggggaatgggcagtttacgggggcctcattcctaagggccttttatttatcaagattgtaatgaccctctgcatttttcctactagtaacactcaactagagattttcttgtgtctttttcccttacattgtatttctaaaaagcaagctgaggaaataatgactgtatatgagataagtgcactgattaagtatccaggaaaaccagccaatgattccattgaattctttattatgaagacatattttaaacaggcaacaaatagcgcttgagaatataaattgcctggagtactaaagaagctagttgtgcgtttgcttaataaaagyatggaagacaagcaagtgattttccattagatatacctttcttttgcactcttaaatggacaatttgaataaccctcaacaacttttattcagtgatagataacccagatcatgcatattctgaagtcacaaaatagtgaagcttcagatgaaactctgtcaagtaccttgagttaagaagaacattcagtaaatcgatgaattaaagggaaagagggacatt

SEQ ID NO: 149116 - DNA, 548 bp, Homo sapiens
ttataccatttgttgcctattgttaataatgctacaatgaacacagaagtgcagatattgcttcaacatactgatttcaatttttttggatatatacccagaagtgagattgctagatcatatgataattctaactctatatttagttttgagaaacctccgtcctgttttccataacggctgtactaattttcattcctaccaacagtgtgcaagggttatcttttctccacatccttgccaacacttgttgtcttttatctttttgataatagccattctaatgtgggtttttggactctcagcccatagattttcccaagagatgtttacatttagtgagaaagaagaactttgcctaaaacattgaaacagtgcratttgtgaatttggcctgaaccagtggagaaccctggtcatctggacagcatcttatggactttaatgcttaggaaaggaaatgttgaagtctttagatattatttgagcaatagagcagcattcaagacatagtttccatccttaagtattttcattcttaccataag

SEQ ID NO: 149117 - DNA, 446 bp, Homo sapiens
gaaccacctccgtgatccaatcacctcccgtgaggtccctccacaacatatggggattataactcaagatgagatttgagtggggacacagagccagaccatatcagtggtgtattagtttcttgccattgctataacaaattaccataaacttaatggcttaaaataagacaaattaattttcttatacttccaggctagaagtctgacatgagttttactcrtataaagtcaaggtttcagcaagttccgttcattttgggggctttggggagaaagtatttcttgcctttttacttcaagaggctgttgtcatttcttggtttatggctgcatttctccaatctcttgcttttgtcattagtctcctactacttactctgatctcctgacacctgtttataaagttgcttataattatgccagatcaaactggataatccaga

SEQ ID NO: 149118 - DNA, 522 bp, Homo sapiens
aacactgaattttttttttccaaaaaacgcgctcacacccaatgtccatgctgcaaagaaaatacaaaaacgggagaatgttcacccaactgatgcaacagaatagggtccatgttgggtggagactttgggaaatgagagttggtcacaacaaagtaacctgttagtttttagatatggtctattggtgattgagayagtttccctcccagagaggcacactagaaaatacaatcacacttggaaatccatgtgcatcctagttaatgtatattgcatttgagatgcagatgggtaataaagtttattacactccgttttaggttctctctttcactagaaatgccagaaagacttgaggaaatatcaaagctaacctctgatgttgtattcaaagttgtaaaagcaacagacattggattaggagcagagtggtcctttattctcaagtgaacagatggacttttatatattaacagcttccccacaaaagtagtgttgttggaggtgaaattcggggta

SEQ ID NO: 149119 - DNA, 522 bp, Homo sapiens
aacactgaattttttttttccaaaaaacgcgctcacacccaatgtccatgctgcaaagaaaatacaaaaacgggagaatgttcacccaactgatgcaacagaatagggtccatgttgggtggagactttgggaaatgagagttggtcacaacaaagtaacctgttagtttttagatatggtctattggtgattgagacagtttccctcccagagaggcacactagaaaatacaatcacacttggaaatccatgtgcatcctagttaatgtatattgcatttgagatgcagatgggtaataaagtttattacactccgttttaggttctctctttcactagaaatgccagaaagacttgaggaaatatcaaagctaacctctgatgttgtattcaaagttgtraaagcaacagacattggattaggagcagagtggtcctttattctcaagtgaacagatggacttttatatattaacagcttccccacaaaagtagtgttgttggaggtgaaattcggggta

SEQ ID NO: 149120 - DNA, 595 bp, Homo sapiens
aggaaattaaatttatgttcaagtgctatttctttatggcaccagagaacaagcatttcaaacatggacatgttaattatcttgtttgtggtgattttttcacaatgtgtatgtacatcaaatcattaggytgtataccttaaatatatacaatgaaaaacaaattaaagctttaccagatttcacaagacaaatgacagctagttcctcattttaaatcaatgtaataatgaacagtccagattcatgattaagatctaaatgttatttatagaacaagcaatgagccctgtgattctgtaattaataattttttacatatacatacatatgataccacctttccaaaagttatatcagtgagaaaattttaacagtaagctaagctaacccaacccccatcttgcccttcctttaattattcctgggctattgggccaggctaactttgtaagacatttaggctacagtttaaatgataataggtcttgcccaaaactcaaccacttttgtaaagctaatgggaggccagtaggctgggggaaggaggtgaacctgagtcctgctaaagcacagacataaatgatggtcagtc

SEQ ID NO: 149121 - DNA, 548 bp, Homo sapiens
tatctccaattaacttccagtatattagacggttagaactatatattaaaaataatcacatgaaatttggagaaagcttataratggcttaaaatctattagtaatgtcctatttctgtatctgggaggtaggtatatgtgaatccattaaattatttgttatatactttacctgtggaaataataataaatcaaaagtttattgcagacaaaaataaatcttcaaaatgcctatgatttccagatagaatacccttatattttgtatttcttatgttctcttctcacagaaacctcccagaagcagatgcctcacctcttttgccaataatccttctctgaattactgtgctgagcatcttatgtgactcatgattaaactgtttcatgtgtaattgtatatcttcagatggaatatattcaccctgagaacaggtgctgcatcttccaatccagtgtttatttccttgtggcatgaatttaactgtaaaactaatgacggaaggagccagctttcttttctttttaaactttaaaaaaatattttt

SEQ ID NO: 149122 - DNA, 594 bp, Homo sapiens
ttttctttgtgtgtatgctgtaaatatatttagccaatactatagttgaagaggctcaattaacacatataagacaacagaaggaatgtaagatgattatatccacagtaactgccaaaatgtatagtctcgacaccaatttccctaagcatggattttcattaccccatgtagaattctyattccaaattaagatgagtttcaccaggtcttctactccctgatattgtgggcagtaatttaaaggtatgcacttttactttggtcaagtatgcagcttttattagattctcaatggaattcacaaataaaaatatttcaaaaaagcagactagtttcctcattttaaaattagctttcttgagataaaaaaaggatataataaaattcattcatctaaaatatacaatatgttgacttttgagaggtgtatacaactgtgaaaacatcatcatagttgtacacatcacgcaacatattcattaccccaaaaatgtctcttcacacccctttacctctaacctcaggcaaccattgatctcctttgcatcaccataaatatattttctttttccagaatgtaagcaaataccg

SEQ ID NO: 149123 - DNA, 594 bp, Homo sapiens
ttttctttgtgtgtatgctgtaaatatatttagccaatactatagttgaagaggctcaattaacacatataagacaacagaaggaatgtaagatgattatatccacagtaactgccaaaatgtatagtctcgacaccaatttccctaagcatggattttcattaccccatgtagaattctcattccaaattaagatgagtttcaccaggtcttctactccctgatattgtgggcagtaatttaaaggtatgcacttttactttggtcaagtatgcagcttttattagattctcaatggaattcacaaataaaaatatttcaaaaaarcagactagtttcctcattttaaaattagctttcttgagataaaaaaaggatataataaaattcattcatctaaaatatacaatatgttgacttttgagaggtgtatacaactgtgaaaacatcatcatagttgtacacatcacgcaacatattcattaccccaaaaatgtctcttcacacccctttacctctaacctcaggcaaccattgatctcctttgcatcaccataaatatattttctttttccagaatgtaagcaaataccg

SEQ ID NO: 149124 - DNA, 568 bp, Homo sapiens
ctggcagaatttcttcttcctctggagagatcagcttttctttaagaccttcaactgattggttaaggtccactcacattaaggattaaaggtaattctctttattcaaagtctactgacttaactgttaatcttatctaaaaataccttcacaacaacatccggacatgtttaactaaatatctcaatacaatggcctaaccaaactgacataataaattaatcatctarcccatctgaaatgtgttattcaaagtttatatatatatatatatatttttaaattatactgtaagttcaaaagaagacatttattcaaggttttaaaaatatattcattaagtttgacaaccatcattacaatcaattttacaacattttatttcataatacccaaaagagaccccatacccatcatcagccttttacggtttcttccggtcatccatctccccagccctaagcaaccattaatatctctgcttctgtagatttgcctattctgaaattcttgtataaatataataatgtaatttggggtcttttatgcctagtttctttcacctaa

SEQ ID NO: 149125 - DNA, 492 bp, Homo sapiens
tttcctcatctgggagtgccacccctactggataaaamtgaaagagattgtgaacttgatagttatggacccttttgtggatttagccatcaccatctgcatcgtcctgaatacactgtttatggcaatggagcaccatcctatgacaccacaatttgaacatgtcttggctgtaggaaatctggtaagatggaacactgtctcccgatattaggattggaatgtgttttgcctgtaggatatctttttctggtactgaaagctggagtttctttgaaaagaaagtaatagttaattggaagacaaatgcttccacatatgccaggacaccagctgcttttctgctcactgttgtgatccctttcctctttctgcagaactttgaagacgtcatttaggagctattggcagaaaaccaatgttggcgacagaatgggaggcctggtacagtgggttggtttcagcagcctgagccaagtacttctggttttt

SEQ ID NO: 149126 - DNA, 595 bp, Homo sapiens
atagctcctaacaaaattcagactactactccctactcctacttggggacctgagtaaatgacactaccattgtgccacaaaaagtaaccatacgtagggatcaactaaaaacattaaatgactttcaaaaattactaggggatattaattggatacgacctgctctaggcattcctacctatgccatgagtaatctgttttctatccttagaggaaatcctagtctcactagcccttggcaattaacaaaggaggcagaggcagagttacaactrattgagaagcaagtccataaagctcaaataaatagaatagatccagagaagaccctagatttgctaattttttcaactcagcattcacctactggtgttattgtccaagaacaggacttagtagagtggctttttcttccacatactaattcacggactctaactccttatttagatcaaattgctacaatgatagggattgggaaaactcggattgttaaattacatggatatgatcctggaaaaattattgtccctctcacgaaggcacaaatacagcaagcttttataaatagtcttacttggcaaacccgtttag

SEQ ID NO: 149127 - DNA, 595 bp, Homo sapiens
atagctcctaacaaaattcagactactactccctactcctacttggggacctgagtaaatgacactaccattgtgccacaaaaagtaaccatacgtagggatcaactaaaaacattaaatgactttcaaaaattactaggggatattaattggatacgacctgctctaggcattcctacctatgccatgagtaatctgttttctatccttagaggaaatcctagtctcactagcccttggcaattaacaaaggaggcagaggcagagttacaactgattgagaagcaagtccataaagctcaaataaatagaayagatccagagaagaccctagatttgctaattttttcaactcagcattcacctactggtgttattgtccaagaacaggacttagtagagtggctttttcttccacatactaattcacggactctaactccttatttagatcaaattgctacaatgatagggattgggaaaactcggattgttaaattacatggatatgatcctggaaaaattattgtccctctcacgaaggcacaaatacagcaagcttttataaatagtcttacttggcaaacccgtttag

SEQ ID NO: 149128 - DNA, 555 bp, Homo sapiens
tattcttcaaaatctttttctatgcatatcctaacatggagatttgctgatgtttttaacaaaaatgctatcatacatgtacatgctattttgcaacttcctccttgtggctaatgctatattttagacagcgtctttgtcagtatatttagacctgggcaacttagggagagaaggaagatcttctctactttttttggacttgaattttcatagcaagagtccatctcattaccatcagtggcttgcatgacccctactctaactccaaccacaagattagagtgaaaagcacaacgttgtccccatttatgttcagggaatgcagagatggaccctacgtgatgytgatgatgataataaagatggtggtagtgatcataataatagatcttgacatttgaaaagcatttggacctaccttatggtggaaattcaaaaaaattatctttgttattaataatacaacaaataaaggccgagctcaaagttggggatgcaaaaagacgtggagtagtttccccaacacagcttcctgactgtgctctttcctcc

SEQ ID NO: 149129 - DNA, 531 bp, Homo sapiens
ccactaacggtttatgacaccagccaggcactgtgctaagtataacaagaaatatatttggtctttgtctccagttgccaacacagtgctcccaaaactattggaattttctgagtaatgaattgttattcataaggaacccctttcagtcacatctgagtttatgctaatgcagtgacttaggtaggactcctaagtagcctcaggaagtggttgatcaccagaaagacggagcgattagagagtgggaacyttcagccccacctactaccttctgggggagggctggagattgagctgtataaaaactattgaaaaatgagatttggagagctttcaggttggcaaacacatggaggtgctgggagagtagtgcacccagagagggcacagaaacactctgcactccccagaccttgccctatgcaccttttctgtttggctgttcctgagttgtatcctttataataaaccagtaaacaaaaatatttttctgagatctgaaatgcattctagcagattatcgaactt

SEQ ID NO: 149130 - DNA, 632 bp, Homo sapiens
gccatgcagagttttaaagatgatgtcattctcaaaggatgcctggagagagttgcttgtgtcttttcaaaaaaacatgttaaaaatcaaatgcctgttgtctgatggctgcaggtgaacctactgttttatgccttatccatttgtgtggagtgcagaaagttctacccccagagaggagcaagaagcaaaaagggtgcagggcctgctatgaccatggcacctctcctggaggacccagagtttcagtgtctcctcctccctgtgataaaacaacagttctccaccatctggtccgctcaccaagactgccttgttagtrgatctcagcaggtgaggctttggagcacaggcaccaggtcagcctaatacagagctgggagacactctcagggcagtcctgatttaaaatgctatcctgttgtcccaggtataaaccaaaaataaaattctaagccccctcagccatctgaatagacccctcctcggggccaagggcatttcaaagttaacctgaacaactagttagttcaggccatgatgggaatggggagctggacatgcctcattataccctcctcccttttgaattactgacagaacagactctttacgtctgataagaaacattt

SEQ ID NO: 149131 - DNA, 614 bp, Homo sapiens
tatggaaatgcctggatgtccagacagaagtttgctacaggggcagagccctcatgaagaacytctgctaaggcagttcagaatagagatgtggggtaagagcctcacccccctccaccaagtccccactggggtactgcctagtggaactgtgagaggagggccaccatccttcagactccagaatggtagatctgccaaaagcttaaaccatgcacgtggaaagcctgcagacactcaacgccagctgtgaaagcttccaggagggggtgctgcataacaaactaccccaaaacgtagtatcttaaagcaacaaacatttattatttcacatactttttaagagtcactaccatggtttgagtgtccccttcaaaactcaaaacttgaaatttaatttctgttgtaacagtattaagaggcggaacctttaagaagtgattaggccatgagggctccaccctcatgaatggattaatgccattgtcatggaagtggattagttacgagttgggttcttgataaaaataatgaatttggtcctattttctctgtcttgtgcactcacttctgccttccaccttccaccatgggatgacccttaccagatgcca

SEQ ID NO: 149132 - DNA, 520 bp, Homo sapiens
agatgagggaacctgctcagggccttttctgcacatgcccacatgtgcactggggaaacggggtggagccatgggcaggtgggaggagcctggcctcttcagatcctgtgtggtggcctgggattcaatctgtgaggtggggagcttgttagcaggactccatctcactttgctgatatttttttttcccttttcacccaataaaatcctgccctactcacccttcaatgtattcgtgtgcctaaattttcctggtcatgtgacaagaactaaggaacaaaattctgcaacaatacttcataggtagtacacagaggaatgtctacttcatattgtatcacatttaggaggtgcataatgtccgaatgttccactactggtgatgcaaagttkagtagtgtattcattatctcttatataacaaattatgcaaaaacatgtctttaaaccaccataattatttagtatttttcatgatttctgcaagttctgaattcggacaaagcatagctggaacagc

SEQ ID NO: 149133 - DNA, 603 bp, Homo sapiens
tgtaatgaatcatttctgcatgtcctgtataaaatatgtttgaaggtaaccacaggcaatgagataaatttcttgtttataagaaattaaagctattaaatgcaaaataaaagctacaattaagatattaattttcccacctcctaagaaaatagtagttctaggtgatcacaaacagctgctaagcaatcacaaggtagaaaaccaataggggaccgttaggcattttttgttttaaggtttattgtggtgtaattgacaaatacaaattgtatataatttaaaaaagaagaaagaaatgaatgaatggacatcaatctactcatttatataataagaaatttggtttagttcaatgctaagagtcttcttagttccaaaaagcagtcaagtgttcctctactgaaatattagcactcagtagtcrcttattgttgagctcctcaactcaatctccattgcacatttttgttgttttcttacctgcccaaacagagacatctagggcagagaatattgttgtacctaaatatgtgtccttttctaatttttacccgactttgctaataattaggctatatgactgacattgtgtaagagaat

SEQ ID NO: 149134 - DNA, 536 bp, Homo sapiens
agcatcccaggtcgatctcagactgctactgtgctggctgcgagaatttcaagacagtggatcttagttttctgagctctgtggaagtgggacctgccaaaccagaccacttggctccctggcttcagccccctttcccagggagtgaatggttctgtctcactggtgttccaggtgccactgggtaatggaaaaacaaacaaacaaacaaacaaacaaacaaacaaaaacctcctgcagctagttcagtgtctgcccaaatggctgcccaattttgtgcttgaaacccagggccctggtgggttaggcactggagggaatctcctggtctgcggattacaaagactgtgaggaaagcatagtatytgggccagagtgcacagttcctcaggctcagtccctcatggcttcctttgggtaggggagaaaattcccctacccttgtgcttcctgggtgagatgatgctccacactgcttcggccctccctccattggctgcaaccactgtcctatcagtcccagtgagatgaagctt

SEQ ID NO: 149135 - DNA, 536 bp, Homo sapiens
agcatcccaggtcgatctcagactgctactgtgctggctgcgagaatttcaagacagtggatcttagttttctgagctctgtggaagtgggacctgccaaaccagaccacttggctccctggcttcagccccctttcccagggagtgaatggttctgtctcactggtgttccaggtgccactgggtaatggaaaaacaaacaaacaaacaaacaaacaaacaaacaaaaacctcctgcagctagttcagtgtctgcccaaatggctgcccaattttgtgcttgaaacccagggccctggtgggttaggcactggagggaatctcctggtctgcggattacaaagactgtgaggaaagcatagtatctgggccagagtgcacagttcctcaggctcagtccctcatggcttcctttgggtaggggagaaaattyccctacccttgtgcttcctgggtgagatgatgctccacactgcttcggccctccctccattggctgcaaccactgtcctatcagtcccagtgagatgaagctt

SEQ ID NO: 149136 - DNA, 630 bp, Homo sapiens
ctgaaatgaaaagagtgtggacatcattaatcctattcttacaacgggaaacaactaaacaaaataaaagtcaatgactttccttggactgatcaacaaaccgagctcacaggaccaactaccacccagaactttggagcaacaggctaatccagagagtcacagctgacatcagcttagttagaacagaagccactaggaggaacacttaaatactgattttgtgtaataataattttgacaaattgytggaggctgagtggcactggcatgattcaaaaactcctagggcatcattcttcagggccctcaacatttttgtggttttaaccttgaggaatcccactaggggttttgtagtaaagcactgagaaatatcatcctaaggattttgattgggagaggaacagtaatcattatgaaataggaccagagagtgcttcatataaaatccctacacttaaggagtaaaggccttatcagagcattattctacctgtgtgaaaggcaactcttgtaccctagctcctactttttgtttcacttacggggtgggggaaggactgagaaagctccataaaggtaaaggacaggcccattacaaaaaaaaatttaattaaattttaagat

SEQ ID NO: 149137 - DNA, 628 bp, Homo sapiens
tttaaacccaaagaaatgtattatttcacagttctggaggctagcagttccagatcaaggtatgtctttgtccacttgtgttgctataaaataatacctgaggtggggtaatttataaagaaacaagatttatttgactcatagttctgcaggcggtacacaaagtgtggcatggacatttgcatctgacgagggcctcaaactgcttccactcctagcaggagaaagggatctggtgtacacatggtgggagcagaagcaaaagacagaaaagaagaggtgccaggatctttycaacaaccagatctctcaggtactaagagtgagaactttctcccaggagaatggcaccagggcattcattagggattcccccccacaattcaagcacctcttaccagggtctacctccaatgtcaggttcaaatttcaacataagacttggtgggaccaaacagcccatatccaaagcgtaggaaggtatcaggaatattggtttgttctgagaaatatgaggaaagaaactgttctacatctctctctttggcctgtagacagccatcttgttcctgtgtctctgtatcatcttctttctgtacctttgtctgcatccaaatatttccttttt

SEQ ID NO: 149138 - DNA, 335 bp, Homo sapiens
tgctgccctctggagctagtagtctcatctttgcagccctaagtagagaggagcccttggaataggtagctccttcctgtggctggtcctcctcatgtctcctcagctctgactgggcccagggcttttatgggcctcagaggggaggaaatgaatgccaattgrtacatgggaagttatgggatggcccagaaaaggcaacacaatctggtccatggtactggcagccaggtccctagccttcaaatcctccctggcctaaagttggtgcctcactgtggacccactgtcttccctccttccctccaggaaactgtctgcctcctgcttctgta

SEQ ID NO: 149139 - DNA, 540 bp, Homo sapiens
aacaaaaaagtaccaacaaaaaagtaccaaccaccatggcacgtgtatacctatgtaaccaaactgcatattctgcacttgtatcccagaacttaaagtataatttaaaaaaaaagagagaaaacatatgcatccacaaaaaagctttacttgtaagagttaaacctgtacacatctcatgtacatgttgctatgatctgaatgtttctgtccctccaacatttatgttgaaacctaacctccattgtggtggtatcaagaggtggggccttaaggaggtcattaggtcwtgatggtgctgccctcatgaatgggattaatacctttataagagaggcttaagaaagcgttcttcctccttcttccatgtgaggactcagtgagaaagtgtcctctttgaagcagagagcatttatcaccagacaccaaatctgcgggtgccttgatctgggacaccccagtttccaaaactgtgagcaataaatttctgttgtttatttaaaaaaaaaaagtacctaccttctggcatattaacctcca

SEQ ID NO: 149140 - DNA, 601 bp, Homo sapiens
ttttaaaatagacttaaataaatgtgctcagtatatagaggaactgtgccaaatttggtcagaataaatgacatctaatggaattcaattaatgttcaaaatagtttttggataaattttgaagacagatataattataactgatttttaatttagaaaaaaactattttaacaattgaatcatctgctattgctttaagaagacacaagagtagtattaagaggcaacctgaatgattatttamgtaattattcatctcaataataaagagatttctaataaacccctgttcagaaaagaattatatggaatctgcagctatctcataacacaaatataggagtttacatagaaggactataagacacattgcctttattctgataatagatattaagtcttttggatattaaatgagaaaattcaatccatttttcatgcgaagtaataaacagtaatttatctaaactttgttcagacatagaggaacattctgtctgagataatgtgaagaaatgagacttgggttccaaataagattatacattctcattccttaaagataaaaataagacccctatctttatgggattactttac

SEQ ID NO: 149141 - DNA, 601 bp, Homo sapiens
ttttaaaatagacttaaataaatgtgctcagtatatagaggaactgtgccaaatttggtcagaataaatgacatctaatggaattcaattaatgttcaaaatagtttttggataaattttgaagacagatataattataactgatttttaatttagaaaaaaactattttaacaattgaatcatctgctattgctttaagaagacacaagagtagtattaagaggcaacctgaatgattatttacgtaattattcatctcaataataaagagatttctaataaacmcctgttcagaaaagaattatatggaatctgcagctatctcataacacaaatataggagtttacatagaaggactataagacacattgcctttattctgataatagatattaagtcttttggatattaaatgagaaaattcaatccatttttcatgcgaagtaataaacagtaatttatctaaactttgttcagacatagaggaacattctgtctgagataatgtgaagaaatgagacttgggttccaaataagattatacattctcattccttaaagataaaaataagacccctatctttatgggattactttac

SEQ ID NO: 149142 - DNA, 601 bp, Homo sapiens
ttttaaaatagacttaaataaatgtgctcagtatatagaggaactgtgccaaatttggtcagaataaatgacatctaatggaattcaattaatgttcaaaatagtttttggataaattttgaagacagatataattataactgatttttaatttagaaaaaaactattttaacaattgaatcatctgctattgctttaagaagacacaagagtagtattaagaggcaacctgaatgattatttacgtaattattcatctcaataataaagagatttctaataaacccctgttcagaaaagaattatatrgaatctgcagctatctcataacacaaatataggagtttacatagaaggactataagacacattgcctttattctgataatagatattaagtcttttggatattaaatgagaaaattcaatccatttttcatgcgaagtaataaacagtaatttatctaaactttgttcagacatagaggaacattctgtctgagataatgtgaagaaatgagacttgggttccaaataagattatacattctcattccttaaagataaaaataagacccctatctttatgggattactttac

SEQ ID NO: 149143 - DNA, 609 bp, Homo sapiens
caatcgttgactatacatttcaatggcaattttctcacttatcagaacagtttgtaaattgcacatatccatttttaggtctttcatttttcaaattcaaacattatagccgttaaatgttttaataaaagttaaattgacatgctacaaattttcagactaaagttttagaatatttcctttacrccaataatatttaagtatggatctccatttcttgtctgtatataacttataaatattacccacataaaaacaagtatagaatctaacaaagaacttcattataaattactcctatggtatttgtgacatgtttgtctgtaaaatattttttaaaacagatattcctaaatcacaacataattttttttttttattttgagatggagtctctctctgtcacccaggctggagtgcagtggccttatctcggctcattgcaacctctgcctctgggtccaagccattctcctgtctcagcctcctgagtagctgggactacaggcacctgccaccacgcctggctaatttttgtatcttcagtagaaatagggtttcaccatgttgaccaggctggtctcgaactcctgacctcaggtgatctgt

SEQ ID NO: 149144 - DNA, 609 bp, Homo sapiens
caatcgttgactatacatttcaatggcaattttctcacttatcagaacagtttgtaaattgcacatatccatttttaggtctttcatttttcaaattcaaacattatagccgttaaatgttttaataaaagttaaattgacatgctacaaattttcagactaaagttttagaatatttcctttacgccaataatatttaagtatggatctccatttcttgtctgtatataacttataaatattacccacataaaaacaagtatagaatctaacaaagaacttcattataaattactcctatggtatttgtgacatgtttgtctgtaaaatattttttaaaacagatattcctaaatcacaacataattttttttttttattttgagatggagtctctctctgtcacccaggctggagtgcagtggcctkatctcggctcattgcaacctctgcctctgggtccaagccattctcctgtctcagcctcctgagtagctgggactacaggcacctgccaccacgcctggctaatttttgtatcttcagtagaaatagggtttcaccatgttgaccaggctggtctcgaactcctgacctcaggtgatctgt

SEQ ID NO: 149145 - DNA, 547 bp, Homo sapiens
tgtgacatgtttgtctgtaaaatattttttaaaacagatattcctaaatcacaacataattttttttttttattttgagatggagtctctctctgtcacccaggctggagtgcagtggccttatctcggctcattgcaacctctgcctctgggtccaagccattctcctgtctcagcctcctgagtagctgggactacaggcacctgccaccacgcctggctaatttttgtatcttcagtagaaatagggtttcaccatgttgaccaggctggtctcgaactcctgacctcaggtgatctgtctaccttggcctcccaaagtgctggattacaggcacaagccaccgcggccagccaacataattttataatgaagaatttcaagaaaagaaacaatattttactgaaatgcagtcctagacaattgacatattcttctcaaaaaactcatcggtaaagaagtacgtgtaatatatattacatatatacatgcataagcaaaaggacaaaaagrcaaatacataaatatacaaattagagttattaa

SEQ ID NO: 149146 - DNA, 619 bp, Homo sapiens
gtgatttgcttattttaagttatccttacttctatccctcctgagaagggtctaaacaaaggcaacacaatgtggtttggacagcagaagctcaaataaggtatagaggttacccaaaggaagagattaaatttgcgtgtaaaaaaattgaaggacagtaaagtcttgccaacttcatcataggtgatgatatctaagatttgaagactatagagtcatccagaattagatatcagaaaaactggacaattcattgttctttatttcctcctsgaggttctttcgttcacctgtctcccacaatagacaggccacagtgctgtggttattgccagtgcttccagaaaagtcattctgttatctctgggctaaataatagtggctgcctcctaactgctatagagtttcttttctttttgtttttccatttttttttttttaattttactttaagttctgggatacatgtgcagaacattcaggtttgctacataggcatacaagtgccatggtggtttgctgcacctatcaaccagtcatctaggttttaagccccacgtgcattagatattggtcctaatgctttccctctccttaccctctgccccgcgacaggccc

SEQ ID NO: 149147 - DNA, 619 bp, Homo sapiens
gtgatttgcttattttaagttatccttacttctatccctcctgagaagggtctaaacaaaggcaacacaatgtggtttggacagcagaagctcaaataaggtatagaggttacccaaaggaagagattaaatttgcgtgtaaaaaaattgaaggacagtaaagtcttgccaacttcatcataggtgatgatatctaagatttgaagactatagagtcatccagaattagatatcagaaaaactggacaattcattgttctttatttcctcctcgaggttctttcgttcacctgtctcccacaatagacaggccacagtgctgtggttattgccagtgcttccagaaaagtcattctgttatctctgggctaaataatagtggctgcctcctaactgctatagagtttcttttctttttgtttttccatttttttttttttaattttacttwaagttctgggatacatgtgcagaacattcaggtttgctacataggcatacaagtgccatggtggtttgctgcacctatcaaccagtcatctaggttttaagccccacgtgcattagatattggtcctaatgctttccctctccttaccctctgccccgcgacaggccc

SEQ ID NO: 149148 - DNA, 541 bp, Homo sapiens
ttagaggctgaaattaccatctgattgcctttaggctcttgcctcaagctagtgcttcttgagagagatatgaactgtataactttagaaaaaatggtagaaactgaaatgaaccaggataaagttgactctcactattaccatcagcttgtaaagaatcatccaaggtcttggctaggtaatttttaatattgtattaggaacattcacttttataacaaatcaaagcaatgcttcttttaagttcagccgccctcgagagatttatctccaaataataaggaaccttawcctatttcacagtagaaggaagttaaataataaatggaagttttgctttatttctactgtcctgtcataccattgttccagagtgtttctgtgctaaatcacagaataaagtcagctcaattctttaattcataactgaaaagatggtaaccccatgccccattcttttatttgatagcaaaatgtttcccttcttttctctaaaattgtcaggaggtaaaaattagacatatttaagagtaaaataagt

SEQ ID NO: 149149 - DNA, 492 bp, Homo sapiens
gggctggcaggcacaggagaacttcctcaataaaagtgtgaagttgacatgcaaaatacctcagtgttctcttaagggatccaaattcacatatggaaggacttcctggatgcttcagcttctggcaattatgaagaaatctgatattcacattcatgtgcagactttcacatgtacatgcattttcaaatggttggataagtatccagaacaattacttgatgtggtaaggctatttaaacatagactttgcaagaaactgtaacratgtctttcaatgtggctttattttatggaattaccaccaccaatgaataagtattgctctgctaactctgtatgatcaccagaaattactattattaatttgttagattttagtccttctactgctatgccacattttaacattttcaattatctaattttaataatgttgagcatctttttatatgcttattttccatctgtatatctactttggtgagatat

SEQ ID NO: 149150 - DNA, 623 bp, Homo sapiens
atatattatatatagctaaaatggccagacccacatggctggcaggtggctttaggacagccaggaaaatctagatgacatggatacatatctctcatcaaccagaaggctgtgtctgtcatgttcacatggagttgctcagttttccaataatagcaagagagaccaagcctcaatgtataaacactttgaagtctctgtgtgcataacatctgatactgtcctattggccaaagcaattcacatggctaaccctcrggtctgagaggagactattcaatagtaggaacagaggaagagaaaaactttgacatgtcttacacacaatctataacatggagattttagaagcagtttactgaagcaagccaaaatgagggaaaggaaaaaagattcattattatgtaaaatatatagtgttggctatttttgcagaactatactattctagagactaaagaaattgtagtggttttactatcaagtaacgacaaggaaacaacatataattctcagatttcattcaagcttaccaaatgtactagcctacggaatgcatttgagcaggtattgaaagggagtaattatattgctgtatgacaacatctctcaatgtccgtttg

SEQ ID NO: 149151 - DNA, 639 bp, Homo sapiens
gttgttttatatatatcataaaagaggagtaggatttttccagatggggrtagagtgaaattgagaggttggtgaggaaagaagagtatttcaggagccagaacagcatgtgctgaactagaaatatattagacagttaagggaactgcagagttttagtcctgattgaaatgtagggtacatttatgtaacacagacaaattaggccaaggagaaattgtagagtatatcttatgatattctaataaacttagattttatttgtaagtagtgagaccactgagaagattaaacaaacaacaacaaaaataggagaaacctggttgtatttaaattttaaaacaatgtctgtggctatattgttgaagacagagtaaaaggatgtaagacctacagacacaggggtcagagtggagcttactttagttcacatgggagattatgagaatctgtcttaagtcattaacgattaagcaggggttgttatttttagatactaaagtaggaaaatcaataggattcagtgacccatgagataaagtaggagaagagagcacggtctcgtggtcttccgaatttttggtttactagattgaataatagcattattggttataaatgtaattatatgaaaatgag

SEQ ID NO: 149152 - DNA, 603 bp, Homo sapiens
tgtaatgaatcatttctgcatgtcctgtataaaatatgtttgaaggtaaccacaggcaatgagataaatttcttgtttataagaaattaaagctattaaatgcaaaataaaagctacaattaagatattaattttcccacctcctaagaaaatagtrgttctaggtgatcacaaacagctgctaagcaatcacaaggtagaaaaccaataggggaccgttaggcattttttgttttaaggtttattgtggtgtaattgacaaatacaaattgtatataatttaaaaaagaagaaagaaatgaatgaatggacatcaatctactcatttatataataagaaatttggtttagttcaatgctaagagtcttcttagttccaaaaagcagtcaagtgttcctctactgaaatattagcactcagtagtcgcttattgttgagctcctcaactcaatctccattgcacatttttgttgttttcttacctgcccaaacagagacatctagggcagagaatattgttgtacctaaatatgtgtccttttctaatttttacccgactttgctaataattaggctatatgactgacattgtgtaagagaat

SEQ ID NO: 149153 - DNA, 582 bp, Homo sapiens
catacatatatatatatatgtatgaagagcaagacagtgtataccaaaatgtatacctaagagtagatatctagcgctggcaatcagtactcagagtagctatctagcactggcaatcagtactcagcaagctctaataaggtgtgtgttgtgtggcaaagggagttaggaaagaaagaggccaggtggagctagaggagatggggaagggagtttgagagaaatcttgaagatgggtagggtatgagcagatggtgagtagacaagactgaatttctaaaaactgtaaaatacatctaaaacatttaagtcttgctcttcttgttgccatcctctgataagaagttgtatgattttcaggtgcagtggctcatgcctataatctcagtcctttgggaggctgaggcaggaggctggcttgagcccaggagttcgagaccagcctgggaaacatactgagacaccatctctacaaatttttttwaaaaattagtcaggcatagtggtatgctcctgcagtccttgcaactttggaggccaaggtgggagaatttcttgagcccaggaggtcaagactgcagc

SEQ ID NO: 149154 - DNA, 394 bp, Homo sapiens
ctcggctgcatattagaatcacctggggaactggtatttttaaactggtatttcaaaagtaaaccaatgccaaggtcttacccccactgagtctctggaagtgtggtatgggcatcagtattttttaagaagctcctctggtgattcttatgtataggttaggtctaaaagattgaagagaatagtagcagaggcygactgtgtccaattatacagggaagcaaagttctgcggagcatggctccaggctgcaacttctgggtctggccatatgaaatgcagaaattcattcattcatgtatgcatacattaattccttcaccagatatttattgaccgtctactatgtgctttgtactgaggatacagaaatgaacaaaacagacaaaactcc

SEQ ID NO: 149155 - DNA, 411 bp, Homo sapiens
cagactcggctgcatattagaatcacctggggaactggtatttttaaactggtatttcaaaagtaaaccaatgccaaggtcttacccccactgagtctctggaagtgtggtatgggcatcagtattttttaagaagctcctctggtgattcttatgtataggttaggtctaaaagattgaagagaatagtagcagaggctgactgtgtccaattatacagggaagcaaagttctgcggagcatggctccaggctgcmacttctgggtctggccatatgaaatgcagaaattcattcattcatgtatgcatacattaattccttcaccagatatttattgaccgtctactatgtgctttgtactgaggatacagaaatgaacaaaacagacaaaactccataccctcatgga

SEQ ID NO: 149156 - DNA, 516 bp, Homo sapiens
ctgggtagtccctgccatgttcctccaggcttctttttacatgtagaaacgtctgtgtgtcaactccctcacccaaagataataagactccctggaaataatattaatagtaacagctaacattaatcmtgctctcaataagtatcagaaactatagtaagttgaaactacaccaagaagctacactaaatatttctgtaattataacttactcagcatgtgcctagttcttttggcggtgcattacaccattattactcattcaatctttacgttaagcctgtaagctaattccattgttatgcctatttttttgatgaagactctgagtcacaaagaggttaagtgattgcttcggacacatagctaatgagtggtggaaccaggatttgaacccccacagtaaaacatgttttgtagggcctttaacactattccacattttcctagtctttgcattcattgtatcacatattctgaactctgcctaatttttagctctgtcttgaaccatcc

SEQ ID NO: 149157 - DNA, 478 bp, Homo sapiens
tcattcaaatgcttgcaatccagttttggccagaggtgcaatggatagatgaggatgtatacacacaaaacaatgcatcattatctaaagcactgtactgatcacttgtgacatgctgaggtaacaatttatttttacaattgaagttaagatttattctcatatggaattataaaatcgctgctattttctgacarccaacaattgtctgattgttctagcgtgtctttgaaaggaggcatcattctttagctaagtagctgtggaacctgtatgtagctttcctccatcagttaaccaatttctttaccatctactgtgctccagacagagtgatgggcatcagagtcacggcgatgagcagaaaaagctagagttcttcccttcttggagcttgcaatgtcaggactccaagttattgagaggctagcaagtcataagtcccctgggaccctgtggaatgcctaggctgaaggta

SEQ ID NO: 149158 - DNA, 403 bp, Homo sapiens
tgggtagttgtgacacagactggcctacagtctaaaatagtcaatagctggccctttacagaagaagtttgctgacttctgaattagacacactctgtaccctttacagcaagcttgtccacctgcygcccgcaggccacatgcagcccaggatggctttgaatgtggcccaacacaaattcaagagctttcttaaaacattacgagatttcttttgtgatttttttttttttttttttttagctcatcagctatcattcgtgttagtgaattttactaattcacaattcttccaatgtggcccagggaagccaagattagacacccctgctttacagcatttataatttggtgaagggaagcagtgagtatacatagagaagaatataaaacacaatgaaat

SEQ ID NO: 149159 - DNA, 376 bp, Homo sapiens
acagtctaaaatagtcaatagctggccctttacagaagaagtttgctgacttctgaattagacacactctgtaccctttacagcaagcttgtccacctgccgccygcaggccacatgcagcccaggatggctttgaatgtggcccaacacaaattcaagagctttcttaaaacattacgagatttcttttgtgatttttttttttttttttttttagctcatcagctatcattcgtgttagtgaattttactaattcacaattcttccaatgtggcccagggaagccaagattagacacccctgctttacagcatttataatttggtgaagggaagcagtgagtatacatagagaagaatataaaacacaatgaaa

SEQ ID NO: 149160 - DNA, 574 bp, Homo sapiens
tatgaaaagaggtgaaaatggagagaatttacatgttttaatccacagcagaagttttgcctccccattctacyctaacactctttcaatttctagaataggggcttgttgaaaaggaagcagtgcagcctcaaggtggggctcccagactcagaagttccactgctgaggtctgattcctgactcagccacccaccaagtataagactgcaggcaaactgctatgtacctcagttttcccatctgtgaaatggggatggtaacaaaacccacctaacaagtatgttttgagatgattgcttgagatgatcaggtaatatgcttagcacagtgccttcatcatcaccatgaatcatgaaacaatgctttttttctttttcaacaaagatgatcatttaagcatcttcaccatctgaccaaaatttgaaggcagctccttttgctcctggcaaaaattctttccagaagtgaaagaaattaggaaaaagaaatgcattactttgccttaaactgtgaggtgaagggagtacacagggtggaaagcatataaataaacatggtgtgctgcattagc

SEQ ID NO: 149161 - DNA, 606 bp, Homo sapiens
ggcttggtagtggtaaattctctcagcatttgtttgtctgaaaaagactgtatcttcccttcatatatgaagcttagtttcactggatacaaaattcttggctgataattgttttgtttgaggaggttgaagatagggcctcccccccttctagcttgtagaacttctgctgagaaatctgctgttaatctgataggttttcctytataggttacctggtgcttttgtctcaaagctcttaagattctttcctttgtcttaactttggataaccagatgacaatgtgcctaagtgatgatctttttgtgattaatttccaaggtgttctttgtgcttcttgtatttggatgtctaggtctctggcaaggccagggaagttttcctcagttattcccccaaatatgttttccaaacttttagatttttcttcttcctcaagaacactgattattcttaggtttggctgtttaacataatcccagacttctcggaggcttcgttcatattttcttattgttttttctttgtctttgttggattgggttaattcgaagaccttgtctttgagctctgaatttctttcttccacttattcaattctatta

SEQ ID NO: 149162 - DNA, 606 bp, Homo sapiens
ggcttggtagtggtaaattctctcagcatttgtttgtctgaaaaagactgtatcttcccttcatatatgaagcttagtttcactggatacaaaattcttggctgataattgttttgtttgaggaggttgaagatagggcctcccccccttctagcttgtagaacttctgctgagaaatctgctgttaatctgataggttttcctttataggttacctggtgcttttgtctcaaagctcttaagattctttcctttgtcttaacyttggataaccagatgacaatgtgcctaagtgatgatctttttgtgattaatttccaaggtgttctttgtgcttcttgtatttggatgtctaggtctctggcaaggccagggaagttttcctcagttattcccccaaatatgttttccaaacttttagatttttcttcttcctcaagaacactgattattcttaggtttggctgtttaacataatcccagacttctcggaggcttcgttcatattttcttattgttttttctttgtctttgttggattgggttaattcgaagaccttgtctttgagctctgaatttctttcttccacttattcaattctatta

SEQ ID NO: 149163 - DNA, 567 bp, Homo sapiens
agcttccagaggaaggatcaggcagcaatatttgctgctgtgcaatatttgctgttctacagcttccgctgatgatacccaggcaaactgggtctggagtggaattccagcaaactccaacagacctgcagctaagggacctgactgttacaaggaaaactaacaaacagaaaggaatagcaccaacatcaacaaaaagttcatctacaccaaaagcccatccataggtcaccaacatcaaagaccaaaggtagataaaaccacaaagatgggagaaaccagagcagaaaagctgaaaattctaaaaatcagagcgcccccttctcctccaaaggatcgcagctcctcgccagcaatggaacaaagctggayggagaatgaatttgacgagttgacagaagcaggcttcagaaggtcggtaataagaaacttctctgagctaaaggaggatgttcaaacccattgcaaggaagctaaaaaccttgaaaaaagattagatgaatggctaactagaataaacagtgtagagaagaccttaaatgacctggtggagttgaaaaccgtgga

SEQ ID NO: 149164 - DNA, 564 bp, Homo sapiens
gggtcaggtttgccatctcacacaactgtttttctcagtgagaagaactttcctcagacagatgctggtttagggaggatgagagacacatggaacagatttggaaacaaccaatagctgaaagccaagttcaggctagataaactgaactaaactttatctccatgtgggtgagtgagaagaagatgcttattttctgccactgagatttsgggggtgagggggacatcatgacacaatattgctatggcaataccagctgaagcacacctacatcggaatcacctagagtgcttgttgtaaatgaggtttctgagccccaatctagacctagtaagtgatcatctctggagtgtttttagaactttgtattttagcaagaccctcagaaaatttttacactcactactgggctacagacaatatttatcagcatgctactttcagtggcaaggaaagagcagtaggttagcacccagagagctactacatttacctacataaaacttctgagggatgtagcactgtaaaaaggacaggaaacgaggttttcttaccaaatca

SEQ ID NO: 149165 - DNA, 532 bp, Homo sapiens
ccttcctgccagttacctctcacagttttttaagttatcatatgatgatttaaaaatgtgtccacaaattctttcacattcttcctccaaagggcagaggctaattcccctcctcctgagtgtgggctggacttgatgattctcttctttttaattaattaaattatttatagagatgaggtctcgctatgttggccaggttggtcttgaactcctggcctcaaacaatcctcctgccttggccttccaaaatgctaggattacaggtgtgagccaccatgcctggccttgatgattctcttctaatgaataaaatacagtgtaagtaagggtatgtgactagcagatcaaaarcatcccgattccccccagcttacactcttggatcactgactctgagggaagccaactaccctattgtgaagctacacaccagctctgaagtgagatccacaagatgattctgtgagccgtcacaaggaatgaaagcctccagacaacagctgcatgagacagttagaaagaggaccct

SEQ ID NO: 149166 - DNA, 532 bp, Homo sapiens
ccttcctgccagttacctctcacagttttttaagttatcatatgatgatttaaaaatgtgtccacaaattctttcacattcttcctccaaagggcagaggctaattcccctcctcctgagtgtgggctggacttgatgattctcttctttttaattaattaaattatttatagagatgaggtctcgctatgttggccaggttggtcttgaactcctggcctcaaacaatcctcctgccttggccttccaaaatgctaggattacaggtgtgagccaccatgcctggccttgatgattctcttctaatgaataaaatacagtgtaagtaagggtatgtgactagcagatcaaaagcatcccgattccccccagcttacactcttggatcactgactctgagggaagccaacyaccctattgtgaagctacacaccagctctgaagtgagatccacaagatgattctgtgagccgtcacaaggaatgaaagcctccagacaacagctgcatgagacagttagaaagaggaccct

SEQ ID NO: 149167 - DNA, 531 bp, Homo sapiens
gcccttcctgccagttacctctcacagttttttaagttatcatatgatgatttaaaaatgtgtccacaaattctttcacattcttcctccaaagggcagaggctaattcccctcctcctgagtgtgggctggacttgatgattctcttctttttaattaattaaattatttatagagatgaggtctcgctatgttggccaggttggtcttgaactcctggcctcaaacaatcctcctgccttggccttccaaaatgctaggattacaggtgtgagccaccatgcctggccttgatgattctcttctaatgaataaaatacagtgtaagtaagggtatgtgactagcagatcaaaagcatcccgattccccccagcttacactcttggatcactgactctgagggaagccaactaccctattgtgaagctacacaccagctctgaagtgagatccacaagatrattctgtgagccgtcacaaggaatgaaagcctccagacaacagctgcatgagacagttagaaagaggac

SEQ ID NO: 149168 - DNA, 505 bp, Homo sapiens
ttcagctttgacaactgactttctatgctaacccatgcttttggtcaaagtagtcattccatcttaaagagtgcttatttgtttcactatgcttttcaaactcaatcttctgtcatttttgctagttgcattccagattttaacttttccarctcccagttgtgtcttttttaacttttactctaattagattttcagtcattgatgtcaattgcatttttacttgtattaagctctgttcttgcctaccttaagacattttgtttgtttgtgtggttgtttatcaagtagaagcttaaaagcctagaaaccaagctccttctattgatgcagcagtctgctaatactggtcccaccataaaagtttgtgggtgaatgagctggtatcacgtacaaatgattgaagtgatctcagtggcactctttcatgttccttcatgatacctttgtgtcattcacttattaacatactgaaaaagtcatttactttttctacttctcttac

SEQ ID NO: 149169 - DNA, 403 bp, Homo sapiens
aaaaccaaaaatgatgggcacctcattttattctatttcacatctcgacaagaatggtacaggccacctcactcatgaacactcaggtctcttagcacaaacggcttctcaaaaagcccttctcttaccaaactaaagtagtatcccctgtcccctgaacctattttattctatttcaagatctatrtactacctgatgttatttgtgtgtgtgtatgtgtacatatataatatttattgactatgtcccccactaaaatttaagctcagacaacacaggctctgttttgttcccactcaatgttgccacactatctgcctacagcaggcttcaaaaatatttgttcaattaataattggttttggttttgttgagaaaatgacaaaaacacaagtagaattc

SEQ ID NO: 149170 - DNA, 603 bp, Homo sapiens
actgtaacgggacgtagctcataaaagtaagtgaaaccccagcacatgagagaaacatacagccaccctctgtgattcacctytccaatggaatccaagaaacccaggaaaagggagggcactttgtttctcctatgccctggggctaacttagagagctaatttacggagaggatctaggagcaacatagtgttctcccttgtccaaaacagtagacactgtcaggaaaagacaccagcaaaaactgtgggcattttcccaaactcaggaccaagagcaggatgccatttttaatctgggcacatacaaagtcagtaattctttagtgacccagcagtgtggctgcacaggcattttagtcctgggccagagcttgggtcacctgctctaaagtagggtaaggacctccagtcagaattatgaaaaggcactggaattatgctgtccctcatcacaggcctagggtgggagaagagctactacagctgtggtttctccagggtaacaagacctgcagccagggccagctcggtgaactggaactcatctgggtatcattgctgggtgttccaactgactcccttgagatcgtggtgcagcag

SEQ ID NO: 149171 - DNA, 516 bp, Homo sapiens
tggtaccaattctacccaattttttccaaaaaattcaagaggaggggcttctccctaactcattctacaaaggcagcatcamcccaagttaccaaagcctgacaaaaacacaacaaaaaaagaaaattacatgccaatatccctgataaacatatatgcaaaaatcctcaacaaaacactagcaaaccaaatcctacagcttatcaaaaagttaattcttcatgatcaagtagacttcattcctaggatgcaaggtgggttcagcttacacaaatcagtaaatgttcaccacatgaacagaattaaaaacaaaaacgacatgatgatctcaaaagacaaggaagagcatttgataaaatccggccttgcttcatgataaaaactctcagaaacaaggcattgaatgaacatacatcaagataataaaagccatttatgacaaacctacagctaacaccatactgaacagccaaaaactagaagcattccccttgagaactgagataaaataaggat

SEQ ID NO: 149172 - DNA, 648 bp, Homo sapiens
catggacacattgagggaaaaacatatactagggcctatcagacggggtagggtaggaggagggaaaggatcaggaaaaataactaatgtgtactaagcttaatacatgagtgacaaaatcatttgtacaacaaacctccatgacacaagttttcctatgtaacaaacatgcacaggtatccttgaacktaaaataaaaattcagtaaatattttttaaaaaaagataaacaggcagaggctatatttttaaatgattttattttattgtggtacaatttataatttcacaaattaatgacaaaataataaattataataaaagtcattcgttttaactttaaaaaatcctattccaacacacacaaaaattgacaagtgggacctaattaaactaaagcgattcttcacagcaaaataaaccagcagagtaaacaacctgcagaacgggagaaaatactcacaaaaaaatgcacctgatgaagatctaatatctaaaatttttaagtacttaaaacagattaacaagcaaaaaacaaataagcccattacaaagtgggcaaaggacatgaacagacacttctcaaaagaagacatacaagtggccaagaagcctgaaaaaatgcttcacatcattcatcatcataga

SEQ ID NO: 149173 - DNA, 648 bp, Homo sapiens
catggacacattgagggaaaaacatatactagggcctatcagacggggtagggtaggaggagggaaaggatcaggaaaaataactaatgtgtactaagcttaatacatgagtgacaaaatcatttgtacaacaaacctccatgacacaagttttcctatgtaacaaacatgcacaggtatccttgaacgtaaaataaaaattcagtaaatattttttaaaaaaagataaacaggcagaggctatatttttaaatgattttattttattgtggtacaatttataatttcacaaattaatgacaaaataataaattataataaaagtcattcgttttaactttaaaaaatcctattccaacacacacaaaaattgacaagtgggacctaattaaactaaagcgattcttcacagcaaaataaaccagcagagtaaacaacctgcagaaygggagaaaatactcacaaaaaaatgcacctgatgaagatctaatatctaaaatttttaagtacttaaaacagattaacaagcaaaaaacaaataagcccattacaaagtgggcaaaggacatgaacagacacttctcaaaagaagacatacaagtggccaagaagcctgaaaaaatgcttcacatcattcatcatcataga

SEQ ID NO: 149174 - DNA, 618 bp, Homo sapiens
ccagccaaactaagcatcataaacaaaggaaaaataagattctttacagataagtaaatgctaaggaaatttgttaccaaaagatctgccttacaaaacatcctgaaggagtgctaaatatggaaaggaaagaccattacagycacaacaaaagcacacttaagtatacagaccagtgacactataaagcaaccacataaacaagtttgcaaaataacccagctaacaaacacgatgacaggattaaatccacacatatcaatactaatcatgaatgtaaacaggcaaaatgccccaataaaaggcacagaatggaaagttggataaacaaggaaaaccaaatagtatgctgtctcaaaagacccatctcacatgcagtgacacccatactttcacagtaaagggatggaggaaaatctaccaagaaaatggaaaacagaaaaaaaagcaatgattgctattctaatttcagacaaaaaaggctgtaagcctacgaagattaaaaaaaaaaaaaaagacaaagaaggacattaccttacagtaaatggttcaattcaacaaaaagacctatctatcctaaatatctatgtacccagcacaggagcacccagattcaaa

SEQ ID NO: 149175 - DNA, 618 bp, Homo sapiens
ccagccaaactaagcatcataaacaaaggaaaaataagattctttacagataagtaaatgctaaggaaatttgttaccaaaagatctgccttacaaaacatcctgaaggagtgctaaatatggaaaggaaagaccattacagccacaacaaaagcacacttaagtatayagaccagtgacactataaagcaaccacataaacaagtttgcaaaataacccagctaacaaacacgatgacaggattaaatccacacatatcaatactaatcatgaatgtaaacaggcaaaatgccccaataaaaggcacagaatggaaagttggataaacaaggaaaaccaaatagtatgctgtctcaaaagacccatctcacatgcagtgacacccatactttcacagtaaagggatggaggaaaatctaccaagaaaatggaaaacagaaaaaaaagcaatgattgctattctaatttcagacaaaaaaggctgtaagcctacgaagattaaaaaaaaaaaaaaagacaaagaaggacattaccttacagtaaatggttcaattcaacaaaaagacctatctatcctaaatatctatgtacccagcacaggagcacccagattcaaa

SEQ ID NO: 149176 - DNA, 618 bp, Homo sapiens
ccagccaaactaagcatcataaacaaaggaaaaataagattctttacagataagtaaatgctaaggaaatttgttaccaaaagatctgccttacaaaacatcctgaaggagtgctaaatatggaaaggaaagaccattacagccacaacaaaagcacacttaagtatacagaccagtgacactataaagcaaccacataaacaagtttgcaaaataacccagctaacaaacacgatgacaggattaaatccacacatatcaatactaatcatgaatgtaaacaggcaaaatgccccaataaaaggcacagaatggaaagttggataaacaaggaaaaccaaatagtatgctgtctcaaaagacccatctcacatgcagtgacacccatactttcacagtaaagggatggaggaaaatctaccaagaaaatggaaaacagaaaaaaaagcaatgattgctattctaatttcagacaaaaaaggctgtaagcctacgaagattaaaaaaaaaaaaaaagacaaagaaggacattaccttacagtaaatggttcaattcaacaaaaagacctayctatcctaaatatctatgtacccagcacaggagcacccagattcaaa

SEQ ID NO: 149177 - DNA, 437 bp, Homo sapiens
caagtaaggtgggttcaacatatgcaaatcaataaattattcatctcaaaaaaggaactaaaaacaaaaaccatttgatctcaatagatacagaaaaggcttttgataaatttcaacatcccttcctattaaaaactctcaagaaattaggcattgaagaaacatacttcaaaataataagtcatctctgacaaacccacagtcaacatcatactgaataggcaaacattgaaagcatgccccttgagaactggaacraggaaagagtgaccattttcaccattcctattaaacatagtattggagatcctggccaaagcaaacaggcaagagaaaaaaataaaaaacgcatcctgacaggaaaagttgtcaaaactagctatcttcactgataaaatgattctatacctataaagccctaaagaccccaccaaaag

SEQ ID NO: 149178 - DNA, 578 bp, Homo sapiens
tagattttgagaggctcttattggaaacgttttttcagaaagtcagctaacacagactgttgaaagagctgtgctgatgaaatctgaaattgagcccccttaataaaaagcattycccgtatataaaatagattttttcagaattgaacaatgaaaatatacacacgatacaactaagttttttactatctctagtgaggagaaatttaatctggccaagaggtgatggagtaaaaattttaataggtacatttcctagtgatggttatcatatgtgtttccttacaggcatctttagcacactctgcatatataataaagttgttatctgctgcaataatgtaaaaagttgcatcaacttctagaaggcctatcactgtgacttgtatggggtcagtactgaacaagtattgctgaacaaaacagaaatctaaaatctatttttcatcatttctcattacaaaagggaatgacataaaaataatgtgtttatgagctacacaataaattaatgagatgtttctataggtatacaaaaatttatataccgaaataagtcctgtctttgagcgtgttca

SEQ ID NO: 149179 - DNA, 578 bp, Homo sapiens
tagattttgagaggctcttattggaaacgttttttcagaaagtcagctaacacagactgttgaaagagctgtgctgatgaaatctgaaattgagcccccttaataaaaagcattcyccgtatataaaatagattttttcagaattgaacaatgaaaatatacacacgatacaactaagttttttactatctctagtgaggagaaatttaatctggccaagaggtgatggagtaaaaattttaataggtacatttcctagtgatggttatcatatgtgtttccttacaggcatctttagcacactctgcatatataataaagttgttatctgctgcaataatgtaaaaagttgcatcaacttctagaaggcctatcactgtgacttgtatggggtcagtactgaacaagtattgctgaacaaaacagaaatctaaaatctatttttcatcatttctcattacaaaagggaatgacataaaaataatgtgtttatgagctacacaataaattaatgagatgtttctataggtatacaaaaatttatataccgaaataagtcctgtctttgagcgtgttca

SEQ ID NO: 149180 - DNA, 556 bp, Homo sapiens
agagttatacatttaattattttatttcttctgaattttttcttgcctaaaattctacaaacttgtagagaaaaatttctacaaatttagaaatacagaaatcatttatgaaaactgtttttcctcctaaatatgcaaatgtttataaagtattcataataygatattaaaatgtctatagattaaggaaatgtttcaagaaattgtattaattagaaaataatgggtgtctttttaaaaattttctgatgaggtataaaatggtagtattgttgtgtttaaaataaaacactatataatctctccagttcacctggacattgagaaaaacaacacacctacttatatagaattatttgagaatgatgtaataaaatgctatgaaattaatttaccatattcttttataaatttaacacaaatagagaaaaattgttgatattaatttcaattaaattcagaaatggtgaatattttattgatatagtttttgaactcactttttatttcttaccaaaataatcatagtgatgataatattaatacattgattttt

SEQ ID NO: 149181 - DNA, 556 bp, Homo sapiens
agagttatacatttaattattttatttcttctgaattttttcttgcctaaaattctacaaacttgtagagaaaaatttctacaaatttagaaatacagaaatcatttatgaaaactgtttttcctcctaaatatgcaaatgtttataaagtattcataatatgatattaaaatgtctatagattaaggaaatgyttcaagaaattgtattaattagaaaataatgggtgtctttttaaaaattttctgatgaggtataaaatggtagtattgttgtgtttaaaataaaacactatataatctctccagttcacctggacattgagaaaaacaacacacctacttatatagaattatttgagaatgatgtaataaaatgctatgaaattaatttaccatattcttttataaatttaacacaaatagagaaaaattgttgatattaatttcaattaaattcagaaatggtgaatattttattgatatagtttttgaactcactttttatttcttaccaaaataatcatagtgatgataatattaatacattgattttt

SEQ ID NO: 149182 - DNA, 473 bp, Homo sapiens
tccataaagactaatagaaggaagaatcagagtggggttttgagagatgaatggaactttatatcatacaaaaggtgaaaattgtattcagcaggataagcacttacataggcatgaaaagctgcaatagttgctaggaaaccactagtagtttgttattttttgtaatataaacaagagcagtggtgtaaggtccaaaggaagacagggatcatctcacgaagggccttgtgtgtcacgctcatgaacttgaattccagccaatggtcgactcagggtcatcagttaaggagttttacaaggaaaatcatactcagatagcaactttaaacgttcrcatttaattggcattaatattgatgagaaatataatattactattatcactttaaaaaattattgctaatttttacattgtatgaagacaataaaattatacattaaaatgaccattttttttcctatgtgtaagg

SEQ ID NO: 149183 - DNA, 641 bp, Homo sapiens
cacttctgttttcatcctttaaggagaggggaaatatgatgaaggttttggtgagatcactgcctttttaattcctaaggcagctttcaaattgtccgtaattacaaagaaaagctagggaaaacattgctattttaaatgtaaatttaattttctgacccagaggtctatgtctaccattgatggtagaatgtttacttctgactaaacttataattgaaattgttagtttggttggcttacacagtaaaaaaagatgtatttgtgaccttgtcattatgtttaaatactatatcagtttatttatattttatcatgtctagttatgacataaaaatgacatttatatccatacatggcctactctaacagaaaagcttccttgctattatttakattatattattgtcaaatatattgatggtaaagtggggttggaacgtgtaaggagtggaagagtgaagtgacagtggctgtttggaaaccattgttttttccttggacaaaattactttcacactgtcacaggagaattatcaacctggaggtaaaatgagtataccttttgccttcagttaaaaaaaaatcacgtctttcttcttcttcatgctacatttgtgcaatcaaatttgtttaaagag

SEQ ID NO: 149184 - DNA, 641 bp, Homo sapiens
cacttctgttttcatcctttaaggagaggggaaatatgatgaaggttttggtgagatcactgcctttttaattcctaaggcagctttcaaattgtccgtaattacaaagaaaagctagggaaaacattgctattttaaatgtaaatttaattttctgacccagaggtctatgtctaccattgatggtagaatgtttacttctgactaaacttataattgaaattgttagtttggttggcttacacagtaaaaaaagatgtatttgtgaccttgtcattatgtttaaatactatatcagtttatttatattttatcatgtctagttatgacataaaaatgacatttatatccatacatggcctactctaacagaaaagcttccttgctattatttatattatattattgtcaaatatattgatggtaaagtggggttggaacgtgtaaggagtggaagagtgaagtgacagtggctgtttggaaaccattgttttttccttggacaaaattacyttcacactgtcacaggagaattatcaacctggaggtaaaatgagtataccttttgccttcagttaaaaaaaaatcacgtctttcttcttcttcatgctacatttgtgcaatcaaatttgtttaaagag

SEQ ID NO: 149185 - DNA, 513 bp, Homo sapiens
acactctggggactgttgtggggtggtgggagggggatggatagcattgggagatatacctaatgctagatgacaagttagtgggtgcagsgcaccagcatggcacatgtatacatacgtaacaaacctgcacaatgtgcacacgtaccctaaaacttaaagtataataataaaagaaaaaaacacttaaaaaaaaactaatacagaaactttacctgaagatttactttgatccatatacctaaaggcaacctccttcaactctgaacagccttaaaataataattactactgttcttatcacgttttacccaaattataattaccttctacacatatatcatccttgtcatacaggaacgttcactgagaatatgaaccatttttaacttatctttcatcacagcccccagtacagttccctattaatgaattcaagaactatgagacaatgattaaacaatttacaataaaacaaataacccacatcattagaaaacgtttttttctttt

SEQ ID NO: 149186 - DNA, 513 bp, Homo sapiens
acactctggggactgttgtggggtggtgggagggggatggatagcattgggagatatacctaatgctagatgacaagttagtgggtgcagcgcaccagcatggcacatgtatacatacgtaacaaacctgcacaatgtgcacacgtaccctaaaacttaaagtataataataaaagaaaaaaacacttaaaaaaaaactaatacagaaactttacctgaagatttactttgatccatatacctaaaggcaacctccttcaactctgaacagccttaaaataataattactactgttcttatcacsttttacccaaattataattaccttctacacatatatcatccttgtcatacaggaacgttcactgagaatatgaaccatttttaacttatctttcatcacagcccccagtacagttccctattaatgaattcaagaactatgagacaatgattaaacaatttacaataaaacaaataacccacatcattagaaaacgtttttttctttt

SEQ ID NO: 149187 - DNA, 513 bp, Homo sapiens
acactctggggactgttgtggggtggtgggagggggatggatagcattgggagatatacctaatgctagatgacaagttagtgggtgcagcgcaccagcatggcacatgtatacatacgtaacaaacctgcacaatgtgcacacgtaccctaaaacttaaagtataataataaaagaaaaaaacacttaaaaaaaaactaatacagaaactttacctgaagatttactttgatccatatacctaaaggcaacctccttcaactctgaacagccttaaaataataattactactgttcttatcacgttttacccaaattataattaccttctacacatatatcatccttgtcatacargaacgttcactgagaatatgaaccatttttaacttatctttcatcacagcccccagtacagttccctattaatgaattcaagaactatgagacaatgattaaacaatttacaataaaacaaataacccacatcattagaaaacgtttttttctttt

SEQ ID NO: 149188 - DNA, 510 bp, Homo sapiens
aagaaaccaataatgagtaaggagactgtgatggtaaatttaatgtgtcaacttgactggcctaagagatactcagatggctggtaaaatattatctctaggcatgtctgtaaggaagtttccagaagagattaccatttgaatcagtagagtgagtaaagaagatttgcctttaccagtgtaaatgggcatcatgcaggccattgaggacctggatagaacaaaaargtagagaaagggcaaactcagtctttcttctggagctaggacattcatctttttctgtcctcgaatataattgttccaggttctcagaccttcagactctgggactccaaagtgagcactccaccccactcaagttctcaggccttttgaactgggctaaaaggtacagtattgggtcccctggttctcaggcctttggactctcatttaattatacattggcttttctagttctccagcttgcacagagcatattgtagaactttctggactccagaattc

SEQ ID NO: 149189 - DNA, 580 bp, Homo sapiens
gggttcttcatgctattgcgtgcatttggattcattagttttcactgctgtaacatattaacatatttcattttctgaatgtactgtatttttttaatccatgtttctattgatacccactagygtcattactagtattttgttaagacaaccgatcctgctaagaacagtcttttatatgtctcatggtatatggttttcccaaatgtttttacaagcaactgtttatgaattcttaacccacacctctctaatacttgatattatgaaatttcaacatttttgactacttattagacatcaaatggtataaaatatggacttactttgaatctttctatttattaggtttgagcatatttatgttttaccatgggttttcccttaggtaaatacctattaatatgcattgactatttcataaaatatatacatacttacacatattttaatttgtagaagtcctttatatattttgattactaatcacttgtcagttatatatgtccagatctttttcctcagattttagtatgtacatttttatgctgaattttaaataagagttattaatatgaat

SEQ ID NO: 149190 - DNA, 577 bp, Homo sapiens
tcttacagtaccgccatcatcgctcagttcctgggaataaaagctccacgcttggctacgatgcatatatcctcctcctccatcttggccacgcattttactgaatgaaatttttgggtgagattagctctgtcagtaaatctgtttgcaatagaggttccaaagtcagatggcatgaattcaaatctagattccacatcgtaatatctctgtgcctttgagcaagagaggaatagctctgtgatttagcttccttgactttagattgaggataacaacaggaattccctcatagattgytgtaaagatcaaataaagtaatatacagaaaacagttgaaactatgcttgcctgatagtaagaactcaatacattttctatattattttttgttattattatctagagtttagttattatcctgtaccactcttgtgggtataactgaatactgagtttaccctttccagctttgactgggtcacaaaatgagaatatgaataccgaattgtcatattcattttaccctgaggaactgaaaaagtgaagagcagaaaggaaatgattacatttttta

SEQ ID NO: 149191 - DNA, 511 bp, Homo sapiens
tcttaaatacaaaaacaaatatgaaatactaaatggagaatgagaatagaatgatttaggatttttaaaaatattaaaataaaactattactgtatttgtggctgtttttaaaagtataacattttaaaagtagataaatagaattaattctcctttacaaacattatattcctgagcactgatctggaaaaagatagacaaagtaagaagccacggagatataatgaccactttggtgccaataaaatgtatcactaaagagaaccataggagcgtaaawccctttagagccagttgaaagtgaatgttgtttttttcccttcatccatgagtcccaacacagcttacctttcttccaggtagaactatgcagtcacaaaaccaaggcaagatatgaatacaaatataagttctatattgtggtagtgtgatgtgattgcatttcatacagcaaagggggagaaaactataacaaaagttgatattgcttttctaccatgacaattacca

SEQ ID NO: 149192 - DNA, 511 bp, Homo sapiens
tcttaaatacaaaaacaaatatgaaatactaaatggagaatgagaatagaatgatttaggatttttaaaaatattaaaataaaactattactgtatttgtggctgtttttaaaagtataacattttaaaagtagataaatagaattaattctcctttacaaacattatattcctgagcactgatctggaaaaagatagacaaagtaagaagccacggagatataatgaccactttggtgccaataaaatgtatcactaaagagaaccataggagcgtaaatccctttagagccagttgaaagtgaatgttgtttttttcccttcatccatgagtcccaacacagcttacctttcttccaggtagaactatgcagtcacaaaaccaaggcaagatatgaatacaaatataagttctatattgtggtagtgtgatgtgattgcatttcatacagcaaagggggagaaaackataacaaaagttgatattgcttttctaccatgacaattacca

SEQ ID NO: 149193 - DNA, 565 bp, Homo sapiens
cctacaccttgagacatattagggaaagcacaatagagtggggagatatggaaagcatttgattaacagtggaaggctgaataaagaggtgtttacctattcttactacaatcagtgacaagaaaacagccattctttcatgtaacttcatcttttattaacactggaaaagacatcttgcagcagcaattaccatttaacacaaaattttaaggacagcagaaaattttagggwacaaaagatttccctttggattttattcttttagtatatgtgcttggagacaacaaactgtaaagaggagtaatgtaaatctgtccaaaccagaacatttgcagttttactttaatgccaaaaacagtgcctttgttcaatgacacctgaacatcagtttatgtaaaggcttagcaggtggattagcagatggtagtcagaattcccaagtttaccactaatattcattacttcatcaaaaccaagatgaaaaaaaaaaactatttaaaagacaaggctaagcatatatcaagtcctattatgtagactagtgagctaaattttgcattc

SEQ ID NO: 149194 - DNA, 622 bp, Homo sapiens
atttcttataggtcaggtctgctagaaacagattctctcagatattgtctatctgcgaacatcttaatttctccttaatttttcaattagttttagtggatgtagaatttttggttgatagtctttctttctgcacttcaaatatatcatcctactgcttttttgcctccatggtttctgatgagaaattgactgttaactttttgaagatccctgtatgtgaagattcacttctctgttggtgatttcaattttttttttgttttttttgtctttgactttcaatatgtgtctaagatgtgaatctctttgaatttatcctgcttgggttttgtggaggttcttggataaatgttaagatttatgcttttcatcaaatttgggaatgtttgtgaattttttgaacatttttctgcctgttgtttctcctttccttcaaagattcccattaagtgtatgttagtatgcttgatcatgtcccacagatctctgargctctgttcatttttattcatttaaaaaaattctggccgttgtattgaataatattaattgacctgtctttaagttcacagattctttcttctgtctgttcagagctagtgctgagtagtatttaaaa

SEQ ID NO: 149195 - DNA, 622 bp, Homo sapiens
atttcttataggtcaggtctgctagaaacagattctctcagatattgtctatctgcgaacatcttaatttctccttaatttttcaattagttttagtggatgtagaatttttggttgatagtctttctttctgcacttcaaatatatcatcctactgcttttttgcctccatggtttctgatgagaaattgactgttaactttttgaagatccctgtatgtgaagattcacttctctgttggtgatttcaattttttttttgttttttttgtctttgactttcaatatgtgtctaagatgtgaatctctttgaatttatcctgcttgggttttgtggaggttcttggataaatgttaagatttatgcttttcatcaaatttgggaatgtttgtgaattttttgaacatttttctgcctgttgtttctcctttccttcaaagattcccattaagtgtatgttagtatgcttgatcatgtcccacagatctctgaagytctgttcatttttattcatttaaaaaaattctggccgttgtattgaataatattaattgacctgtctttaagttcacagattctttcttctgtctgttcagagctagtgctgagtagtatttaaaa

SEQ ID NO: 149196 - DNA, 554 bp, Homo sapiens
tatgggctgctttttccttccagtcttgaatattatttattttttaaaacagctttaacaatatagctgacataaaataaattgcatatattttaagtgtacaaattgatgagctttgatgtatatctacacccattggtatggaccatcaccacagcaggagatttaatatatccatcaacattcccaaaacttttctcatgtagatgggctgcatttaagtgaagttttagcaaagaggttgattctttagaacttaaagaattctggagtccttgggggtaggttccaagatggccaaataggaacagctccagtctacagctcccagcatgagcgacacagaagacaggtgatttctgcatttccaactgaggtactgggttcatctcactgggacttgttggacagtggrtgcagcccacagagtgtgagctgaaggagggcggggcatcgcctcacccgggaagtgtaaggggtcaaggaattccctttcctagccaaggaaagctgtgacagatggtacctggaaaatcgggacactcccacactaa

SEQ ID NO: 149197 - DNA, 554 bp, Homo sapiens
tatgggctgctttttccttccagtcttgaatattatttattttttaaaacagctttaacaatatagctgacataaaataaattgcatatattttaagtgtacaaattgatgagctttgatgtatatctacacccattggtatggaccatcaccacagcaggagatttaatatatccatcaacattcccaaaacttttctcatgtagatgggctgcatttaagtgaagttttagcaaagaggttgattctttagaacttaaagaattctggagtccttgggggtaggttccaagatggccaaataggaacagctccagtctacagctcccagcatgagcgacacagaagacaggtgatttctgcatttccaactgaggtactgggttcatctcactgggacttgttggacagtggatgcagcccacagagtgtgagctgaaggagggcggggcatcgcctcacccgggaagtgyaaggggtcaaggaattccctttcctagccaaggaaagctgtgacagatggtacctggaaaatcgggacactcccacactaa

SEQ ID NO: 149198 - DNA, 486 bp, Homo sapiens
ttactttacgattaaaaccctcagcaaaatcagcatacaaaggacatacctcaaggtaataaaagccatctatgacaaacccataaccaacataatactgaatggggaaaagttgaaagcattccctgtgagaactggaacaagacaaggatgtccactcttgccattcctcttcaatatagtactggaagtcctagccagagcaatcagaygagaaataaataaagggcatccaaatcagtaaagaggaagtcaaattgtcacttttgctgatgatatgatagtttacctcaaaaactttaaagattattccagagagttcctagaactaataaaagaattcagcaaagtttctggatacaagattaatgtatgaaaattggtagctcttctttacaccaacagtgaccaagctgagaataaaatcaactactcaaccccttttacaatagctgcaaaaaaatacttaggaatatacctgaccaa

SEQ ID NO: 149199 - DNA, 441 bp, Homo sapiens
gagaagctgaaaatgctggaatttggacttggtctcaacagagtaaaataacatgcaatgccttctttccaggtaatttcattatcacctcagtttgttgaattgtcttcatgttcttgtactaaggacagtggtgctaaattaatggatggaatactaacaatgttttggttaagtcaagctttgttgaagatttcaaacaaattctagccttgttccaactctgattttgaattttataaaaaatatattagtctactctcccttcttggcaatataactgtaaacattgacttttaaaaaaatagcctatatatggatttttaaacaaaatgtattttatgaaaaaaagcttaattatagaagacatggaaaataaagacatgtaaagatgaaaatttytcacatagcacacaacacaaacactattattttggggtc

SEQ ID NO: 149200 - DNA, 410 bp, Homo sapiens
ttgtatggcaacttcctgccatgcataattattttgcaaaagcgtatcaggtcagagatgaagcaaagaatgggggaaagagtccatggtgacctcaggcagatttttttactactacaaatcagttggatagttattaccacctggcgctgctaatgagtctagtcgggaaaacaaagctgcyaagcattccacagcagactgcactgcagtccaggactgggggagtcttttggggtctgctgagcatctgaaaatacattttaaggtgttctggttattaaagaaatcaaacttcttagtttcttatttttaaaagaaatacgttgctaaaaagcattatctgttgttgattcttttgtacttctgtaaactatttttctgtattcataaaataattctaaaacctt

SEQ ID NO: 149201 - DNA, 563 bp, Homo sapiens
taaaaatataaactttgtttctcaaaaaaactccatcaaggtcaagacacttttgtaagtgatgatatcagccattttagtccatacctaaagaactgacatttctgagaatttaaccacatcaatgaagtctttctttacactattaagtgaaggaaaataagtgtcctttagagactttttaagattagaaaacaaaaagtaatcagaaatagccaaatcaygactggaacatgaatatctaatgatttccccctgaaaactcttgtttgatgagaggaattagcaggagcattgtcatgctggagaaggactctttggtgaagatttttctgggcatttttctgctaaagctctagctccttttctcaaaacactctttaataaacagatcttattgttctttggccctctagagagtcaacaagcaaaatgccccaaaaaactgttgccatgacctttgctcttgaccaatttgcttttgctttgattgaaccacttccacctcttggcagccattcctttgattgtgctttgtcttcagaattgtactggtaaagcca

SEQ ID NO: 149202 - DNA, 563 bp, Homo sapiens
taaaaatataaactttgtttctcaaaaaaactccatcaaggtcaagacacttttgtaagtgatgatatcagccattttagtccatacctaaagaactgacatttctgagaatttaaccacatcaatgaagtctttctttacactattaagtgaaggaaaataagtgtcctttagagactttttaagattagaaaacaaaaagtaatcagaaatagccaaatcatgactggaacatgratatctaatgatttccccctgaaaactcttgtttgatgagaggaattagcaggagcattgtcatgctggagaaggactctttggtgaagatttttctgggcatttttctgctaaagctctagctccttttctcaaaacactctttaataaacagatcttattgttctttggccctctagagagtcaacaagcaaaatgccccaaaaaactgttgccatgacctttgctcttgaccaatttgcttttgctttgattgaaccacttccacctcttggcagccattcctttgattgtgctttgtcttcagaattgtactggtaaagcca

SEQ ID NO: 149203 - DNA, 548 bp, Homo sapiens
catcctgtttaagtcaactccagaagatgaaaagacagaatttttgtcattatttattttatgctcagactctttgctgaggccataagtaccaaatggtctctgtactcccggtaatatacaagacacttacagaagctaatgtaagtcaaaaaatgcctataaacttaacagagtgtctgagacaagcatggattatgacaaagacatagtctggggaccttcctattgttttagtgaaacgtatagtcttcatttgtgaaagaaaaccctatttctgcttttaaataggcactatgtattccactactaggtttagagattgtgtattgtcaaaaaggatcatatatgaactcatatgctgacattgcactttttctttagtagaacattaattcccttctacctccccttaaaaagaacagttgaataaaaacacaaatcaaaaatatattgtgcytttaagttggaaaaccaaatttccacttctcactcttgtataatgctgaatattatgcatttcttttaccttgaagataaacaggtgt

SEQ ID NO: 149204 - DNA, 382 bp, Homo sapiens
atcaagtttggcccaaatatcctaatctctctcttttgttatactgtcctgaagtcatataaggtctgggctttcttctttcaaattctcagtttcttgttcagtctccgatcattcataagcccattcatccattccacatgtgtttttgagctcctactgtgtgcaaggcactaaatatacataagtatgtactccctccccatgtgtaggttacaatctgtgggtgataccaatgataaacaaataaatatgcaactacaagtgattatacatgctctgaagggaatgagtagcgaacactgatggtcaaatagagaaggcctctcyggggtgacatttaagccacagtctgcaaaatgagaaacatacagagctttcc

SEQ ID NO: 149205 - DNA, 547 bp, Homo sapiens
aagtggatacatgtcattatacatttgtccaaacctatagagtatatcccaccaacagtgtgaaccttcatgtaaactatggactttgagtgataatgatgtgtcagtgtaggtccgttgattgtatcaaatgcaccactctgggcagaggggggattttaataaagaggraaactgcatgtgttggggtggggatatatggaaaatatctgcatcttcctctcaattttgctgagaaaacttttcataagcagtttgctccgagtgacggtttaataatagctaactttgctgccttcttactatatgtcaagtagttatacaccttgtcacatttaatcctgaacacaatcctataaagtaggtactatcattaccagcatctctgtttcacagaggaggaaatgaggtttgaagagattgagtaacttaccaaaggtcactgtcataatggacagatcccaggatgtcatcgttatgccatgctctctcaggccaccaacccaactgaagtcagtgctttgtcacagggacgttgtaacttatg

SEQ ID NO: 149206 - DNA, 561 bp, Homo sapiens
taaaaaaatgttctgacacagtaatggctatcataagattgaattattgtagtaataccataaaatgtaataatggtgagtgggattagcaacaggaaggattagaagaatgtcataataatgttgaggtaaactgagttaaaaagatttgctgtgatttcatgatcatgatctaggtgattaagtatacctgcatattgctaaaagtaggcaatactgaagagtcatacaatagaataaggtataacttccaagccaattgaactactatttaaaaagtcaccattgagaagttagtaatttaaataattcccaatatctggaattcagattktactctggccaaattctaacttctctacatatattaaatgaactaggtgacgggcatcggggcaaccagaaaacttgtaaaatcttttagttcaagggtagaaccatcagacacctgactgtgtgagctactaaccttctgattcaaatgtatgatgcaattaaaaatatcctgggaaagcatttagaatttaaggtgattaatgaaatagtctattatttagatct

SEQ ID NO: 149207 - DNA, 561 bp, Homo sapiens
taaaaaaatgttctgacacagtaatggctatcataagattgaattattgtagtaataccataaaatgtaataatggtgagtgggattagcaacaggaaggattagaagaatgtcataataatgttgaggtaaactgagttaaaaagatttgctgtgatttcatgatcatgatctaggtgattaagtatacctgcatattgctaaaagtaggcaatactgaagagtcatacaatagaataaggtataacttccaagccaattgaactactatttaaaaagtcaccattgagaagttagtaatttaaataattcccaatatctggaattcagattttactctggccaaattctaacttctctacatatattaaatgaactaggtgacgggcatcggggcaaccagaaaacttgtaaaatcttttagttcaagggtagaaccatcagacacctgactgtgtgagctactaaccttctgattcaaatgtatgatgyaattaaaaatatcctgggaaagcatttagaatttaaggtgattaatgaaatagtctattatttagatct

SEQ ID NO: 149208 - DNA, 558 bp, Homo sapiens
gcttctgttattccttaataaattttaggtatcatacatataaccactgaattcagaaaaggtgataatgcctaacttgacagaacattgtagaccaatccattaattatacagctgcccccaaacactcctctaaaagcatcactgatgtgatwtttctgctgagaaaatttggaaatggtttaagtcatattatattatggtcaaaattacctgtaatcattatttgccaaaatgtgtcctacaaaaactgcaaattttaaattttgtataaaatattacattattcctttcaaaatacaatgccactttcaacagaaatagaaaaatgaaattattctaaaattcaaaaaagagcccaaatagccaagtcaatcctatgcaaaaagaacaaacccgaggcatcatattacctgattttacactatactataaagatatagtaaccaaaacagcatagtattggtacaaaagcacacatacagaccaacagaacagactagagagcccagcaataaagtcacatacctacaaccacctgatctgcaacaaagttga

SEQ ID NO: 149209 - DNA, 554 bp, Homo sapiens
gactctgtatgggggctccaaccccacatttcccttccacactgccctagcagaggttctccatgagcaccccacccctgcagcaaacttctttctggacatccaggtatttctgtacatcctctgaaatctaggcagaggttcccaaactccagttcttgacttctgtgtagtcacaggctcaacaccacatggaagctgccaagacttgggccttgcaccctctgaagccatggcctgagctctatgttggcccctttcagccacaactggagcagctgggacacagggcaccaagtccctaggctgcacacagcccagggaccctgggccccaccctgccatctcctaggcttctgggcctgtgatggcaggagttgctgtgaagacctctgacatgccctggagacattttcctcattgtcttggtgattagaatttgaatcmtcattacttatgcaaatgtctgcagccgacttgaatttctcctcgaaaatgggattttcttttatgctttgctttccttataaaactgaatgcctttaacagcaccc

SEQ ID NO: 149210 - DNA, 476 bp, Homo sapiens
cagaaacaccatcaattgcaagagacatattagagcagcactggttatgcaagtggtgaactctactgagatccattgcttaacccttccttagccttgaagtatcctgagttaatctctagtttctctttcttgagatctgttcatgcctgcctggtcttcctttggttaggatcttttcttaccctttatatttctcaagtggtgaggttgaaatgttccgtgaactgtagcacaggtgtttatttaatcatccacatggtttcctcagagtctttcaatcttgacttgggatgaataggttacacctcaaatttctttaaagtyagtggaggcggcacagctctctccaaggaaatcgtcttcaaatatcatccaatttcttattttctaaaagtgggtgagggatttaaaggttatctaattttttaaaaagtttctcagatttctctaaaatttgcatcgtatttgaaatg

SEQ ID NO: 149211 - DNA, 566 bp, Homo sapiens
tggtacagtcgattcctactgctaattaagcagaatttcactcccatgcacatgatctgcaaatgacatcaatttattggctatactaaaaattcaatatattggtgttctgtttccacagtcttttcttaacatattaattcttagggcaatawaatgttctcatggtacctacaaaataagacaaattatttcatctctctcattctcatgttgtctcaactaattcattaacagaggtaaattgggagcaagactgagtcacaggcttaaaattagtatgttgagctggcatgactcagaaattccaagatgaaagatgtttaaccataattagcctttgggaagcatgagttacatagattttcaggggaaaaaaaatgtgaaagatgttgaaatgggcaagagagagaaaaaaaaatattactttcctaagtagggtacctctccctaagtgctatcggctacttaacaactctgttgtagaagaccagtttttatcttttatcttttattttcttgagactgagtttcactcttttcgcccaggctggaatacgatggag

SEQ ID NO: 149212 - DNA, 566 bp, Homo sapiens
tggtacagtcgattcctactgctaattaagcagaatttcactcccatgcacatgatctgcaaatgacatcaatttattggctatactaaaaattcaatatattggtgttctgtttccacagtcttttcttaacatattaattcttagggcaatataatgttctcatggtacctacaaaataagacaaaytatttcatctctctcattctcatgttgtctcaactaattcattaacagaggtaaattgggagcaagactgagtcacaggcttaaaattagtatgttgagctggcatgactcagaaattccaagatgaaagatgtttaaccataattagcctttgggaagcatgagttacatagattttcaggggaaaaaaaatgtgaaagatgttgaaatgggcaagagagagaaaaaaaaatattactttcctaagtagggtacctctccctaagtgctatcggctacttaacaactctgttgtagaagaccagtttttatcttttatcttttattttcttgagactgagtttcactcttttcgcccaggctggaatacgatggag

SEQ ID NO: 149213 - DNA, 538 bp, Homo sapiens
tttttcattggttgatagtcaacactaatattagaaggagtaaaaatatctgtgcaatataataatcttacttacatttttatctctgaatgcagcaatattttgagaataacatttttgccattgtcattccaattatgtgctaatgaagcatatttattttgaattttccaaagtaaccttattttccatactcttaaaatatccacagktaaagcttagtgtttttttttaatttcttaaatattttattattgttctcaaccaataagatatttttatgtttatgatgcttacaaattaaaaacgatttgagatgtagtaatttgttaatcctcatatctaattttgtatctatagctaaaatatgagaaaaagaaatagagaaaataataaaagacaagagttttacaatctgttcaaatgctaagcacctaaattctctaattcaaagtaaggtcatagtccataaataaaacctctttctcttgagcctttaatatataccaaagtatgctggcaagaagtaaactacacc

SEQ ID NO: 149214 - DNA, 538 bp, Homo sapiens
tttttcattggttgatagtcaacactaatattagaaggagtaaaaatatctgtgcaatataataatcttacttacatttttatctctgaatgcagcaatattttgagaataacatttttgccattgtcattccaattatgtgctaatgaagcatatttattttgaattttccaaagtaaccttattttccatactcttaaaatatccacagttaaagcttagtgtttttttttaatttcttaaatattttattattgttctcaaccaataagatatttttatgtttatgaygcttacaaattaaaaacgatttgagatgtagtaatttgttaatcctcatatctaattttgtatctatagctaaaatatgagaaaaagaaatagagaaaataataaaagacaagagttttacaatctgttcaaatgctaagcacctaaattctctaattcaaagtaaggtcatagtccataaataaaacctctttctcttgagcctttaatatataccaaagtatgctggcaagaagtaaactacacc

SEQ ID NO: 149215 - DNA, 569 bp, Homo sapiens
gtagtcaactaagggaaactttaagggcatcttggttctaggcaaatattaatatcctagcaatcccatctttaaaaacaaatcttgcaaattttatagattatgtagtcctcatgaatgagagacgcataaaatttctctgctggtatctgttattgcctcttcaaattacagatattataaatacaratagtatctatagtttattaagcacaatatcatttgtgtcattaccacatatctgtcaaatattttgtttccatcattggccattggggattttttgttatgattctgactagttttaaatagagtagacaggtgacaagtttttatatttggaaagtttaataaacaaagaaaatatttgaatcaaagttttaaagtcgcagggtgtggtggctcatgcctgtaatcccagtgctttgggatgctgaggtgggtgtatcacttgaggtcaggagttcaaaaccagcctggccaacatgatgaaacctcgtctttactaaaaacacaaaaattagccgggtgtgttggcgtacacctgtaatccccgctactcagtagga

SEQ ID NO: 149216 - DNA, 365 bp, Homo sapiens
aaatgaattttttctttgtccaaagcaatgcaattttgtaaaagtgcttaatcattttctgtatatgattgtgcaaagaaaattataatttcagtaaaattaaataagttagtgacattttcataacattgatacctagactgatgagattttttatgtttcttgctcatattacwcttttttaatgaatctggtaaagtctctaatataacaaggtaattgaaggattttgcaccttctccactccttgattttatacagtagaaaataaaaaaaaaattgaaatagttgctctaaaacataatatgcttatttcagtagtcctatcttattttaggtccttaaaaagtgggttattgacctac

SEQ ID NO: 149217 - DNA, 415 bp, Homo sapiens
aaagtttatatcttatttaagttacattaactttaagaaatgaattttttctttgtccaaagcaatgcaattttgtaaaagtgcttaatcattttctgtatatgattgtgcaaagaaaattataatttcagtaaaattaaataagttagtgacattttcataacattgatacctagactgatgagattttttatgtttcttgctcatattactctttttwaatgaatctggtaaagtctctaatataacaaggtaattgaaggattttgcaccttctccactccttgattttatacagtagaaaataaaaaaaaaattgaaatagttgctctaaaacataatatgcttatttcagtagtcctatcttattttaggtccttaaaaagtgggttattgacctactcagaaaactact

SEQ ID NO: 149218 - DNA, 390 bp, Homo sapiens
cttatttaagttacattaactttaagaaatgaattttttctttgtccaaagcaatgcaattttgtaaaagtgcttaatcattttctgtatatgattgtgcaaagaaaattataatttcagtaaaattaaataagttagtgacattttcataacattgatacctagactgatgagattttttatgtttcttgctcatattactcttttttaatgaatctrgtaaagtctctaatataacaaggtaattgaaggattttgcaccttctccactccttgattttatacagtagaaaataaaaaaaaaattgaaatagttgctctaaaacataatatgcttatttcagtagtcctatcttattttaggtccttaaaaagtgggttattgaccta

SEQ ID NO: 149219 - DNA, 433 bp, Homo sapiens
attataatggcacgtgtttccaaagggtcttacagattctaagaaatgtcatcagttttaaaactgtcatcagttttcaaagatattgtttttccaatgttatacatctttcacagagcactaacataattttmagtttactcatgtggaaacttagacacagaaggataaaaagcagtgagatatctaacaattctaatactagcatctaaaattgactgctttgcacttacatacatgattattaatcctgagactctgcgaggaggtattattatctcttattaacagctaagtattattatacttacgaaggattacaggcaaagaagggtaggtaatttggccaaggtcaccccattataatggtaaagctagagttcaaaccaaagtcttttttactctaaagaccatgctttttccattattcatt

SEQ ID NO: 149220 - DNA, 610 bp, Homo sapiens
accccaattaaatgtcattctaaaaaataatttagttaactcaattattctacaaaataataataaaatcatcaaagtcaagaaaaatgcaggctgtggaaatgtcctagatagattgaaactaaagagacataagaacttccatgctcctagaatagatcctgaaccagggaaaagccataacasatactggataggaaaactgatgaaatctgaatagccggtagattagataatagcattatatcaatagtaagtttcctgatcttgacaataaagataatgttcttttttaggaatacatgctgaattattgagggataaaaaggtacaaagtctcaacttacaaatggttcaggaaaaaatgtttaaacacacataaggaaaataagcccatataaatacaaatatacatactgagagagagaaagagagagagagaaaagatggtgaaacagaaacagaggaacctagctgattcctgaataaaaggttttcaatgactggccagaaatagttgccccctcacaaactaatgcctattctcatgattcaccccaaattctctcatggattctgtaccctaacaagaggtagagcccttgcataa

SEQ ID NO: 149221 - DNA, 610 bp, Homo sapiens
accccaattaaatgtcattctaaaaaataatttagttaactcaattattctacaaaataataataaaatcatcaaagtcaagaaaaatgcaggctgtggaaatgtcctagatagattgaaactaaagagacataagaacttccatgctcctagaatagatcctgaaccagggaaaagccataacacatactggataggaaaactgatgaaatctgaatagccggtagattagataatagcattrtatcaatagtaagtttcctgatcttgacaataaagataatgttcttttttaggaatacatgctgaattattgagggataaaaaggtacaaagtctcaacttacaaatggttcaggaaaaaatgtttaaacacacataaggaaaataagcccatataaatacaaatatacatactgagagagagaaagagagagagagaaaagatggtgaaacagaaacagaggaacctagctgattcctgaataaaaggttttcaatgactggccagaaatagttgccccctcacaaactaatgcctattctcatgattcaccccaaattctctcatggattctgtaccctaacaagaggtagagcccttgcataa

SEQ ID NO: 149222 - DNA, 590 bp, Homo sapiens
gtagagcccttgcataatccagacagactaatacaagaacagctccaaaggatasagtctacacactgaaaaagatgcaatgtgtatggcagggcagggaaacatgaatggatgtagattctgagtatcagatcaagaagaatgaggcataaggtttgacccagctgaattaattgtcaagagtctgttcacccaggattcaagaaaaatgtactatgtcataaacatggcagtggtgttaatagtctgataagttggtcaattgaagctgaatctcgaaaattatctacgttagaggtcagcaaactatggcccatgagccaaatcctgttcaccatctgtatttgtaaataaagcttcatacgaatgaaactaaattcatttatttccatattatctgagattacttgtgaactcaaatgacagagctgagcagctgagacagagactatatggtcctcatagcctaagatattcactgtctagccttttactgagaaagtttgctgacccctgctctgcatcactgaggtcaaaatgctggaacattttgagtactagagaggaagaagctctaatggcaaatgaga

SEQ ID NO: 149223 - DNA, 604 bp, Homo sapiens
ttactacttctaaactctggttttcctaaactctaaccacatacctttgtaaaaagtccccaaattaaattctcaagttatagtcacaatactgtgtaacaaaatttgcaacacttcagtagcattcaaccataagcacttattgcttgaatctcaggtatcagctaggctatcaactagtgaatccttggtcagggttgtgtgtatgtctgacagctgtctgatggctgatctcagacagcctcagctctgttctccgtgcttcttgaccttcaggaggttatcctgggcatgctcccacggtgttgcaagaggcataagaaaggaagccccaatgcataggwttctacttgtatccattctgctaatactgccttggccaaagcaaatcacaaggttgagcccagtgccaaaagaaaaaggaggtaaggagatatggcaggtcaccctgcctgtaatgaaaaaactctgcaaaatcacatatcagaggggacaagtggaggaagaataaagaattcagaccatcattgcaaaccagtacattcctcaaattactcaatttgaatgtgccatcttttcctgatagagccctgtctagtttgtt

SEQ ID NO: 149224 - DNA, 454 bp, Homo sapiens
ttggtcagtagtggtgtcaagtggaaatgaggcaagagaagggatgggtagggaagaatatcacgaaatgttacaaagacacaagctatggcatttggagacagcttacacgaaggtctccaaatatcctttcattatcagaaaaacacacttctgcaaacataacaggctacaattttctgcaagttctcattaatgtttgacttttaacagattgccaagcacaagccaaaatgaaatgtcatctttaacaatataatatgatttaaaatcctgtagaatgcctacatgacagatcaaccttcacatgaaatctcctctataamaatattctgtgtaatcatgcatattttgcattccacagtcagtgtaacacataggtagaatattggcagtctgaaaaatagtaaaaatattgccaggcattaaacttttctggatacaaatcacatct

SEQ ID NO: 149225 - DNA, 591 bp, Homo sapiens
gtgagataaagggacctatttatgattgcacaccaagaaaagtaaaaacacagaggaaaaaatacttcattcagcaaggtggggcgataaggcaggtagctcaaggaagagttcacagtaaaaattgatggtgcttttttgataacttaatttgtgctaggtacttttctaagcactttaacgctcacaatgattctttyaaggtaggtgctcttgtttttccaatttttagagctgaggaaacaaaggtggagagaaattatataatttacagagtaaataagttactaatgataaccaataagccacagaatttcctcttctgtcttcactaataccgttttactaatatgtcccacaaagtggacattactggtaatcactaagatttctggttctccttcccttcggggcacattcctctttgaatatatgcatggacacatgccaatgaaatgtagtcaaatgcaacacatgtcactaccaggcagaagcatttaatagcccagtgcacaattttccatgctctctttaccagtccccatggccatgggctttacctgctccaatgggaacctgctcccattgttg

SEQ ID NO: 149226 - DNA, 561 bp, Homo sapiens
tccatacagtttttcatagaggttgtactaatttacattcccaccagcagtgtgtaagtgtttccttttcaccacatccacatcaacatctattttttttttgacattttaataatggccactctggctggggtaaggtgggtattgcattgtggttttgatttgcatttccctgatcattagtgatatagagcactttttcatatgttcgttggccatttgtataccttcttttgagaaatgtttattcatgtcatgtgcccactttttaatgggattttttgttcttgctgatttctttgagttccttgtagattctggatattagtcctttgttggatgyagagtttgcaaatattttctcccattctgtgggttgtatgtttactctattggttatttcttttgctgtgcagaagtttttttagtttaattaggattcatttatttatttattttgttgtttatgcttttggggtcttagtcatatattctttgcctatgccaatgtcccaaaaagtttttcctattttctcctagaatttgtatggcttcagatct

SEQ ID NO: 149227 - DNA, 302 bp, Homo sapiens
atgccttatttaactcatttggtgagktcttttttttttttttttttggatggtgttgatgctggtagatgttctttagtgactggccattaagggattaggtatttactgtagtcatcactatctgggcttatttgtagccatccttcttgagaaggctttccaaatatttgaaaggacttggatgtcatgatctaagatatatctgctttaggggacagcccaagcccagtaacactgtcgttcttgcagacttgtagaaataccaccaccatggtcttggactggatccaggagaattc

SEQ ID NO: 149228 - DNA, 644 bp, Homo sapiens
aaaacataggagaaaacctccaggatcttggtctgggcaaagatttattgagcaataccccacaagctcaggcaaccaaagcaaaaatggaaaatggaatcatatcaagttaaaacacttctgcacagcaaggaaaacaatccacaaagtaaagagaagcccatagaatgaargaaaatatttgcaaactacccatgtgacaagggattaataaccagaatatataaggagctcaaacaacagtataggaaaatgtctcataatccaatcaaaaaatgggcaaaaggtttgaatagacatttcttaaaagaagacatacaaatggaaaacaggcatatgaaaaggttctcaacatcattcatcatcagagaaacacaaatcaaaactacagtgagatagcatctcactcccattaaaatggcttatatccacaagacaggcaataacaaatgttgatgaggatgtggagaaatgggaactcttgtacactgttggtgggaatgtacattagtacaatcactatggagaacagttcagaagttcctcaaaaagctaaaaattgagctaccatatgatccagcaatcccactgctggatatatactccaaataaatgataccaacatatccaagagatatcttcac

SEQ ID NO: 149229 - DNA, 644 bp, Homo sapiens
aaaacataggagaaaacctccaggatcttggtctgggcaaagatttattgagcaataccccacaagctcaggcaaccaaagcaaaaatggaaaatggaatcatatcaagttaaaacacttctgcacagcaaggaaaacaatccacaaagtaaagagaagcccatagaatgaaggaaaatatttgcaaactacccatgtgacaagggattaataaccagaatatataaggagctcaaacaacagtataggaaaatgtctcataatccaatcaaaaaatgggcaaaaggtttgaatagacatttcttaaaagaagacatacaaatggaaaacaggcatatgaaaaggttctcaacatcattcatcatcagagaaacacaaatcaaaactacagtgagatagcatctcactcccattaaaatggcttatatccacaagacaggcaataacaaatgytgatgaggatgtggagaaatgggaactcttgtacactgttggtgggaatgtacattagtacaatcactatggagaacagttcagaagttcctcaaaaagctaaaaattgagctaccatatgatccagcaatcccactgctggatatatactccaaataaatgataccaacatatccaagagatatcttcac

SEQ ID NO: 149230 - DNA, 471 bp, Homo sapiens
tatctgttattgttttctatctgttattgttatctatttattgcctttttttcttcattcttagttttatgttctacggtttttgtctcttttgtggttttaattatgcattttttttactctactttctctttattcttagcttaccagcttataccacctttttyactttttaagttgttgccatagagttggcaacatacatttataattaatccaagtccacttcaaataatactgcatctcttcacagatagtctgagtaccttataataatgaaatagtcttaattcctccctcacttgtagcattgctgtcattcattttacttacatagtagcgtgtattaatacataagatatacacataagcatacataattgaatacattgttgctattattatttggaaaaatgctatctgttacatcgattaaaaataccaaaaagttttcattttgccttcacttct

SEQ ID NO: 149231 - DNA, 585 bp, Homo sapiens
aaatggaagagcccactcaaccattccaaggctactttgccttgctttttttcaatactgtaccattrtaaatgacttttcattttaggtacacacactcacccataatttaaaaaattttattcacatactatgtggatagtagactcaaaataggaaaagttaattttgcatttgttttgatagagatcctgatgtgagatgtgaaatgtgaaattttgtttatagaagttttgttgatgaatcctgattttaaggtggatacactgttattgtttatcctgttttcttgtagaatattattggcatgaaaggcattatacaaggttggattcaaccttttgtcatacataagatttttattattagttatttgagataatctattttgattattagctttctgtgaaataatatttccccttgagtatgtatacacgtactgaatgaatggaaagtacgcgtatgctggatgtgaaacatattaacaagtgatttaatttgcaaaaattagataatatggagtttagaaaccattatttacttgaaattttgttagaacttcatctcaatggctatttaact

SEQ ID NO: 149232 - DNA, 585 bp, Homo sapiens
aaatggaagagcccactcaaccattccaaggctactttgccttgctttttttcaatactgtaccattataaatgacttttcattttaggtacacacactcacccataatttaaaaaattttattcacatactatgtggatagtagactcaaaataggaaaagttaattttgcatttgttttgatagagatcctgatgtgagatgtgaaatgtgaaattttgtttatagaagttttgttgatgaatcctgattttaaggtggatacactgttattgtttatcctgttttcttgtagaatattattggcatgaaaggcattatacaaggttggattcaaccttttgtcatacataagatttttattattagttatttgagataatctattttgattattagctttctgtgaaataatatttccccttgagtatgtatacacgtactgaatgaatggaargtacgcgtatgctggatgtgaaacatattaacaagtgatttaatttgcaaaaattagataatatggagtttagaaaccattatttacttgaaattttgttagaacttcatctcaatggctatttaact

SEQ ID NO: 149233 - DNA, 419 bp, Homo sapiens
acgaattcaatttaaatctaacttttcaggaacacaaggaaggcccccaccacttattgagttagaagctactcaatgtaagatggacataattcttaagtaagaggatggctaacataggtcatsgtccttttaatatatcccatgttatgattatttttctcactttggacatttttgctgctgtgtattcagctcagcattgagcaaagaattgttcaattctataatttctttcttcttcttctgactactttactaagctgctgggacattttaaattttattcttgactccaaagcatgaaagttctcatcatctagactcaaagttagaaaaaaatagctgaaaagtcaagaagtacgtggcaaagccagcaagacaataccttaatcttaagatagtctggtggaagtgat

SEQ ID NO: 149234 - DNA, 368 bp, Homo sapiens
agaattctaggctaaataagtacttactgtttgcrttttacacaaacagtatataactctttatgtcactatgtaatcactgtttttagctgtgtcctgtggtctgttatgattacatcttcttgttttcccttgggttacaaatggccttaggttttgcttgttttttactgcatctgtcactaattcattcttgaactttctgtaagaattgtaaaacttctttcatcctattgagaatactggcagtctatcaccttcattttttttttcttctgggatttcttcctggagtcttagcaggactgtttgcactgtaggcatgctgagcagctgtaatgctagaacttctttcactcatgttgaaa

SEQ ID NO: 149235 - DNA, 484 bp, Homo sapiens
tctgctgcctccagcccctcatcatatgtggtgtggcttcaccacagggtggctgtttgctccctctggatgacaggcagtcagagtccagcttttcaccactcctggacagcgatgacrcacaacccagaagccattctcagtcccaagggtgttactgctccagggcggattctcagaaggagatcactggaccacagggtgagtgtggtctcactttcagcagcctgaccattttcacaaaaggctcttgaaattctcccccacggcgctggaggcccctctccccaacatcgtcaccagcactgagcttgactccactttttagtcttggccaacttgcccttcaagtctccctcccacaacctgaatctttatccacttcactcgcctgtttgtcttttccacactgcagcaggaactctctggtggccactgacccttcaaccacaatgccatggtgagtttcccaggatgggcagag

SEQ ID NO: 149236 - DNA, 484 bp, Homo sapiens
tctgctgcctccagcccctcatcatatgtggtgtggcttcaccacagggtggctgtttgctccctctggatgacaggcagtcagagtccagcttttcaccactcctggacagcgatgacgcacaacccagaagccattctcagtcccaagggtgttactgctccagggcggattctcagaaggagatcactggaccacagggtgagtgtggtctcackttcagcagcctgaccattttcacaaaaggctcttgaaattctcccccacggcgctggaggcccctctccccaacatcgtcaccagcactgagcttgactccactttttagtcttggccaacttgcccttcaagtctccctcccacaacctgaatctttatccacttcactcgcctgtttgtcttttccacactgcagcaggaactctctggtggccactgacccttcaaccacaatgccatggtgagtttcccaggatgggcagag

SEQ ID NO: 149237 - DNA, 570 bp, Homo sapiens
gtgaggtgaagggctgggagcatgcagtggcttctcccctctagctcgcagtcttcaggagacaaccccgccctgcaaacgcctccttcctggacccagcccctctgttccccagtgagtgtcatctaggggtttgaccgggagaatgagcatctgctgggcctcttgccactaagccttggggtctggccctatacccyggggacccaggaggcactaggctggctcctgagaggcagggtggctgccagagccacggtccccagagagcagaactttatgagagggcactgagccaaggcccccagctcctggagtctccagggggcttaattaatagacattgggcaggcccatgaagggctgcctgcgcccgaggatggcacattccagggcaggctccccgctgcctcagtggcccccttgggatgacagttaatactggtgagggctgggaggctgtgctggtggccccagtgctgccggctggcgacagggcgcggagccagggctaaacccctgtcctgctgccctcaaagccagctctgtcactgtgaggacagaggcgac

SEQ ID NO: 149238 - DNA, 570 bp, Homo sapiens
gtgaggtgaagggctgggagcatgcagtggcttctcccctctagctcgcagtcttcaggagacaaccccgccctgcaaacgcctccttcctggacccagcccctctgttccccagtgagtgtcatctaggggtttgaccgggagaatgagcatctgctgggcctcttgccactaagccttggggtctggccctataccctggggacccaggaggcactaggctggctcctgagaggcagggtggctgccagagccacggtccccagagagcagaactttatgagagggcactgagccaaggcccccagctcctggagtctccagggggcttaattaatagacattgggcaggcccatgaagggctgcctgcgcccgaggatggcacattccagggcaggctccccgctgcctcagtggcccccttgggatgacagttaatactggtgagggctgggaggctgtgctggtggccccagtgctgcyggctggcgacagggcgcggagccagggctaaacccctgtcctgctgccctcaaagccagctctgtcactgtgaggacagaggcgac

SEQ ID NO: 149239 - DNA, 439 bp, Homo sapiens
caattcaaggccaataggagagaaaaaaaatagaatagtcctttcaaaaaagaaagccaacagaaatagcagaatcaaactgtaaacagaccacagaggtcaccatagctaataaaatattgtatttctttctgccaaagtatgtagtcacagttcctaatccattacccacctcatggcctgcattcatcccagcctggtagatgagtatttttatgctgaacatgaaaaagagcattcctsttttccagacactcagctataaacttcatggtcagaggcatcgatactatgataatcttctggccaaactttcctctcagtatccatttttaagtgttgattatagatgaaacaggaaagaggaaaacagaataaaataaacacactgtattagttaggtctcttttgtttatgctgcaataacaaccctgaaatc

SEQ ID NO: 149240 - DNA, 565 bp, Homo sapiens
actaaactcaacatttcctgtggtcagaccatgcagatctcctcttatgataaacggtaattgccaaacgattataggtaaatattcccctgtcatttcttttgagagggaacctactaggttaatgtgaactgggctaaaaatattgattccagaaatgagtatgaaatgttgtgatttccaattattctaagaaattggtctttgaaatcctgaattatgaaaggataaagtggctccactttaatctgtgaaacaggactctatttagactccatagtcaagttcctaggaaaaaactttagacaggaataatggttggcatctaatrttgttgactggtgccctccagtggcaaaacttcatggagtgttcaatccagtaaaattcaaagtgtcttctgtttcaattctcaggccttttgaacatatgagcccaaactttttaagagcccaatagttgggaataaaaccacaaaggctttagactgtacttggttttacactgtatggtcataaaatgctagagaaaaaggttgtttgcctttaaagtaaggctggaaaaa

SEQ ID NO: 149241 - DNA, 594 bp, Homo sapiens
catgtgtcacttttgggctgaagcatttaattgtcaatttgacaccatccagagctcttaccagcagcatttgagatggcagctgctccatcagtctggatccctaaatgactatcatagcaatcctgatggcatgtttcatgagcaagaattaaatgtctgttattttaagccattgtgatttgggggttgtatcggtctgttctcacactgctataargaaacacctcagactgggtaatttataaagaaaagaggtttaattgactcagagttccacatggctggggaggcctcaggaaactaccagtcatggcggaaggtgaaggggaagcaaggaccttcttcacatggcagcaggagagagaagagccagcaagagcagggaaaattgccttataaaattatcagatctcatgagaactcattatcaggagaacagcatggcggaaactgcccccatgatctaatcaactccctccaacgacgtggggattacggttccctcccttggcacgtggggatcacaattcaagatgagatttgggtggaaacacaaagccagacaatatcaagggtatttttaatataaac

SEQ ID NO: 149242 - DNA, 594 bp, Homo sapiens
catgtgtcacttttgggctgaagcatttaattgtcaatttgacaccatccagagctcttaccagcagcatttgagatggcagctgctccatcagtctggatccctaaatgactatcatagcaatcctgatggcatgtttcatgagcaagaattaaatgtctgttattttaagccattgtgatttgggggttgtatcggtctgttctcacactgctataaagaaacacctcagactgggtaatttataaagaaaagaggtttaattgactcagagttccacatggctggggaggcctcaggaaactaccagtcatggcggaaggtgaaggggaagcaaggaccttcttcacatggcagcaggagagagaagagccagcaagagcagggaaaattgccttataaaattatcagatctcatgagaactcattatcaggagaacagcatggcggaaactgcccccatgatctaatcaactccctccaacgacgtggggattacggttccctcccttggcacgtggggatyacaattcaagatgagatttgggtggaaacacaaagccagacaatatcaagggtatttttaatataaac

SEQ ID NO: 149243 - DNA, 562 bp, Homo sapiens
gtttagtctcagtctcaccgttttctatttataaagacctggagaaagttgcctaattgccgagcctattttcttaccttctacatggagatggtctctgttcctcaggaatgttgagagtatgaataaagacatctgtaaagggccaactggagggcttgtcacttactagtcttttaacaaattaacttctttaagctctttctttgttatgagtatgggaaattagttaatatttacattttaattgtgtccataatttggggagatttggtaactaaaaatctctctattttataaacagacytagagagcaatgtgtgttcctggctctaccagctctgacttgatctgtaaatgttttcgctgatttctcctgcaaaatggaaaaccagagtacacaagttggggtgattattaagatgagagagctaaaaactatttggaaccccatataaatgtcaagccaaattttatagaaatccaaaacgcacttgagatattcagcagttctcctgaggccttattacaggcttgatggccttaatttttctctaatata

SEQ ID NO: 149244 - DNA, 584 bp, Homo sapiens
aataggatattttaaacaaccagaaacaaccagaaaacagttaataaaatgacaggagtaagtctacacctgtcaataacaaccttgaatttaagtagtttaaattccctattaaatgatatagactagctgaaaggattaaaaacaatagcaacaatactccagtatatactgcctataagaaactcatttcacctgtaaagacactcataggctaaaagtaaagagctggaaaaagatactccatgcaaatcaamactaaaagtgaggagaagctatccttatttcagatacaatagactttaagtcaaaaaatataaaaagagacaaagagtgtcattcatataatgaaatgtcactatataatgaaaaagcaatcagttcaggaagaaaatacaataactgtaaatatatatgcacccaacactggagcacccatatatacatataaagcaaatattattagtgctaaaggcagagatataccacaatataataatagttgaagacttcaacaccctattctcagcaatggacaagtgatctagacagaaaataaagaaacatcagacttagactacact

SEQ ID NO: 149245 - DNA, 568 bp, Homo sapiens
tgaattattagtcactgggtatcttacaattataatgttcatttcagctttggagaaggaaaataaagatgtttccactttgccttcactcgcatgtatgtgaacttccctccagaaatttccaagctgcttgatttgcaggttctgcatacctcttggaaacagtctgtgcctttgtgaataacacagggggtcttttaggctatgggagaataaattaacactctctctgttcgatgcaatggactggcaaatttgagaacgaagttagcagagcaaaatgcaaacatactcctcgagtcaggtgaaaacctgsgacttgtacagaagtaataatgctgccaccagaccaccctctcttcattcttctatgcctgcttctcacagtgctcaagtcacatcagcattctttctgtccacaaacagaaatgccaagctcacagcttttacacttgtccctctgcctgaacattttaccccaagattttcacatgcttcgcatctcttttcattcaggccttagttcagtcttcacaattttggaggggtttcccagactcctagtcaa

SEQ ID NO: 149246 - DNA, 538 bp, Homo sapiens
catgtaattccatttatataaaactgtagaataggtaaaactaatcaatggtgataaaaatgagattagtgatcacttctgaggataggcgggcaggaataggaggaaactttctaaagtgatagaaatagtccatttattgttatttactcatcaaaacttaatgaaaggyaaacttactatctgaacactctactatggataaattatatctcaatacaaaataatcaaaaacataccaatatttgctgtaagcaaaatttaattatcattcctaatcaaatcacctatggtaaattttaagtagattgtctggcatcatcttaaaatatagatgtgccttttgggtgcaggccctgggaatacgcctgcttaacctcaacgaaattacaatacagaaaatatctcataggatgatcaaccataatatatggtaacaaaaagttcagtgaaaatccaatggggcagataaattgaaaacagactcttattgagtatttgctactgcgaaggaatctttcctatcatagtgaacaca

SEQ ID NO: 149247 - DNA, 561 bp, Homo sapiens
aacagagttatgtaacagaggcctccccaaatgctcctagagataacatcactactgcaaaacctaagattgttatttgaggtatttttcaaaccttgcattctgatggaccagctggtgccacctggactggtaacccataccaagaaacaactagtcttgcaatctcacccagaaactgactcagtgtaaaaagacagcttcaaccctctatggtttcatccctgacccaacaatcatcattccccattccctagtcccctgactgccaaactatcttcaataaaccctaacctcctaatttccagggaggctgtttgagtaataataayttctgtctgaccacttggataaccctgcaattattaaactctttctctactgcaataccgctatctcagtgaatcggctctatctgtgcagtgggcaagaagaacctgtcgggcaattacaaagcccaacatgacttggttatgcttaaagatttggagcatgttctttcatctagctagctttgataaatttgtggttgggggagagaggccacagatacattgtttg

SEQ ID NO: 149248 - DNA, 600 bp, Homo sapiens
agtgacggaacttggtattcagattcccaagtagtcagccagtggataaggaccactccgggaaaacagacactctcaaaatttctgactttcagcacttgtgggagaagagattcaagtggccccaggataatcctccaaagaaaattgtctgtgtgagctgttagggacaaaggtcatttgagagctcagaaatggtaaacagcatctgaggatgtttatatggagcacagacggtgtccattacagtttggaatccccacttagacatttactatttttacatttgcctttgaggtatttctaaacttcttggtctcaaatgcctatatccttttagttaattgggaggattaaatgaggtgggtgctagttctcttccccttcggggatggagtgaaagaaragatagaatgcggagatcaaatgtattttagaggttaaattgatgaaattgaagaaagtcacagctgctagtctgtatttctaaggttatcagcttaaaagtgaataggttaagttttgctgaagctattgtagcaaatattttccacaataatgaatcaaataattttccagcaacatgagactagccaggat

SEQ ID NO: 149249 - DNA, 418 bp, Homo sapiens
ctgctgtttctgtcctctttcaagggaccaggtgctattttctgccacctttccagtcccctatcattccctgacactcttgacctcaagctcatcaacaaggaaataaacttacaaatttgtttagaaaataaactgcttgtatttcctaagtttttctgtcctgaatatgaacagctttttgttcttatgttttggtttttgtaacacacatatctataaagatatgtgtgtgtatgtatatgtatayacttttttaaaacattttgctagatggaaattaatcacagaaatggccaagatggataatggaataaaatgggtgaaagactgtggcactcaaaaccagatgaaactcagggctgtcaatgtcttgtgaataaactgaaaactaatttttaatccaatcagtgctatt

SEQ ID NO: 149250 - DNA, 522 bp, Homo sapiens
tttctaattacctggtgctaaaggagtaatagtgaatgaaaatagaggagtgatcactgtccttgttgagcttacagtctagtgggggcaaaaaatatttataataaatgataatgtaaggaaatacaagtggaaatttgccattctaatctgtgttgtgaagcagagcacatggtacagggaagacacagaaggcttctggaaagaaatagttgagatatgaaaagtaggaagtaattaggcaaacagattggagaagagcatttgagacaggaaatagcaggcacaaaaggtattttggtaggatgttgagtgcatcctatgatttgtatgactggttaactatttttttacgataaaaattattttatcggaaccataagcacactgtatattaacttccgaaatgtattatttttattctagtgtgaatgytactgctgttattagtaatgtctttttgcatagctctgcatactacaaataaatgtacataaacactacaaattaacaatttaattt

SEQ ID NO: 149251 - DNA, 487 bp, Homo sapiens
aagctagtttatttaatcgttttttaataaaaatttagatttgaataactaaactatagctatccaagcctgtatgtgtggtggatattttctaaagaatgaatacaaygagtgtgtcacttcaaggtaaattacctactgtgtgtgttgcaaatggtaaaaaccaaactctgaagtaaaaaaattagagtagaagtcttgtatccaccacagtaaccttgacagcttcccagtacttacaggcttttctgttgacatggtgataatattaatgcatgtgatttgggagtattgcataataaaatgtgtcaacatttagaagctatgcataagttagagaaccaatattttcaaatgacatgataaaatcatgcatgagtaaatgatttattcaaagtgcaagatagaccaatgaattttaatgtaatagaggatgaaaagttcatcactatggtttcagattccacactgcaactaacctttaagt

SEQ ID NO: 149252 - DNA, 592 bp, Homo sapiens
ggctagaagtacaaataaaagcactgttatgagttagaaaagattttttatgaagcagtttgagcccctaacaaaataggtgtgaaacagaaagataaaaagccatggattataccagcaatccagtcaacagctatcccttccactcttcccaagccattggtaatgatatcttctttccaagtctgatctcttttagctctgctaattttattgaagcccatgtctgtccagtagatggtatcattttctatggataagacacagaaaaaaaatacatatacacacactgtaaaaggtatcaatatcggtgttaggatyatattgcaacagtatcttttaggatatcatcctgggtatgctagatttttaagtattcttcaggataatttactaatataaatagtaaaaaaaaagcatgaaaagaacatgaaagaacttatatttcagtcaaatgatttttgaagtattttttgaaatattatagaaataatctattgcattgtttattgtttttattaatttctctacttattttaactcaataaatccttatcctgcatgaatttgcagctttgattccaaaccatgt

SEQ ID NO: 149253 - DNA, 590 bp, Homo sapiens
gttttaaaggggataatgtgtcacttagagttggatgctgttcattttcttccctgtcgattttactratgttcttaaaatgtgtatcaaagtaatgtgatgtctgctgacaagttgagtaaatctacttggtttactacgtaaatcagcagaacttcaaattttactaggcatagtttcatattcagtaatgaattgaaatatttactgtgcaaagtgtttatgggtaacatattaaagatatgtgaggaagaaggagagaacaaatgtattgctaattgcaaggcatgaggaagtggtcatgttttgtacacttagttgggtcctttttaagtgttttcaaatttagcatgatggtttgcacaggcgctgaagtgagattaccaggggtagaatcaccttcctgctacgtatgtggctaggtgttccggaacaagtactaaacttctttgtgcctcattttcttcatctgcaaatggggatcatcataataatgccttccacggggagggctataaaaacatgaaatataaagtgcttggcacagtatctagaacacaattagcaatcagtgatttagctagtagggc

SEQ ID NO: 149254 - DNA, 590 bp, Homo sapiens
gttttaaaggggataatgtgtcacttagagttggatgctgttcattttcttccctgtcgattttactaatgttcttaaaatgtgtatcaaagtaatgtgatgtctgctgacaagttgagtaaatctacttggtttactacgtaaatcagcagaacttcaaattttactaggcatagtttcatattcagtaatgaattgaaatatttactgtgcaaagtgtttatgggtaacatattaaagatatgtgaggaagaaggagagaacaaatgtattgctaattgcaaggcatgaggaagtggtcatgttttgtacacttagttgggtcctttttaagtgttttcaaatttagcatgatggtttgcacaggcgctgaagtgagattaccaggggtagaatcaccttcctgctacgtatgtggctaggtgttccggaacaagtactaaacttctttgtgcctcattttcttcatctgcaaatggkgatcatcataataatgccttccacggggagggctataaaaacatgaaatataaagtgcttggcacagtatctagaacacaattagcaatcagtgatttagctagtagggc

SEQ ID NO: 149255 - DNA, 578 bp, Homo sapiens
ggtcagcttgctgtgtcatctgcttcaaagtttcttatgagactgcaatcaaagtgttgcacagagatgtggtctcatcagaaggctcagttagggaggattcactwccaagctcgctcatggggctgttggcaggattctgttccttgcaggttgttgaataaaagaccataactctctactgagtattatctcagttctttgtcatgtgggcctttctacagggcagttcacagcacgaccacaagcttctcttagagctagtgaataagagagtgggagaaggcattcacaaaatggaagtcagacttcttgtcacccaatctcagaaatgatatcccatcacttttggtatattctatttattagaagctactaactagatgcatcctcccctcagagaaagggactagagaaggagtgaataccaggtggtaggggtaagagggggccacattaggggctgcctatcacaatattatagaccttttatatatcttattcccacacattattttctaaagggtgaactcggatggcaggtttgaaatatcagtgatgttcctgtatggacagct

SEQ ID NO: 149256 - DNA, 578 bp, Homo sapiens
ggtcagcttgctgtgtcatctgcttcaaagtttcttatgagactgcaatcaaagtgttgcacagagatgtggtctcatcagaaggctcagttagggaggattcacttccaagctcgctcatggggctgttggcaggattctgttccttgcaggttgttgaataaaagaccataactctctactgagtattatctcagttctttgtcatgtgggcctttctacagggcagttcacagcaygaccacaagcttctcttagagctagtgaataagagagtgggagaaggcattcacaaaatggaagtcagacttcttgtcacccaatctcagaaatgatatcccatcacttttggtatattctatttattagaagctactaactagatgcatcctcccctcagagaaagggactagagaaggagtgaataccaggtggtaggggtaagagggggccacattaggggctgcctatcacaatattatagaccttttatatatcttattcccacacattattttctaaagggtgaactcggatggcaggtttgaaatatcagtgatgttcctgtatggacagct

SEQ ID NO: 149257 - DNA, 524 bp, Homo sapiens
acttgaatagtttgagcaaaaaatgtagacggtattgtatcatctgctctgttcttcaggggaaaaaaacaaacattcacaagagggattatattttgctgctttccttacaaattaaatatgagataatgataaaactgatgatccagtctagtaattcaaggctctaaacatatataaaaagttatctaaatactgaataagaggattcataatttttatttttgtttcctatgacataytattctcattaatagagaataaaagagctaagatttattagtgattcttaataataacttatttaaaatatgaccatagccttataattttttttctttactcctctctcctaatattatttaggggtaaagcaactgatattttgagctcactggctcagattttaatttactgataacaataaaggatacttaatgagtatatttgcatactcaattatttttaatgttcattaaaaccctgttaactaaaaagaatggtgatttaaattaaaaaataga

SEQ ID NO: 149258 - DNA, 549 bp, Homo sapiens
attttctccacttatgaatttatcatttttgttatggggtattggaatatcaatttattggatatattattatccaataatcatgtatgttagctgtgatcaagttgaggaagtcccttctgtacttctactttgctgagagatttttatcataaatgggtgttggattttatcaaatgttttctctgcatctaaagatatgatcatgtttttcctttatcagttaatgtggtggattaatattgattgattttgaaatgttgagctggtcttatattcctggaataaatcctactcggttttggtgtgtaattcttttcawgcactgctacatttgatttgctaatattttattgacaatttttacagctacattcatgagaaacattggtctgccgttttcctttcttataatgtctttatacagttttggtattagtttaaggctagcctcatccagtggactaggaagcagtattttcttcactattttctggaagacgttgtataaaattggtatcatttgttctctaatgtttgatagaattc

SEQ ID NO: 149259 - DNA, 592 bp, Homo sapiens
tgtaagtcagttttgaaataaaaataaagcagtcactcatgatattatatatgatgagttttaattagcaagtgttttatcctgtaattatttattacataggctaacatttacacttttcaccttgcatatggtgaactgtaaattaaaattaaacacataaaatatttcaatttgataattatttgtaaataaagtataataaaggcaatttatcatcatatatgtaaatgacaccttcaaaccaccattgtatgttaatagattaacagatattttaaaatgaaatcctaaatcgcaaatcaaagttaggttctctaagtttaaaatttggctcagttactaattatttgtgaaaactttaattacttaagctctctgggccgttctgttttcttacctgtgaaatgaaggggggaaatraaaggaacactaacacctctaaaattctcttattataaagcctacaatctaggaaaatattgtaaataaattgtgagtttaatactttacattctatgcataacttttaaaatgttttaattcagtattttttattttaaatgtcacaacttataagtaaaattaccaa

SEQ ID NO: 149260 - DNA, 460 bp, Homo sapiens
acaactcgaaaagtgtaactagattgtttgtaactcaaargataaatgcttgaggggatggatatcccattctccatgatgtgattatttcatatcacatgactgtgtcaaaacatttcatgtaccccttaaatatatgcacctactatgtacccataaaaattttaaaaattaaaaaaaaaatagaagaaaaattgaaggaaaaaaccttagctatagaggaatacacctactgtggagaacagtttggaggttcctcaaaacactaaaaatttagctaccatgtgatccagcaagccgactgctgggtatatgcctcaaagaaaggaaatgagtgtatcaaaaatatatctacactcctgtttgttgcagcactgcttacaacagctaagatttggaagcaacccaagtatccatcaacagatgaatggataaagaaaatacatatacacaatggagt

SEQ ID NO: 149261 - DNA, 638 bp, Homo sapiens
gtatgccagacttgatgccaggagctggatctgtggggtttagctcttgaatttagtctgttctctgagtggttcattactgcagggtggccctgtgtgcatgaagtgacaactctccatccattgcatgctgggagactttacttttgttacctaggatctgctcagttatactggggaaactgaagaaacatagctgattcagttagtcacaaaatgccaacaagattcttaactctaggcccggtgcagtggctcaygcctgtaatccccgcactttaggaggctgaggcgggcagatcacttgaggtcaggagttcgagactagcctggccaacgtggtaaaacctcatctatactaaaaacacaaaaattagccaggcaggctacaggctcacacctgtagtcccagctacttcggaggctgaggcacaagaatcacttaaacctgggaggcagaggttgcagtgagctgagatcactccactgcactccagcctgggtaacagagggagacttggtttaaaaaaaaaaaaattcttaacttttggattctctttgtcctagcagtctcatctgactcatgagaatcttaactagtttcagataaagatgagctatcaaccacaggtagattt

SEQ ID NO: 149262 - DNA, 638 bp, Homo sapiens
gtatgccagacttgatgccaggagctggatctgtggggtttagctcttgaatttagtctgttctctgagtggttcattactgcagggtggccctgtgtgcatgaagtgacaactctccatccattgcatgctgggagactttacttttgttacctaggatctgctcagttatactggggaaactgaagaaacatagctgattcagttagtcacaaaatgccaacaagattcttaactctaggcccggtgcagtggctcatgcctgtaatccccgcactttaggaggctgaggcgggcagatcacttgaggtcaggagttcgagactagcctggccaacgtggtaaaacctcatctatactaaaaayacaaaaattagccaggcaggctacaggctcacacctgtagtcccagctacttcggaggctgaggcacaagaatcacttaaacctgggaggcagaggttgcagtgagctgagatcactccactgcactccagcctgggtaacagagggagacttggtttaaaaaaaaaaaaattcttaacttttggattctctttgtcctagcagtctcatctgactcatgagaatcttaactagtttcagataaagatgagctatcaaccacaggtagattt

SEQ ID NO: 149263 - DNA, 308 bp, Homo sapiens
atctagtcttcccttctgcccaccagtatccttcacaggaaacaacagagtgaggacataacaggactctycttcccagaaacttcttctcagacttccactcagaggtcactggccagaaatgatgacatatggattccttaatttaagagaaacagaaaaataagcatcatctgctaaaagagaatggagttatactgactggctgaggacaatcatgcccgagccactaggtctgggcaaattgggcacttccaaagtgcatcatgaaagtgctcttaagaaaaacgtggggtatgtggattctg

SEQ ID NO: 149264 - DNA, 619 bp, Homo sapiens
cttttaaacagtcaaaggttaaggttcactccgtcattcatgtggtytcattctcttatgcatattgaaatagctcagaaagatttataaccgtgtttcatacagtcagagttccagtaaatgagtccctttttgaaggttaaatatttatgctcttattttcctgcctgatacagaaagcaagagtaaacccatgttagtcaaaaagccatggtgacaggctggcttagaacaagaaaagccagtgggcacaatattcagatcatcccccatgctcttatactcttatttatcggggaaatgaatgagtgaaagaatgaatgaaaactcttacatggcctgtctccggaagcagaagtaaatcactttggcaaatgtgattttaagtcaatctaaaatttcccacatatttagcctattgagtcagatctttgaaataataatcattatccatcaaggaacagcaattatagctagtgaaatactttcacatgtacttgagcttcataccactctatagagtgagcaggcagaaattaggttattttataaatgaacaagttgatgttttgagctgatgaatgatttgtcctgtttcagacaggcagtgagtgacagg

SEQ ID NO: 149265 - DNA, 619 bp, Homo sapiens
cttttaaacagtcaaaggttaaggttcactccgtcattcatgtggtttcattctcttatgcatattgaaatagctcagaaagatttataaccgtgtttcatacagtcagagttccagtaaatgagtccctttttgaaggttaaatatttatgctcttattttcctgcctgatacagaaagcaagagtaaacccatgttagtcaaaaagccatggtgacaggctggcttagaacaagaaaagccagtgggcacaatattcagatcatcccccatgctcttatactcttatttatyggggaaatgaatgagtgaaagaatgaatgaaaactcttacatggcctgtctccggaagcagaagtaaatcactttggcaaatgtgattttaagtcaatctaaaatttcccacatatttagcctattgagtcagatctttgaaataataatcattatccatcaaggaacagcaattatagctagtgaaatactttcacatgtacttgagcttcataccactctatagagtgagcaggcagaaattaggttattttataaatgaacaagttgatgttttgagctgatgaatgatttgtcctgtttcagacaggcagtgagtgacagg

SEQ ID NO: 149266 - DNA, 619 bp, Homo sapiens
cttttaaacagtcaaaggttaaggttcactccgtcattcatgtggtttcattctcttatgcatattgaaatagctcagaaagatttataaccgtgtttcatacagtcagagttccagtaaatgagtccctttttgaaggttaaatatttatgctcttattttcctgcctgatacagaaagcaagagtaaacccatgttagtcaaaaagccatggtgacaggctggcttagaacaagaaaagccagtgggcacaatattcagatcatcccccatgctcttatactcttatttatcggggaaatgaatgartgaaagaatgaatgaaaactcttacatggcctgtctccggaagcagaagtaaatcactttggcaaatgtgattttaagtcaatctaaaatttcccacatatttagcctattgagtcagatctttgaaataataatcattatccatcaaggaacagcaattatagctagtgaaatactttcacatgtacttgagcttcataccactctatagagtgagcaggcagaaattaggttattttataaatgaacaagttgatgttttgagctgatgaatgatttgtcctgtttcagacaggcagtgagtgacagg

SEQ ID NO: 149267 - DNA, 595 bp, Homo sapiens
gaattcaccttttattttgatagaatggcagaaagtctaagtagaagcagggctttgtgtattctgtaaagttaacctacctccatctgcagctgactttgctaggaggaatacacagagaagtctggcatccttagaaatgtgctgttgtgacacagttacctgaataactaaacacactggaatctcccctaaacacagctcaggtggctaatgctaacaattatagggttacctatagggagaaactaatgaccatttcaaccaaaataatgaatactgataataayaagaataacacatcagctggcatttaagagtgtgtgtccctactgtgctccttcttgaggatgttgattatcatgccattaacttagaagaactcaaaatctctggttgtagtggtcacgctccctagatttacatttatctaatttacattatctcatttcatgatctttaaccattctattgcctagaaagaaaaactcctgagatcaaataatttgactttgttacaattgttaagaacaaacaaacaacaaaagaattgtccctcacttgtctttgctgcaggcaatgggtataacacatg

SEQ ID NO: 149268 - DNA, 491 bp, Homo sapiens
cttccttcccaccttttctgggaaggcctgagtcatagttctaaaatgctaaagacagcaaatttgtcagaggtgttatgagcctactgcaaaaaatacttttattcaacttgctaaaatcacagtgattaacaaccaaccaaaagtttgtcatagcttttcaaatgagtttaacctcctcttaacacacaatcctctaaaatttccaggagggatctcacaatgttaatatgcttacagaaatggatatggccttttaaaatgcccttggctytaacgtccaacagcaatggaaacagcaatgtttaaatgacaaagttagtaacaatatccattatcatttccatagcctgttttttttaaaggattgatgtaagagccccctgaagcagccaataccgccactgcacaaatgaatcaatatgcttgcacataaatgttggaattaatataagcactgagatatcaaattcaaatctccaactggaaaa

SEQ ID NO: 149269 - DNA, 491 bp, Homo sapiens
cttccttcccaccttttctgggaaggcctgagtcatagttctaaaatgctaaagacagcaaatttgtcagaggtgttatgagcctactgcaaaaaatacttttattcaacttgctaaaatcacagtgattaacaaccaaccaaaagtttgtcatagcttttcaaatgagtttaacctcctcttaacacacaatcctctaaaatttccaggagggatctcacaatgttaatatgcttacagaaatggatatggccttttaaaatgcccttggctttaaygtccaacagcaatggaaacagcaatgtttaaatgacaaagttagtaacaatatccattatcatttccatagcctgttttttttaaaggattgatgtaagagccccctgaagcagccaataccgccactgcacaaatgaatcaatatgcttgcacataaatgttggaattaatataagcactgagatatcaaattcaaatctccaactggaaaa

SEQ ID NO: 149270 - DNA, 564 bp, Homo sapiens
gaatataggtggtattaaggtggttgttactgtgtgtcttgggtgagacccagtgctgtgctagctttgggtctgacccagtacagtcccagtggttgtggccacaggggtgcttgtatcactcctccccctgctctaggtagctcagcacagagacagtctccatttgtttgggggaaagtaaggaaagagatcaagaagctccatcaggtaattcctctggaattcttctggatcttatagaagaccaacaagatgatacctctgtgagtctgyaagagccacagcattactcaccttggggtgccccctaaagcagatatggctgtggtgacaaaagacaatgtcgaagtcctttcaaatacctggaaagccttcctaaaaaggacaggtatcattgctgcttgcaacaaatacctaacgcttcaatgcctagacatccacgagcgttatgaccacccagaaaaacatgacttcaccaaacaatctaaataagacacctgtgaccaatcctcaagagacagagacatgcgaactttcagacagaattcaaaatagctgttt

SEQ ID NO: 149271 - DNA, 622 bp, Homo sapiens
cctgggatagcccacaactgaatgcaccgtcggtcttttgatggttccaaaggatggakaaaacagatctgatttccttgtaaattgtacaagttacagaccagcaggctgactctcgccacaggcagccaaatgtgcctcccacccacactcgttcgtgaaactataaagtggcagccaaggtcttgtacatctcattgccagatgacattctcggtgcccgggtgggaatctgtcctctgtcctccaacagataaaccatgaaaaaatgtgtgcctattcatgggcactgtcttccaccatcccccagcaccttctccttccctcctaaagccatccccctttggcccaagttacaaactaggggagaataaaagggtcaggacatctctcattccttctcccagcctcagctaggaggcttctgggttacatcagaaataaaatgagactttaacagaaacaaggaaggcttcaactcttagatctcactcaaatactgaggctaacaccggaggtaacaaggacaggcatgcccagagttcagcctccctctggaaccgggcagagttctgcagccggggactaagtgtacagcccacacagcagatcctttggccca

SEQ ID NO: 149272 - DNA, 254 bp, Homo sapiens
catgtactagaatgtccatagcaaagctaaccctacccgaaagcccattggcagcagtgggtaaataaatggtggaattgtcacacatggaatactacacagcaatgagaaggaacaaactacaactacactccacaagtcggataaatttcaccatgataatgttgaacaaaagaagccagacccaaaagaagacaaactgtatgattccatttacataagrttcaaagatagacaaaactactctctgtgta

SEQ ID NO: 149273 - DNA, 534 bp, Homo sapiens
cagatctcaaaatatcactttcacttatcacttctttgaaattacagtggttattagacctgccactctatcttattaattactgtgttaataaagaagcatatatattacaatagcacaactgtgtttttttattttgataactacatttcaatgtaattggttttctttgtaattttattttattttatgcatttacaagccttcttttgagaagcagtccatgagcttcaccagagcrtcaaaaaagtctatggcagaaaaggataaaatgcctggcactttgtccctcaaccagcacatgacagtgccacaagtttgtaagtcagatgcagaaattaaaatgtcatcctcctgacctcagcccagggctctttcagatgtaccacatggtcctatcttttccacagctcaccctcacatgcttctgtgtagaggtggcagtgactgcgttggggtagaaaccttcctcagcctacgtgcctgttggcttttcctgttcatgagaaagccttgctgaacaaagctctagaa

SEQ ID NO: 149274 - DNA, 448 bp, Homo sapiens
ctgtatatatatatccaaatatcacactgtaccccataaatgtatgcaattatttgtcaatcaaaaataatgttaatcataattttttttttttaaatggagtctcactctgtcgcctaggctggagtgcagtggcgcgatctcggctcactataaatttttttaaaagatgacccctgacaatttttttacctctcctccattgagaggtaggaggtctatgcctccttccsttgagtctgggtgtatggctacttgatcaatagaatataatgaaggtctgtgtcagtttctgggcctaggccttaaggaacaggtcatcttcttcttcctgtctcttgggactcctgcccttagaacccagattccaggctgtgaggaaacctgaacagcctgtagagaggcccacgtggagaggaactgaggtccctggccctcagcctggctg

SEQ ID NO: 149275 - DNA, 426 bp, Homo sapiens
caaattttcccagtttattcataccactaacattttattgataccaattagagaatatactctgatttttggctgaaaaatctgtgagaaaatactcaatgctaatatactactttcctacatttatatttaagtccacagtttccttattaaattgatgtttggataacttatccattgttgaaagtggggtattgaagtcccctaatatttttattttgctatttctcctttcagttctatttgatatttgcttaatatacttaggtgctccaatgttggatgcatatatgtttataattgttatatcttcttgatgaattgacccctttataactatataataactttgttycttgttatagtatttacttaagtctattttgtctgacgtaaatgtagctactctgtgtttgttgtggtttt

SEQ ID NO: 149276 - DNA, 643 bp, Homo sapiens
gacagctgtttataaaatccctggggtagaggaagtgatccaaatgtactggtttagcttgacattcttctaacagggtatcagactgagcatttgtttggaagtctgtgtgtctttgcaaggagacaccactagggcattaatcacacagaacagatgagactgctttcattcatcggtcaagttgcctcagggctccattttgaagtatatttcatagtggtcatattttataatatccaggaaccaggctgagaccataaamctatacaagatcaattttacacactctcatttatcagaagtgaaagatatcctagttcagtattttcattaaggaatatggagtacttgacctatttcaggaatgggacaaaaaccaccggtagcccggagcaggggtccctaacccccgtgccacagacatgtaccagtccatggcctgtgagaaaccaggctgcatagcagaaggtgagcagtacagtggatgatcacgtgaagctgagtttcacctcctgtcagatcagcaacggtattagattctcacaggagcacaaatcctgctgtgaactgtgcatgtgagggatataggttgcatctccttatgagaatctaatgattaaggtaatgtgcttgaatcatc

SEQ ID NO: 149277 - DNA, 643 bp, Homo sapiens
gacagctgtttataaaatccctggggtagaggaagtgatccaaatgtactggtttagcttgacattcttctaacagggtatcagactgagcatttgtttggaagtctgtgtgtctttgcaaggagacaccactagggcattaatcacacagaacagatgagactgctttcattcatcggtcaagttgcctcagggctccattttgaagtatatttcatagtggtcatattttataatatccaggaaccaggctgagaccataaacctatacaagatcaattttacacactctcatttatcagaagtgaaagatatcctagttcagtattttcattaaggaatatggagtacttgacctatttcaggaatgggacaaaaaccaccggtagcccggagcaggggtccctaacccccgtgccacagacatgtaccagtccatggcctgtgagaaaccaggctgcatagcagaargtgagcagtacagtggatgatcacgtgaagctgagtttcacctcctgtcagatcagcaacggtattagattctcacaggagcacaaatcctgctgtgaactgtgcatgtgagggatataggttgcatctccttatgagaatctaatgattaaggtaatgtgcttgaatcatc

SEQ ID NO: 149278 - DNA, 643 bp, Homo sapiens
gacagctgtttataaaatccctggggtagaggaagtgatccaaatgtactggtttagcttgacattcttctaacagggtatcagactgagcatttgtttggaagtctgtgtgtctttgcaaggagacaccactagggcattaatcacacagaacagatgagactgctttcattcatcggtcaagttgcctcagggctccattttgaagtatatttcatagtggtcatattttataatatccaggaaccaggctgagaccataaacctatacaagatcaattttacacactctcatttatcagaagtgaaagatatcctagttcagtattttcattaaggaatatggagtacttgacctatttcaggaatgggacaaaaaccaccggtagcccggagcaggggtccctaacccccgtgccacagacatgtaccagtccatggcctgtgagaaaccaggctgcatagcagaaggtgagcagtacagtggatgatcacgtgaagctgagtttcacctcctgtcagatcagcaacggtattagattctcacaggagcacaaatcctrctgtgaactgtgcatgtgagggatataggttgcatctccttatgagaatctaatgattaaggtaatgtgcttgaatcatc

SEQ ID NO: 149279 - DNA, 643 bp, Homo sapiens
gacagctgtttataaaatccctggggtagaggaagtgatccaaatgtactggtttagcttgacattcttctaacagggtatcagactgagcatttgtttggaagtctgtgtgtctttgcaaggagacaccactagggcattaatcacacagaacagatgagactgctttcattcatcggtcaagttgcctcagggctccattttgaagtatatttcatagtggtcatattttataatatccaggaaccaggctgagaccataaacctatacaagatcaattttacacactctcatttatcagaagtgaaagatatcctagttcagtattttcattaaggaatatggagtacttgacctatttcaggaatgggacaaaaaccaccggtagcccggagcaggggtccctaacccccgtgccacagacatgtaccagtccatggcctgtgagaaaccaggctgcatagcagaaggtgagcagtacagtggatgatcacgtgaagctgagtttcacctcctgtcagatcagcaacggtattagattctcacaggagcacaaatcctgctgtgaactgtgcatgtgagggatmtaggttgcatctccttatgagaatctaatgattaaggtaatgtgcttgaatcatc

SEQ ID NO: 149280 - DNA, 476 bp, Homo sapiens
ggttaagccatggtaattggtggtggatgcagccataagtaatttttgaagctcctcatgtgattccaatatgcaggcaaatttacgaacaggtgtaccacatcatctcctttgagcctctcaatgtccgggacgtaatttttaccattatccccatcttacagatgaggaaatgaatgcttagattatagcagaaatagtggagccaggacttaaatacaggtgttttatctccagggtggcttcagtacctttctgtggtagtcacaaagcagggttttcacttctctacaaagcaagacatgtttagcgttattttcatgccatttgcaggggtgcgaatttctgtgtagtagaagaaaacaagtcttgctgaatagattcattttttaagaactaaaatgtctgctyatgcataaatttcaatgttgtctcaatagtttattttcatctgtcattttcctgacacccgtttc

SEQ ID NO: 149281 - DNA, 410 bp, Homo sapiens
actacttatcggcagactcccatgcattaattcaatacagttagttaggtatcatgtatagtaacaatgccaaatgctggagattcaatgcactagtggagaacttagatgttaagatcagtttaaataaagtaggtgatatagttgttgtttcaggagtatatgtgaaacactttcatgaaaatagcaacagagagggtatttcaattaaatataaaacagaaaaaaatagaaaaaagaacttgtggakgtagtaaattatagtactgaataacaaaaaaaatattcactcatggatgtagacattgggactgtggggttaggggctagataatgaatgtagaatgtctttcaactccaggactcaataaccatgagagacttcagtgaaaatgtgtaggaacacagct

SEQ ID NO: 149282 - DNA, 410 bp, Homo sapiens
actacttatcggcagactcccatgcattaattcaatacagttagttaggtatcatgtatagtaacaatgccaaatgctggagattcaatgcactagtggagaacttagatgttaagatcagtttaaataaagtaggtgatatagttgttgtttcaggagtatatgtgaaacactttcatgaaaatagcaacagagagggtatttcaattaaatataaaacagaaaaaaatagaaaaaagaacttgtggaggtagtaaattatagtactgartaacaaaaaaaatattcactcatggatgtagacattgggactgtggggttaggggctagataatgaatgtagaatgtctttcaactccaggactcaataaccatgagagacttcagtgaaaatgtgtaggaacacagct

SEQ ID NO: 149283 - DNA, 497 bp, Homo sapiens
agcttgcaccctctgaagcagtggcccatgctgtaccttagctcttttgagccatggctggagctggagcagccaggatgcagggagcattgtcytgaggctgcacagggtagtggggccctgggcctggcatcctggaattcctcccctgaaaatgggcttttcttttataccacataaccaggctgcaaacttttcaaacttttatgctctgcttcccctttaaatataagttccaacttaaggtcgtttttttgtttatgcatatgagtataagttgtcaggagctgccaggtgacttcttgaatgctttaatgcttagaaatgtcctctgcaagataccctaaatcatcactctcaagtacaaagttccatagatacctagggcaggggcataatgcagccaagttctttgctaaggcataacaaaagtaacctttgctcaactctatctgagaccccatcaatctggacatcactgcctgcatcactattgg

SEQ ID NO: 149284 - DNA, 497 bp, Homo sapiens
agcttgcaccctctgaagcagtggcccatgctgtaccttagctcttttgagccatggctggagctggagcagccaggatgcagggagcattgtcctgaggctgcacagkgtagtggggccctgggcctggcatcctggaattcctcccctgaaaatgggcttttcttttataccacataaccaggctgcaaacttttcaaacttttatgctctgcttcccctttaaatataagttccaacttaaggtcgtttttttgtttatgcatatgagtataagttgtcaggagctgccaggtgacttcttgaatgctttaatgcttagaaatgtcctctgcaagataccctaaatcatcactctcaagtacaaagttccatagatacctagggcaggggcataatgcagccaagttctttgctaaggcataacaaaagtaacctttgctcaactctatctgagaccccatcaatctggacatcactgcctgcatcactattgg

SEQ ID NO: 149285 - DNA, 497 bp, Homo sapiens
agcttgcaccctctgaagcagtggcccatgctgtaccttagctcttttgagccatggctggagctggagcagccaggatgcagggagcattgtcctgaggctgcacagggtagtggggccctgggcctggcatcctggaattcctcccctgaaaatgggcttttcttttataccacataaccaggctgcaaacttttcaaacttttatgctctgcttcccctttaaatataagttccaacttaaggtcgtttttttgtttatgcatatgagtataagttgtcaggagctgccaggtgacttcttgaatgctttaatgcttagaaatgtcctctgcaagataccctaaatcatcactctcaagtacaaagttccatagatacytagggcaggggcataatgcagccaagttctttgctaaggcataacaaaagtaacctttgctcaactctatctgagaccccatcaatctggacatcactgcctgcatcactattgg

SEQ ID NO: 149286 - DNA, 440 bp, Homo sapiens
gggatggggaagctgtactcctgatacaattatctccacctggtccctcccataacatgcagggactacaggaactacaattcatgatgagatttgggtcggggcacagccaaaccatattatttacttawgtgccttattttattctgctattattttatttattatcatttattcttatttttctcatgaaaagaatattcaggtcccctttgtgaaaatatattcaaattggatgctttatataaatatttttacttttattattcttcagaagacctctgtgaatgttaaatagtttattaataataattacatcagtttgttcttcttcaacaagatgctagatcttctaaaagtctctttgccctattgctcatatcccataaactattaaatatcaaatggagtcaagaaaagctctggtgaaaggcaaccct

SEQ ID NO: 149287 - DNA, 440 bp, Homo sapiens
gggatggggaagctgtactcctgatacaattatctccacctggtccctcccataacatgcagggactacaggaactacaattcatgatgagatttgggtcggggcacagccaaaccatattatttacttaagtgccttattttattctgctattattttatttattatcatttattcttatttttctcatgaaaagaatattcaggtcccctttgtgaaaatatattcaaattggatgctttatataaatatttttacttttattattcttcagaagacctctgtgaatgttaaatagtttattaataataattacatcagtttgttcttcttcaacaagatgctagatcttctaaaagtctctttgccctrttgctcatatcccataaactattaaatatcaaatggagtcaagaaaagctctggtgaaaggcaaccct

SEQ ID NO: 149288 - DNA, 440 bp, Homo sapiens
gggatggggaagctgtactcctgatacaattatctccacctggtccctcccataacatgcagggactacaggaactacaattcatgatgagatttgggtcggggcacagccaaaccatattatttacttaagtgccttattttattctgctattattttatttattatcatttattcttatttttctcatgaaaagaatattcaggtcccctttgtgaaaatatattcaaattggatgctttatataaatatttttacttttattattcttcagaagacctctgtgaatgttaaatagtttattaataataattacatcagtttgttcttcttcaacaagatgctagatcttctaaaagtctctttgccctattgctyatatcccataaactattaaatatcaaatggagtcaagaaaagctctggtgaaaggcaaccct

SEQ ID NO: 149289 - DNA, 512 bp, Homo sapiens
atgttgcccaggctggagtgcagtggctcaatctcagctcactgcaaactctgcttcctgggttcaagtcattcttctatctcagcctcctgagtagctgggattataggcacatgccaccagggccagctaatttgtgtatttttagtagagacggggttttaccatgttggccagactgatctcaaactcctgaccttaagtgatccgcccacctcagactcagcctcccaaagtgttgagattacaagcgtgagcagctgtgcccagccttaatgccatgtttcatggtttttttttcttttttttttttttttctcatttgatgggccattgggttttctctcctttaaaatttaggacatttactctatttgtgttttartatgagcatatgactaatgctgcacttttcttatcatcttggttttgtgtgaaagattttcctaatagttagggaaaactgaaagacttacatagtggtttagagaaggcagaaaagtaactaatta

SEQ ID NO: 149290 - DNA, 512 bp, Homo sapiens
atgttgcccaggctggagtgcagtggctcaatctcagctcactgcaaactctgcttcctgggttcaagtcattcttctatctcagcctcctgagtagctgggattataggcacatgccaccagggccagctaatttgtgtatttttagtagagacggggttttaccatgttggccagactgatctcaaactcctgaccttaagtgatccgcccacctcagactcagcctcccaaagtgttgagattacaagcgtgagcagctgtgcccagccttaatgccatgtttcatggtttttttttcttttttttttttttttctcatttgatgggccattgggttttctctcctttaaaatttaggacatttactctatttgtgttttaatatgagcatatgactaatgctgcacttttcttatcatcttggttttgtgtgaaagattttcctaatagttarggaaaactgaaagacttacatagtggtttagagaaggcagaaaagtaactaatta

SEQ ID NO: 149291 - DNA, 581 bp, Homo sapiens
tgctgcagtaaacatgtgaatgcaggtatctatttgatgcactgatttattttcctttgagaatgagacagaggttggtccgtgggtatcaacatacagttagataaaagtcgtaagttctaatgtcccatagcatagtaaggtgactatagttgaaaatgatgtattgtatatttaaaagtaggtagaaaagagaccttgaagtattcccaacacataaaaataatgaatactcaaggtgagggatgggtagcccaaatactttggagtgatcattacgcattctatggaacaaatactcacawgtacctcataaagatgtaaaatactatgtgtcaatacagcaattttatatccaacataaagaatgagttaataaagtatcaaatatattgcttagttcaagttaggtgtttaaaattagtatttctttctctttccctcccctatccctataaagtaaaagcctttgagctggaatatttctctgtttagcatgtttgtggtttaatgatggttgtgatgaaatgctatgcccgtagctttttgctgtcttgccagaaacagcctgtcacccagca

SEQ ID NO: 149292 - DNA, 596 bp, Homo sapiens
atattgttccttgtttcttaccataaattctgtcattaggtaaaacaaccttgatgttatgatacctcaattgttctacacatcccttctggaccaccctctccctatggcatataaaccctgggtctaaggggcaatggcacagggattcaccaccttgtcttgccaccacctgagacccatctgtggcttgcttcaatgtttctttgagaaattggatttgtcagcccctttctttggcctctcatcttcctcggactttggggtaggtttgcatggttcatggtaagaatggctcatggacagggtagcaaacaatggcataacccttcttagagtttatgtgtgatgtgttcttactattgattttgaaataaaaagatcttcrttgacctataagggaactgtttttaggagacttatactctgggatcacatttttgaaaggcaaaatattatttgcccaattaacaataccaattcaggaatatttatttaccacttctacaaactgatgatagtgtagtgcattttgatgtttgggatttaaaaatttctgaagataatatatagttaaatataattgaaaatattca

SEQ ID NO: 149293 - DNA, 597 bp, Homo sapiens
gtctgtaactttggcaaaataagcttctaaattgactggcacttgtctcagattctttttggtttacaagcccaaccaaacaattaagttcatctgctcatttgctggtagtaatagtatatcagtggaacctatctctctattttacaccaatattagggktgttgacacttctgagatttaacaatgatgctataatacattaaatacattatagttgatgagttcatttggaaccacaaactctttgagggaaaaatgtcttcattattttagtgccttcagtgtttatcaggaaacagagtacaaaatgataaatatatgatgagcaaaaaaataaaaactaattaaaaagctaagtgaatgaaggaggaaatggttctaccatggtccacttctgtgtacacataaatgactttatatttttcaatgagtttaccctatccttaaaggtattctatgaagggatcatatttattgtcatgacagctatgacttttcttacgaaattcatattctctcattttaccaatggccacatgcatgctgtgaattttagcccccatcatagtaagtacttagatattccctttacag

SEQ ID NO: 149294 - DNA, 597 bp, Homo sapiens
gtctgtaactttggcaaaataagcttctaaattgactggcacttgtctcagattctttttggtttacaagcccaaccaaacaattaagttcatctgctcatttgctggtagtaatagtatatcagtggaacctatctctctattttacaccaatattaggggtgttgacacttctgagatttaacaatgatgctataatacattaaatacattatagttgatgagttcatttggaaccacaaactctttgagggaaaaatgtcttcattattttagtgccttcagtgtttatcaggaaacagagtacaaaatgataaatatatgatgagcaaaaaaataaaaactaattaaaaagctaagtgaatgaaggaggaaatggttctaccatggtccacttctgtgtacacataaatgactttatatttttcaatgagtttaccctatccttaaaggtattctatgaagggatcatatttattgtcatgacagctatgacttttcttacgaaattcatattctctcattttaccaatggccacatgyatgctgtgaattttagcccccatcatagtaagtacttagatattccctttacag

SEQ ID NO: 149295 - DNA, 194 bp, Homo sapiens
gctcaaatcataaaagtgtaatttatataaataatacgtatataatatataaattgcaatttatttctaggtggatattggcaaatttacacayggtaatagaattttccttgtgtgtcactgaaacagccatgtaaacatatttaaactaatgtgttggtagtctgccattgtagaaggaggcacagaatatt

SEQ ID NO: 149296 - DNA, 624 bp, Homo sapiens
ttaatctgggtttctattagatcaaacagttactacttttcattctaattttttttttttttgcaaacttagatcctgtactggaaactgattttaaaattgtgtgcaaaaagagagagaaataatatgttcattttgggggttattataacagcttgttagtaatattttgaaattagaaaaatattgacaataaaaccaggggccctaaatcatttcctcaagctcacaccttgagctagtatcagaagcaaatagaaaccttgtcttttaacttccaatgactgtaccatatatttacatatcataatttgtgcaaagctttttaaatayattttcctctcaattagtacttaaaattataactctatgaatttaatttttaaaattctcaacttgttcaatattttggggctgcctttcctttaaaattttcaaaaaaatacgccagtatatcccaaactcctttacctacaataggaagatcagttagaataaatccaaaagcttaataaaaacgggacactgaagggagaattttttatgggattcattttaaacgtttatgtaactctttgagaagtcgtaagctttccttttattttagattatgttactggatta

SEQ ID NO: 149297 - DNA, 386 bp, Homo sapiens
gcttttgggcagagacaatggggttttctagacataaaattatatcatttgcaaacacagagagtttgacttcctctcttactatttagatgtcttttatttctttctcttscctgactgctctgactaggacttccagtactaccttgaatacaagtggtgacagtgggcatcattgatcccatcttacctcttctgttgaagagattccttaagatttctacaacaagaattgagagcttccttttctctatacacaaaaatcaactcaagatggattaaagatataaaacataaagctattaaaactcttgaagaaaactgaggaaataccattctagacatacgccctcagaaagattttttggcaaaaatgtcaaaagcac

SEQ ID NO: 149298 - DNA, 470 bp, Homo sapiens
cactggcaaaaatatgaaatgacatatatgtacaaggttatgcaaggtagcactatttgtgatagcaaatgtatggaaacagcccaaatgttcagtggtagagatctaactgaataaactagggtaatcaacaaaatggactatttatgcagctataaaacaagaatgagggatattctatataatatcatggagtggttcccagactatgttgttaagtgaataaaagcatggtagagattagtaggtatggtatgattctctttatctaagaaaggggcagaggcatacacacatattcactcatattaacaatcactgaaaggataaaccaaaaactaaaagattattcacagaaggacggagggaacagggtagagaagatagggatagawgctaggctttctcagaatataccttttttatatatttagctttggaactatgtaaatattttaaataattaaaat

SEQ ID NO: 149299 - DNA, 384 bp, Homo sapiens
agcacattatatagggcatgacaccatgagattgtccctttaaccttagcaggatcatccccaaaggcccttcagtttagaatttgaccaggaacagccataccctcttatgcagctaactttgtacatagcaggtactcaataaatcaagatggataaataaatgaacgggtagaaggaacagagaaaatgtaaagattaggaagaggtttcaaccccagtatattgtatgktgggggtatacaatattgatagatttccagtaagggtcacaaatctacctttcttggatttgtctaactcctgacaacctttgttgcttcatacaggtaactcggccagcagtttgcttctatactctggcctagtatttttatcctaagg

SEQ ID NO: 149300 - DNA, 446 bp, Homo sapiens
agctcttactaaccccccaccatgtctctcagtatgagaatracacttccccctgggcctatgtgaccgtggagtcttagaaggcgttcctcaaatctgctgaagattcatctgtcgacttgaaatattacattagcactgaattgggagtctctaggctggacatggatgcccccacacagccatcttgtctccagctttgtgggagttcagttgggaacataatgcaaataatgaggaatcaaaacccaaaggcaaagaccttgaaggcagagggggcaagtcacagggcctgctgagcaagtccaaggcagatgaagacaaagaaaggtgctaaagtttcagagggaagatggtcaggggcactgtgagtatgtgagcaaataaatttgctgcagaggactatttaattaataaggcctgagaccctctccccacctccatca

SEQ ID NO: 149301 - DNA, 429 bp, Homo sapiens
ccaccatgtctctcagtatgagaataacacttccccctgggcctatgtgaccgtggagtcttagaaggcgttcctcaaatctgctgaagattcatctgtcgacttgaaatattacattagcactgaattgggagtctctaggctggacatgsatgcccccacacagccatcttgtctccagctttgtgggagttcagttgggaacataatgcaaataatgaggaatcaaaacccaaaggcaaagaccttgaaggcagagggggcaagtcacagggcctgctgagcaagtccaaggcagatgaagacaaagaaaggtgctaaagtttcagagggaagatggtcaggggcactgtgagtatgtgagcaaataaatttgctgcagaggactatttaattaataaggcctgagaccctctccccacctccatc

SEQ ID NO: 149302 - DNA, 412 bp, Homo sapiens
acagcacattatatagggcatgacaccatgagattgtccctttaaccttagcaggatcatccccaaaggcccttcagtttagaatttgaccaggaacagccataccctcttatgcagctaactttgtacatagcaggtactcaataaatcaagatggataaataaatgaacgggtagaaggaacagagaaaatgtaaagattaggaagaggtttcaaccccagtatattgtatggtgggggtatacaatattgatagatttccagtaagggtcacaaatctacctttcttggatttgtctaactcctgwcaacctttgttgcttcatacaggtaactcggccagcagtttgcttctatactctggcctagtatttttatcctaaggcttccttgtccttacatttgcagatg

SEQ ID NO: 149303 - DNA, 412 bp, Homo sapiens
acagcacattatatagggcatgacaccatgagattgtccctttaaccttagcaggatcatccccaaaggcccttcagtttagaatttgaccaggaacagccataccctcttatgcagctaactttgtacatagcaggtactcaataaatcaagatggataaataaatgaacgggtagaaggaacagagaaaatgtaaagattaggaagaggtttcaaccccagtatattgtatggtgggggtatacaatattgatagatttccagtaagggtcacaaatctacctttcttggatttgtctaactcctgacaacctttgttgcttcatamaggtaactcggccagcagtttgcttctatactctggcctagtatttttatcctaaggcttccttgtccttacatttgcagatg

SEQ ID NO: 149304 - DNA, 597 bp, Homo sapiens
tgtgtttcccactgttaattggtaagttccttgaggaccgagccaatgttttttgaaatgtctayatcccagcttttctagtgaagtgcaaggcacagagaggggatccaataaacttttgaggcatgatgggggaggatggaggagaggatggaaggaaagcagcaggaaaggagaaatggaggacaacagcgtagagtctagagaagagctagaagctcagtgtagtgggaagctcaagtgatgaagagagaagaggccggagagatggttggagggagaccctgaagggcttggttcgatgagtaataagtcatttaagctccatcctgtgggttgtcagctccctcagagccaggggtcgcatcccttccactctttgtatctccagaaccaagcccagtgccttatgcatactaagtgctcagacctgttgttgaatcagcacaaactcctagtgagtgaccaggacatcttcggtgcattaggaacaccctgtgggcatgcccagaccacctggattgcctcagaaccacaccccactctgcttttctacttctgattatgcgaagggcaccaggaggtgagagaccccac

SEQ ID NO: 149305 - DNA, 594 bp, Homo sapiens
cctgctggcttccacaggtggcggggacaaaacacacatccagacatggggcaggttgggtttccacaccataagaaaacacatggagctcaggattgaacaacttttgccccatttatccacagggaaaggtctcttctcatcgcaatggcggagaaggtgcacaactcggcctcttgctccaaaggcagaagcactctgcccgccagtgcggggccacacccatgtgtgctgaaagtgcaaccacagtggtcaatgtcttcttctattccacctaaataaggctcaagtacaaattgaaatcttattgcaattggtagacaataggatttttaaaggtctgagaagaggattaccatatggttacgatattacagtctgatttaagcaattctgtyttcttgtaaggcttgctcatgaaatatctattttacatgtggtacaaaccccaactgggattgaaaaacaacaacaacaagaatttgacattcctcaaacagtactttcttattaatcaacaacaacaattaggaaatgtttcaagtaactttaatctctgtgcttgaatacacattgttcattttcctatgtcaa

SEQ ID NO: 149306 - DNA, 594 bp, Homo sapiens
cctgctggcttccacaggtggcggggacaaaacacacatccagacatggggcaggttgggtttccacaccataagaaaacacatggagctcaggattgaacaacttttgccccatttatccacagggaaaggtctcttctcatcgcaatggcggagaaggtgcacaactcggcctcttgctccaaaggcagaagcactctgcccgccagtgcggggccacacccatgtgtgctgaaagtgcaaccacagtggtcaatgtcttcttctattccacctaaataaggctcaagtacaaattgaaatcttattgcaattggtagacaataggatttttaaaggtctgagaagaggattaccatatggttacgatattacagtctgatttaagcaattctgtcttcttgtaaggcttgctcatgaaatatctattttacatgtggtacaaaccccaactgggrttgaaaaacaacaacaacaagaatttgacattcctcaaacagtactttcttattaatcaacaacaacaattaggaaatgtttcaagtaactttaatctctgtgcttgaatacacattgttcattttcctatgtcaa

SEQ ID NO: 149307 - DNA, 655 bp, Homo sapiens
cattatttacttatcagaagtttattttactctttgaaaatatattgcttactggactattcacaatagcaaagacatggaatcaacctaagtgtccttcagtggggggactaaataaagaaaatgtggcatatatataccatggaatactacacagccataaaaaaacaaaattatgattttttttttttttttggcagcaacatagatgcagctggaggccattatcctaagtgaaataatgcaggaacagaaaaccaaatactgcttataagggagagctaaacattactcatagaaataaagatggcaacaatagacattggagactactagatggggaagggatggattaaaagggctgaaaaactaactcttgggtactacgctcacctcctgggttacagaatcattcttatcctaaaccttagcatacacaatatacccaggtaasaaacttgcacatgtacccccaaatctaaaataaaagttgaaaattaaaaatatatgcatattgctcattgagatagactacatattgagagattagctctatgaagataacatgaaccctaaattgtgtgattgagagaattctacacatttattggccttcattttagataacatgttaaataattcaataatgaacatt

SEQ ID NO: 149308 - DNA, 529 bp, Homo sapiens
gaaaaaagagcaaagagggaaaaagtgttttcaacaaacagtgctagaacaactggatagccgcatctaaagaaaagtatataaacaaaccttataccctcccccaaaattgatagataatgaatcacaggtctacttgtaaaaggcaaaacttgaaatctcctagaagaaaaaaggagaaaaatcaaagtgactttgggtttggcaatgtctgtatctataacaccaaaggaatgatctctgaaaaaattgataaatgagacttcattaaaataaagtttctgctctgcaacagagaagggaatgaaaagacaagmcacagactgggataaactacttgccaaagacatattagataaaggacagtttttaaaatatacaaagaacccttaaagctcaacaatataaaacaaaacaaaacaaaaaccaatttcttaaaaatgggccaaagaccttaaaaaatacctcaccaaaaaagatatacagatgaaaaccaaccaaatgaaaaggtgcttcacttgatgtgaag

SEQ ID NO: 149309 - DNA, 675 bp, Homo sapiens
tatgggctcagaaaggaggaagtacatgctgatttgtccatgggtggccatgggtggacctggaaaaaccaccataagttctcactccaggccccagactctacccagaactaaaaatctggccccctggcttgaaggtgagcttcacctgggacccgcccctttttgtccaggagcctgtctgcctcctgcttccatcaataggtcatccatggtgcccaagctgtttgtgcagaggggcacctgcaggcctgtgctgagccactctcagcctcccttcgatcctcatcggtgcccaaaattcagagggggctgaaacagaaggaggctggcatgccagcactgccccaagcacaggcacacctggcaggcttgtgacagcacccaggcttagccacaactttgctccaaaatcatagttggcaccaggagcagggagaggccagggagctagagcagrcacttacgagcctacggggacagggggtcttcctgggcccccaagagtgcatggattccctcgtcctggtccagagtctgggctgggctgctgcagatgtccctgggagtgtgggattcccacccttttaactcagtagggggcagggctcctgcttgttcctggcccaggccagctctggagcacacagccctcactgcagctggtgtgtgtca

SEQ ID NO: 149310 - DNA, 507 bp, Homo sapiens
tttaaaatggtttaacatagtgtgcaacagcaatacatacttctagatacctactccaactaaaggggaaaagtgagctaacataacattttctagaatgtttttcccacaaaagcaagcgtctgtttatctgtttaagtctactatgtttcatccctagaagctcactcaaaatttataagccactaacattatctcatcattcatatactacattattataagtgcaattctttaagtacattgatattacataaagatcctacagcaattggaataacattttgaatcttggagattttcattatayatgcatggatgataatatgaaaagtatgaaaaacacacagactttattttgcactttcttatcattttcaatagcttcaatttgacagactcagtgatgattttcttaactgtcatttctatattctttcccctctacttttgatcatctgacaaatgctattggaatacttattatggactgcaccaaaagtattc

SEQ ID NO: 149311 - DNA, 547 bp, Homo sapiens
ttagggaaagcacaatagagtggggagatatggaaagcatttgattaacagtggaaggctgaataaagaggtgtttacctattcttactacaatcagtgacaagaaaacagccattctttcatgtaacttcatcttttattaacactggaaaagacatcttgcagcagcaattaccatttaacacaaaattttaaggacagcagaaaattttagggtacaaaagatttccctttggattttattcttttagtatatgtgcttggagacaacaaactgtaaagaggagtaatgtaaatctgtccaaascagaacatttgcagttttactttaatgccaaaaacagtgcctttgttcaatgacacctgaacatcagtttatgtaaaggcttagcaggtggattagcagatggtagtcagaattcccaagtttaccactaatattcattacttcatcaaaaccaagatgaaaaaaaaaaactatttaaaagacaaggctaagcatatatcaagtcctattatgtagactagtgagctaaattttgcattc

SEQ ID NO: 149312 - DNA, 547 bp, Homo sapiens
ttagggaaagcacaatagagtggggagatatggaaagcatttgattaacagtggaaggctgaataaagaggtgtttacctattcttactacaatcagtgacaagaaaacagccattctttcatgtaacttcatcttttattaacactggaaaagacatcttgcagcagcaattaccatttaacacaaaattttaaggacagcagaaaattttagggtacaaaagatttccctttggattttattcttttagtatatgtgcttggagacaacaaactgtaaagaggagtaatgtaaatctgtccaaaccagaacatttgcagttttactttaatgccaaaaacagtgcctttgttcaatgacacctgaacatcagtttatgtaaaggcttrgcaggtggattagcagatggtagtcagaattcccaagtttaccactaatattcattacttcatcaaaaccaagatgaaaaaaaaaaactatttaaaagacaaggctaagcatatatcaagtcctattatgtagactagtgagctaaattttgcattc

SEQ ID NO: 149313 - DNA, 549 bp, Homo sapiens
gtaggtactattttttactattcttattccattmttattttatattgatatctatgttttaggtagaatattaatgatatgtgaaggggaaagaattgtcaaatgtcacacagccactaagggttacatagggacttggaccttgtatggggaaagccggtggagaacgaagggtaagcatgatacgcagatgatctcaggcccaggctgtggttcaaataaggcagatcattcgagtggaattcctttggccaggaaggataaaagggcaggcggtcttagtacaggggctcagatgacatattttgacaacaacaacaacaacaacaacaacaaaaaggttcttgatgtggctttgaattccatatctctttgaaagaatctgaaataaacaatcaatgagactttctaagagctgctggaatccagaactgataatgagaccagtgagagccaccatcttttcctgtttcctccaccataaccattatgccatcataaccattgatccaataatatgacaaccagtggagcaaaattttacccaaa

SEQ ID NO: 149314 - DNA, 549 bp, Homo sapiens
gtaggtactattttttactattcttattccattcttattttatattgatatctatgttttaggtagaatattaatgatatgtgaaggggaaagaattgycaaatgtcacacagccactaagggttacatagggacttggaccttgtatggggaaagccggtggagaacgaagggtaagcatgatacgcagatgatctcaggcccaggctgtggttcaaataaggcagatcattcgagtggaattcctttggccaggaaggataaaagggcaggcggtcttagtacaggggctcagatgacatattttgacaacaacaacaacaacaacaacaacaaaaaggttcttgatgtggctttgaattccatatctctttgaaagaatctgaaataaacaatcaatgagactttctaagagctgctggaatccagaactgataatgagaccagtgagagccaccatcttttcctgtttcctccaccataaccattatgccatcataaccattgatccaataatatgacaaccagtggagcaaaattttacccaaa

SEQ ID NO: 149315 - DNA, 549 bp, Homo sapiens
gtaggtactattttttactattcttattccattcttattttatattgatatctatgttttaggtagaatattaatgatatgtgaaggggaaagaattgtcaaatgtcacacagccactaagggttacatagggacttggaccttgtatggggaaagccggtggagaacgaagggtaagcatgatacgcagatgatctcaggcccaggctgtggttcaaataaggcagatcattcgagtggaattcctttggccaggaaggataaaagggcaggcggtcttagtacagggsctcagatgacatattttgacaacaacaacaacaacaacaacaacaaaaaggttcttgatgtggctttgaattccatatctctttgaaagaatctgaaataaacaatcaatgagactttctaagagctgctggaatccagaactgataatgagaccagtgagagccaccatcttttcctgtttcctccaccataaccattatgccatcataaccattgatccaataatatgacaaccagtggagcaaaattttacccaaa

SEQ ID NO: 149316 - DNA, 358 bp, Homo sapiens
actaaaagagagttacagaaagatttacactggaaaaccctgaagataaatmaaaaaatatatatttttttaaagttcaaataatccaagcagtttgggaggcccaggcacacagatcacttgaggtcagaatttcgagaccagcctggcccatatggtgaaaacccatctgtactaaaaattttaaaaattagctaggcatgatggtacatacctatagttccagctactcaggaggctgaggcttgagaatctcttgagtccaggaggcagaggttgcagtgagcagagatggcaccactattctctagcctgggcgacaaagtaaaactctgtctcaaaaaaaaaaaaaaaaaaa

SEQ ID NO: 149317 - DNA, 358 bp, Homo sapiens
actaaaagagagttacagaaagatttacactggaaaaccctgaagataaataaaaaaatatatatttttttaaagttcaaataatccaagcagtttgggaggcccaggcacacagatcacttgaggtcagaatttcgagaccagcctggcccatatggtgaaaacccatctgtactaaaaattttwaaaattagctaggcatgatggtacatacctatagttccagctactcaggaggctgaggcttgagaatctcttgagtccaggaggcagaggttgcagtgagcagagatggcaccactattctctagcctgggcgacaaagtaaaactctgtctcaaaaaaaaaaaaaaaaaaa

SEQ ID NO: 149318 - DNA, 400 bp, Homo sapiens
ctcactgaagccttgggctccccaggctcaagtgatcctgccatcttagtcttctcagtaactaggactacaggcacacaccagcaggcctggttaatttgtgtatgtgtgtgtgtgtacattttttgtagagacgaggtttggccatgttacctagactggtctcgaactcctgggctcaagcaatcctcccacctcaacctcccaaactgctaggattacaggtgttagccactgcacctagccttggtgctttaaatatgtgtgttatgactctcaaatatatggacatagcatgtgatattctccaaagttatttgatgatggaaacatttttttagagggartatcctgcagggtcagtttttcagggaacatattttgagaaaggctagattag

SEQ ID NO: 149319 - DNA, 546 bp, Homo sapiens
caaccattccaccagatgtgcagatatcaatacagagaaactagaaacaaggaaaagcgaagaaacatactgccaaaagaacataataattcctttgtaacaaaccctaaagaaaaggaaatctatgaaaggcctgaaaagaaattcaaaataataatcttaagggtacttagggagatacaagataaacagaatgacaattcaacaaactcagaaaacaattcatgaactgcatgcaaaattcaatagttatacatcattaaaaataaccaaatagtatcttgaagctgaagaattcaatgactataataaaaaatacagtcaaaagctgtgatagactagatcaaggagaagacaggctttctaaacttgaaaacagatcttctgaaataatctagtcagacaacaaaaaagaaaaaaaatgaagaaagcttatggtccctatgggacaccatgaaacaaacaaatatttaccttatgactgyttcaaaagaagagatggtaaaaggcataaaaatctatttcacaaaataatggctgaattag

SEQ ID NO: 149320 - DNA, 469 bp, Homo sapiens
ctgtttgtgtggtgtactatatttattgacttgcatatgttaaacaatctctgaatccctggtataaaacccacttgatcatggtgaattacctttttgatatgctgttggattcagtttgctagtattttgttgaggatttttgcatctatrttcctcagggatattggcctgtagttttctttttttgttatatcctttcctggttttgatattaaggtgatactggcttcatagaatgagttaaggaggattccctctttctctatcttgtggaatattgtcaatagaattggtaccaatttttctttgaaagcctgatagaattcagctgtgaatctctctggtcctggacttttttttctcaagcaggagttttgccccatagccaccacagctttatccgtaatgtggtaagtcccacctgaagtcagcaagtctcagaggctccccccaggcccttgatgta

SEQ ID NO: 149321 - DNA, 601 bp, Homo sapiens
gtctactttttgaataatcggagctatataaaagcataagtaaatgattatatttctttttcaataactcagatcagctctgttctgtaaagtcttcccttcccataccattacaacatcttttgcctttttctcctatgataaattaagctcaatgaaaacctcaatttcatatcaaatttaatgttcccctcctttactactgcctgccctgggtacaaatgattggacaaaaagaaggctcaacctactctataaatactttatcttctgctttctttactgccttggtgtgttaaggtagagaaaaaggataaaaagagaggaaggatgagtgtcaacctggcacagttgcatccatttctataaggtagagaaaaaggataaaaagagaggaaggatgagtgtcaacctggcacagttgtcatccatttccagtagctttgatcaagtaagtttttactgtacactytaaatgttgctcagatttgcttgggtctttagggctcactaaaggcctagagatgccaatgtgtagttttgatgaggcaatctatataaggctttactggctccacccagatgttacttttgataccct

SEQ ID NO: 149322 - DNA, 417 bp, Homo sapiens
gatgctaaaggtctacagaataatagcaattgtgatcaaatttattttaatctttccccccatattcaggctaactagatttcatttgtgagaagaaaaagayttaaatgtatagtcttaaagtattattcatcttagatatcctgatggtataaagatatcaaaaaatcaaataaggattacaataaataatacagatccccttctaaagaattattagactatgtgctccaaaagaaaaaatgtaaatgcaaataaagttagagagctaagatattggcaaaattcattctttggcataaatttagtactggaatgtaaaatctgaaaatcccaaattatcataaaatgttggaaaaatgtgataagttccccgcacaagaatacagattgtgtattagctttgtttttctcaca

SEQ ID NO: 149323 - DNA, 595 bp, Homo sapiens
aagaattattagactatgtgctccaaaagaaaaaatgtaaatgcaaataaagttagagagctaagatattggcaaaattcattctttggcataaatttagtactggaatgtaaaatctgaaaatcccaaattatcataaaatgttggaaaaatgtgataagttccccgcacaagaatacagattgtgtattagctttgtttttctcacaacgaatttccacaaatttattggcttcaaacaacattcgtttattgcctcatagttttctggggttggagtccaggcaccaagtggctcatttagattctctggagtctcacaagagtgaatcaagttgtcagcagggctcttgggtaatttaagttggcagaattcagttccttgtaattggagaactgaaattcctattttcttgctggtcatcggctgggggtagttctcagcttttagagaactcacatgtcttccyatatggatccttctaaagcagcaatgacaggacgagtttctcacacacttcgatttctctgacagatccttttctgaggcagtctccctggctggaagcagtccttactgttaaggactcactca

SEQ ID NO: 149324 - DNA, 538 bp, Homo sapiens
tgctgtaccacaaggcaattcatcaatacccatttttcattcaattttttaagtatctataaatgtaacatatagttatatataagataatttttaggacttcatttgtacttggcaaatgtggtttctcttaatcagaaagagatttttggcctggcatcagggctcatgcctggcaattccagcattttgggaggccaagctgggaggaccacttgtggtcaggagttcgagaccatcctggaaaacatggtgaatccctgtctctactaaaaatacaaaaacaaaaattaggtgggcatggtggtgcatgcctgtaatcccagccactcaggagactgaggcaagagamtcacttgaactggggaggcagagggtttcagtgggcagagatcatgccactgcactccagcctggatggcagatcgagactttgtctcaaaaaataaattaattaagtaattaattaaattaaaaaataaaaaagagtttatcgtctctaattgtttatatcaagaattgcaaatcaaaaccacag

SEQ ID NO: 149325 - DNA, 420 bp, Homo sapiens
tgcagcatttcttaccttcctcgaggatgctgttaagaaagaactggctactcgaaagtgaagctctggtgtttcaactccagagcttgcatccaaaaagtacatgaggttgtaatgatggatagttgttggaataaccattgttctcactggtccctagaaagggatctgtggctctgcaatggggagaaagacaggttgctgtttgcttctcatgtcagcastatggctcagaaggaagcaccatagccgcagtcaccccagggaagtatgaggcacagtctccaacaccactgaggcatcgccgctgcaagattgattctgccttaggggaggcaagacaaggctgaatgtgcaatgtgtaactaccattcgctgagcctccattgttaagcaatctttgtgtcaggtgctttacgc

SEQ ID NO: 149326 - DNA, 593 bp, Homo sapiens
tggtaatcttaaactcctatctaattgttctaatagctagattctctctgtgtctagttctgcaaattactttatcttttttacaaagggtcttttcgttttctttttgtgagtcacataacttttgatcagatgctaaacataacatatcaaatagcggtagagtctgaggcaaatagtatttattcctagaaatgagttctctcagkttgttagtacagggagagtttgactcaatctagtcaataattgagttgggtttggctttttttgttgctgtcattatcctcagtgacccagtcgtcaaacaccttcagcattgggctgccatcttctgtacagaggatggggctgctggaggggctctattattctttttctatccctccatttcagcagttcctgaatgtctgaatcacagaaggagtctctttaaacccttttccatcagcggtttgcttctgctggttacttagtgttagctgcatggtgggggtgaggaggattcttgttcccctggttcaacctcaggctaagtaaggcaagacttcttcatatgggtcttgtgaatgaggtatttttttagcattcct

SEQ ID NO: 149327 - DNA, 580 bp, Homo sapiens
ataacggggcttagaaaaagactatgctttcaaaaacaaaacaaaacaaaacaaaaaggccagagagttgtccaatgtcaataacgacaaagatagaattgagggataaagaagcgtacccaccaaaaagartgtaaaaaatctgtcatgtagcactaatgaaatgcaagtgcattgactgttcaaggaccaaattcacatcttgtttcagctaggaaaacagggaaaagtatgatgggggatgaatatgtgcaaagacaaagggagaagtataacagggcctgaattcagagtatgataagaaattcagtgtggtaggagcataagcgagtgtcagaacatgatgtattcagggaagaaacaaatgataacttcattaagaatgattctaggataacagtgaaaatcacttttgttacttgccctaaaaaagaacacctttgagagctaagtcaccttatatgccttgagatataattcccacatttcttcacaagggaaccccttcaactccacctcacacacttgatgtgtacattgacaataatttaatgaaattgaatcctggcaaagctggtca

SEQ ID NO: 149328 - DNA, 535 bp, Homo sapiens
tgaaagaattaatattgttaaaatagtcatactgccataagcagtgtatacatccaatgcaatccctgtcaaaattttaatgtcattcttcacagaaatagaaaaaacaatcctaaaactcatatggaaccaaaaaattcctgaatagcaaagccatcttaagctaaaagaagaaagttggagtcatcagactrctggatttcaaaatatattacaaagctgtagtaaccaaaaagcatggcactggcataaaaacagacacatggatcaatggaatgcaacagagagcccagaaaaaaaattccactgaatatccacataacagaagaataaatacagacccttatctcactgcttaaaaaaaaaatagactcaaaatcacttaaacataagcactgaaatagttaaactactaggagaaaacataggggaaaagctctatgacattggtctgggctgcaatttcttggtgatgttccccaaaacacaggcaacaaaagcaaaaataaactagtaggattgcatcaaatttaaa

SEQ ID NO: 149329 - DNA, 606 bp, Homo sapiens
aaatgatttaattgccgtggcaagtgcaacgaaaagtcctataaatcaaggatttaaaaatatccatggattggtcatttagaaggttatcggtgactcagcaaggcaaggttcagaggagtggtaaggccaaacattagactgaaataaactgaagagtgaattagaagaaattatagactgttcttgtcagagatttggaggaacagagcagagagatcgaacagttgcttaatcaagacgcaaacacagtatttgtttgtttgtttgtttcttttccctttttggggtaagaaatgttcaaacatgtttattggctgaggagaatgaacgggtggggaggtgagggtggattggctgaggagaatgaacaggggtggggaggtgagartgggggaaaatgaaagatattagttgaagaagcagaatatctaatggagcaaatcttggcaggagtgagaggagatgtggcctcagacatggtcagggtttggatttaaacaaaaagtgaggcatcctttcttctggtactgagaggaaggcaatgaatttgatggcagatataaactagcttgtggagttacatgtaagaaagatttggaggat

SEQ ID NO: 149330 - DNA, 600 bp, Homo sapiens
gagaaaacatgcggaagccacacttagcttccatgtggcttttgaaactcatttccttttaaatatggtaagaatctcatggagtgctttgaaagtatgcaatggagaacataaaatgtgcaatcttttatacctagagtgttcaatcatgtaattccctggttagagtttcattctagatagtttgtccctctacaaactatctacaaatggagtccagggctccaaccttaggcctatgccatgtcagcatttcgtatggtactctctctctgtccttgttgatatcttgcatcttttcttggttctgtagtrcatttttaaataagaaatgtgattggcctggcttgtcagaatccaatgtaggaggtcactgcaaagcttatggattggtgactcttgagtcagatgcacatccctttcaatcagctgagcaaagggtagggcctgtgagtgggcagtttccttcagatggggatgtgggctcgcaggcacatgaaaaactgtaaaggaccttatagagaatgaaaagtcttcatattaattggtagaagggggacaataaaccctttagcatgtcagataccacagttacaattt

SEQ ID NO: 149331 - DNA, 645 bp, Homo sapiens
  misc_feature (1)...(645): n = A,T,C or G
nnnnnnnnnnnnnnnnnnnnnnnnnnnnnnnnnnnnncgtttctttagctaaatatgagttacattttacatgactactcaagaaacccaaactacatgaacgacagtgaaatatctaatagtggagaggtaaatgttttctttcggacataaaacaaacaaaatcaaagaaacaaagccatcagatgtgtttctgctctgtaagctgttgttcaggttgcctcatacaaacataggtgtgagctaaagaaggtcatggttaaacaatggtggacaatatgtgkgtctggactctgctcttacagtttacttatgcccactgttcatgctatacatttgttgttactaaataccaccgactgtgtggcttaaacaacagaagtttgtttccttgcagtcctagtccaagatcaaattgtcagcagaactgatttattctgaggttctctctccttggcttggcttggagatggatgccttcttctcgataccatcacatggtcttccctctctgtgtttctgtgtcacgatctcctcttggcaggacaccagtcatattggtttaggaaccactcataagatctcattttaccctaattacctctttaaaggtcctatatctaaatctagtcacattctgaggta

SEQ ID NO: 149332 - DNA, 574 bp, Homo sapiens
tggcctccacctgtaatcccagctactcaggagcctgaggcgggagaatcgcttgaacccaggaggagaaggttgcagtgagctgagatcacaccaccacactccagactgagcgacagagtgagaatcctgtctcaaaaaaataagtaaataaataaataaataaaaagatgactcaagggttccaaaactggaagggaaggtggacaatttcagagagaagaattcatgaaatctatcaatagaataagtaggaagttgacagttgacagtaataagataaaaatgcaaattttagaacatttaatatatattaattaaaaatttccacacactggtataaattacttatgattattttttcaattatttatgattatttattttctcatcacaatagtcctatgaaatattttttattatcaattcagttttaaagatgaggaaacaaatgtcttgtatamccatttgaaagtcacataataagtgtcaaagttatcatttaaactctaagagtagttacatttcaaatactttttaccttggagttagaaatacgaacagaaacacaaga

SEQ ID NO: 149333 - DNA, 588 bp, Homo sapiens
ccctgtagaaacaaacagggtaaatgtcccaagacaaaatttgagaagtcttaagatgagaatgcagaacaattatttattttcttgttggtagcaattattctgtgtgataatggactcaaatctaataattattattaagcaattatatagccctttatttttgcaaagtgctttacaataatttttattagatagtcatcacaataaccctgtgaaagaggtcataatatattcaaggagaagaagataaagctattttttctgaaatagcttacaataaaatgttctaattttcctaattctaaatacaaaagttttatgttgtgatttgtttggccatctagcacacgacctggtttaataatgtgcaatttggaatcacccggcctgttaactgcctgatgcaattgctgagaaagtcctayatcctcaagggcaatacaaataatcataaagattaaaaatgtgaggagcagacaatagcaggacagaaattcaagaaaaggaatggttaatggaactttataaattatttaatcagaacaataaaaattaatatttgctttgttttacaatcccccaaac

SEQ ID NO: 149334 - DNA, 588 bp, Homo sapiens
ccctgtagaaacaaacagggtaaatgtcccaagacaaaatttgagaagtcttaagatgagaatgcagaacaattatttattttcttgttggtagcaattattctgtgtgataatggactcaaatctaataattattattaagcaattatatagccctttatttttgcaaagtgctttacaataatttttattagatagtcatcacaataaccctgtgaaagaggtcataatatattcaaggagaagaagataaagctattttttctgaaatagcttacaataaaatgttctaattttcctaattctaaatacaaaagttttatgttgtgatttgtttggccatctagcacacgacctggtttaataatgtgcaatttggaatcacccggcctgttaactgcctgatgcaattgctgagaaagtcctatatcctcaagggcaatacraataatcataaagattaaaaatgtgaggagcagacaatagcaggacagaaattcaagaaaaggaatggttaatggaactttataaattatttaatcagaacaataaaaattaatatttgctttgttttacaatcccccaaac

SEQ ID NO: 149335 - DNA, 517 bp, Homo sapiens
tagtaggggagttagtcaccaggttctttattttcttggtgagggatggagcactttctcctttgtgaatcctcttcgtgggatcagcgattaggctctttgctccctggaggcttggggcagctgtcaagagcccagaccactacatggcctcagagctgcattttaattttgcagatgaaggaagtggcctcataggagtgggagactgtggggttggggctggctaatatgcagacttttccaataggctttataagttagcaaatctaatcttaacttttttttacttcaggtctaatatccaaaatgagaaaaattcaattcacgaagaaaaattcatccattagaacttagaatatctagttaattaagtgatcagtatagtcaaattagttatttgatattttattgataatgyattcatatacatcaactacatatctatatatatgtagataaagataagtagatatatttttctatatgcatgtgcatacatgcaaatgtagtttta

SEQ ID NO: 149336 - DNA, 505 bp, Homo sapiens
gagtttaactaataacaaaatggttggatttactggtttccaatggactgcaacagaatactctcccttcaaagttgggtcgtgctatctgtagtcatggtatcctttaagtttccctgtaaaattcagatttagagtcatttgttgcactgacctctatagttatttcaccactattttgttttttattcttgttctgaaaagtagtttgccctttgccccctcccttattaagttccgtcactggaacaccatcagtcatcattgcttttttgctgcctatataattttctttatatatatatatatatatatatatatatatatatatatatatacctatatctatctatctatatgcatctatctakatacatatacagatatctggatagacagatagatagatagatagatagatagatagatatatatagataaatagatagacagatacatatatttatctttttggcatcctgagaagtttggcatgttttatgta

SEQ ID NO: 149337 - DNA, 505 bp, Homo sapiens
gagtttaactaataacaaaatggttggatttactggtttccaatggactgcaacagaatactctcccttcaaagttgggtcgtgctatctgtagtcatggtatcctttaagtttccctgtaaaattcagatttagagtcatttgttgcactgacctctatagttatttcaccactattttgttttttattcttgttctgaaaagtagtttgccctttgccccctcccttattaagttccgtcactggaacaccatcagtcatcattgcttttttgctgcctatataattttctttatatatatatatatatatatatatatatatatatatatatatacctatatctatctatctatatgcatctatctatatacatatacagatatctggatagacagatagatagatagatagatagatagatagatatakatagataaatagatagacagatacatatatttatctttttggcatcctgagaagtttggcatgttttatgta

SEQ ID NO: 149338 - DNA, 472 bp, Homo sapiens
gcctgggtgacagagcgagaccttgtctcaaaataaataaacaaataaataatacaaattcaggaaaaaaacactaagtaattatataacctaataagttattataacataaatgcacctggtcatcatcaggtcaagtaatagaactttgtaatctaccctagaataccaatccctgtgccctatcttcgtcacaagccgctaccttctgtaggcaaccagtattctgacttatatagtatttatgtgtktgcatttttaaaagaattttattatcaaaatgcacctccccaggtgttatagtcatgcctattaaaaaaaatagtatctttgaaatctcttgatctttagtttccttgctaaacttttgttttactaaattgttgacaaacccatgctgaatttcctgtagagattcccacaatccggattgatcatatactcatcatgcagtttaacatgttcctgtctg

SEQ ID NO: 149339 - DNA, 566 bp, Homo sapiens
aatggcagttacctggctaaggggaaaggagttagggatggagcagaatcagacaccattccttcctagagaaatctctgttcccttcccacttcccagcagccatgggaggcttttagaaatagaaacagaaaaacagaccaaagaagccaagtggtcttggccccctacccctcaaaatagtgcccacatcctgcttcctataggtgtatatttaattagtatgttccctgttcattcattcaacgaatattcagaaaatgctctttaatgtgccagccactgttctgtccactgaggatgcaacattgtgcaaaacagatgaaaatccctgctcttatagagtacccattctwcagaggggtgggggtgaccaaaagcaaacaaatgaatatctaagaggatgcgtggtctagggctgtgcagggcaagggaaggggctagtgatgttggggcatgctgtttcacctccagccttaagaaagccctctcttgcaggggccccagaaaagtgaggacctgtagccagagggcatgttgggagaggtgtttcttggccaagaaaa

SEQ ID NO: 149340 - DNA, 427 bp, Homo sapiens
agatctggttggttgaataacgtccctctggctgctgtatggaaggtggatctcagaggagtgaktctgaaagacattgtggtgatcctgaggactatcatctgatttttttttatcttgtccgaatttctatctcaagggtctggggagtcatgttctacaaatcataaattctcatcagatgggtttaatttaaccctatataggatgacttactttccaacctgactctggcataacattatgagacaaggaagaaaatcaaaatattttaccccaaaacatgtttctttgccatatcttgaaatggccctgcaaagctgtcctttgtgggggaaaatttgcatctataaagaatctctattaacctagctagttctttttcttcaagaccctcccaatcctaaagagattaactaaaagtcta

SEQ ID NO: 149341 - DNA, 416 bp, Homo sapiens
taagatctggttggttgaataacgtccctctggctgctgtatggaaggtggatctcagaggagtgagtctgaaagacattgtggtgatcctgaggactatcatctgatttttttttatcttgtccgaatttctatctcaagggtctggggagtcatgttctacaaatcataaattctcatcagaygggtttaatttaaccctatataggatgacttactttccaacctgactctggcataacattatgagacaaggaagaaaatcaaaatattttaccccaaaacatgtttctttgccatatcttgaaatggccctgcaaagctgtcctttgtgggggaaaatttgcatctataaagaatctctattaacctagctagttctttttcttcaagaccctcccaatcctaaagagatt

SEQ ID NO: 149342 - DNA, 586 bp, Homo sapiens
ggaaaggattgtagtgttcataatctacctcagtcagaattcttggttagaagcaaataaatggactctggctatttttaacaaaaataacaattcttaggaggctataggtatttatggaagcaaacaaagtccagaggtcctggcttgggaaagtagaaggaaacaaaaggaacactgtgtggtttagaaataagtggggaggaagaaaggggaggcagcaagtgtaaactgttcctctgagaagcttaagaagcaggagctaggcatggtggctgatagctggtgactgtaattccagctacttgggaaggtggggtgaaaggatcacttgaacacaagagttcaaggcctcagggagctatgatcatgccactccactccagcctgggtgacagaatgagacycttgaagacaaaagaagaacaacaggaggaagttagagaatagtaggtatggttaaataggatcaaagaacgggtgtccttttaagaatgggtaaaacatgagcatgcttattggcagagagacaaaaaaacagtatggaaaggaagagtttctcttatcaccatagaattaaaccaga

SEQ ID NO: 149343 - DNA, 442 bp, Homo sapiens
atgaaatcaagtttatttaacaatgcaagactggtttgctattcaaaaatcaatgaaatatgaatacatatgtagagcaactaaatgttaagaaactccggtttccagtccaacatgtgaagagcttggaaatcttcatattaaaaaaaaaactgaacaaattgaaaatcagcaattcttacatccgtcagagaattgaggtcccagggcaatctgctgccttgaaaatgaaagaaacagacagacagatacagagaatttcagcttaaaaggagcagacggcctcagctggacgagttcgagtttaaaactccaggaggggccagtcttggagacrccacacagctgggagtttcacctccagaagccctactgttactcaaaaggggtcccaagccaaaccccaagagagggttcttagatcttgcacaagaaagaattc

SEQ ID NO: 149344 - DNA, 532 bp, Homo sapiens
gaattcttgtgggaccggatctttttccttcctcttgtaaaaaaaattctgaccctacgccatggcttaactttgatttccaaatttaaatgtataaaaccaatgttatttgggatgagtgaataccaggatggttgaagaggtggaagcaagatgaaggcagccgagcaacccctggaagctgagaaatcccggagtgaatcctccttgggtctgtgccccaccttgggaacaaatcaaccgcactgaactctttcgggccataagggggccattcactccatgatttctgcaggatgtatttatacccttgaagaagcttaaaaaaaaaaaaaaaaaaaaaacagtccggagactgcagggaaaaagaaaccaacccccaaaccaaatacaccaggggctttgtgctcctacatccygtgctcccgccattcatccgtaacaaaattagtgtaatcatatctgcaacggaggaggaatcaaatttgctcttcggttctgctgtttgggtagaggtttcctcaaggggaca

SEQ ID NO: 149345 - DNA, 448 bp, Homo sapiens
ggacattgcatagaaatggaatcatacagcacgtggctttcatgtctgccttctttcactcagcatcgtgtctccgagttcacccatggtatagcatgtaccattccattttatggaagacgatatttccttgcatcgatgtaccacattttgtttatcctggttgtctcttttttaagagcaagaaaggtctttcccagagcccctggcagacatctctccctgtctcaccagccagacctgaatctggaggtgatgcctaatccaaaaaccggtgggaggacgggatgattaggggtgctctctgactctcctgtgcgggaaaatgtctcttccctgggctcacggtagtctggaggaagctccctgaatgacacgggactcygccatcaagcgtggcatggggagtggatttggggcggccatccacagtgctgctgcagcacct

SEQ ID NO: 149346 - DNA, 408 bp, Homo sapiens
acaggtatgcctgagagaatagttatgtgctacctgggccaggttgccctctgctcttctcctagactgtccrccatttgccaccaaattcttcctgttgcttgtctacaatgaccctgtcatttgggctgtaacaagagtaatctatcttgtgtgaatgatatatagaagctattgttattgttctatctcatcctgctccaccttgccctgcccttctctggaagtggatacagcgggggataccccactcaatctagttcttacatccccttctcatcccaggtggctgtggaccagaatcaggaccagtgccttgcccaccttggtgggagccatttattgtgctctgtgtgaatggtgtcccctggtcgtggaggtgtgtattttgggtgaggacaatggtaa

SEQ ID NO: 149347 - DNA, 539 bp, Homo sapiens
ggatctacactcattggcatttctagattgccaggctctccagctcccagtctgggatctgtgaggcgcaaagaaagtccagaaaactcaccaccatgtgctttctcyggtcttgagatccgcagccagtctgccatattctctcctcctttccgagtcatctatttttatttatttatttatttatttatttatttattctttagctgcacctgtgatagactgcttgatattattcccatagaacaatgatgttctgttcatatttttgaggctttttctctattgctttattttattttatttatttttccatagattattggggtacaggtcggtttggttacatgagtaagttctttgggggtgatttgtgagattttggtgcacccatcacctgagcggtatacactccaccctatttgtagtctttcatccctcactcccctcccactcttcaccccaagtccccaaagtccattgtatcattcttacgcttttgtgtcctcatagcttagctcccacatatcagtgagaac

SEQ ID NO: 149348 - DNA, 539 bp, Homo sapiens
ggatctacactcattggcatttctagattgccaggctctccagctcccagtctgggatctgtgaggcgcaaagaaagtccagaaaactcaccaccatgtgctttctctggtcttgagatccgcagccagtctgccatattctctcctcctttccgagtcatctatttttatttatttatttatttatttatttattyattctttagctgcacctgtgatagactgcttgatattattcccatagaacaatgatgttctgttcatatttttgaggctttttctctattgctttattttattttatttatttttccatagattattggggtacaggtcggtttggttacatgagtaagttctttgggggtgatttgtgagattttggtgcacccatcacctgagcggtatacactccaccctatttgtagtctttcatccctcactcccctcccactcttcaccccaagtccccaaagtccattgtatcattcttacgcttttgtgtcctcatagcttagctcccacatatcagtgagaac

SEQ ID NO: 149349 - DNA, 540 bp, Homo sapiens
tatgcttactacatgggtgataaggcctgcactccaaaccttaccatcacacaatattctcatgtaccagatctgcatatgtagcccctgtatctaaaataaaagttgaaataaaaaagaaaaatgattattagcttttgaaatcaatgcaaatgcttcttaagaaaaaaacaagaatatcatatatcagtcttctacttcaaatattcaggatcttcttactgcctttataatataatacagaatcttcattatggcttttgagaacccaaaagctctatctattgcttaccttgttaggccagactcatacctctcactcctcatacatgacagtgcaataacacgggtttgtttaagttcctcaagcacatcaagctcttttccaccatgaggttttgtgactcttgttccttctgcctagaatccttatttgcccgctcatgccattcctggcatgccaatcagggttcaaccagaggagcagagtgwctatgaatattatggcataatgaatttattataggaattatgacttaa

SEQ ID NO: 149350 - DNA, 606 bp, Homo sapiens
aaagctttttactgaaaagccatcttaagacattttaagagggatatgtttggaaatactctctcatcactcacttgtgtcttccttgctggaatttttccactttaagctcaacaaacaactcgtcatttctttggtatttattgtaatattaatcatacagacacataccccccaaaagataatgcagtaaagacttttggggaaaatacatcttttctataggtttcccattttaattctcttaatttcattgtgtaaaacttgttaaaaatactattttacagaggaaaaggattctgagaatgttgattattgatactatccaaacccaaaaaggatctgtttgcaaaytgaatttcttaactgaatccagtaaataatcatcataatattaaaccagagtgcagatcctgaaagagggactaagattcctatgaggtgtagctaattggtaacacagaacacggactttgaggggatatcacactaaattaattagttcagagatgcactgagttcacaacttgattacagggctggctgattccctcaaaacaatagccttaatttaaaccaaccatataaacttgccttcctttgcaa

SEQ ID NO: 149351 - DNA, 545 bp, Homo sapiens
cccaccctaatccatcatgaccttaatttcattacatctgcaaatatcttattttcaactatggccacaggcacaggtaccagggrttaggatttcagtatacctttgagggggatgtaattcaacccactacagccttccatagacagaaaggaccgactcacccaaggcatgttgaatcaccttctagattacgtcataagcaaaaagggtgatcaagattggccatgtttgcagacaatatgcaagtggaaaagcatggcatttggctctattagtctccctgctgctagtctgacactctcctgtccattctctgctgtgttctaagaaggattgtaataaatctaatcatatcactcccctgttcaaaattctttggtggctccacctggcctaaagcataaacgctttactccattaccagcccttcgtggcctggtccctgtccaatccagctggggctcatgatttgctcctccaactcatcagaggactgggaagagaagtcagagggcacagtcatgtcgaaagggaaaccccag

SEQ ID NO: 149352 - DNA, 545 bp, Homo sapiens
cccaccctaatccatcatgaccttaatttcattacatctgcaaatatcttattttcaactatggccacaggcacaggtaccaggggttaggatttcagtatacctttgagggggatgtaattcaacccactacagccttccatagacagaaaggaccgactcacccaaggcatgttgaatcaccttctagattacgtcataagcaaaaagggtgatcaagattggccatgtttgcagacaatatgcaagtggaaaagcatggcatttggctctattagtctccctgctgctagtctsacactctcctgtccattctctgctgtgttctaagaaggattgtaataaatctaatcatatcactcccctgttcaaaattctttggtggctccacctggcctaaagcataaacgctttactccattaccagcccttcgtggcctggtccctgtccaatccagctggggctcatgatttgctcctccaactcatcagaggactgggaagagaagtcagagggcacagtcatgtcgaaagggaaaccccag

SEQ ID NO: 149353 - DNA, 663 bp, Homo sapiens
gggttaatagccagaatctgtaaagaactcctacagctcaacaacaaaaaaccaaacaactcaattaaaaaatgggcaaaggacttgaatagacatttctccaaagaagatatacaactagccaataagcacacctgaaagatgctcagcatcactaatcattagggaaatgtaaatcaaaaccacaatgagataccacttcacacacctcacacccattaggatggcgactatgaaaaaaaaaaaaacaacaagagaaaatgataagtgttggctaggatgtgtaraaattagaagctttgtgcactattggtgggagtgtaaaatggtgaagctgctatgaaaaagagtataaaagttcctgagaaaattaacaatagaattaccatgtgatccagaaatcctacttgtgagtatgtacccaaaggaattgaaagcagggtctcaaaaagaagcttgtacacccatataccagcattgtaccagcataataaccaaaagctaaaaagggaaagcaacccaggtgtccatcagtagatgaatggataagcacaacgtggtgtatatagacaaaggaatattattaagccttaaaaagaaggaaactctgacacatgctattacatggttgaaacttgaggacattatgctaagtgaaataag

SEQ ID NO: 149354 - DNA, 663 bp, Homo sapiens
gggttaatagccagaatctgtaaagaactcctacagctcaacaacaaaaaaccaaacaactcaattaaaaaatgggcaaaggacttgaatagacatttctccaaagaagatatacaactagccaataagcacacctgaaagatgctcagcatcactaatcattagggaaatgtaaatcaaaaccacaatgagataccacttcacacacctcacacccattaggatggcgactatgaaaaaaaaaaaaacaacaagagaaaatgataagtgttggctaggatgtgtagaaattaraagctttgtgcactattggtgggagtgtaaaatggtgaagctgctatgaaaaagagtataaaagttcctgagaaaattaacaatagaattaccatgtgatccagaaatcctacttgtgagtatgtacccaaaggaattgaaagcagggtctcaaaaagaagcttgtacacccatataccagcattgtaccagcataataaccaaaagctaaaaagggaaagcaacccaggtgtccatcagtagatgaatggataagcacaacgtggtgtatatagacaaaggaatattattaagccttaaaaagaaggaaactctgacacatgctattacatggttgaaacttgaggacattatgctaagtgaaataag

SEQ ID NO: 149355 - DNA, 503 bp, Homo sapiens
gaatccagacatttggcccagacattgatgccatattgttaaaacacatttgtataaattccaaaaagaatatctgactttctgatagagtattctgctttgtaaaaattcatattcttgtttctatttaatgaaacttgtattgctggagtacttagtagccacttagaactgctccgtgatcttagcaagaaaaaaataataaagtaactgttcttacatttaaaataygtaattttctgctgaacaaacaaaacagaataaagttgtctaaaaaattttatgttccatatgacttaacaccttctggtataccatataatttagcattatatatctaaactttctcccagccacttgaatgagagcagagaacctttctttctttgcaagtatacatacacgcttggaatatttggcttcacctcaaatctccttgctttttttctgtctttctttgtaccatgatgcatcccatgagcctaaaagtacctagaacacag

SEQ ID NO: 149356 - DNA, 655 bp, Homo sapiens
catttttcctgttaattaatcaacaagccatcactaactatttatgattaactaaccagaaaatgacaggctgaatgaagggaatcataaaatctccacaaatttcttaagcagcagaagaaaaattcttgactaaattatctgcttttttttgggataggtcacttcaggaagtctgaaattttatctgatttatcaatattatagattattgaacttggaccagaagtataaatttagacactaaaatgtgtgttgaactggctaattctcacaacttttcctctagaatccccaagaagcatttaagttattattctttctcattattactaatttcacctaagccgagtagaaagctatgcagttataaacagtccatttaatgatataatgggatgaagccagaactgtcttactactgttaagggaaatrtgaatgtagaatcattaatgtgattcttacattaatgtgaatgtaagtgacacatttgcaatgacaggctgataatattcttatttgaattaagagattagctagattcataatcatgtatactattgattcattttcaattgctacctctattttctattttcacttagaagtaacaaacagcaaaagtattttgacatctcttttgtagagataact

SEQ ID NO: 149357 - DNA, 471 bp, Homo sapiens
gagctgacaaggatgtcatctctggtaaagcctagccttacctgatctgcagggagagaactagtcacaggccaattttctcaccttgaggcaagcaggtcagtcttccgtacccctgcatccactggaggtgggctatcccctgagagtgaggaggggatgcagagtttgatttccggtcaggtggcttctattagccggggagaattctcaatcccctagctgggggcaatagcagctggcaaagttcagaggagtggagggtttgctctagtctgaaaagaggatgcattcagtggagaaaagagcwtccaccacactctactctgtacacgctcagtttcatttgttatgttcactccaaccagacacattttttctcatgattctataaacttcctgcctggggaaatttataagaggagaattattttgagaaactataacacaattgctgcttttggtcccaaa

SEQ ID NO: 149358 - DNA, 582 bp, Homo sapiens
cttatagttctgtggaaaggagatgaccaggacaccctccagtaacaacgtttagggcacgagacacatccactcacatctactaggaaaggagtcaaagacacgtggagtgtttggctgatgcaatgaaataaaatttacaacacaatgaacacactgcagtttaatgatttatataaccttcattgtgttctttgataatcaggcagaaaatgcaaactcttcacatatgtgacatgatttaatattattttataaggtcaaaccaatttttaatttttttcttctctttgccagtatgwttaatcagtatcaacgtttaaacttccagtattcaaaaaatactcctaatgcaatgaaaccattatccttaccggtatatatacattttgtgtgcagttagttcctgaaacttaccctccaatcctgtgtaacaaagttttgaaattaacgacgctaagttctttcctgaccctaagatctgttctcactggccccattgtttggagcagactccccaggtcccattttaggcataactggtctgttattttccatgcctcaacaaaatggcctgccact

SEQ ID NO: 149359 - DNA, 572 bp, Homo sapiens
gaacccactttttgcatcagtatgatctggatgtgagacatggcatcaaaggagatcattttggagctaaaatttgattgcccttctggattttggactttcatgggcccatagtccctttgttttggccaatttctcccatttggaacaggtgtgtttacccagtatgtgtatccccattgtatctaagaagtaaataatttgcttttgattttaccgtcatagatggaaggggcttgccttgtcttagatgagactttggactgtggacttttaagttaatgctgaaagtaataaaaactttgggggactgttgagaaggcatgtttagttttgaaatgtgaggacatgaaatttgggagaggccaggaatgatttggtttggctgtgtcaccaccaaaatctcattttcaataatgcccacctgttatgagaagaacccagtgggaggtaattgaataattgaatcatggggttgggtctttcccatactattcttktgatagtgaataatctcatgagatctgatgatttaataaaggggagatcccctacacaatctctcttgcctg

SEQ ID NO: 149360 - DNA, 526 bp, Homo sapiens
atggaatcaacactccacaattgagatgaggcaagggaaaattaaaattacagtattcttggccttcygcacttagagtacagcttcttttctatgagtggggctgcatagtggaggaaaactccaggtctcaaatttgctgttaactagaatagaacttctgcatacagagatgcggagaggagaaatgccgtggactgccatttccaaggagaaatcataagcctagacttgacactacagagagatgtagccctatgttcttggctacacttacccaaggtaagaattctgttactctaaactggggcaggaagagaaaggagcaggtcatggctcacatgccatcgactctcactgttcttaccatttgtagtagattttcttgaataaatggttttgcatgggttatatccccttggttcactttccagatatttttaatgtttttaaaataattttcacctgttatgggtgtctcacttggagatggtccacagagctcctcataccaccattgcacaac

SEQ ID NO: 149361 - DNA, 526 bp, Homo sapiens
atggaatcaacactccacaattgagatgaggcaagggaaaattaaaattacagtattcttggccttctgcacttagrgtacagcttcttttctatgagtggggctgcatagtggaggaaaactccaggtctcaaatttgctgttaactagaatagaacttctgcatacagagatgcggagaggagaaatgccgtggactgccatttccaaggagaaatcataagcctagacttgacactacagagagatgtagccctatgttcttggctacacttacccaaggtaagaattctgttactctaaactggggcaggaagagaaaggagcaggtcatggctcacatgccatcgactctcactgttcttaccatttgtagtagattttcttgaataaatggttttgcatgggttatatccccttggttcactttccagatatttttaatgtttttaaaataattttcacctgttatgggtgtctcacttggagatggtccacagagctcctcataccaccattgcacaac

SEQ ID NO: 149362 - DNA, 642 bp, Homo sapiens
ttaaaaacaatgtgaacaagagccctgatctgtagcatttgccgatttccttggtgtaaacactcccgcgaaggccgatgtcaaatgctaagctgtatgctgagtcggcacctgggactaggtggctccaaccatactgcttgtgactgaagccaggcaattggacccttgttaggcaaccctttcccttctgaactggaggaggaggagtccttgctgttctctaggaatgcaagctttgtttgtgaccatggaggtgctgacaatcatactctctgccatgtggagaggcccaggagaccacagcttatattgatggagaaatattgagttgttatgcagctttggatccgtctgtcccttctagttctatgagctagtgaaccatgttccccctgccccatttttatttttgacctaacccatttgggtggatttctttcacttgcaactgaaggagttcccattgtgctggtttttctccatttctcccacaggccttctccactcttctctgccctgctttgtgtcagaaaggctgacttcttctttctcatttaaccaataagaagcaccagcaggagaytggaatgcagaaagacacccccgacaactgcccagccagcggtccagctcccattg

SEQ ID NO: 149363 - DNA, 567 bp, Homo sapiens
atgtgatctagaaatgagcatggaacacctaagtggccccaaatacaaatgctaaaatcaaatcaagtaaaatctcaattctcccaagctaatggagggaggtagtggcaaaattcaaatattgaccagtagagaatacatattttgctttggtatgtattcttctttttttttttttttaattgagatgaggtcttgctatgttgcccaggctggtcttgaactcctaggctcaaacagtcctttcacttcagcctcccaaagtgctgggattgtaggcatgagccacccgcccaaccaggtatgtattattcttcccagagcgttaacttttcatattgtggcctccttccaagcccttatacatcctggaagagaygacaggaacccagcagggagccaaagaccctgggcaacattaaacattttgcctccaaaaagaaaatttggaaaaggcccatagttaaatcccttgaccatgagcacatcaagaatattatcctcctaaaatcatcctgacctgtaatgttctaattggagaggcagaaataaagagtgaccagaaga

SEQ ID NO: 149364 - DNA, 567 bp, Homo sapiens
gagcactaacgccatcaagtggagtactgggctgaggcattgtgttggacatcgtcagagagggagctggcagtccaggaataaaaacctttcccacctttaagcaataaaaagatgtgaaaaaaaaatactgcctttaatgcatcacatccttaaataaaatgttaaggaatataaacatatatttcttttgatatttctaagtttatkctcaccaaacacagcaaagaaacaattcaaatgtcaataatctatccaattccactatccaactgcaaatatgttggtataatttcttttttttttttttttttgagataagatctcactctttccctgtggctggagtacagtggcatgatctcagctcactgcagcctcaacctaccaggctcaagtgatcctcccacttcagcctcctgagtagctggaactacaggcacatgccactatgcctggttaattttgtattttttggtagagacagggtttcaccatgttatccaggctggtcttgaacttctgggctgaagccatctgcccacctagacctctcataccttggta

SEQ ID NO: 149365 - DNA, 567 bp, Homo sapiens
gagcactaacgccatcaagtggagtactgggctgaggcattgtgttggacatcgtcagagagggagctggcagtccaggaataaaaacctttcccacctttaagcaataaaaagatgtgaaaaaaaaatactgcctttaatgcatcacatccttaaataaaatgttaaggaatataaacatatatttcttttgatatttctaagtttatgctcaccaaacacagcaaagaaacaattcaaatgtcaataatctatycaattccactatccaactgcaaatatgttggtataatttcttttttttttttttttttgagataagatctcactctttccctgtggctggagtacagtggcatgatctcagctcactgcagcctcaacctaccaggctcaagtgatcctcccacttcagcctcctgagtagctggaactacaggcacatgccactatgcctggttaattttgtattttttggtagagacagggtttcaccatgttatccaggctggtcttgaacttctgggctgaagccatctgcccacctagacctctcataccttggta

SEQ ID NO: 149366 - DNA, 567 bp, Homo sapiens
gagcactaacgccatcaagtggagtactgggctgaggcattgtgttggacatcgtcagagagggagctggcagtccaggaataaaaacctttcccacctttaagcaataaaaagatgtgaaaaaaaaatactgcctttaatgcatcacatccttaaataaaatgttaaggaatataaacatatatttcttttgatatttctaagtttatgctcaccaaacacagcaaagaaacaattcaaatgtcaataatctatcsaattccactatccaactgcaaatatgttggtataatttcttttttttttttttttttgagataagatctcactctttccctgtggctggagtacagtggcatgatctcagctcactgcagcctcaacctaccaggctcaagtgatcctcccacttcagcctcctgagtagctggaactacaggcacatgccactatgcctggttaattttgtattttttggtagagacagggtttcaccatgttatccaggctggtcttgaacttctgggctgaagccatctgcccacctagacctctcataccttggta

SEQ ID NO: 149367 - DNA, 561 bp, Homo sapiens
ctgaatgcaactgagattttcatttgtgactgcagtaaatagactgtggtgccaggaaatatgtattgatacatccaagaatttcaacaatcactaaaatttggaaactatctagtatacagattagtatactacagacctgtgggccaaatctggccagctgtgggattttttgtaaataaaattttattggaatacagccacactcattcattacctattatttacagctgcttacttgccacaatggcagtgcttgctgagtcctgatctactctaaagtcttcaatttcaccataataaaaagtagactcagaaagaatacctatattttccaaagttacagagtagagattctgttagtactcaggcccttatattcttaatgcaatattgttttcacagagacacaaattttttaacaatatttgaaagttattatttgaaaaaaagaagcctcaggaaatattttcattttgttccctattttyaaacctgctctaaactagttttctggttgagaaaaaattaacagatttatgtcaaggttattaatcaaaa

SEQ ID NO: 149368 - DNA, 607 bp, Homo sapiens
ctgaaaccaataggtcaagcaaacaggagtcagtaagtacatggaaatttgtacaacactggcaagtttgatgtatgaagttacatgaaatactgtactccatgcctgtagaatacacatcattgtgaagcacatatggaacatttataaaaatttccttaatattatgataccatacatataacaagtttcattacattttaaaggactggtatcatccagaccacagtctctgaccaaattgcaactaaacaaaaaatcaataactatatgataactagataaattatatatacttggaatcccctttatgtgagaattcccgatctagtttaccactgtccccattaatccctattgagccagaactgaaggcagaatgaagtggctattcatcattataccactagttctgttggtttcttagagtaaacagtctttcttgatacccatttcactatctaaaatggggtgaagagggacaaaccaaggggaatatgtgtttttaaaaaatgtgaatataatatgttcattatgcaaagaaggtatcagaagaataygactaatgcaccattatgagatgacccaaggtaagaactattatcaa

SEQ ID NO: 149369 - DNA, 570 bp, Homo sapiens
agggaaaggggatggcaaggtaggtagtcagattatgtggcacttacattcttttttgtggttgtggcatttaaaacactatagcaaggctgcattgatacctcatgatttagtagaaaggatttaygggcttagcatttggttccctcattacctacttaaataagttaggtcaaatcatgtgtctatatcttagctcacataagaatcttaaactaataatagatcattaagtctaaatcagctcaaactttaaaaatcataaaaatgatttttaaatccctaaagaagtgaatgagaaaataagtgaataacctcaagcacatggcttggagcactaagccaaaatcttaaatgtctatctcttttctctttatcaatcttattttgtcacccaaaagtgtgagtaagagatgccagggctttattggttttaatttaaaagtcacatcttttttggaaaaggcaatgcaattggcacttttggtgttttccttatatttatcacaacttaaaggctattggaaaagttagaaaagtagtgaaggaaagaaacatgtgactttagtc

SEQ ID NO: 149370 - DNA, 626 bp, Homo sapiens
ataaacaactcaacaggaaaataaataatgtcattaaaaatgtaggcaaataacagacatttctcagaagaagatatacaaatggccaataactatatgaaaatatgctgaacatcactaatcatcagagaaattaaaattgaatccaaaataataatcttaccccagtcacaatggctattactaaaaagacaaaatataacagatgttggtgagaatgcagagagaaaagtaactcttatatacttgatatggtttggctgtgtcaccacccaaatctcatcttgaattctcacatattgtgggagggacctggtgggaggtaattgaatcatgggggcaagtctttcccatgctgttctcatgatagtgaataagtctcatgatatctgagggttttaaaaagagttcccctgcacaagctctctctttgcctgttgccattaatgtaagacgtgacttgccttccaccatgattgtgaggtttccccacccawgtgaaactgtaagtccaaataaaactatttcttttgtaaatttccaagtctcgggtatgtcttcatcagcagcatggaaacaaaccaacacagtaaattggtaccagtaaagtggggcactgctgaaaa

SEQ ID NO: 149371 - DNA, 353 bp, Homo sapiens
tcctcttcaaacacactactgtaatataaatgtctatgatcaaactttgcaagttctcattttcttggtgtgaagaatttaaacaaagaattcacgtgatctgactgaatccatctctagtactagaaatatactaatatagacctattttataagacagagaaaaatgtaaaaggtattgtatgtttaaaataaaaaattcataagtagagttctgrttccaaaatagcagcatggaagcaagctagcttcacttccccaacaaaaataaaaataaaaaaacagacacagcattgagattatcaccagcaatatcaaagaactcaaatatgagaatgggacagttcccaggg

SEQ ID NO: 149372 - DNA, 554 bp, Homo sapiens
gcaatacattcctttagcttttgtttctatgaggagcctttattccttcataacttttgagggattactttactgaatatataattatggaatggtggtttcattctttcaraacgttaaatatttaactccattctttcttgtttgaatggtttatgttaagaattctgatgtaaattttttcattgtttctctataggtaagttttttttttttatctcctgtgccttcttgcaagattttccattttgcatttgttttctgcaatgtgaatatgatatgcatagatacaggttttgctttttgtttatgtttagtctgcttagagttctgtgtgcattctggatctgttgtttgctgtctgtcatgagtttagttaaattcttagccattattattttgaatattttgtcttctccattctctcttccttctcttttcgatattccaattacacctctgttacaccttttgaaattgtccttggatttcttgtcctgttttgttcacacttttttttctctgcatttcagcttgataagtttccactgaca

SEQ ID NO: 149373 - DNA, 554 bp, Homo sapiens
gcaatacattcctttagcttttgtttctatgaggagcctttattccttcataacttttgagggattactttactgaatatataattatggaatggtggtttcattctttcagaacgttaaatatttaactccattctttcttgtttgaatggtttatgttaagaattctgatgtaaattttttcattgtttctctataggtaagttttttttttttatctcctgtgccttcttgcaagattttccattttgcatttgttttctgcaatgtgaatatgatatgcatagatacaggttttgctttttgtttatgtttagtctgcttagagttctgtgtgcrttctggatctgttgtttgctgtctgtcatgagtttagttaaattcttagccattattattttgaatattttgtcttctccattctctcttccttctcttttcgatattccaattacacctctgttacaccttttgaaattgtccttggatttcttgtcctgttttgttcacacttttttttctctgcatttcagcttgataagtttccactgaca

SEQ ID NO: 149374 - DNA, 580 bp, Homo sapiens
actacaaaaatcctagaagaaaatctaggaaatacccttcttgacatcttttttggcaaagcattcatggctaagttcccaaaagcagttgcaataatagaaagtattgataagttggacctaattaaatgaaaaagctatcactcagcaaagaaactatcaacagaataaacagacaacctacacaatgggagaaaatatttacaaattatgcatccaacaaaggtctaatatctgaaattgttaaggaatttaaatctataagcaaaaaacaactccatttaaaaagtgggcaaaagacatgaacagrcacttcttaaaagaaggcatacagccagcaaacatttaaaaatgctcattatcactaagtgttagaggaatgcaaaccaaaaccacaatgagataccatctcacagcagtcaaaatggtgattattaaaaagtaaaaaaaaataacagttgcttgcaaggctgcagagaaaagggaatgcttatacattgttggtgagaatgcaagctagttcaactactatgcaaagcagtttggagatttctcaaataacttaaaacagaactaccat

SEQ ID NO: 149375 - DNA, 430 bp, Homo sapiens
atattttgttgaagattgttgaatttttttcatatayattggtcatttgtatgtcttcttttgagacatgtctattcaggtttttgcccattttaaaattaaattatttggttttttttcctattaatggtgttccttatatgttctggaatactaactcctttaaagatgaatagtttgcaaataatttctcccgttctgtaagttgtctatttattgataatttccttgctatgtagaagctttttagtttgatgtaatcccatttgtctatttttgcttttgttgtctgtgcttttgaagtcttattttaaaaaaaaatccaatccaattttatgaaatgtttccccaatgttttcttctaattgtttaatagttttgggtcttagataggcttaagctttagttcatttgatttgatttttgtata

SEQ ID NO: 149376 - DNA, 430 bp, Homo sapiens
atattttgttgaagattgttgaatttttttcatatacattggtcatttgtatgtcttcttttgagacatgtctattcaggtttttgcccattttaaaattaaattatttggttttttttcctattaatggtgttccttatatgttctggaatactaactcctttaaagatgaatagtttgcaaataatttctcccgttctgtaagttgtctatttattgataatttccttgctatgtagaagctttttagtttgatgtaatcccatttgtctatttttgcttttgttgtctgtgcttttgaagtcttattttwaaaaaaaatccaatccaattttatgaaatgtttccccaatgttttcttctaattgtttaatagttttgggtcttagataggcttaagctttagttcatttgatttgatttttgtata

SEQ ID NO: 149377 - DNA, 430 bp, Homo sapiens
atattttgttgaagattgttgaatttttttcatatacattggtcatttgtatgtcttcttttgagacatgtctattcaggtttttgcccattttaaaattaaattatttggttttttttcctattaatggtgttccttatatgttctggaatactaactcctttaaagatgaatagtttgcaaataatttctcccgttctgtaagttgtctatttattgataatttccttgctatgtagaagctttttagtttgatgtaatcccatttgtctatttttgcttttgttgtctgtgcttttgaagtcttattttawaaaaaaatccaatccaattttatgaaatgtttccccaatgttttcttctaattgtttaatagttttgggtcttagataggcttaagctttagttcatttgatttgatttttgtata

SEQ ID NO: 149378 - DNA, 659 bp, Homo sapiens
tggttactcagcttcacataactttaggggaaattttgcagcccaaccttacttttgtatgttagacttctttagagaatgataagcaaaaatcatagtacatgtatgcataaatctgtcaaaagtaagcaaagtgcaatacctatagaaccccacagatttgtcaaaagtgagaataaatgtattggggaggtatgcattacactgagtgcctcttttattacattctagtcttaaaccattcctaaacttgtaggcagatggtgatgggtaattaaaatgctagcaaaattatggaaggtgaaagtaacttatatgtctctgtaatgacagacatgaaaaaaatatgcacacagtttgcaatgaaatgatgcaaagatgaggactaaaataaaatatgtagctgggtaagataacatccatcaaggtgttctcttttccattgtgtttcacttgagaaagacactgatttatacctgaggacttagaagaagcgatgcaaaacttttcaaagaaaaatggatacatatatttctggatattatacgagcagcttgaaaacayaacttttgattgattgtgtttttattactgaggataaaaggtgacagccatcaaaatttaaggtaaataattaccataacttttagtgcaaattc

SEQ ID NO: 149379 - DNA, 520 bp, Homo sapiens
gcaggaagaagcaggagtgagttacacagacctgggtcactaatcacagtttgggacatgtggcccacataggaccttcaacccatgactaaactgaaartgtgacagacagaagagtgtttttttaaattacacttcagccaagagactctctacccccttccaactcactctatggtatctgaatattaaagttgaaaaatgcctttaagaaacaggcttaagaatatcatattctgagagcttcatcttttatgggacaagctcttcctggacaactttaatttcaaacaactatttctaaaatgaaattttagacagaatcattacattaagaaggccctcagatttcatctatttagatccattttaaaaaatagaggatactgagtctcccagaacttaagtgatattttttcaaggtcataagcctagtcaatgacagatttgtgacaagaagctcggctttctgacaatagtgtttatacccccttcctgctcaaaatggaataatctgcct

SEQ ID NO: 149380 - DNA, 417 bp, Homo sapiens
ctataaatttccctcttacaactgcttttgctgcatctcgtaagtttttgtatgttgtgtttccatctttktttgtctcaaggtatttgcttaatttcctttttgatatctcctgtgactcactggttgcttacaagcatgtatcttaattttcacatatttgtgtatttttccatgatttcttctgttattgatttctagttttatgccactataatctgaaaagatattcaaaagatgtgtataatttaaatccttttaagtttgttaagatttgtgatctaatataatttttcaaatcctggagaatgtgtcatgtgcattatagaagaatctatattctgctgctattatatgggatgttctgtatatatgtgttaggtccatttggtctaaagtgcaattcattttcagtat

SEQ ID NO: 149381 - DNA, 521 bp, Homo sapiens
aggacacgtgcattaaatgtaaaagcactttataactaacatgccaatagggctttaattttttacccccttaccaaaagaaaaatgcctaaaaacaggttctacttcccctcagcctattctaaaagaaagcacatgggagaatacaagcttaaaacaaaaagttacttcaaatgtatcattgtaataaatttaacttgcttaaggaaaccaagctgtgctctttcgcggcaaatataaaaatacattcccacatcaccagtttatgttttcaacaataataaatgaaacagacatgttctttgacctctttgagtttaaagtcctgtgggaaaggcagrtgttaaactgggaactgagataaaaatgaagagagagagtttgatgaaagagacagcctgagggagcacatgtagattgcagggccaagctgttttctctgagggagaaacaccaaaactaagatctggaggatgagtagtacagtaagctgaataatgacccccagatgtaaccatgtt

SEQ ID NO: 149382 - DNA, 606 bp, Homo sapiens
tgtccacatgtatccaatgtttaactcccacttataagtgagaacatgcagtatttggttttctgttcccatgttaattcgcttaggatagataatgtgcggtatttggttttctgttcccatgttaattcgcttaggatagataatgccctccaactccacttgtgttgctgcagagggcatgatttcattattttcatggctgtgtactattccattgtgtatatgcatcacattttctttattcagtccactgctaatgggcatctaggttgatttcmtgtctttgctattgtaaatagtgccgcaatgaacatatgtgtgcatgtgtctttactgtagaataatttatattcctttgcatatatacccagaagtgggatagctaggtcgaatggtagttccattttaagttctttgagaaatctccaaattgctttccacaatgtctgaactaatttacattccaactgacaatgtataagcgttcccccttctccacaaccttaccagcatgtggtatttctgactttttactaatggccaatcttgcccggtcagtcccacaggccctagctgagtgacggatgaaaggagtactcagac

SEQ ID NO: 149383 - DNA, 496 bp, Homo sapiens
acaagaactcatccacataccaggtacactccaactcaaaackagaagaagcttctgtgctcaggacccttcagacctcaccctgtgtgtctcatcatctggctgtttatttgtatcttctaaaatataataaactggtaactgtaagtaaatgtttcccggagttctgagagccactgtagcaaattaattccgcctaaacagaggaatgtcagcttgaagccggccagtccgtagttgtggaggcctgtacttgggactcgtgtctgaagtgggggcaaccttgtgggactgagcccccaacctgtggtatctgacaccctatccagaattgaattgggttggaaaatacccagctggtgtcccctgcaaaattaattgcttgcttgatggtgaaaagtccccacacgtttggtcacagaagtctcctgtgttgattgttgaagtataagagcaggggaaaaacactttgtttttttctacacactatgccggt

SEQ ID NO: 149384 - DNA, 496 bp, Homo sapiens
acaagaactcatccacataccaggtacactccaactcaaaactagaagaagcttctgtgctcaggacccttcagacctcaccctgtgtgtctcatcatctggctgtttatttgtatcttctaaaatataataaactggtaacygtaagtaaatgtttcccggagttctgagagccactgtagcaaattaattccgcctaaacagaggaatgtcagcttgaagccggccagtccgtagttgtggaggcctgtacttgggactcgtgtctgaagtgggggcaaccttgtgggactgagcccccaacctgtggtatctgacaccctatccagaattgaattgggttggaaaatacccagctggtgtcccctgcaaaattaattgcttgcttgatggtgaaaagtccccacacgtttggtcacagaagtctcctgtgttgattgttgaagtataagagcaggggaaaaacactttgtttttttctacacactatgccggt

SEQ ID NO: 149385 - DNA, 584 bp, Homo sapiens
aagtattttaagaaaagggaagaaagatgaaaatgagtttctaaagagtgagaatggtattttcagatgttcaagaaattatyacagaacatcatcattaaattaattctgcagttattcaagaagatgaaataaaaatgactagaaaaattatgtggataacatttgtaactctctatcatgcaaatagagatttgtaaaatctatcatgtaaaataagagattatccttctgtggatgataaagtcctcacttattgaagaaaatcaaattgattttttataaatataatgtaggaatattgatatttgaatcagataccttctttgttattcaggaagcccagtagttgtcacctacagctgacatggaatgaagtaggagggaagctggctagcagagctctgtatcctcatactcattcaaattttgtttttgtcctctccaaatagtactttgccagctggtttccattttctatactagattacacacatttactttagttgtaatgtatatctacacctaaaagttgtattaaaaactaaaaaacaggacaatgtccacaatgtaatcacgctctg

SEQ ID NO: 149386 - DNA, 620 bp, Homo sapiens
acaggggttatatattcattgatgtggaatcatagttgtattactcagggttccctagaaagacagagctaataatgtgtgtgtgtgtgtgtgtgtgtgtgtataaaatattagtttattaagtattaacttacgtgatcagaagatcccacaataggctttctgcaggcttaaggagcaaagagagccagtctgagtctcaaaactgaagaacttggagtctgacgttcgagggcaggaagtatccagcacaggagaatatgtaggctggaggctaggccagtctcccttttcatatttttctgcctgctttatattcactggcagmtaattagattgttctcaccagattaagagtgggtctgccttccccagcccagtgactcaaatgttaatctcctttggcaatgccttcacagacacactgaggatcaatacttcgcatccctcaatccaatcaagttgacacccagtataaaccatcacaatagctttcatgctaaatcctagtttctactttatgccaccaaactgacttcacttgagaatttaattgtcaccagtagatttaagaataaagacttacggtgacaagggttggagagtggcataaaaaaaaa

SEQ ID NO: 149387 - DNA, 344 bp, Homo sapiens
ttcatttattagattattacaacgtcaaagttccagtcttttattttataccattcggtattttcaaatccatgacatggytcaaacagttatcttcatttatttttccaagcttcaaggtacatatattagttcgttctcacacttttataaagaactaccagagactgggtaatttataaagaaaagaggtttagtcagctcacggttctgtgggctgttcaggcttctgcttctggggagggctcagggaacttacaatcacagcagatggcaaggggaagcaggtaaatcttccctgaccagtaggagagagagagagtggcaggagaggtaccacacac

SEQ ID NO: 149388 - DNA, 441 bp, Homo sapiens
taaatatttgttcttagttttgaaaattaaatcgatcacagtatttatgtcttatttttaaataaaaacatatgaagtcttattctctgctcaaatgtcttcatctaagaatttataacaagataggaaaaatgaaactcaatcacttagctgaatctaattggcagagcctaawcttaatacatcaagtaaaagatgtggtcaaacaggaataaataataaaacaaatcaagacaaaaatcctcattttttttgcatgaagtggaagtaaaaaactctgagaataaagaaacaagccctatgattctgataagggtacaattagcaagtgttaagtggaaaagctaccgactttaaaataatattaaatggagttaggtccgagaaaagaaaattgatataaggcagtgtgaagcaagttaattttgtttatgttttcaa

SEQ ID NO: 149389 - DNA, 585 bp, Homo sapiens
aaacatatttacatatatttatgggtattgcatgtttgggtatatatctatatgtgtagggcactgcactgtgaaccaccgtcttttcacttttaactgttaacacaatcctagcattaaagtaatatcattctcatttttcagatgcagaaattttgacttgcccaaggttacacagttaattagttaatggcagagggatccactcctcttaggtttagcatgattcagataaaaaattactatgctaaccacaattacctctcctttaaattaactgcattaaaaaaataataatttgaatagcttcctctgcagaaaaagtcaccatggctcgtgttytaaggtagtagagaaattgagttttctattaatttggagctagatgaagaagtaaagcataatttgtttttgagaactgttgagcaagttgagaaggtatgtgatccaaaaggcagttacttgggaagcagccaaattaaaaaggataaatctgaatgagtcataaattgaaagtggtaggcaaagaaggtgagtctgggttggagccaaagaaatagagaacagcaaattgtagaaaatgcc

SEQ ID NO: 149390 - DNA, 585 bp, Homo sapiens
aaacatatttacatatatttatgggtattgcatgtttgggtatatatctatatgtgtagggcactgcactgtgaaccaccgtcttttcacttttaactgttaacacaatcctagcattaaagtaatatcattctcatttttcagatgcagaaattttgacttgcccaaggttacacagttaattagttaatggcagagggatccactcctcttaggtttagcatgattcagataaaaaattactatgctaaccacaattacctctcctttaaattaactgcattaaaaaaataataatttgaatagcttcctctgcagaaaaagtcaccatggctcgtgttctaaggtagtagagaaattgagttttctattaatttggagctagatgaagaagtaaagcataatttgtttttgagaactgttgagcaagttgagaaggtatgtgatccaaaaggcagttacttgggaagcagccaaattaaaaaggataaatctgaatgagtcataaattgaaagtrgtaggcaaagaaggtgagtctgggttggagccaaagaaatagagaacagcaaattgtagaaaatgcc

SEQ ID NO: 149391 - DNA, 606 bp, Homo sapiens
tatgttgaaatcacagtgttagtaggctgcattctcattttgagcttgatatcctttctcaagtgcattcatattcttggaaaaatttaattcctgtggttgatggactcatatccctgcttgctwgctggctgctggcttagggcctttcttgtatcctaaagcctgctgttaggttctacccacatgaagatttagaacatggcagcttacttactcatagccagcaagagaatctttcttcaatccactaaaactgaattctatataacataaacaggagagtgactacccaatcaccttttgcatatttcctaacctaatctagggagcaattctcccatcatattcacaagtctcattaaagggaatagaattattggaccatctatatcattgggcagaatttgagggccatcaaataattctgtgtaccatgctatgctatcactatcacaattagtattgcattgccacatcacctattcttagaaaccttattgccaagagaattattaacacattttaaaagattaacataatgggccatatcagaagagtgaattagaggaagacatttaacaaagactttcaagtagcaaaatg

SEQ ID NO: 149392 - DNA, 606 bp, Homo sapiens
tatgttgaaatcacagtgttagtaggctgcattctcattttgagcttgatatcctttctcaagtgcattcatattcttggaaaaatttaattcctgtggttgatggactcatatccctgcttgctagctggctgctggcttagggcctttcttgtatcctaaagcctgctgttaggttctasccacatgaagatttagaacatggcagcttacttactcatagccagcaagagaatctttcttcaatccactaaaactgaattctatataacataaacaggagagtgactacccaatcaccttttgcatatttcctaacctaatctagggagcaattctcccatcatattcacaagtctcattaaagggaatagaattattggaccatctatatcattgggcagaatttgagggccatcaaataattctgtgtaccatgctatgctatcactatcacaattagtattgcattgccacatcacctattcttagaaaccttattgccaagagaattattaacacattttaaaagattaacataatgggccatatcagaagagtgaattagaggaagacatttaacaaagactttcaagtagcaaaatg

SEQ ID NO: 149393 - DNA, 422 bp, Homo sapiens
atttctttcactcagagccaaacctaacactaaaacatacttaataatttaagaagaatgtttcacaaatctgccatgtgaacctcaaaacaagtctacaagttagataaactgtctgatagacacagtgatttttaacttccagattcaacttttttttgataaagaattcatagtcatgatgtaggatgcagatctgtaggcttgtgatgtagggcttatatatatatacacatgcacatacacacacacacacacacatatgtatatatatatwttttttttctgaaatacaatgcttctccctagtgttattatctcatcaattgaggcatagcccacatacatccatactattcggaaaagctcccttgttttaggggtacatcttcagaaggagatagacgtgctgcttacaactt

SEQ ID NO: 149394 - DNA, 411 bp, Homo sapiens
cacaagctgcctttttgcttgctattacccatgtaagatgtgacttgctcctatttcccttacaccatgattgtgaggccttcccagccatgtggaactgtatgatcattaaacctctttcttttgtaaattgcccagtcttgggtatgtctttatcagcagtgtgaaaatagactaatacaatcagggataaaaatcttggaatatcattttagaattctgcttatcacaggtaacaaggttatgatggcttgctaaaatgagttacttaccaatacctctctagtagctgtaaaactttacatgtaatccaatcttagattgttggtagaaactactggtaaaaaaawtaatttgttggtagttagtagctattactggtaaaaatagctgcaactcatgttttattta

SEQ ID NO: 149395 - DNA, 548 bp, Homo sapiens
tttgctagtttggggcagggatcatgaaacactgagtttttttctgcttgccctgttgtgtggttgccattctccatgagaatataccctggatagctgttgaaccaatgaaaagraaaaaagatgtgaagatttctgattcaaaaccaaagttttgagccaatcacaaccaatctacaacctgaaacagagcctcataaatgactgtagcaatatgacagagaaaaacacttactgcttaagccactaaattttagggtgatttattatggatcattctctgacaaatacaccatctaacaactacctagtcaaagatatctcaaataaatataagcatttatttttgttcaattttatcaatttagtctcctggccaaacattgaatgctgctatcatataagttgtaccacttctaacttcttaaattcccatatattaatttttatcacacgttcttattgttccaacttttaatttcctcaaaatgcttgatgtttgacctcattgagacttcctcccttcatttttaatcttagtctatttt

SEQ ID NO: 149396 - DNA, 588 bp, Homo sapiens
tattgtttcctagccaatattttattctgtttctttcaagatttctacaaaatattttagaaaatgttttttccttttttgttttcttctttccttccttccttccttccttccttccttccttccttccktctttctttctttctttctttctttctttctttctttctttctttctttctttctttcttttctcttttctttctttcttttcgatggtgtcttgctctcttgccaggctggagagcagaggcgcgatctcggctcactgcaaccctcgtcttccagggttcaagcgattctcctgcctcagcctcctgagtagctgggacaacagacacagcagctcacactgtaatcccagcactttgggaagccaagaagggtggatcacctgaggtcagcagttcgagaccagcctggccaacatggcaaaacccggtctctactaaaaatagaaaaactttcttctttgcattttacaaagatgtatttaaacactgaaaatcatgagtaatatcttcggccattcaggctgctgtactaaaatactttatattggataatttagaaacaacataactttat

SEQ ID NO: 149397 - DNA, 597 bp, Homo sapiens
ctgtttcaaacacctatttttccttctaagaagctgtatggaataacagccatcctgcrtgaggtggcattctcaaaacataactaaaggagattttattttttaaagactacttattagcagagatgtgtaagatgtaggtttaagggtattatataaaggaagagagtatccctaggctcagtagcatcttctgttaccagcccatgtccaaagggacaaaaggagggaaacttgttaaaacccagaggaacacagtcacagaagttaagcaactttgagagaaacagtacacttcggtgtaaggatagggatacaacctagtagagaagggactaggacaataaatttctgacttcattctccccactcttttaacatcctatcaccaaacccaagtgagctaattagagaatataagaatcatgatgtgatctaggacagtgagcaggacagggaagggtcaaaaattaacctggagggacaaataaaaactattgagcacttttctctctctctactctacagcagaatctttcccgaggtcatttcaacaagcagcgtctccataaatgtgagagataactattcctttta

SEQ ID NO: 149398 - DNA, 597 bp, Homo sapiens
ctgtttcaaacacctatttttccttctaagaagctgtatggaataacagccatcctgcgtgaggtggcattctcaaaacataactaaaggagattttattttttaaagactacttattagcagagatgtgtaagatgtaggtttaagggtrttatataaaggaagagagtatccctaggctcagtagcatcttctgttaccagcccatgtccaaagggacaaaaggagggaaacttgttaaaacccagaggaacacagtcacagaagttaagcaactttgagagaaacagtacacttcggtgtaaggatagggatacaacctagtagagaagggactaggacaataaatttctgacttcattctccccactcttttaacatcctatcaccaaacccaagtgagctaattagagaatataagaatcatgatgtgatctaggacagtgagcaggacagggaagggtcaaaaattaacctggagggacaaataaaaactattgagcacttttctctctctctactctacagcagaatctttcccgaggtcatttcaacaagcagcgtctccataaatgtgagagataactattcctttta

SEQ ID NO: 149399 - DNA, 672 bp, Homo sapiens
ccatatttttttcctaaactttaggtgcattcttcaattagagatacattgtgttttctttatcagtcaatacaaagtattttcttagtctcttggggctttcaccatggaatatttagaagactgttctgtacatctgggatttttcaaacattttcccttactgtttttttttatttcattatgataagtgaatatactttatatattttcaatttttctatattgtttgagacttatgtactgttttagaatatatcttagtaaatgtttcatgtaaasttggaaaacatgagtattctcttacttttgggtatagtattttgaatatgtcaattagatcaagttatattataatgctatctaggtttttataatcttagtaattttctttctacttaaaaaaaattccagagagaaagagagatgtttcaattctccaaatctgattgtgatttatctatttctcttttaatttctatttatttttgcactattttttgagctcagttgtttaatatatacacttttagaattatctctttcaaagcattgactccttatcattatgaaattttcctccttatctttggtaatatctctttttctgaagtttatttagatgtcaatataattattccacatttcttgtgagcaaatattgcataataa

SEQ ID NO: 149400 - DNA, 575 bp, Homo sapiens
agatctcactttgttgcccaggctgaaaatctgaattagattttcaaactggtttcaaactcctgggctcaagtgatcctcccacctcakcctcccaaagtgctgggattacaggcatgaaccactgtgcctggccattttgggcttgccttgtatatgtttttactatttaaaaaaatctctggttggtcagggggccaattctttctaatataaataaagaagctttttgaagggaggtaactctctctttcctctgtgtagatcaggattacattgtggcagccaggatggcctagagtacacagctttgatgctggcagaacaaagatagattatggccagtgaaatgtggcaccacctgataacagagtgtggagagagggttgacttagagcagatgaaaggggagggtgtagaatacagtggaatacagcaacaattgttcagaagctgcaggaaagagacagtagaggaaagcagaaagttgttatgatgaaaatgaatctgctatggttatttaagtggcagagacgtcacatcccaaaacaaatagatgtggttaggccctttat

SEQ ID NO: 149401 - DNA, 546 bp, Homo sapiens
attttaggttcaggggtacacatgcaggtttgctatataggtgaactgtgtgtcacaggtttggtgtagagattatgaacattaacaatctgattctaaaaagttttatggaaatgcaaaaggccaaagataaccaaaataatcttgaaggagaaaaaagtgggaagacttgtgttattggatatcaaaacttataaagctgcarttaagacattattgacataaagatattcaaatagtttactcaaatacaatatcccacaaaatagctctatggacatagaaacaatttgtgacaaatgtggctctgaaaaactggggaaaggcaaacttttcaataaatggtgctgtgtcaactggctgtccacatggaaaaaataaatctcaacccctgcctcactatgtacaaaaaatgaatcccaagtgaatagtagatagaaagcaaagacagtacagcttctacaggaaaatccatgagaacatcttcctaactttgaggtaggaatgactttttaaacaacacacataaaacaaaaccaaaaaggg

SEQ ID NO: 149402 - DNA, 605 bp, Homo sapiens
tgcctggtaggtccactcctcctctttgacattgttcaaatttattctaggtgaccagaagaatctttctaaagygcacagttaatcatcctctcctctgctaaacaccttcaatggcctccctgctgcctgaaagtacaatctcctcaatgtcatctataaaaccatctttcatttggcttctgttgactcctccaacttcgcctctccttccctgccctgcattttacacaccagcaacaccaagctgatgcctctacaactttgcttatgctgttcctcctgtctggaatgccctatctgtatgtcatcccttcaacttttcctattaattgcttaaggctaatttagatgcccctcctccaagatatacttgtctggtttacatgcccttttcctgtcttgcaactagttaccttttgtcactgctacattgtagttacatatgcacaagagtgtcctagttgagcccaaactgggagtcagaactggtggaacagtcaccctcttggactctatttatatgacctgatatgcatgacagtatgtactgtcatggataatatatagtactataattgcttaaattataagcaattataatt

SEQ ID NO: 149403 - DNA, 605 bp, Homo sapiens
tgcctggtaggtccactcctcctctttgacattgttcaaatttattctaggtgaccagaagaatctttctaaagtgcacagttaatcatcctctcctctgctaaacaccttcaatggcctccctgctgcctgaaagtacaatctcctcaatgtcatctataaaaccatctttcatttggcttctgttgactcctccaacttcgcctctccttccctgccctgcattttacacaccagcaacaccaagctgatgcctctacaactttgcttatgctgttcctcctgtctggaatgccctatctgtatgtsatcccttcaacttttcctattaattgcttaaggctaatttagatgcccctcctccaagatatacttgtctggtttacatgcccttttcctgtcttgcaactagttaccttttgtcactgctacattgtagttacatatgcacaagagtgtcctagttgagcccaaactgggagtcagaactggtggaacagtcaccctcttggactctatttatatgacctgatatgcatgacagtatgtactgtcatggataatatatagtactataattgcttaaattataagcaattataatt

SEQ ID NO: 149404 - DNA, 605 bp, Homo sapiens
tgcctggtaggtccactcctcctctttgacattgttcaaatttattctaggtgaccagaagaatctttctaaagtgcacagttaatcatcctctcctctgctaaacaccttcaatggcctccctgctgcctgaaagtacaatctcctcaatgtcatctataaaaccatctttcatttggcttctgttgactcctccaacttcgcctctccttccctgccctgcattttacacaccagcaacaccaagctgatgcctctacaactttgcttatgctgttcctcctgtctggaatgccctatctgtatgtcatcccttcaacttttcctattaattgcttaaggctaatttagatgcccctcctccaagatatacttgtctggtttacatgcccttttcctgtcttgcaactagttascttttgtcactgctacattgtagttacatatgcacaagagtgtcctagttgagcccaaactgggagtcagaactggtggaacagtcaccctcttggactctatttatatgacctgatatgcatgacagtatgtactgtcatggataatatatagtactataattgcttaaattataagcaattataatt

SEQ ID NO: 149405 - DNA, 532 bp, Homo sapiens
catacagcttaagaaagaggagcagccaattctgaaatagaagtcgaacataattaagcctttgaactttgctagatagagttgtcccagactatggtcagacttaaagtcagtcagaattgtttagatttgatggagtaagcaatatgggagttattgcaggggattgagcagggaaaagacagggtaaaagtggttattttagtaagattaatttagtaaacaattatggaacacctactacatctagcactcttgctaggccctgagaatacaaagatgacttaggcatgatctttgctcttggtaagctcacagtctatttagaaagatagtgtagtcagtttgtggtttagaacatggatctagaatgataaacctcagcttcctcatttataaaatgaaaatagtaktaatatctgcctctttaataatcttgtacaaattaaatgagatagcatacctaattccttggaacagtgcctatctcagtgagtacctcatatcagcttctgttattattgtaattgac

SEQ ID NO: 149406 - DNA, 626 bp, Homo sapiens
caatctgcactgttcattgtgaaatgtggcatgagtagtgcactgraacttttagtcacagctgcacttccaaatcacagtatgttaccttacagtgttataagcaaaaaccagctgcaagcagagaaatgttgttcagatggtaagtattggcaagctattcaaataagaaataaaactggtattttaaaaagctattaaatgtatgtatagataatgacaaagatataaaactgatagtatcttttccttttaaaatatagaatcagttaatttgaacatcatgtaattgtgcaagcaaaatttcccacttatttcttgtcatggttcactagtataaagaatagtttcatttctcttatttgtaaaaaaatgagcatactaagaaaataaaaacaagtatttaaaaactctaaagcaaatcagccttccaaagtatagtatgcatatttactcataggttaaaataaataatttggctatagcacaaaatgcaatttattttcctggaacaaatactaatatctgtttctttatggatcatggtgattatattatttacataaggtagatgaataattgagatcaatacatgaaaatttatccatatatgaaatttttgtatg

SEQ ID NO: 149407 - DNA, 539 bp, Homo sapiens
caaagtacagaagtcatgaggggaaaaaagggggactaggaggaacaatcaagaagacccactaggaggtccagaagaataaaaagtaccaagtggaagagaatcaataaytaataaatgctagaaaaaacttaaaccaaaaaagtctaaattttccttttgaaaattcagtttccaggcagaacttagagaagacatatataagtaaaatttccaactctgaagataaagagaaaattatgcaagtttccaaacagaaattttatagaaggaaaaccaaactgacattaaaccttttatttgtgagagtgaatactagaaacatcaactattacagggagaagagagctgccacctgagtatcctatatacaatccacatattgcttacttaaagtaaacaggtatttgcaaatgtgcaaggattcagagagtatgcttttagtataccctctctaaagaaaatatgcaggttctaaccaacaaatgaatcagaacagacttcaaaataggggaagatgagatgagaaaaagtgatga

SEQ ID NO: 149408 - DNA, 602 bp, Homo sapiens
ctccacagtttttgaccattcagagaggtccatccacatacctcttttccaaatttctttgttaccaatttccaatcatgcttcttccaagtccctgacatctagccaaaccattggcaacagcccatgaatcaatatrtaatcgcacatatggccatttctccctccatgcaatgtgcacaaccaggtgcactgctcgaagttctgcccactgggaagatttcccttcaccgctgttcagggatgtcctagacaggggctgtagtgctgcagcagtccattttcaggtgcctgcatatcatgtagaaccatctgtgaaccaggccctagtcttctcttcctctgtcaactgatcatagggaactcccatgaggccactggtgcaggccgggcgagagaaggcagggtgggaggaatgcagaccatgggcatttgaccaagccacttcctcatgtaacttacttttgccttcaggacctgcttgagcccaatcacatatataccacttccatttgatgatggaatgctgcggtgtatgacccactttatggctagatgggtcagaaagcacccagttcatgataggcagttcaagttgtatg

SEQ ID NO: 149409 - DNA, 593 bp, Homo sapiens
cagccaaatcttaaagctccaaaatgatttcctttgactcatgtctcatgactccagggtatgctgatgcaagaggtgggctcccatagtcttgggcagctttgcccctgtggctttgcagggtgtagcctctcttcccagatgctttcatgggttggcattcagtgtccatggcttttccaggtgcaaggtgcaagctgttggtggatccaccattctgcgatctggaggatagtggccctcttctcacagctccactaggcagtgccatggtggggactctgtgtgggagctccaaccctacatttctcttctgcactgccctagcaaaggttttccatgagggcttgccttgccattgcagcaaacttcttcctggacatccaagcgtttttgtacatcctctgaaatctaggtagaggttcccaaacttcaattcttgacttctgtgaactcacaagctcaataccatgtgtaagctkccagggcttgggactttcatcctctgaagccatggcctgaactgtaccttggccccttttagccacagttggagtcgaagcagctgggatgcagggtaatgtgtcccaagg

SEQ ID NO: 149410 - DNA, 508 bp, Homo sapiens
aatgtgtcccaaggctgcatagagcaagggggcactgggcctggcaggggtgccctgagtccagcccatgaaatcatttttccctcccaggcctccaggactgtgatgtgaagggctgctctgaaggtctctgacatgccctggagacattttcccaattgtcttggtcattatcactgggctccttgtcacttatgcaaatttctgcagcaggcttgaattttccccagaaaatgggtttttcttttctatcatatcttcaggctgcaaattttccagttttaccctctgtttcctcttgaacactttcsgcttagaaatttcttctttcacatatcttaaattgtctctctctagttcaaagttccacagatttctagggcaggggcaatatgctgccagtctctttgttaaagcataacaagagtcatctttgctctagttcccaacaagcttctcatctccatctgagaccacctcagcttccaggaaattccaaattctccca

SEQ ID NO: 149411 - DNA, 388 bp, Homo sapiens
tccccaacttagaggcaacagagggaaggtgtttattagtggttgtggctgagggtcttttgcttatctcctgggggctccaccccagggagatgtgggtcagcaattgctcaacgcaacaatcatcccaggatggggagatctgtgctataggcctgagctaggagttccttacccagttatgagcagggggagtgggacctgtgggagacagactaacctcttctcctttggttgactgcagcttgttgaaggtgtggataaggcacttagggtctttactccttcattrgtccaagggtagcagggtagtaccactgcagagcaagtggcagagaagcttttggttgccctgggatctccacctctgagaaatgtggagttgctg

SEQ ID NO: 149412 - DNA, 557 bp, Homo sapiens
gttctcacatggataaaagtcacataatcctaaatcttttccctcagaagagaatgaaagaagtagaacagatgcatccaataaaaggtttgagaggctcccccagaatcctcagcttggctgactaatgaaggcctttcattgataaagctagtctaaagactgaaaaggataataaacagcaacacaaaagcatatttaaggcagaattaggtagtactataatggcgatacataaataacttttaaccctaatacaagtgctacaagataaaagtattaagagtaattatagttgctgggtgtggtggcatgtgcctgtaattccagctactgaagagkctgaggcaggagaatcatttgagctcaagagtttgagaccagcctgggaatatagtgagaacctgatttaaaaaaaaaaaaaaaaaaggaaagaaaagagaaaaagcaaaattctagccaaaaatatttgttaataaatacagaacataaaaagaagtaaattcagacattaataacataaaagtgtgtagtttttatatgcaattgaagttaag

SEQ ID NO: 149413 - DNA, 557 bp, Homo sapiens
gttctcacatggataaaagtcacataatcctaaatcttttccctcagaagagaatgaaagaagtagaacagatgcatccaataaaaggtttgagaggctcccccagaatcctcagcttggctgactaatgaaggcctttcattgataaagctagtctaaagactgaaaaggataataaacagcaacacaaaagcatatttaaggcagaattaggtagtactataatggcgatacataaataacttttaaccctaatacaagtgctacaagataaaagtattaagagtaattatagttgctgggtgtggtggcatgtgcctgtaattccagctactgaagaggctgaggcaggagaatcatttkagctcaagagtttgagaccagcctgggaatatagtgagaacctgatttaaaaaaaaaaaaaaaaaaggaaagaaaagagaaaaagcaaaattctagccaaaaatatttgttaataaatacagaacataaaaagaagtaaattcagacattaataacataaaagtgtgtagtttttatatgcaattgaagttaag

SEQ ID NO: 149414 - DNA, 612 bp, Homo sapiens
ataggaaaaggagcaagagcagcagcaggatagagtaggtgtggtctggactggagcctagcttcagtctgatcatacagaatctctggagcacaaactacacaaaattaatcctaccctgaggcaaggaggcagccttctgtacctctctgtcagctttccatcatagaagaccttctccattctgatagtattgagcatagtacaggttcttctcatacttcaatagttttgattttccttttaattttttctttttacattaaaatttgtgatccaattggtatttattttagtgtgagatatggagtaaataygcagtttcccaaacgttgtttattgaattgcaaatcttttccacactgatttgtaattcaatttttacatatatatgttaaattctcatatatatatatatatatatgagtctatttctggacttttgaaatgcattcttattttcatgagccagtactgcactgcttttacttatatagttttatagcataatttgagagttcgttggtagttggtatagtcccccttattactattttttcttcacattttttctgacattttgctgctacataaaaaattttaaatctgtca

SEQ ID NO: 149415 - DNA, 631 bp, Homo sapiens
aaatagatgctaattatcactttctcctgtttgcatgaggtcaacctcctcctattatctgtaactttcactgtttattactctcaggttcaaatttttaaatccatttgaaatggactatccatgtctatttcatactaaaagaaaagccagccaggatgatgatttaaaacaggctttcaatcaagcagagctgcagtccaaaatccagctctaccacttacttggttgtatgatcttagtaaagttgttgaacttctgactcagattcatcaggtacaaaaagggagaagggggttaatatctccaacaaaggactgattatatgaaggataatggggaggaataaacagctatctctgtaagagagccctggtcaacatactccctggggcttaggacaccctaagcaaatgccacttcatcacaatactgtcttgtcttggtcaccagagtaccctacggcagctgatgaacaggcccctagaaataatgcctgctcactgatgttaaatttggcgccratgctatgagaaacacgagttaatgaaagggtttagctccaagttttaaaaagcttcatgggtgaaatatggctagacagtctttgccctgaatctgatgtggtcac

SEQ ID NO: 149416 - DNA, 631 bp, Homo sapiens
aaatagatgctaattatcactttctcctgtttgcatgaggtcaacctcctcctattatctgtaactttcactgtttattactctcaggttcaaatttttaaatccatttgaaatggactatccatgtctatttcatactaaaagaaaagccagccaggatgatgatttaaaacaggctttcaatcaagcagagctgcagtccaaaatccagctctaccacttacttggttgtatgatcttagtaaagttgttgaacttctgactcagattcatcaggtacaaaaagggagaagggggttaatatctccaacaaaggactgattatatgaaggataatggggaggaataaacagctatctctgtaagagagccctggtcaacatactccctggggcttaggacaccctaagcaaatgccacttcatcacaatactgtcttgtcttggtcaccagagtaccctacggcagctgatgaacaggcccctagaaataatgcctgctcactgatgttaaatttggcgccgatgctatgagaaacaygagttaatgaaagggtttagctccaagttttaaaaagcttcatgggtgaaatatggctagacagtctttgccctgaatctgatgtggtcac

SEQ ID NO: 149417 - DNA, 588 bp, Homo sapiens
tttctggtaaaacattcatggaaacattcccaccctaccacagcaggaaaagtcctccagccagaacatgtgattagaaacaaattaagaaaactcaatctgctggctcaggtggtccctctcgccttgatgggccttggggtagtggggatccctggggcttctccactcagcagaacctggaccctagcagggaaacatccaaatgccagcacctgtgcctcccttcctgcccggaaaatcctccatccccaaacctctctctttaattcgccaaacacctgctctgtgatgttgagtgtggtgggcttgttaagaagcctaagacataactatttcctgtgtgcccactgtgagcatgctttgtagctgctttgcacagagctcattcaaatgccaatccttacagyaaccctgtgagacaggtcttacaatacgaatttggggagaaaatggaagtactgagaattgttaaacaaggtacccagtgacattcaggggcaagtggaaagaggagcttccaacccagggctgtctgattctcattaataataacagccagcatttgttacatgccaagcactatta

SEQ ID NO: 149418 - DNA, 598 bp, Homo sapiens
atttatcctaaaagcaatgagaaataattaaaggatttaaaccagaaaagcaaacaaacaaactaaaaaaaatccttcaactctattatagctgcaattaatttcattttgaaactttttatagtataccatatgcctgcatatatgaaaaaaaagtttgcctaaactctgttctcagaaaaagtaaattatcatatctatctatgtctctatctatcatcttacaactcaggaaaagtaaaaacgagccccaggtrtattagagattcaaaatacggctctagtgaaaatgaggacaccaaagtcagagatccatgtgagcaatatgaaaaaattgctttgtaaaatgtgaggctgaaaataattatttagaaatttatattactttatataaaaatgtgttcaaacatacattattatatcaaatactaatatatttgagtattttatctatatctggacaatagatacagataaaatttacctatcagttttcaatgtttctggtcaatatttaaggctggccaaaaatttacttggatggatcttatctttgggagcacaggggatcagagtatcacgttaaacacaggcttat

SEQ ID NO: 149419 - DNA, 595 bp, Homo sapiens
cacatcaaattgtttttctcccttaatgagaatattttaacaattcatcactaagtataatgtttgctgacattttttcatacatacctttaagaaaattaagaaaatttatttctctcttactaataatttttcttacatagccattatttgattcaacctgtcaatatgccaaggttgagaacccctgacctagcataagatctaaaagcaaaaaagaacatatccttctctgtgaacttctcctggcccccatacctccaacagcagaaattaaagaggaaagccaggaacttcttatacaccaagtaaatcatcccttctcctggcctccatgacacaattggcagaaatcaagtggatgctgtagtgcctcttatagacgggagacccaaagacacaagacttttgagaagactggtctctacctcactgatagaggctgtggagaggggggcccatgttcagcatgctcctrgtaaaagggaccccatccccaaatctcataaccccaatagcgcattctacttgagacagagttgatcctttcataaatgttatgtgactacctaagtcactacaagaaacccaagac

SEQ ID NO: 149420 - DNA, 590 bp, Homo sapiens
tgtctcccagtgtgagagtgccaagtcaacactcataggctgagtagtgggtcctggctgtattttaggctcccagtgccctctgcataacatctttggcagagcacaacccctcaactgtatgtgaggcttgaatcctcagtcattgtattagtccattgtcacgctgctatgaagaaatacctgagagtgggtaatttataaaggacagagggtatttaaaaaaaaattattattttttttgagacagtctcgctctgtctcccaggctggagtgcagtgtcatgatctcagctcactgcaacttctgcctcctgggttcaagcgattcttgtgcctcagcctctcaggtagctgggactacaggagctcaccaccatgcctggctaatttttgtatttttagtagagatggggttttgccttgttggccaggctggtctcgaactcctggtctcaggtgatcygcccacctcagcctcccatagtgctaggattacaggtgtgagccaccatgcccagccaggaaagaagtttaattggctcgcagttctgcagggctggagaggcctcagaaaacttacagtcatg

SEQ ID NO: 149421 - DNA, 417 bp, Homo sapiens
ttaccctcaacttctcactttcagtgacacctactgaggctattgcttctcctacatttttttgagtgcctagtttcctctcccttactttttgaataatkcttattgtttgcgataaagtagtgtagatgcccaacagctgaagaccacaaaatcacaagaatcaaacaaagttgggtttattacttgttgcaacaggagaaaccataaaattcggggaaacaatgggatgtatcattaaaaggatactatgaggagattgttataaaatttgggctagggtgggaccaagcaggtttacctctggaatgtgtattgtaagaaagtggaggtgattgtacaattgtgtatcttaatatttatctaggaagaaggtgatatgaaattaggctaaggctgtaattgtttttttaaaaa

SEQ ID NO: 149422 - DNA, 623 bp, Homo sapiens
cttcctgtttttaagcgaaggtattagttaatttttaatttattgaaccattttcttatatgagccagtatgatcctcagtggggggctaaatcaaagagcttattgcttaggagattatcatgaacagtcaagacagttttagcctcaagtacatttttgcaggtcattgcttcctatctaaggcaatctctctgaagttcaattctggacagcaaaaatatagagagatgaaagtatctctcatccatttataatcaggccttaattgatctcagcagatttcctaattgcagaagttacctcaggtaggtcacgtatttcctcatctgtggaatcttgctgccataatcagcactttaggtgttacatggaggcttcagaaatccccttttctagatataataaagggaagaattattatagcttgtccctaaaataatgtctttggcttcaggtgcaaagccacaaaggaaaatactatgaattttaagaaatgaatgaaataattttgtgaacagaatgaaaacaatattttaacaattaaatagtatttacatttctgtacacayttaaaacttgtttatgatttttttggagtgagtgctttatattattcatata

SEQ ID NO: 149423 - DNA, 364 bp, Homo sapiens
gggcagtggaaacagttgtgtccactatatccagaatgccttgaggtcaagtttcagctctgctccttcgtaactgtggggccttggacaggytccttagggtctctagacatagctctcctgtgctttaaaatgcatattactacaatactttccatttacagttgttgagagaatcaactaatgtttttaagtgctcaaaatggtacctgcggcctacaaagcgtgtgattatgttagctcctctgtagagcacgcctggtctctacctacgtggcccacatggcaagcaatacaagtgctgctcttcacacaagtagggtgggagagagttgggaagcacaatgcttacacaaacaatctg

SEQ ID NO: 149424 - DNA, 470 bp, Homo sapiens
ggcttaaattctcaacaagtatcttctgtgtgtgtcagcttctggatgcaaacttttaggatctgtttttcaacacaccaccagaggagtacttaaaaatcagtaagtcagaaagataaatccaaaaacacaaactcctcttttaaaaaaaggagaaaaaaatattagaaggggtgttttttaatattcagaatttttttgctcccttcagaaaagtcttagttaaggttaaattatttttctaaatcaacattgcatggattatgttaccattgattaactatttttgctagctttcttcttgctgtacttcarttatagcattggatgtatgttgaacatgtcaattacagaatacaaaccaaaggctttttttgtttttatttcttttcaacatctcactggcctggcaagagtcaatgagtcacaccatcgatctccacatttgccctttgctctacaagtgttgt

SEQ ID NO: 149425 - DNA, 470 bp, Homo sapiens
ggcttaaattctcaacaagtatcttctgtgtgtgtcagcttctggatgcaaacttttaggatctgtttttcaacacaccaccagaggagtacttaaaaatcagtaagtcagaaagataaatccaaaaacacaaactcctcttttaaaaaaaggagaaaaaaatattagaaggggtgttttttaatattcagaatttttttgctcccttcagaaaagtcttagttaaggttaaattatttttctaaatcaacattgcatggattatgttaccattgattaactatttttgctagctttcttcttgctgtacttcaattatagyattggatgtatgttgaacatgtcaattacagaatacaaaccaaaggctttttttgtttttatttcttttcaacatctcactggcctggcaagagtcaatgagtcacaccatcgatctccacatttgccctttgctctacaagtgttgt

SEQ ID NO: 149426 - DNA, 597 bp, Homo sapiens
taaactgaggttctaacatagccaaatatcacaataagtgaactatgttatactcttaaacctaaaggcctactcatgaaagaaacatcctaacagaaaattaactcagcagcaattaaaggcaaacttctgtaccttaaaaatgaaatgaacatgatacatgggctttaagtttcactagaaatgcacaatttcacaaatcacctattctgttatcctgaagtcttccctttactaagctttccaacagttgggcacttcagtgtctcagcatactgtgtggctgatgtagaaaggactggggcagttgaaacacttgtctcatgtcagaaaaacaggatgtaattgtggctctgttactacctyccccggtgactgtggacaattcacttccctactgtatctcagtgtcctcagtcattaaatgaaggagtaaggcagaagttcccttgggttttcatattcgattatttctgggactctagtctcaaccaacaaatcttccacatcactgctggagtccagggttatgtcaacacaatagtgcttaaataaaaccttcagtgacttgccattgtcctagcagcaatgcccagt

SEQ ID NO: 149427 - DNA, 690 bp, Homo sapiens
ctctctccactcctatgcaactccatgcactaatttataataaactctacccacaaaagttccaggagtgcctatagtccttgattattttcttcaattcaattcaacagactttgagatctcaatactttccaagagaactgtgctaggctctagggatacagagatgatgaaaacccagtagatactcacaagaggtacataatagcattcatcacattctgtatcatgttatacgacamaccttccccagcatctgcagagttaacaaaattactaaaatccccttaaattcagttaaagaatttggattagaggactagcatgtaagtgaacctataaaaacaactataaatgtttcacatacttggaaaaataatgacaggaaaaaaatatcagtaacatttcacacattgtaatgtggtaataatagacatagtgttatgaattgttacttgccagttcttgcttacaggaaattttataggtctactgtgatttgcagtttcaataatatatttgcaaatagtttttactccattttggatcatactaatactgaagacaattatttttttcctctctggtccttcattcaaatgtatgatgactttctgattttatgtcccagaaattaccactacttcccaggtaggggctgacttccattagcgtgcagctctgaagcca

SEQ ID NO: 149428 - DNA, 690 bp, Homo sapiens
ctctctccactcctatgcaactccatgcactaatttataataaactctacccacaaaagttccaggagtgcctatagtccttgattattttcttcaattcaattcaacagactttgagatctcaatactttccaagagaactgtgctaggctctagggatacagagatgatgaaaacccagtagatactcacaagaggtacataatagcattcatcacattctgtatcatgttatacgacacaccttcccmagcatctgcagagttaacaaaattactaaaatccccttaaattcagttaaagaatttggattagaggactagcatgtaagtgaacctataaaaacaactataaatgtttcacatacttggaaaaataatgacaggaaaaaaatatcagtaacatttcacacattgtaatgtggtaataatagacatagtgttatgaattgttacttgccagttcttgcttacaggaaattttataggtctactgtgatttgcagtttcaataatatatttgcaaatagtttttactccattttggatcatactaatactgaagacaattatttttttcctctctggtccttcattcaaatgtatgatgactttctgattttatgtcccagaaattaccactacttcccaggtaggggctgacttccattagcgtgcagctctgaagcca

SEQ ID NO: 149429 - DNA, 690 bp, Homo sapiens
ctctctccactcctatgcaactccatgcactaatttataataaactctacccacaaaagttccaggagtgcctatagtccttgattattttcttcaattcaattcaacagactttgagatctcaatactttccaagagaactgtgctaggctctagggatacagagatgatgaaaacccagtagatactcacaagaggtacataatagcattcatcacattctgtatcatgttatacgacacaccttccccagcatctgcagagttaacaaaattactaaaatccccttaaattcagttaaagaatttggattagaggactagcatgtaagtgaacctataaaaacaactataaatgtttcacatacttggaaaaataatgacaggaaaaaaatatcagtaacatttcacacattgtaatgtggtaataatagacatagtgttatgaattgttacttgccarttcttgcttacaggaaattttataggtctactgtgatttgcagtttcaataatatatttgcaaatagtttttactccattttggatcatactaatactgaagacaattatttttttcctctctggtccttcattcaaatgtatgatgactttctgattttatgtcccagaaattaccactacttcccaggtaggggctgacttccattagcgtgcagctctgaagcca

SEQ ID NO: 149430 - DNA, 254 bp, Homo sapiens
gggataggagagctaccaacttccatttggcctgaaaggcacaaagatataaaaaaatactgaccctgctgttcagggtcttagcctcagagcactccttgcccaggctgttcaccatcctcagttgctcccaagctgrgagctgcttgccctccagtgcatagtgtgtgtcggaagccactggttgtcctgaggagttaaggtggctctgtctgtggcagcacctcactgcagagacctccaggcccaggact

SEQ ID NO: 149431 - DNA, 604 bp, Homo sapiens
cattttcatttattagttggaatatttttataaggggaaattgaaattcaaactgttccatctgtggctttgagtctttttgaaaaacaaacaaaaaagccctagttgtcattcatagtttccttgttctatattatgtcaagaggttccaaggtcattttgtttatttcctgcaacagaccaggaatcagccatttcttcaggaagccctgttttgttttgttttctttgtctttatttattttttaatcttttgttgctgctgctgctgttgttgtttaatgagaattggcatttcaaggccataatctgggtgttcattgcatttgggttggcccttgcttctaggccttttcaatggacagagtcaggatataaataataccttgagtatatcttttktgtgtgtgtgtgtgtgtgtgtgtgtgtgtgtgtgtgtgtgtgtgtgtggtgtttttggtctgtcctttttttaaaaaaaatattttggttaaatatataaatacatttttttgttttgatttttttttttttttacattaagttccaggatacatgtgcagaatgtgcaggtttgttacataggtatacatgtgccatggtg

SEQ ID NO: 149432 - DNA, 571 bp, Homo sapiens
caacagacatcatctcagcagctgattcatactatagatggctaggtagccactgggcattgaaggttcaccatcatgtcttcttcatccttccttttcccaaaccctgctttagccatagttcagtggtttgggttgtttttttagcaaatcccacttctgatagtagctgtcatccccagtttggggatttgctagaactcagcatatagttgtactcatggataagatttattatgttgaaaggatacaaggtaaaactgagaaagaaaatggaaaaggcatatggggtacagtctggaggaaattakgcacactcttccaaaaagtcttgttccagtgaagtcccacaggatgtgcttaattcctccagcaatgagttgtgataacacaggaagtcttggccatttgcaaaaaataaaaatgttagaagatatgttaagctttggctacttttccttagtaacataaaagttgtgatgccatgctctgtaaacattggtcatagttatcaagcttatctttttgcagctcaaggaaggattttcgtagggcaaatggccaagaattc

SEQ ID NO: 149433 - DNA, 541 bp, Homo sapiens
tggggaggagcacggggaaaaggcctaggagtaaaaaagtactgagtcccaagtcagagtggagagaagggtattctaagttctgcctcgtcctccatgatatggtttggatttgcatccccgcccratctcatgttaaattggaggagggacatagtaggaggtgattggatcataggggagaatttccccctagctgttctcttgatagtgagtgagttctcacgagatctggtggtttaaaagtgtgtggcacttcccccttctctctttctctcctgctctgccatggtaagacgtggttgcttcctgttctgccatgactgttaagtttcctgaggcctcccagacatgcttcctgtacagtctgtggaactgtgagtcaattaaacctcttttcttcataaattacctagtctcaggtagttctttatatcactgtgagaacagactgatacactccatctctctaataacaagttcttggtagaggcacctgaggaaggcctttgttgaaggccccagataaaaagacctctaa

SEQ ID NO: 149434 - DNA, 661 bp, Homo sapiens
taagtagtttcttttttacaagatttagaatttccacaaggtagttcagaaaaaggaaaattcaagagaggaaatcagaaactaccatggggggaaaaacctcagtaaatggcaatgctacactaataacaaaccagaaaggaatcattccagaagccaacaattgaacccaggccaccactttcaaaagataaagccttggctactgagctgtacagcattgagcagtttctattgcttttcctagaaggagcctagagaagccaatttcaagcttgcaaggcttttaactgctcaaaaaaaattkttatggctaactatgacatgagcccacaaatgtctgtcttctggatagtgcaaaccaaaagaaagtatccccatatggtcacaaggttgagctcttaaggacacaaaacaagacagaggaattttgtactgtattggtttcagggacctgtagcaaagtttgtaactgaccagcctgccaaactgccttgaaaagcaggcttgtagggatcctaaatccacattctatcctgtgatacccctctctccattacagaacacagaaagacaaattcttagcacaaagtacaccagatttgctatggcctaagactagtctcgcaaatcctttttgctattaatcaaacccttgcag

SEQ ID NO: 149435 - DNA, 661 bp, Homo sapiens
taagtagtttcttttttacaagatttagaatttccacaaggtagttcagaaaaaggaaaattcaagagaggaaatcagaaactaccatggggggaaaaacctcagtaaatggcaatgctacactaataacaaaccagaaaggaatcattccagaagccaacaattgaacccaggccaccactttcaaaagataaagccttggctactgagctgtacagcattgagcagtttctattgcttttcctagaaggagcctagagaagccaatttcaagcttgcaaggcttttaactgctcaaaaaaaattgttatggctaactatgacatgagcccacaaatgtctgtcttctggatagtgcaaaccaaaagaaagtatccccatatggtcacaaggttgagctcttaaggacacaaaacaagacagaggaattttgtactgtrttggtttcagggacctgtagcaaagtttgtaactgaccagcctgccaaactgccttgaaaagcaggcttgtagggatcctaaatccacattctatcctgtgatacccctctctccattacagaacacagaaagacaaattcttagcacaaagtacaccagatttgctatggcctaagactagtctcgcaaatcctttttgctattaatcaaacccttgcag

SEQ ID NO: 149436 - DNA, 661 bp, Homo sapiens
taagtagtttcttttttacaagatttagaatttccacaaggtagttcagaaaaaggaaaattcaagagaggaaatcagaaactaccatggggggaaaaacctcagtaaatggcaatgctacactaataacaaaccagaaaggaatcattccagaagccaacaattgaacccaggccaccactttcaaaagataaagccttggctactgagctgtacagcattgagcagtttctattgcttttcctagaaggagcctagagaagccaatttcaagcttgcaaggcttttaactgctcaaaaaaaattgttatggctaactatgacatgagcccacaaatgtctgtcttctggatagtgcaaaccaaaagaaagtatccccatatggtcacaaggttgagctcttaaggacacaaaacaagacagaggaattttgtactgtattggtttcagggacctgtagcaaagtttgtaactgaccagcctgccaaactgccttgaaaagcaggcttgtagggatcctaaatccacattctatcctgtgatacccctctctccattacagaacacagaaagacaaattcttagcacaaagtacaccagatttgctatggcctaagactagtctcrcaaatcctttttgctattaatcaaacccttgcag

SEQ ID NO: 149437 - DNA, 518 bp, Homo sapiens
caccctagctctggtgtccctggatattagaaacaaatgccctagccttcccaggtttcataatgatgggaccctggccacttttatgatctggggaaaccactggaaattactggaaagccaagggagatggggtgaatgtgcctgattaaaatatttcccatgaggagtttactttactctcattcccctaagtgtttctaaaggtacattgtgtgggaaaataaagtcatagttattcattgattgtctgaacatttcccaactgctttttctctgtatttttttttgtgtgtgcrtcagatgttgtggcaccaaataaagaagatataggctctgttcctacgttgttcattaccagcatgccttagtatcccaatatttcatcatttttgttacagacttttaaaaatccactggtagacagctgggaagagggaggaggccaacatttccaggctggttggaatacccagtcactatcatattatgctctctagctttcatgtgccaattct

SEQ ID NO: 149438 - DNA, 541 bp, Homo sapiens
tattttcttagaatgatgttcctttgctacacataacctgtttgtaagttcacatttattagtttacatctttctctcttgctgcactataagctctgtgagggcagggaccatgcctgcttggctaatacctagccagtgcctggcatattgatagcattcaataatgtttattgaaataaatgagtgagtgagaytgagtgagcctgggagggtcataaatgccttagtggtataggcaaagtgttgttcatctgcatttgtgttttatttgggatgaaagtctccatagctttcttgcagtctcaaagggttctctgactccagaaaggatgaagactactgatgtattaaaagcaatttgttgaaaatttgaaagcactgactttgaactcagataaacctggcttttctgattcctagctgcttgaccccagggcagtcacctctgaatctaaactccttaattttatcctaggtgaaaaatcccagcctggctgcatttgtctatggtagggtcccagcatggtggtgagagttg

SEQ ID NO: 149439 - DNA, 575 bp, Homo sapiens
atggttaattagctaaaatttgcractgcatctgtgaagctatttttctttttggcatgcgtgaacttaattaccgaagacatgagaagttcctggcccactgggatcacggtgggcatgggtgtcacagaacatgcccatggctcagggtgtgagatatgtgggtggttgagagtttgagaaatgaaggatagagagagttgcttgaccagaggaggatggggtctttcttctggtgttcatgcagacatattagtaaagaatttcatggtgagacacaatgtcacaaggacccccatctgtgtatgtggacaagcatcctcaaaaaatggccaacccccttgcatggtagaatgtagggctcatcgtcttattaccccactgccctgcaaattctatcattagttgctccacagaatatttatcttcccagaacatatgactgtctcccccgcacataggacagggcctgtaacatagaaggtgtccagtaaagatggctgattggcccagtggatgagaccaatcatcttctgagccttcagtttctcatcggcagaaggaagatcataaaa

SEQ ID NO: 149440 - DNA, 569 bp, Homo sapiens
cttatagctgatattcagaaatgaaaaatggtaaaaaattggagcctcaaggtcctggttttgccacttgttgtctgtgagcttggaaaatcccctgcatctctgtgcttcagtttccacatctctgaaatggggatgatatttttctctttgtctatcttgcagggcctccaaggrgaactaatttggataattgacactgaagtgctttgaaaaacataaatgcttagcaacttgaagtaggtggatgtggactcttatctattgagtacctgtcatgatccccacttttgtagattaggtgttggcaaactattaactgcaggccaaatccagacttctgcctgttttgtatattccatgaattaagaatggtttttacattttttattgcctggaaaaaaattaaaaggtaataatattttgtgtgacatgtgaaaattctataatcttcaaaattcagtgtccataaatgaagttttattggaatgcactcacaacacactgagtaaatgggtggagggatggattggcttccatgcaagagttgtctatggctgttttgccag

SEQ ID NO: 149441 - DNA, 598 bp, Homo sapiens
atgccaactgcagatggctattcccaaggttgtaggaaagatagttgattttttttattcagatctaggggtctataccagaccagtcctttcctcacctacatcttctacaggacaatgattatagcaacagcagctaccagttgctgagtgcgggttatgtgccaggtgccttatatacaatatttttaattcttagaatagtgctgaaaaactatttccccttcatcctgagaaacccaggtccsagaaaggtgacatagttgatccaaggtttcatgagcctgtctgactccagatccctggctctttctctataccttgtcacaacctttgaggcttgacatcagctgtcatttcctttctgagcatttgcttctccaagataaacagttccaggctttgaacaccttcttatggaagcttctttccagtactctcctgttttccttcccaaattgttagtttcctgttcttgaacacacatgtatttacatatgtttttttcaaggtgatgagtaccctacggaaaagccaagactcctcaataaaaagttcttgagaaggactctcttgagggttttccccaagggcacct

SEQ ID NO: 149442 - DNA, 598 bp, Homo sapiens
atgccaactgcagatggctattcccaaggttgtaggaaagatagttgattttttttattcagatctaggggtctataccagaccagtcctttcctcacctacatcttctacaggacaatgattatagcaacagcagctaccagttgctgagtgcgggttatgtgccaggtgccttatatacaatatttttaattcttagaatagtgctgaaaaactatttccccttcatcctgagaaacccaggtcccagaaaggtgacatagttgatccaaggtttcatgagcctgtctgactccagatccctggctcyttctctataccttgtcacaacctttgaggcttgacatcagctgtcatttcctttctgagcatttgcttctccaagataaacagttccaggctttgaacaccttcttatggaagcttctttccagtactctcctgttttccttcccaaattgttagtttcctgttcttgaacacacatgtatttacatatgtttttttcaaggtgatgagtaccctacggaaaagccaagactcctcaataaaaagttcttgagaaggactctcttgagggttttccccaagggcacct

SEQ ID NO: 149443 - DNA, 521 bp, Homo sapiens
aagtgtgataactgttatggaagaaagacaaagagacccaagaaagtaagtgaaaaaataaacaaggaggatcttatcaaatctggaaaccttggcaatctgataaatcagtaacagttcactcagtggaaagaaggggaaaaatacattccaactacagggaatagcctgtgcaaagtctctttggcaggacagagcacagtgtttccaaaaactagaagaagatcactatggctggagcacaggaagcaagagaagtaagaagacaagatgagttttaagaaattagaaggtttcygcccaagcagcccctgagcaccatggcaaggactttggtttttatcttaagagcaactggaagtcgataaatggttttaatcacgaaagtgatgtgagcaagttttagttttgaaaatatcactctggctgcaaagaagtggaaggattaaaagaggcaggggttgttattagacaggagactattgaaatagtacaggcaagatttggatcagtttgggaaa

SEQ ID NO: 149444 - DNA, 521 bp, Homo sapiens
aagtgtgataactgttatggaagaaagacaaagagacccaagaaagtaagtgaaaaaataaacaaggaggatcttatcaaatctggaaaccttggcaatctgataaatcagtaacagttcactcagtggaaagaaggggaaaaatacattccaactacagggaatagcctgtgcaaagtctctttggcaggacagagcacagtgtttccaaaaactagaagaagatcactatggctggagcacaggaagcaagagaagtaagaagacaagatgagttttaagaaattagaaggtttctgcccaagcagcccctgagcaccatggcaaggactttggtttttatcttaagagcaactggaagtcgataaatggttttaatcacgaaagtgatgtgagcaagttttagttttgaaaatakcactctggctgcaaagaagtggaaggattaaaagaggcaggggttgttattagacaggagactattgaaatagtacaggcaagatttggatcagtttgggaaa

SEQ ID NO: 149445 - DNA, 571 bp, Homo sapiens
gggttgtattttgtggggaatgggtgcaggtggaaaggaaagaggagttatcaaggctgactccttggtttcaggattttaaaaatggaaatagaaaatactgtcagaagaaagggaggcaattcatggcaaccatagtagagtggtctgcaagggttacaaatgagaagttactgtacttttattttatggtaggagccaatcctagaatgaatcgaagtgaatcaatgtagacagagatgcctgctttttcaaaagttttggctgttaagaaatgaagagacagtagctggagaaggtaactgaatgcaatgacattgtctttagcatgcattagactttaacttttatttaaaatttgaagaagagaagctagtagagagaaaagtgagaagaggctcaggtgctcaggtcaaatcctggctctacaagttcctatttgtaagaccttgagacaagtgatttagcttctccatgcctcagttttcatgttggggaaaaaaggataataatagyacccaccatgtggacttgatgagagggttcagtgagccaagtacataaagtgctt

SEQ ID NO: 149446 - DNA, 577 bp, Homo sapiens
ttaccaccaaataatcctccaatttattcttggacatttctaaagatgtggaaatcagtacctttctaggcctcaagttccattgtggaaaggctctattaaacttagactaacttctcatccaggaaccacacttctcatcctaagcatcagacccaagcccagagttatgtactttatgctattagatgtcttatctacagtactcacgcctggactctagttggggtgtggggtcatactacaattaaacaattaactaactaggtagatgaaattcctatcccaggaaccatagggcattgttgggtggcttctgagaaggtatatatgtatgagtatgtgtatgttgtgrtgtatgtgttgtgttcatattgcaagcgcacacacacacacacacacacacacacacacacacacatttggggaatggaaagaaaagcaacagtggagattccaaaaataagaagacagaattataaaactgccaaaccctaggacaactgatttcctaacctaagtgaatttgcaagctcttcccctaaatgtataagtaataagcacaattacagagggg

SEQ ID NO: 149447 - DNA, 588 bp, Homo sapiens
tcttaccatagcggtctatggacaatcaataggtaattggktgaaaaactatgaagcatccaaacagtggggtactatatacctaaaaatgaattagaataatattgtatgtgattggagtaatcacaaatatattttactaaatggaaaaaaggaaagtgcagaacagtgtttaaggttttttgtttttttttaatataggcacagggcctcactatgttgcctaggttggtcttgaacttgtaagctcaagcaatccaccctccttggcctcccaaagtgttgggattacagtgtgagccaccatgtccagcccagagcactgtttagagtgctctcttttgtatagaaatatatataatatatatatatgtatatgtatatatgtatataaattttttattaggaaacactgacaggttacccaaacctaacacaatagttatctacaggggaaacaagaaaacaaggtccagggataagaatagaagccagagttctgcagtatatcttcatttataagttttagctttgcaccacacaaaagttttacatacttttttttaaagcacaaaagaaaaaaaaaaa

SEQ ID NO: 149448 - DNA, 450 bp, Homo sapiens
taataaagcagctataaatggtgctgagtcgagtaaaattttgacaaggatgggtgcactgggttccttgtgcaagtggaaggagctatagctagtyatcaggggaaggagagactaattagcactgcatcctgagaacagttttattcatggctttcctcacaagaaatgttgagcaataccatggagggtatcttcagcaatcattttgagaagcccccaagtattttccctatggtctttttaattttttttagtaattgatcctcaaataataagcacactgatacctaaagaagtaaaaataatagtaataaaataaataaaaatcccctaattgtaaagctagtaaagacatgaccaaattttgaactcagatcttccaaattatgtccttcctgcagctcattttttttggtataatgtctgttttctctacttttggattcc

SEQ ID NO: 149449 - DNA, 445 bp, Homo sapiens
taaagcagctataaatggtgctgagtcgagtaaaattttgacaaggatgggtgcactgggttccttgtgcaagtggaaggagctatagctagtcatcaggggaaggagagactaattagcactgcatcctgagaacrgttttattcatggctttcctcacaagaaatgttgagcaataccatggagggtatcttcagcaatcattttgagaagcccccaagtattttccctatggtctttttaattttttttagtaattgatcctcaaataataagcacactgatacctaaagaagtaaaaataatagtaataaaataaataaaaatcccctaattgtaaagctagtaaagacatgaccaaattttgaactcagatcttccaaattatgtccttcctgcagctcattttttttggtataatgtctgttttctctacttttggatt

SEQ ID NO: 149450 - DNA, 444 bp, Homo sapiens
tataaatggtgctgagtcgagtaaaattttgacaaggatgggtgcactgggttccttgtgcaagtggaaggagctatagctagtcatcaggggaaggagagactaattagcactgcatcctgagaacagttttattcatggctttcctcacaagaaatgttgagcaataccatggagggtatcttcagcaatcattttgagaagcccccaagtattttccctrtggtctttttaattttttttagtaattgatcctcaaataataagcacactgatacctaaagaagtaaaaataatagtaataaaataaataaaaatcccctaattgtaaagctagtaaagacatgaccaaattttgaactcagatcttccaaattatgtccttcctgcagctcattttttttggtataatgtctgttttctctacttttggattccagagtc

SEQ ID NO: 149451 - DNA, 445 bp, Homo sapiens
taaagcagctataaatggtgctgagtcgagtaaaattttgacaaggatgggtgcactgggttccttgtgcaagtggaaggagctatagctagtcatcaggggaaggagagactaattagcactgcatcctgagaacagttttattcatggctttcctcacaagaaatgttgagcaataccatggagggtatcttcagcaatcattttgagaagcccccaagtattttccctatggtctttttaattttttttagtaattgatcctcaaataataagcacactgatacctaaagaagtaaaaataatagtaataaaataaataaaaatcccctaattgtaaagctagtaaagacatgaccaaatwttgaactcagatcttccaaattatgtccttcctgcagctcattttttttggtataatgtctgttttctctacttttggatt

SEQ ID NO: 149452 - DNA, 475 bp, Homo sapiens
gcttcctctctgctgagagctgaacagtcatcaggatgagtgttgtcaaagaggagccacccacttcagggcctcctctctgctgagtgctgaacactgatgggacaacctggctacagagaggagctacccactgtgggtctcctctgagctgttctaacactcaatgaagctccatcttgctcaccctccacctgtctgtgtagctcattcttcctgggctcagaacaagaactcaagcaaaggcatcactggccacagacgtttctggccataagagcgacaccccaaagatgccttgactctgttactttgacagtctccaataaaccacaccttcctgcctttatgtagttcctacccacactgactctggacaggacaatttggacagacaaagagacatgaggaattgagatgcaagcagaggcttcataatgacttkcatactgaggcttgtctccctgtaatgttg

SEQ ID NO: 149453 - DNA, 245 bp, Homo sapiens
aagttggctctgtgagaccatcactgataaagacacatacagttagcaccacacatttataaatgcagatagccacaatgacctttccaatatgtacaagctccatttacacatccacacatgtatttacagctaataaataaaatgtaaagccagaacatccttgatatatatarcaaagtttttcggagccagagttcccagtgctatgtgctgctttagtgaatcttttaagttaatgcacc

SEQ ID NO: 149454 - DNA, 644 bp, Homo sapiens
gttccctgacctgtggagtccgcactgaagtcagtgcagctcacaaaagccaccayagaccccagcacattagaagcttgctgggaaaatgttggaccaccatgccccacaccatggatgccaaatctagcaattcacagattatcatagttgcttctccctaaacctcaggcaactcccataggctgggctgccagacaatagaaacagacacatggtggaagtcaaagttgcctctcctctctgtcttgggcctccatccttgagtcacttttatgtgttttgcttctcttttctcttgggaaaaattttttctgccaatgtatttctggtgcaccatctccaagtgccccagatatgttcaaacaggcttaaaactcaaaggggggaaaaatcaacaactccaactttgaagtcacacattggtttaaaagccaactcacccacttactagctttgatttctaaattaattcatttccctgcatctcgttatattcatcaataaagagaagataaaaatacctatttcaggaggctattgtgagaatgaaacaaatgttaaccaagcacttcacacagtgcctggcacatagttgatgcagaaaaactggtagtaattatttttagtaacacaacatcgga

SEQ ID NO: 149455 - DNA, 630 bp, Homo sapiens
agatctttaactgacttacattggcaaagacccttattccaagaagggtcaccttctggaggttctagttacacatatatttggggcggtggtgttattcaacccaggaaaaggatgtgtttgagtagttcagacaaaggtattggaatacaatgggtagaagtcagattctaaggtccttgaaggyaggagattttatctgttttgtttactttgtgacctcagattccagaacagtacctgtacatagaaggtgctcagtaaatgtttgttgaataatgttctttatatcctccacccattagaaggccacagcaccagtgatagtgcaaggccaggaaccccccctggcttcactgaggtgtgcgagccttgctcaggcttctttccctttaagcatcagtgacgtcgcctgtcccttttctaacctcatatgaccctgaccgtctgtgatgcccaggtcacttctgaagtgtgccgttatggcattagtcaaggtgtctgcaggagctctttatcagcttatcaactctctgatttgggcaaggagcatttcctatatttgcattcagcaaaaccaaaatgcttggcatcttgggtctacaatacctcttcatttgtacttaataa

SEQ ID NO: 149456 - DNA, 630 bp, Homo sapiens
agatctttaactgacttacattggcaaagacccttattccaagaagggtcaccttctggaggttctagttacacatatatttggggcggtggtgttattcaacccaggaaaaggatgtgtttgagtagttcagacaaaggtattggaatacaatgggtagaagtcagattctaaggtccttgaaggtaggagattttatctgttttgtttactttgtgacctcagawtccagaacagtacctgtacatagaaggtgctcagtaaatgtttgttgaataatgttctttatatcctccacccattagaaggccacagcaccagtgatagtgcaaggccaggaaccccccctggcttcactgaggtgtgcgagccttgctcaggcttctttccctttaagcatcagtgacgtcgcctgtcccttttctaacctcatatgaccctgaccgtctgtgatgcccaggtcacttctgaagtgtgccgttatggcattagtcaaggtgtctgcaggagctctttatcagcttatcaactctctgatttgggcaaggagcatttcctatatttgcattcagcaaaaccaaaatgcttggcatcttgggtctacaatacctcttcatttgtacttaataa

SEQ ID NO: 149457 - DNA, 630 bp, Homo sapiens
agatctttaactgacttacattggcaaagacccttattccaagaagggtcaccttctggaggttctagttacacatatatttggggcggtggtgttattcaacccaggaaaaggatgtgtttgagtagttcagacaaaggtattggaatacaatgggtagaagtcagattctaaggtccttgaaggtaggagattttatctgttttgtttactttgtgacctcagatwccagaacagtacctgtacatagaaggtgctcagtaaatgtttgttgaataatgttctttatatcctccacccattagaaggccacagcaccagtgatagtgcaaggccaggaaccccccctggcttcactgaggtgtgcgagccttgctcaggcttctttccctttaagcatcagtgacgtcgcctgtcccttttctaacctcatatgaccctgaccgtctgtgatgcccaggtcacttctgaagtgtgccgttatggcattagtcaaggtgtctgcaggagctctttatcagcttatcaactctctgatttgggcaaggagcatttcctatatttgcattcagcaaaaccaaaatgcttggcatcttgggtctacaatacctcttcatttgtacttaataa

SEQ ID NO: 149458 - DNA, 630 bp, Homo sapiens
agatctttaactgacttacattggcaaagacccttattccaagaagggtcaccttctggaggttctagttacacatatatttggggcggtggtgttattcaacccaggaaaaggatgtgtttgagtagttcagacaaaggtattggaatacaatgggtagaagtcagattctaaggtccttgaaggtaggagattttatctgttttgtttactttgtgacctcagattccagaacagtrcctgtacatagaaggtgctcagtaaatgtttgttgaataatgttctttatatcctccacccattagaaggccacagcaccagtgatagtgcaaggccaggaaccccccctggcttcactgaggtgtgcgagccttgctcaggcttctttccctttaagcatcagtgacgtcgcctgtcccttttctaacctcatatgaccctgaccgtctgtgatgcccaggtcacttctgaagtgtgccgttatggcattagtcaaggtgtctgcaggagctctttatcagcttatcaactctctgatttgggcaaggagcatttcctatatttgcattcagcaaaaccaaaatgcttggcatcttgggtctacaatacctcttcatttgtacttaataa

SEQ ID NO: 149459 - DNA, 546 bp, Homo sapiens
tgcattgactggctttcattatgccttcaagtgacaaaatatatgccaatttaaaaaggtggccaggcgcaatggctcacacctgtaatcccagcactttgggaggccaaggcaggtggatcacctgaggtgaggggttcaagaccagcctgaccaacatgttgaaaccctgtctctactaaagatacaaaattcgctgggcatggtggcacatgcctctaatcccagctagttgggaggctaaggcagaakaatcgcttgaacccaggaagccagaggttgcagtgaaccgagatcatgccattgcactctagcctgggcaacaagaacaaaactccgtttcaaataaataaataaaatttaaaaggcaatgtatttctctttgtgtattcatatggatatctattttgtagctacaaatgaaataccaattccattcagaataagagaaggaaacaaataaattatatcacataacacttatcattatacatgtcttgggaaggataaccattcattagtttaagttaagtcttctgcttctat

SEQ ID NO: 149460 - DNA, 546 bp, Homo sapiens
tgcattgactggctttcattatgccttcaagtgacaaaatatatgccaatttaaaaaggtggccaggcgcaatggctcacacctgtaatcccagcactttgggaggccaaggcaggtggatcacctgaggtgaggggttcaagaccagcctgaccaacatgttgaaaccctgtctctactaaagatacaaaattcgctgggcatggtggcacatgcctctaatcccagctagttgggaggctaaggcagaataatcgcttgaacccaggaagccagaggttgcagtgaaccgagatcatgccattgcactctagcctgggcaacaagaacaaaactccgtttcaaataaataaataaaattwaaaaggcaatgtatttctctttgtgtattcatatggatatctattttgtagctacaaatgaaataccaattccattcagaataagagaaggaaacaaataaattatatcacataacacttatcattatacatgtcttgggaaggataaccattcattagtttaagttaagtcttctgcttctat

SEQ ID NO: 149461 - DNA, 546 bp, Homo sapiens
tgcattgactggctttcattatgccttcaagtgacaaaatatatgccaatttaaaaaggtggccaggcgcaatggctcacacctgtaatcccagcactttgggaggccaaggcaggtggatcacctgaggtgaggggttcaagaccagcctgaccaacatgttgaaaccctgtctctactaaagatacaaaattcgctgggcatggtggcacatgcctctaatcccagctagttgggaggctaaggcagaataatcgcttgaacccaggaagccagaggttgcagtgaaccgagatcatgccattgcactctagcctgggcaacaagaacaaaactccgtttcaaataaataaataaaatttaaaaggcamtgtatttctctttgtgtattcatatggatatctattttgtagctacaaatgaaataccaattccattcagaataagagaaggaaacaaataaattatatcacataacacttatcattatacatgtcttgggaaggataaccattcattagtttaagttaagtcttctgcttctat

SEQ ID NO: 149462 - DNA, 546 bp, Homo sapiens
tgcattgactggctttcattatgccttcaagtgacaaaatatatgccaatttaaaaaggtggccaggcgcaatggctcacacctgtaatcccagcactttgggaggccaaggcaggtggatcacctgaggtgaggggttcaagaccagcctgaccaacatgttgaaaccctgtctctactaaagatacaaaattcgctgggcatggtggcacatgcctctaatcccagctagttgggaggctaaggcagaataatcgcttgaacccaggaagccagaggttgcagtgaaccgagatcatgccattgcactctagcctgggcaacaagaacaaaactccgtttcaaataaataaataaaatttaaaaggcaatgtatttctctttgtgtattcatatggatatctattttgtagctacraatgaaataccaattccattcagaataagagaaggaaacaaataaattatatcacataacacttatcattatacatgtcttgggaaggataaccattcattagtttaagttaagtcttctgcttctat

SEQ ID NO: 149463 - DNA, 512 bp, Homo sapiens
aggcagcccaactgattctgaattctaaagctgtgaatttgaatgaatgaagctgcagatgacaatctcaataggtatcatttactgacatttactatatgccaaaacagggctgtttaaagttcatggtggttycatctactccttctgaggctacttcaaggtagggaggctacttcaaggtagggatctgaagtcctatccaaggttcagaaaggagaaacgactggcttttgttccaggggacacagtctcgcttgcttctgagcccagcgtcttctctctacagcacgctgtctcagcaccccgatgaggcaggtccatgcctaaattgcttcctacacacacaagcacacacctgcaagaccctctaaaatgagaattgttaaattgttaacagaaaaactcagagtataaaatctgccattgacaaagcttctactcacagctttgtgaaagctgatgattttagtttatgaactaaactaaacatgaacagtaagacagtttta

SEQ ID NO: 149464 - DNA, 562 bp, Homo sapiens
ccttggtctctatgctgtagttatgtttcccgtttagaagaaataagaaaaggttgacttagtgtcccgttgccaacagaggggtagatataacaaaacctattcacaattctgtattcctcacacattcaacatgaaagctatcaaggttatcttttctaaccccttagagaaaggctgtatgcctgtgcatmtatgtacacttacacacatgtagacattactcagctctgtgccttcaacaaacttcaggggtaaattgcaggctcttctaagaagcatggagatggaaatgtgccattttccatcagaagtgacaattaataaacacaactttgggaggcatacaactgtacaacaatgaagacttcagatccccagagagaaatggcatacattccgtagctcttagttcaaaacttgattttagacactgatatggtttggctgtgtccctaacaaatctcatcatgaattgtagcacccataactcccacatattgttggagggacctggtggcagaaaactgaatcatggtggtggtttccccaatactgttct

SEQ ID NO: 149465 - DNA, 562 bp, Homo sapiens
ccttggtctctatgctgtagttatgtttcccgtttagaagaaataagaaaaggttgacttagtgtcccgttgccaacagaggggtagatataacaaaacctattcacaattctgtattcctcacacattcaacatgaaagctatcaaggttatcttttctaaccccttagagaaaggctgtatgcctgtgcatatatgtacacttacacacatgtagacattactcagctctgtgccttcaacaaacttcaggggtaaattgcaggctcttctaagaagcatggagatggaaatgtgccattttccatcagaagtgacaattaataaacacaactttgggaggcatacaactgtacaacaatgaagacttcagatccccagagagaaatggcatacattcygtagctcttagttcaaaacttgattttagacactgatatggtttggctgtgtccctaacaaatctcatcatgaattgtagcacccataactcccacatattgttggagggacctggtggcagaaaactgaatcatggtggtggtttccccaatactgttct

SEQ ID NO: 149466 - DNA, 512 bp, Homo sapiens
gtggttgactgagttttagcaaagcaataccgactgtaatattgagttaattttgttaatttgaattgtttggattctgtcatcttctttgtatttaatctttaaatttgttttgggtttgtggctgccacagacagcctgctcttctctttctggacatgtggtaaaatgccacggtggggcccccttctgttgtgcagaacacatgattagttctggccagtgagttgtgagtgcgaagtgacacttcatagyatttagctgcagtgtgagtctctccagtaccgcttttgcctctagcaacgtttgagattgcactaagtatctccctgtgtgctgctccaggtgcgtcccaactcctctgtgccttcgctggaagcaggtctggagaaaatgggtccatggtctcccttccattctaacttccggttggatttggccaatggggcgttctggcaggaaactgcagggcaggaggcgaatggggtcaaaagagtaggcataagtctctt

SEQ ID NO: 149467 - DNA, 512 bp, Homo sapiens
gtggttgactgagttttagcaaagcaataccgactgtaatattgagttaattttgttaatttgaattgtttggattctgtcatcttctttgtatttaatctttaaatttgttttgggtttgtggctgccacagacagcctgctcttctctttctggacatgtggtaaaatgccacggtggggcccccttctgttgtgcagaacacatgattagttctggccagtgagttgtgagtgcgaagtgacacttcatagcattyagctgcagtgtgagtctctccagtaccgcttttgcctctagcaacgtttgagattgcactaagtatctccctgtgtgctgctccaggtgcgtcccaactcctctgtgccttcgctggaagcaggtctggagaaaatgggtccatggtctcccttccattctaacttccggttggatttggccaatggggcgttctggcaggaaactgcagggcaggaggcgaatggggtcaaaagagtaggcataagtctctt

SEQ ID NO: 149468 - DNA, 511 bp, Homo sapiens
tgctgatgaaatattattgatggtggcggtgatggtgattattattaagactatcaataataataagaagtcaccctatatttcctagtaataacatgaagatgattacttagcttgcaaacgtatacgattcatcttctacctctctcttcttgatctccctaaagcaccaatcccattactgggtagctttttaaagtgatatttcagttcttcacatgtgtcaatcagaaagctaagggctcatttttgcactgatatctgtcaattcagttctgagaaaaagatacggctccccattaccagtgggtaaacacatggaaagaagcactaacctttcattctttgcattcatactgacccgtatttgctagayaccttctctctgttcaactttcagcttgtgacctttctagtgtttgtctgtttatttcacagttgacaaaaccaaaacccaaactaagaaagtgaggccaagtctgcacaggaagtcagtgtcagagcacaacta

SEQ ID NO: 149469 - DNA, 492 bp, Homo sapiens
atcaacagggttgccacatacaattgtgtaagttgtgcactgaacaagggaatatggctgtgcagagtagtgtgagtgggaaacctggtatggggcttcccctacttgtggagagcggcttttctctttttttgcgcaaaggctatacattaactagcaaagggcatgrctattatggtactccaatctcaatatttttggatctgataactatttttcaacacctatgatgtgctgaaatttttctgtgatgttatcctcttaagaaacttcaattttaccaatgtagtacctaaatgtgcgtgacatccagaattggctacaatctaccagaaatcaatgatatgctcacattcccttgatccataaattactacccattagtaaaagttccagtaacttttttgagcagccttatcacactgttggcccacgctgagcttgcagtccacgaaaacctcaggttgtttttttcttgaaaagtggtgttcg

SEQ ID NO: 149470 - DNA, 492 bp, Homo sapiens
atcaacagggttgccacatacaattgtgtaagttgtgcactgaacaagggaatatggctgtgcagagtagtgtgagtgggaaacctggtatggggcttcccctacttgtggagagcggcttttctctttttttgcgcaaaggctatacattaactagcaaagggcatggctattatggtactccaatctcaatatttttggatctgataactatttttcaacacctatgatgtgctgaaatttttctgtgatgttatcctcttaagaaacttcaattttaccaatgtagtacctaaatgtgcgtgacatccagaattggctacaatctaccagaaatcaatgatatgctcacattcccttgatccataaattactacccattagtaaaagttccagtaactttttkgagcagccttatcacactgttggcccacgctgagcttgcagtccacgaaaacctcaggttgtttttttcttgaaaagtggtgttcg

SEQ ID NO: 149471 - DNA, 656 bp, Homo sapiens
cacaataatgctacataacaaacaaccacaaaatgccaatggcatataaccataagcttttatctccgtgcacaccagtacgcaggtcagctggggtatctctcgttcaggttaaggatctgtgggtccctagagacactgcaggtcaccatgggtcaactcatctgtgttgtgcttgstcaactctgatttcaagtagagaactgggtccaggtttgctctacttgtcttataacttctaagaacaagtggctacctagattatattctactcatggagaaaggcagcacaagtgagtgtgccgaaacacacaagcacatttcagccctttgctcaagtcatgtccgctaacatcccatcggccaacacaagccccagggccaagcccaaagctgcatgatagggaagcatgcacatgccttctgtggccccgtgcaaagctcatactatgtgctgcatgacagccaataaatcgagagactgggtactggggcaaggaaagtgactatttcagagagccagcagactgagaagatggtggactagcatcctaaagaaccatagctaatttggggctccttttatgttaggggaaaggggaagatggagggggttaatgtcaaaaggtgactgatgaccacacatacctgagaag

SEQ ID NO: 149472 - DNA, 575 bp, Homo sapiens
aaccaattctaacagcttgataacacactcttttccagttgatctgccatcattcgtctatcttttggtgacttgtccaggaatggggacaagcctttccattccacaataaaattgacttttgtatcaaaaatcaatttattatagcatgttatctaccgttaacttgtatatagatttgctgttagctcttcgaagcatagtatcatcattattgtatgttgtggatggattcagattaagatgtgtttttgtacacattctgccaggatctggacagggatggtaaggaggacttttgttttctaagcatttacaacattttctcaaactccacccgcctcaracctttcattccccatatcggggtgatctgcttatgctgtgaagctgtctcttctgctcctgagttgtctccagagacacctttttttaaaaaaaatggtggtaaaatatatacaacatactatttattattttacatgacataacataacacactatttataattgtaaccattcataagcataaaatttggtagctttaagtatattcataatgttgtgtaatcatc

SEQ ID NO: 149473 - DNA, 565 bp, Homo sapiens
gaggtagaacagtggaagtacaagaattsgaaaagcacagccatccaagggccgaaaagtattgtagctctagtaggagaagtttaatagggagagatggcaacgctagccccacaatcgtgcccatatcaacccatgttcataggagaaactgaccagcagttgaaattccaattctgactggggagcttaaaaaaatattgatcttagcctcagtgactgatttaattggtctggggtgtggactggactttggacattttaatagttctccagtgatcctaatgaacagatagatagatttgggaatcatcagttcaggaagaaaataagactaattgaaactagggtttgtactgggaagccatggtagggtgttttattgagtgacttataataaacccattttctcaagaaaattataggtctgggaatgtaggtttgttctgaaaggaaatgagaagtgtcagcaaataaatgggttccacgtgtacagctaagttcccgtgaaatcctctaaggtcagtcacatccttatataatcctaggctggagtcacaaggtc

SEQ ID NO: 149474 - DNA, 684 bp, Homo sapiens
gccttgaataaaagaggtagaacagtggaagtacaagaattcgaaaagcacagccatccaagggccgaaaagtattgtagctctagtaggagaagtttaatagggagagatggcaacgctagccccacaatcgtgcccatatcaacccatgttcataggagaaactgaccagcagttgaaattccaattctgactggggagcttaaaaaaatattgatcttagcctcagtgactgatttaattggtctggggtgtggactggactttggacattttaatagttctccagtgatcctaatgaacagatagatagatttgggaatcatcagttcaggaagaaaataagactaattgaaactagggtttgtactgggaagccatggtagggtgttttattgagtgacttataataaacccattttctcaagaaaattataggtctgggaatgtaggtttgttctgaaaggaaatgagaagtgtcagcaaataaatgggttccacgtgtacagctaagttcccgtgaaatcctctaaggtcagtcacatccttatataatcctaggctggagtcacaaggtcaagtctcagccctgtaagragccataagactgcaagttagcaaatgttaactcttattgcacacctactctctcagactcagagagggccaaatccactcacacta

SEQ ID NO: 149475 - DNA, 564 bp, Homo sapiens
agatctgctctctgcccctatccacccagctctgttctctggaaaactgaatgatatgaagtgcaacaaatttctctctcgtctcggtttcttgttggatttggtaaacaggaggccaaatgaagcaatgtgggaatttgttaccaaggaaaggcacctcgattccttgactamcacaacactgactgtctaattttctttcttctcaaattgtttattctggttcatcaaaattttgactaaaatgccagctacgtataatgcattttccttatcagtacatattccctaaaggagctatttcacttctgaacattatacaaattaacaattactttcaacagcataaatacacataatgttagcttccctagggccaccagagagctgacatgtatgaactgcaacaactttcttatcctctggctttctgtttagatttggccaacaggaggccaaatgaaattgtatatagatttattaccaatgaaagccacccaaatttcaacagtggtaacaaggggaggcctgcaactccccgattattgggtcatcgtggattgg

SEQ ID NO: 149476 - DNA, 564 bp, Homo sapiens
agatctgctctctgcccctatccacccagctctgttctctggaaaactgaatgatatgaagtgcaacaaatttctctctcgtctcggtttcttgttggatttggtaaacaggaggccaaatgaagcaatgtgggaatttgttaccaaggaaaggcacctcgattccttgactaacacaacactgactgtctaattttctttcttctcaaattgtttattctggttcatcaaaattttgactaaaatgccagctacgtataatgmattttccttatcagtacatattccctaaaggagctatttcacttctgaacattatacaaattaacaattactttcaacagcataaatacacataatgttagcttccctagggccaccagagagctgacatgtatgaactgcaacaactttcttatcctctggctttctgtttagatttggccaacaggaggccaaatgaaattgtatatagatttattaccaatgaaagccacccaaatttcaacagtggtaacaaggggaggcctgcaactccccgattattgggtcatcgtggattgg

SEQ ID NO: 149477 - DNA, 586 bp, Homo sapiens
ctttttcagctttgggttgctttcttcccttgatttctcatctcaatacagtggtctttactcttttatttactatgtaggaagatgttgctctctacatgaaagaatacggattccattcactaatgcaagagacgataaacgtatgttggggaggaaaagaaaggagagaaagaaaagaatcaggtgggaatagtcactcaggttcaaagtaagaggatccagtgacagaggagtgtcctcactgccacctaagtgatgcccattttcctcagatggtatgaaggtttccatttagaaatcctaatttctttcctttagggtcatcagactgaaaacaggcatttgctatcaaaaggagggattatttgggacactaaaatgggcaatagggagtgaaagaactgagggggagcagtcatcaaaaaagacagaaaaggcgataaacatctctggttggggagacagaacgcttgtaaattagagaaatacaagacgattgaaagaaaccttaaactacctggtaatttgtatraggctctgttggctggagcccagtgttaagagggctttaggctaccaacac

SEQ ID NO: 149478 - DNA, 589 bp, Homo sapiens
gtagttagtaagaatgtttttgtattacgtgtaatcttaacttggaagatttcagtggattatttcataaggttgaattttaattttctaagaataattccacattagcataaattattgattaagtaaaacttttctaagggtagaaaatgataagaatttatttaatagacacatccctgtcttttatgtacttgtttaaaaatagttatttgtgtcttggatatccatttcttctgtagacatcccaacttacagtagacgttctcyctcccatatccactatggttgaaacaaagtccctgcctctgtttaaatcacagaggaatattttggcataagcagaatcctatgctttattcttgctattttggattgtgactcatgccttcttgttccttaaaattattgtcacagggtcagatttcctgtgaactttgcttgtctatgttgagttgtagttttctttttagctcctgtgaaggacaatgtttcattaccctgaaaagtttaaatcacacaaatatacagtcacatctagagaaatacaagaagtgattataagactgtggtcttctaaaaagagcaa

SEQ ID NO: 149479 - DNA, 573 bp, Homo sapiens
gcactgctatataccaataatgacaaaactgagaatcaaaccaataactcaatctcttttagaatagctacaaaaayatataagaatatacttaaccaagaaccaatagttctaaaaggagaactattatacaaaacatggctgaaagaaataatagatgatgcaaacacatggaaatacatcccatgctcatggattggaagaatcaatattgtgaaaatgagaccacaatgcccaaagcaatctacatattcagtgtaattcctatcaaaataccaacatcatctttcacagaattagaaaaaacaatcctaaaattcatatggaaccaaaaaagagtccaaacagccaaagcaatcctaaacaaaaagaacaatctggaggtatcacattatctaacttcaaattatactacaaggctatagtaaccaaaacagcatgttactggtttaaaaacatataaatttatgtataaagtaacaatgtcctattgagttcgcagcacgcagtgttgtgacatgtgtgctaataatagaacaaaaggagaaagggaacagagcaacaagggaattc

SEQ ID NO: 149480 - DNA, 589 bp, Homo sapiens
gtagttagtaagaatgtttttgtattacgtgtaatcttaacttggaagatttcagtggattatttcataaggttgaattttaattttctaagaataattccacattagcataaattattgattaagtaaaacttttctaagggtagaaaatgataagaatttatttaatagacacatccctgtcttttatgtacttgtttaaaaatagttatttgtgtcttggatatccatttcttctgtagacatcccaacttacagtagacgttctccctcccatatccactatggttgaaacaaagtccctgcctctgtttaaatcacagaggaatattttggcataagcagaatcctatgctttattcttgctattttggattgtgactcatgccttcttgttccttaaaattattgtcacagggtcagatttcctgtgaactttgcttgtctatgttgagttgtagttttctttttagctcctgtgaaggacaatgtttcattaccctgaaaagtttaaatcacacraatatacagtcacatctagagaaatacaagaagtgattataagactgtggtcttctaaaaagagcaa

SEQ ID NO: 149481 - DNA, 368 bp, Homo sapiens
gcctgaagtacccgaccgagagaagacaattaaacaaacaaacaaacaaacaaaaacctcctcatcccttcctctccaaatgcagattcrcagaagaaaaacattcgtttggtttgtgattcctgtataaatttagttttgggtgctcattacctgtagatcccttccttcccagggtcagctattgctttcctatttgtctcattttgtgtactgagaacctggcttgacttcccacctgttagggatgtgtgagctgtcagttttgtgtatgcaggcagccaacttcaagttgggggccccaagaatataaccagacaaaaatgtgattcgcaccctatttgcagccagtttaccaactatcgcta

SEQ ID NO: 149482 - DNA, 429 bp, Homo sapiens
ctggcacctctcagacttcttcttctctccactggcttctgcttctgcttccatgttttttcaccttcattctttcattcagttcccttgaatccttgatatgtctgctttcaagcccctacctcctcccatgcctctgtccacctgtcagacctattccyttcctactcaagcccctcaatcacttgaattttaagctcgttgctctcaacagacttaaggtctccccaaaacaacctgaggatgaaaaaggaaaaagccacagcctccatatacatatcagggcaagggaaggtcgtgaaggtcgtctccacaaatattggtacacaggtaaccttaattttatcccaactgccaggaacaaagtggagaaaagatgagagccaactattttgtacaaatcagtgagttgtgtgctatgttttacga

SEQ ID NO: 149483 - DNA, 454 bp, Homo sapiens
tggcacctctcagacttcttcttctctccactggcttctgcttctgcttccatgttttttcaccttcattctttcattcagttcccttgaatccttgatatgtctgctttcaagcccctacctcctcccatgcctctgtccacctgtcagacctattcccttcctactcaagcccctcaatcacttgaattttaagctcrttgctctcaacagacttaaggtctccccaaaacaacctgaggatgaaaaaggaaaaagccacagcctccatatacatatcagggcaagggaaggtcgtgaaggtcgtctccacaaatattggtacacaggtaaccttaattttatcccaactgccaggaacaaagtggagaaaagatgagagccaactattttgtacaaatcagtgagttgtgtgctatgttttacgactcatggctaaaattttttaaatgaa

SEQ ID NO: 149484 - DNA, 454 bp, Homo sapiens
tggcacctctcagacttcttcttctctccactggcttctgcttctgcttccatgttttttcaccttcattctttcattcagttcccttgaatccttgatatgtctgctttcaagcccctacctcctcccatgcctctgtccacctgtcagacctattcccttcctactcaagcccctcaatcacttgaattttaagctcgttgctctcaacagacttaaggtctccccaaaacaacctgaggatgaaaaaggaaaaagccacagcctccatatacatatcagrgcaagggaaggtcgtgaaggtcgtctccacaaatattggtacacaggtaaccttaattttatcccaactgccaggaacaaagtggagaaaagatgagagccaactattttgtacaaatcagtgagttgtgtgctatgttttacgactcatggctaaaattttttaaatgaa

SEQ ID NO: 149485 - DNA, 534 bp, Homo sapiens
tcccctgcacccccaaatccaatttattactaagacagatcttttcaatctgttcacttctctccttctcctctgctgcttccctggttcagaaccctaccatgtcctgtccacattccagccaccacatcccttcggcagctctctggtggctctcactgaccccagtgtcacctccaacccaattcattctctacactgacactagagccatcttcatatagtgtcaatatgctcatgacactacccagcacaaactcccctctcatgcatatatatctaggccttagccatrtggaattactttctattaccagagtgtgcagctattccttttatcactagggctctgtgtatgttgctttttccacctaggacactcttcctccccttaccaggctagcttctattcatatttcaggtcttaggttaagtgtaatctccaggaggcatttcttgatttctcaagttccaattaggtgattctatagtatccccaaatgtattgtacttgctgtttatttatctgtatct

SEQ ID NO: 149486 - DNA, 600 bp, Homo sapiens
tgctagtattttgttgaggatttctgtatcttatgttcatcaggacattcgcgtgtaactttttatcttgtagtgttcttgtctggctttgctatctaggtaatgctggcctcataaaataaattgagaagtattcccacttctccaaatattttggaagagtttgagaaggattggtatggcttctttaaatgtttggtagaattcagcagtgacgacttcctgggcttttcttyggtggtagaatttttattactaatcagatttccttactttttattactctgtttagactttctgttttttttttcatgtttcagtcttggtaagttgtatgtgcctaggaacttctccgtttcttctaggctatcaaatttcctcttcctataaggacagcagtcagattggattagggcctatccttggggctttattttaatttaatcacctctttaaaggctctatatccaaatgcagccacattctgaagtattgaggattagggcttcagcatatgaattttgggaaaggacacagttcagttcataacaccagctaagatttagggacttttcatgttgccaggactggaaggtggct

SEQ ID NO: 149487 - DNA, 600 bp, Homo sapiens
tgctagtattttgttgaggatttctgtatcttatgttcatcaggacattcgcgtgtaactttttatcttgtagtgttcttgtctggctttgctatctaggtaatgctggcctcataaaataaattgagaagtattcccacttctccaaatattttggaagagtttgagaaggattggtatggcttctttaaatgtttggtagaattcagcagtgacgacttcctgggcttttcttcggtggtagaatttttattactaatcagatttccttactttttattactctgtttagactttctgttttttttttcatgtttcagtcttggtaagttgtatgtgcctaggaacttctcygtttcttctaggctatcaaatttcctcttcctataaggacagcagtcagattggattagggcctatccttggggctttattttaatttaatcacctctttaaaggctctatatccaaatgcagccacattctgaagtattgaggattagggcttcagcatatgaattttgggaaaggacacagttcagttcataacaccagctaagatttagggacttttcatgttgccaggactggaaggtggct

SEQ ID NO: 149488 - DNA, 606 bp, Homo sapiens
agctagagaaatgtattccattgaaaactttataaacctttctaaaaatcattttttcatttaatctgtcataccatttttaaagaaaatgatgactatctattgagtaacacggacaaaggaggaagaggcacatgctgcccattacccgactttctcggtcctggtcttaaggggaggatgttttcatggttcaggtgttcttcccaagacacatgagcctggtgttggacgtgttgtgtgtgcatcagagtcccatccgcgggggctgattcaatcttcctgcatckcagacattaccctagtgtccttttcctacttcagttatatcctttagaagtttctttagtggggattttggatgtaaatgttctgagtggtagtttacctgaaaatgtcctaattcttgctctggtccttgaaatttagttctgttgagtatataattataggatgacatatattttcttagcaatttggaacttttaatcttctgctgtctgttatcgctgttgagaagtcttttgtccgtctaaattccatccttcataggtagtccatctttcctctctggctcttttttccttagtctttggtgaactgcaa

SEQ ID NO: 149489 - DNA, 606 bp, Homo sapiens
agctagagaaatgtattccattgaaaactttataaacctttctaaaaatcattttttcatttaatctgtcataccatttttaaagaaaatgatgactatctattgagtaacacggacaaaggaggaagaggcacatgctgcccattacccgactttctcggtcctggtcttaaggggaggatgttttcatggttcaggtgttcttcccaagacacatgagcctggtgttggacgtgttgtgtgtgcatcagagtcccatccgcgggggctgattcaatcttcctgcatcgcagacattaccctagtgtccttttcctacttcagttatatcctttagaagtttctttagtggggattttggatgtaaatgttctgagtggtagtttacctgaaaatgtcctaattcttgcyctggtccttgaaatttagttctgttgagtatataattataggatgacatatattttcttagcaatttggaacttttaatcttctgctgtctgttatcgctgttgagaagtcttttgtccgtctaaattccatccttcataggtagtccatctttcctctctggctcttttttccttagtctttggtgaactgcaa

SEQ ID NO: 149490 - DNA, 443 bp, Homo sapiens
caaccctatggccactactgtgatacctagataaaattgaccaattccttgaaaaatagaatayaccaaaactcaaacaagaaaaaaaagacaatctaaatagccctacatctgttaaagaaattaaatcaatgatcaataacttcccaaaacagacagcaccagtcccagagcaatcactggtaaaatctaccaaacatttaaagaagacactatgccaattctctacaatctcttcccaaaaaaagcagacggtatccatcctaattcattctacaaggccagcattaccctaatatcaaaaccagacagagacattttaagaaaataaactatagataaatgtattttatgaacatgaaagatgagatgcaaaaatcttcaacaaagacttagtaagtcaaatccaaaaatgtgttaaaataattgtataccactaccaa

SEQ ID NO: 149491 - DNA, 586 bp, Homo sapiens
ggtaggtatctgaaaaaccagggcttgaggaacagtcttgcaaatgagttgaggggttacaaaaacaataaaactagtacccataggctagacaccaaaagggcagtgagtacccaagcccacaaaggataacattggtgtcatagaacactggtggatgtgaaagcaaaggcacacagggaccatttgaccccacagatatctgagcatttttgtgataccatctgtgtaagaactatcccagaakgtggggttctagacactttgttgaatagcggcagaagcaagttaagaagctggaaatctaaactagtctctggtaaggataagaatggagacacaagctttcccttctcattgtttggacaggtccggtaggtgcaattggcaactcactataccccatgaaccttaagagatgatatagagcagggctcagcacattttttttctgtatagggctagatagtaaatgtaaattttggaggcaacgtggtctctgttgcaactactcagccatgccatagtatcaccaaacagtcatagataatattgagtgtggctatgtgccaattaaagtttattt

SEQ ID NO: 149492 - DNA, 624 bp, Homo sapiens
atacagtgtatattctctgaccacaatgacactgaagtagaaatcagtaacaaaaagataatttaaaaatctccaaatccctggatgttaataacacactgctaaataatccatgggtcaaagaagaagtctaaagggaaataaaaatacattgaactaaattaaaataaaaatgcaacatattaaatttgtgggacatagctaaagcaatgcttagagagaaatttatagcactaaataaatttgaaaaagtctcaataatctaaaccttgatcttaacaacctgaaaaagggcaaaataaacccaaaacaagtagaagaaaataaattataaagagcagaaatcaataaaactgaaaagaggaaaacaacagagaaaaatcaatgaaagaatgagttctttgaagagatcaataaaattgaccaacctctaacaaaattagcaaagaaaagattaaagaaaacacaaattactaacatcaggarttaaacaggggatatcattatagacctcaaagacatcaaaagagactattacaaaaaactctactcacataaatttgtcaaattcgatgaaatcggccaatttaagaaaagcacaaactaccacaactcacccaacag

SEQ ID NO: 149493 - DNA, 326 bp, Homo sapiens
tttttcaaaaatatttaataataaagtgatgcaatggagaatgaaaggagccctaagkgatcagcctcctggacaacagccataaatggggctgtcctgggaaaactggcacatctgtgtatcctattcgttgaatacatactatgtccccaaattgttattgttgtggggaaatcttcagtgagcaaaaatataaaaattgctattctcatggagcttatattctcatcttaacaatgaccagggttaacatgggggcatgtattgttctactcatataaatggacatgttttttctttcttcaagtaaagacattgtgttttca

SEQ ID NO: 149494 - DNA, 326 bp, Homo sapiens
tttttcaaaaatatttaataataaagtgatgcaatggagaatgaaaggagccctaagggatcagcctcctggacaacagccataaatggggctgtcctgggaaaactggcacatctgtgtatcctattcgttraatacatactatgtccccaaattgttattgttgtggggaaatcttcagtgagcaaaaatataaaaattgctattctcatggagcttatattctcatcttaacaatgaccagggttaacatgggggcatgtattgttctactcatataaatggacatgttttttctttcttcaagtaaagacattgtgttttca

SEQ ID NO: 149495 - DNA, 567 bp, Homo sapiens
cgcactcatgtccagctccagggcaagccaactggatgctaagaaacaggaaacaaccaagctatgaagaaaactgatccaagtgttgaaaagataatttgtccaaaaccagacccctggtgaagcttcattgtgttatttattagctaagggttaggagtatgtggaaatgaagggttgctgggaccattaatagaagatcttcatggccattactgactcaaatgtcaggaatgaagggcctttactctctagaatccccagctccttttatggggcagtctttcaggtatgaaatcagtcaactttggaaaactgtctttttgtttgaatttttgatgctgcaaaggacagagggagtaaggaaagaggcaatacacagggcaaggctygcatgttcccagaggggccagcagagaggcacatttatcttgacaggctccccttctgaggcagcaccctgggggtccccagagccattcatccagcaaccccaagcccctgcgagcaggctctgggcttggcagaagcccttcctggcatggttccatgccagaaaaagaattc

SEQ ID NO: 149496 - DNA, 588 bp, Homo sapiens
tgaacatggagtcagggacattacaggcagtgggartagctggcacaaagtatgagggaggagagtaccatgagttagtggatctaaaagtataagcagatatgaaagacagtagagccccaagtctgggtcagccatgctgcaagttttattctgtaggcaatagtgagtcaccaaattaaataggtgagtgccttgatcaaaattacattttaggaattgcatcaaatctgtatattgctttggaaagtatggtcattttaacaatattgagtcttctaatccatgaacatggggtgtttttccatttgtgtcatcggtgatttttttcattagtattttgtacttctgcttgtagagatctttcacctccttaattaaatattgttaggtattttggaggggctattgtaaataaaatgaacctaagtgctgttcaatggatgactggataaaatatatatatatatgtatatatatacacacacacacacacgcacacacacaaatcatgggatactacacagccataaaaattatgaaatcatttcttttgcagcaacatggatggggttggaggccattata

SEQ ID NO: 149497 - DNA, 588 bp, Homo sapiens
tgaacatggagtcagggacattacaggcagtgggagtagctggcacaaagtatgagggaggagagtaccatgagttagtggatctaaaagtataagcagatatgaaagacagtagagccccaagtctgggtcagccatgctgcaagttttattctgtaggcaatagtgagtcaccaaattaaataggtgagtgccttgatcaaaattacattttaggaattgcatcaaatctgtatattgctttggaaagtatggtcattttaacaatattgagtcttctaatccatgaacatggggtgtttttccatttgtgtcatcggtgatttttttcattagtattttgtacttctgcttgtagagatctttcacctccttaattaaatattgttaggtattttggaggggctattgtaaataaaatgaacctaagtgctgttcaatggatgactggataaaatatatatatatatgtatatatatacacacacacacacacrcacacacacaaatcatgggatactacacagccataaaaattatgaaatcatttcttttgcagcaacatggatggggttggaggccattata

SEQ ID NO: 149498 - DNA, 525 bp, Homo sapiens
gttgatctctagcagcaagggctgttcttaatataattatagaaatggctcaatgcacacatactcagtaaaatttaattcacagctcagccaaattcatagcmtaatgaagtatttaattgtaagatttttatattttccataagttgtaaactactatttggtcattaaaagcacccaggtatcaaaactcatcagaaaagttacctctgactgggtcttaaaataacccccctttaagagcaatatctgttagtctgcgttttaccttctgagtgaaagggaaaagagacagagatcaaaagtcctacacgtgtgacttagtatttgttttgatctctcatcttttctttagttttctccatcatagttgtgttctcacctattgacctacaatgtggtatccagaacattttctggtgtccccatcaaatgcagtccttttttatgctaagtctgagcactctctgtaatccctcatatttgctaagaagatccaaaaccattcataccctacaatggagt

SEQ ID NO: 149499 - DNA, 551 bp, Homo sapiens
attttaaaacaattataaggatgtcttccttctccctggcctgttggaggaccttcatccttcaccaaaacgcgccagtgtaacgtaccttgttcagctcttggtcataaagtcgtcctcagcctgtctgtgtggtcccggagggtcggtggcgggcagtttccaaaattgaggtaataagagatcagatgaatttgagacgaccggccaaaaaaaataagaaatttaaaaacaacatttaaraaggataggggagtcttaaatgtttgattcttccccactttaaaaaataatttcactaatattctctttatgtttccgttgcacttcagtctaattcttaaaaaaattatgctttaaaaataaattaacttttcttttttcttttcttttcttttttttttttttttttttttgtgcttcagtctttctgcccccgataacagaaaatctctttttcgtcttaaaaaaaaaaaaaaaaaaaaaaaaagcctgtggaagactcagcagaacccaggaagcgcagaattgggagaaaagtctttggctgg

SEQ ID NO: 149500 - DNA, 551 bp, Homo sapiens
attttaaaacaattataaggatgtcttccttctccctggcctgttggaggaccttcatccttcaccaaaacgcgccagtgtaacgtaccttgttcagctcttggtcataaagtcgtcctcagcctgtctgtgtggtcccggagggtcggtggcgggcagtttccaaaattgaggtaataagagatcagatgaatttgagacgaccggccaaaaaaaataagaaatttaaaaacaacatttaaaaaggataggggagtcttaaatgtttgattcttccccactttaaaaaataatttcactaatattctctttatgtttccgttgcacttcagtctaattcttaaaaaaawtatgctttaaaaataaattaacttttcttttttcttttcttttcttttttttttttttttttttttgtgcttcagtctttctgcccccgataacagaaaatctctttttcgtcttaaaaaaaaaaaaaaaaaaaaaaaaagcctgtggaagactcagcagaacccaggaagcgcagaattgggagaaaagtctttggctgg

SEQ ID NO: 149501 - DNA, 556 bp, Homo sapiens
ttattctttcaagtaaaaattatgttccataataaaagtggccagttagttaaggcttgcaactcaatcacatgaaagcttttcctccagataaccagggtagctgggtgtgcagcagactaaagatgtcttctttactgtgtcctttctgtttcttcacacagaatgttaaaaagccaaatactcaaggattaaaatttaataaaattaaaactattggctgtacgtggtggctcacacctgtattcccagcattttgggaggctgaggtgggtggatcacctgagattgggagttcgagaccagcctgcccaacatggagaaaccccgtatctactaaaaatacaaaattagctgggcatggtggtgcatgcctgtaatcccagctactcgggaggctgaggcaggagcatcacttgaacccgggaggcrgaggttgtgatgagccaagatcgcgccattgcactccagcctgggcaacaagaacggaaatccatctcaaaaagaaaaaacaaaaaacaactatttactgctctatcaaggatcttcttaaatg

SEQ ID NO: 149502 - DNA, 556 bp, Homo sapiens
ttattctttcaagtaaaaattatgttccataataaaagtggccagttagttaaggcttgcaactcaatcacatgaaagcttttcctccagataaccagggtagctgggtgtgcagcagactaaagatgtcttctttactgtgtcctttctgtttcttcacacagaatgttaaaaagccaaatactcaaggattaaaatttaataaaattaaaactattggctgtacgtggtggctcacacctgtattcccagcattttgggaggctgaggtgggtggatcacctgagattgggagttcgagaccagcctgcccaacatggagaaaccccgtatctactaaaaatacaaaattagctgggcatggtggtgcatgcctgtaatcccagctactcgggaggctgaggcaggagcatcacttgaacccgggaggcggaggttgtgatgagccaagatcgcgccattgcactccagcctgggcaacaagaayggaaatccatctcaaaaagaaaaaacaaaaaacaactatttactgctctatcaaggatcttcttaaatg

SEQ ID NO: 149503 - DNA, 585 bp, Homo sapiens
agctaccatgtgctgaaaactgggctgagaactttttaatcctcacaattctacctctgacttcatctcctactgctctccccaccttactaygctccagccacaccagccttttctgagttccgagctcacactcacctccagagctttgcatgtgctgttcctctgcctggggctctcttcccccgcagcagccttatggctggctcctcattgttcaaggctgaattcaaacatcacctcctctgagaagccctccctgatcatcctatcagacatttccctcctcctgtccatcaggcctcaatcctgtacatcatctgcagctattgccttagtagctctcatcatggtcggaaatcaacctatttattgatgtatttacttatatcccacctccccctccagaatgtgagctccttcagggcagagtccttgtctacctttttcacaattgcattcccactgcccaaaacaatgaatttctgtctccccaaaccccaaccttgcccatggtgctttctaataaatgcatattaaactaacaaatggatatatagaaagtacagtagacaaaaaataact

SEQ ID NO: 149504 - DNA, 585 bp, Homo sapiens
agctaccatgtgctgaaaactgggctgagaactttttaatcctcacaattctacctctgacttcatctcctactgctctccccaccttactacgctccagccacaccagccttttctgagttccgagctcacactcacctccagagctttgcatgtgctgttcctctgcctggggctctcttcccccgcagcagccttatggctggctcctcattgttcaaggctgaattcaaacatcacctcctctgagaagccctccctgatcatcctatcagacatttccctcctcctgtccatcaggcctcaatcctgtacatcatctgcagctattgccttagtagctctcatcatggtyggaaatcaacctatttattgatgtatttacttatatcccacctccccctccagaatgtgagctccttcagggcagagtccttgtctacctttttcacaattgcattcccactgcccaaaacaatgaatttctgtctccccaaaccccaaccttgcccatggtgctttctaataaatgcatattaaactaacaaatggatatatagaaagtacagtagacaaaaaataact

SEQ ID NO: 149505 - DNA, 509 bp, Homo sapiens
aagctaactatagtttacagcaatttggtaargtatacttttgtaaacaagttggaaacatttgctttttatctctactggattccttcagaatttagaatctattcatgagtattcttatggcagtatggttatttacacaagtccagtaaaaatctgctctctctttatagtaggatacaattgaagacattagttatattgccaaggctttgactgaaatgtcatattttaaaatatgcgtgtaatgcctgacttcaagagttctcagccttacagtgagtaaataagaatcgtcacttcctggcatgcccaggaaccttaagactataggtgaaatatagagtctgccttggtttagcttgctagactcaagtgatttttaaaatctgagattcctttgtaatcaacatatagagaaaaaattgtatttctcaagaaaagctataatatatatcagttattagcttgtagctctgtgtactgttttcaagtcttcattatgtaac

SEQ ID NO: 149506 - DNA, 551 bp, Homo sapiens
ggggttgttctgaggatttggtgacttgattgatgcaatcctattggcagagggcctagcacaaagggaacgttctctatctggaggctggtgttgatgtctcttactgagcgcccctgaacatcagacactccaccaaatatttttgttgcctcatcttacataaacgtcgcatcaactttacgaggagtggtttcctttaaacaaacaaggaggatttaaacaaatattaaaatctgctgggaaatggcagctttgggtttcaagctcasgtctgtctgacacccaaatccatttctatctcagcccatcctttccctctcctgctactcctcctcctcctcatcatcctctttctcctccccttcccttcttcctctcctcttcctcccacatccacccagccaggccatctgctcacagttccttcatctcctagggcctcctctcctctgcctgggcacctgctggcctttccctccctccagccctcatattctgtccaccatcagggcacggccccccctgaaaccaccccccccccagttctc

SEQ ID NO: 149507 - DNA, 551 bp, Homo sapiens
ggggttgttctgaggatttggtgacttgattgatgcaatcctattggcagagggcctagcacaaagggaacgttctctatctggaggctggtgttgatgtctcttactgagcgcccctgaacatcagacactccaccaaatatttttgttgcctcatcttacataaacgtcgcatcaactttacgaggagtggtttcctttaaacaaacaaggaggatttaaacaaatattaaaatctgctgggaaatggcagctttgggtttcaagctcaggtctgtctgacacccaaatccatttctatctcagcccatcctttccctctcctgctactcctcctcctcmtcatcatcctctttctcctccccttcccttcttcctctcctcttcctcccacatccacccagccaggccatctgctcacagttccttcatctcctagggcctcctctcctctgcctgggcacctgctggcctttccctccctccagccctcatattctgtccaccatcagggcacggccccccctgaaaccaccccccccccagttctc

SEQ ID NO: 149508 - DNA, 435 bp, Homo sapiens
ccctctgctcccctggcccctccatgatgctgtcagagctccagctgtgggcgtctttccagcaccatcaggatgtagttgaaacgtggaatggacgatgctgggcagtcggttcacccagttccctttgagtccccatccctctgcccagggtgtgataggagcctctcgttgatttcagctgggctgtccatgctctgactcccagtgttcaatgtctccwgaggcctctgaggcaagaagacacaggacgggaggctggagagccagggagatgaggggctggggtctaggagactgaggggctagggggctggggcactggaggactgaaaggataaggagatggggagctgaaggcttcacaggaggaggactgaggagatgggcagccggagggctgaggggctgaggggctgggggctgggaggctgg

SEQ ID NO: 149509 - DNA, 596 bp, Homo sapiens
tttcattaatgctaatttcccaaaggaaaattagggtgttaaaggagcaagtgaaaacgaggctgagcagatttaaaataaaaatggatgctccttgcttctcttccttgtttcctgggctgattcctgcctggtcctaaaagtcacataccacagtgacaagtgatggtttctgcagaaggcctgccatccactccagggataatttggattagaccttaaaagcatctgagttgaggcaatgcgtatgtttgtggggggcatgtggtggtgggggaggggtcatgcacatacatgggggtgcaggaacctgtcttgggacctgatagtctaagggaaaatgcagctgggctgcaattgctttgagcactgactctgcttgaaatctgccaagtgacagtcaagaattttaacacacggtaaatattattgagcacctgctgcgtactaggcacagctctggtttggtgagacatagcagtgactaaaacagaccaatgtccctgcgctcaaggaggtgacaatcagaatggaackaactcatggcaccccgttactccctgggctcaatttattcatctgtagagagggcaagc

SEQ ID NO: 149510 - DNA, 539 bp, Homo sapiens
gatctggtcaggagagactcaaacaagcaagaagggagaagacagatttgctgagcacctatcawgcagggagcttccatgtgacttctcatctaagccttattacctatggaacagatgtcactgtcctcatgttgcagaagaggaaatcaagtcccagagaggtcaagtgactttcccaaggccacacagctggctgtgacagggcagggactcaaactcagaccctggatgagccctaagtccatcttcctatgttcttcttcccaactacactgtcgagatttgctcttcactgtatgtgggttctggggctgcttcgacctctgtcactccacccccaccctcgtctgccctgcagctccctggggaagagaagcctcagtaaatcccagacttcaaggaggatctgagatgatccttccagagaagcaaacatttccctgcagagtaaatcaccaatgcctcttagtaattgcaggtgccgccggccaccctccttcccctggaagtttgtaactcaaaccttagacctgaat

SEQ ID NO: 149511 - DNA, 545 bp, Homo sapiens
cagggagcttccatgtgacttctcatctaagccttattacctatggaacagatgtcactgtcctcatgttgcagaagaggaaatcaagtcccagagaggtcaagtgactttcccaaggccacacagctggctgtgacagggcagggactcaaactcagaccctggatgagccctaagtccatcttcctatgttcttcttcccaactacactgtcgagatttgctcttcactgtatgkgggttctggggctgcttcgacctctgtcactccacccccaccctcgtctgccctgcagctccctggggaagagaagcctcagtaaatcccagacttcaaggaggatctgagatgatccttccagagaagcaaacatttccctgcagagtaaatcaccaatgcctcttagtaattgcaggtgccgccggccaccctccttcccctggaagtttgtaactcaaaccttagacctgaattcacataactctgtcaggggataaataaggcagtaagctgggagacatgcagggaggagagcagctgcccaa

SEQ ID NO: 149512 - DNA, 545 bp, Homo sapiens
cagggagcttccatgtgacttctcatctaagccttattacctatggaacagatgtcactgtcctcatgttgcagaagaggaaatcaagtcccagagaggtcaagtgactttcccaaggccacacagctggctgtgacagggcagggactcaaactcagaccctggatgagccctaagtccatcttcctatgttcttcttcccaactacactgtcgagatttgctcttcactgtatgtgggttctggggctgcttcracctctgtcactccacccccaccctcgtctgccctgcagctccctggggaagagaagcctcagtaaatcccagacttcaaggaggatctgagatgatccttccagagaagcaaacatttccctgcagagtaaatcaccaatgcctcttagtaattgcaggtgccgccggccaccctccttcccctggaagtttgtaactcaaaccttagacctgaattcacataactctgtcaggggataaataaggcagtaagctgggagacatgcagggaggagagcagctgcccaa

SEQ ID NO: 149513 - DNA, 592 bp, Homo sapiens
tgtagtcttagtatgatttatttgtaaacaacatcagtagtgtctatgattttctcagtggcttagggtgtggttgttagtggaggctggggtgaaattttgctggggatggggacaacatctgggccaatcctcaggtcttagtggtggcatcggtgagctgagcatgactttccttggtccccaggggagcccagtatgctgatagtggtgttcgcaagtccaggcaggccaattcttgggtttccaggtggcttgctcaggtgctagaagtggcagcagtgggccaggtccttgagtccctggacagcagatgtggcatgggcaataacagtggtggatcaatcatctggctcccaagcagtctgtggttgttttggtgatgactgcaatggtcttcataggccagaccccaggcctgcatgtggtgtgtgtgcaggtggaggccagctgtggtagcagcaggttggctgggcctctgctcagkcccctgggaggagtgctgaggtgttaattgttgttgatggggcagggcagtccataggccactggatggtgtgttggacactagggataaagttagattaagcag

SEQ ID NO: 149514 - DNA, 514 bp, Homo sapiens
ttatatatgccctgatttgcttactgggactaaccatatatcttgcattctattatctttgcccaggaccataaaatcagcattaagaaaatcaaagcatttactgacagcatttactgcaagttacctctctgaaaagaaaccagtgaaatcagggactgctcactaggtgaataaatgtgtcttgstgattttctccaggttagcaaccccatgcaaccttcaaaaacaaacctaaatcattttagatttagaggaatgtaacaagtcagcatatgataaaatatggtaatttaatttgtttctcttaatttaattttcacacgccaaaggtgcagactaaaagggtgttaaaatgcagggaacaactttatagaattacccttgctccctgtaagaggttatgaagatgacattggggagcattttcctgaaccactaaattttaatgcgtggctgatttgggcattttgagatgaattgagtaaagggctgatctgatttccttgagatt

SEQ ID NO: 149515 - DNA, 478 bp, Homo sapiens
ctattcaatcatgctgtgcctttctacttttattgacatttcatttcttaggtcacattgctttgacctgatcccagggcctcactcagggctacgtcagtccaactatcttaggagaaaagagttgggtcttgatcctatctctctgaaaaagttccagggcaccttatgtaaatgagctcattaatttcaagacaaacttccagttgcaaaaatcattgctgtccttaaggagatacaattttgcctcaccaaatctagttactataaagacaaggcaacatcattkggcaattacgagcatgggttctgaagcctcaatgtcttggttgaaatatcacccttgtcatttattttctttatgacctttgtcaaaatactacaaacgttcttttcctagacttccttatgtgcataacaggaatgatatcactacttcctttacagagttgttacgagaattcaatgaggttaaaaa

SEQ ID NO: 149516 - DNA, 591 bp, Homo sapiens
tataattggacatttagtttcttttcagtttttactattagaaactattatttatttgatgtaaatacctttgtgcatgattttttcatgttcagtggtttttttgagttgcacttcccccaaatgtaaattaataaatcaaggaataaatagtataaagctcctgatatattttgccaaaatatcttacaggaccactctgattattttcaccaattttggcaccaatttagtctcagaattcaaaaggaaaaatatgaagaagaaaaatgcatttagaaaagtgtcatatcacaaacactgagtaaacacaaaagaagcacaaagatcttatatcaacatagtttataatagtaaaaactgaagagaaactaagactctcccaaaagattttttaaaagatttcaaacaaaaccaccatgaattattctggctattattccccatcttttgttctgcaagcaataatcctatgccaaatttatacgtagatgttccttgcttttgacttttcagggacctgaatttcaactcaataaaaayacaaagtggtagctgacctgtaatataaagtctcagttgatacacctg

SEQ ID NO: 149517 - DNA, 329 bp, Homo sapiens
tagacaaaaccacacaaatacaagcatgacaaaatgttctatactyacacaaatttattctaaaaataacaccagtgttttaagaagtttgtctttattttaaactagttttatgccatcttaaaataatgagaggcttagctcaagatctttttagggtatcagaaaaattactatgaaaccttttggtaagttcagtaattctactaagaaagaaattctttcttagactagctaaggtaacagaatctgagtcactgatcaattgattcttgatcagggctcaggatttaactgacttcttccaaggtgattcaaattaaagtcac

SEQ ID NO: 149518 - DNA, 581 bp, Homo sapiens
tctgtacaaaacctcgaagggggaaatgagatgactctattccaggatctggagcttttgaaggaaactgatcaagaagcagagccagctggggtgaaggaggagagaggccagtgctaaatcataaggggttttgaagtgtgtggtagacaacatgcactgggaatcctctggaaggctttagttagaataatgacagtcctgtttagatttttataagtttattccaactgtcagagagaggatatattgtggttagggtaaaaaaaggatggaagctgtctattggaataactggagaagagatgacagtgactttgactagaaagtagcagtgatgatgggggaatgttcagtcactcaagacactttagaggtgtactactagagcctgctcatggattagatttcaggagtgagtagggaaaaatgagaaaccaggaatttctagttggagcatccaggtgaattgyaacactcagaaaacagggttgagaggacacatcaagtcagtctgattttggacaggagtgaggtcaaaaatagctgtgagatatctaagtgaaaggcatacaaagctt

SEQ ID NO: 149519 - DNA, 319 bp, Homo sapiens
gacatcaaaaaatcagaacaaatcggttttaagagtggtacttttgggaaaaaaaggaggtgatgatccttataaatttacattttcagatttaattgtcatgatttttaaaaaatacttaaatgattggtccactatgttgagtatctgtctatcacatttcartgattccgggtggtttaaatattatcagaccacatgtctaatacgtatagctcggtttactcatcaaaaattaaatgaagatagctaatttaaatactaccaaatctaaaatgaaaactggaaagtttctaatgtcatgtgtaattaggcacct

SEQ ID NO: 149520 - DNA, 233 bp, Homo sapiens
tattttaatttcatccactgaattatttatttccaggatttctgctgggttctttttttttttttttagctttaaacaaaactcacwttttatttagattgaaataaactatacaaaattgattttcttcaccaaaaataacagcaatattttccatatttttctagataaaccacaacacttattttgtaggttttccaggttttgcttataaatcaagatgaggcagtaga

SEQ ID NO: 149521 - DNA, 548 bp, Homo sapiens
tggggaccttggcaatggcaatggcagaaagcctttctgttgtctcttggggtaccacatcagagacgtgcagagctctgccaatcagaatgatcagtcagaaatggagcagctgcattgtgagcccaagctgggacccctgtctagtgaagagcaggggatttggggccaacagggaagagagactgggcttccctccatatggtgcctgtggcctgctggaggtgtgagcaaagcactcaggcactttgtttcttccccagcctgagggcagcaagggcagtatcactgcagcagtaatggcaaaagggctctcagttgcctctgggaactccaccccagagagacgcagagccactgccaatgagaatgttcagccaagggtgaggtggctgaamtgtgggcttaaacctgggcctccttctggtgaagagcaggttgccagaagctcacagagaagagaaactgggcttctctccaactggtggctgtggcacactggaggtgctggcaaagcaatcagggtctttattctttccccaggccaa

SEQ ID NO: 149522 - DNA, 403 bp, Homo sapiens
gcctcaaccccccaggctagcaatcctaccacggcctttcgagtagctgtgactacaggtgagcgccatgacactcagtgaattttcaatttttcggtagaggtggggcccggctgtgttgccagggctggccttgaactcctgcactcaagggattttcctgcctagggcttccaaagtattgatattacaagcatgagccactgtgctcactctgtctggttcttaacttcctgcctccctcttccatatttaaagaacccttgtaattacatgggctcacccagatactacaggataatcttgtttcaaggacagctgawtagtaacattaattccatctgcactcttaatatcccccttcctctgaaactgtgctgtgtaacctaggacgtgagcaatt

SEQ ID NO: 149523 - DNA, 527 bp, Homo sapiens
  misc_feature (1)...(527): n = A,T,C or G
nnnnnnnnnnnnnnnnnnnnnnnnnnntgcggagtcagaggaattggaagataagtctatctggatagccatatcaggacagacatggctgagaacaaagcattgtctgtaatagaacatacaaattcttctttagaatgtagtaaagggactcctttattcatatgcagttcctgccacactctgaatgcatagattcttttgacttkacataaatgccacagatttgtttttattttaatgaagcccaatgacaggagatccaccaataaactggaggtagcaagtagctattgaaagttaagaagtttatgaaattattagaaaatgccttattgaaactttctgttacccatctcctagcattcaatatctaccctcatcaaattctattagtaaatttaataatcactttttgcacaatcaaatttttattatgctggttgttaagtgggacatacaccatggttccaaattttctatactttaaaattcattttcttcatttatacttcataccattctac

SEQ ID NO: 149524 - DNA, 535 bp, Homo sapiens
  misc_feature (1)...(535): n = A,T,C or G
nnnnnnnnnnnnnnnnnnnnnnnnnnnnntgcggagtcagaggaattggaagataagtctatctggatagccatatcaggacagacatggctgagaacaaagcattgtctgtaatagaacatacaaattcttctttagaatgtagtaaagggactcctttattcatatgcagttcctgccacactctgaatgcatagattcttttgacttgacataaatgccacagatttrtttttattttaatgaagcccaatgacaggagatccaccaataaactggaggtagcaagtagctattgaaagttaagaagtttatgaaattattagaaaatgccttattgaaactttctgttacccatctcctagcattcaatatctaccctcatcaaattctattagtaaatttaataatcactttttgcacaatcaaatttttattatgctggttgttaagtgggacatacaccatggttccaaattttctatactttaaaattcattttcttcatttatacttcataccattctactaattt

SEQ ID NO: 149525 - DNA, 481 bp, Homo sapiens
ataagtctatctggatagccatatcaggacagacatggctgagaacaaagcattgtctgtaatagaacatacaaattcttctttagaatgtagtaaagggactcctttattcatatgcagttcctgccacactctgaatgcatagattcttttgacttgacataaatgccacagatttgtttttattttaatgaagcccaatgwcaggagatccaccaataaactggaggtagcaagtagctattgaaagttaagaagtttatgaaattattagaaaatgccttattgaaactttctgttacccatctcctagcattcaatatctaccctcatcaaattctattagtaaatttaataatcactttttgcacaatcaaatttttattatgctggttgttaagtgggacatacaccatggttccaaattttctatactttaaaattcattttcttcatttatacttcataccattctactaat

SEQ ID NO: 149526 - DNA, 535 bp, Homo sapiens
  misc_feature (1)...(535): n = A,T,C or G
nnnnnnnnnnnnnnnnnnnnnnnnnnnnntgcggagtcagaggaattggaagataagtctatctggatagccatatcaggacagacatggctgagaacaaagcattgtctgtaatagaacatacaaattcttctttagaatgtagtaaagggactcctttattcatatgcagttcctgccacactctgaatgcatagattcttttgacttgacataaatgccacagatttgtttttattttaatgaagcccaatgacaggagatccaccaataaactggaggtagcaagtagctattgaaagttaagaagtttatgaaattwttagaaaatgccttattgaaactttctgttacccatctcctagcattcaatatctaccctcatcaaattctattagtaaatttaataatcactttttgcacaatcaaatttttattatgctggttgttaagtgggacatacaccatggttccaaattttctatactttaaaattcattttcttcatttatacttcataccattctactaattt

SEQ ID NO: 149527 - DNA, 447 bp, Homo sapiens
tatctggatagccatatcaggacagacatggctgagaacaaagcattgtctgtaatagaacatacaaattcttctttagaatgtagtaaagggactcctttattcatatgcagttcctgccacactctgaatgcatagattcttttgacttgacataaatgccacagatttgtttttattttaatgaagcccaatgacaggagatccaccaataaactggaggtagcaagtagctattgaaagttaagaagtttatgaaattattagaaaatgycttattgaaactttctgttacccatctcctagcattcaatatctaccctcatcaaattctattagtaaatttaataatcactttttgcacaatcaaatttttattatgctggttgttaagtgggacatacaccatggttccaaattttctatactttaaaattcattttcttc

SEQ ID NO: 149528 - DNA, 521 bp, Homo sapiens
  misc_feature (1)...(521): n = A,T,C or G
nnnnnnnnnnnnnnnnnnnnnnnnnnnntgcggagtcagaggaattggaagataagtctatctggatagccatatcaggacagacatggctgagaacaaagcattgtctgtaatagaacatacaaattcttctttagaatgtagtaaagggactcctttattcatatgcagttcctgccacactctgaatgcatagattcttttgacttgacataaatgccacagatttgtttttattttaatgaagcccaatgacaggagatccaccaataaactggaggtagcaagtagctattgaaagttaagaagtttatgaaattattagaaaatgccttattgaaactttctgttacccatctcctagyattcaatatctaccctcatcaaattctattagtaaatttaataatcactttttgcacaatcaaatttttattatgctggttgttaagtgggacatacaccatggttccaaattttctatactttaaaattcattttcttcatttatacttcatacc

SEQ ID NO: 149529 - DNA, 527 bp, Homo sapiens
  misc_feature (1)...(527): n = A,T,C or G
nnnnnnnnnnnnnnnnnnnnnnnnnnntgcggagtcagaggaattggaagataagtctatctggatagccatatcaggacagacatggctgagaacaaagcattgtctgtaatagaacatacaaattcttctttagaatgtagtaaagggactcctttattcatatgcagttcctgccacactctgaatgcatagattcttttgacttgacataaatgccacagatttgtttttattttaatgaagcccaatgacaggagatccaccaataaactggaggtagcaagtagctattgaaagttaagaagtttatgaaattattagaaaatgccttattgaaactttctgttacccatctcctagcattcaayatctaccctcatcaaattctattagtaaatttaataatcactttttgcacaatcaaatttttattatgctggttgttaagtgggacatacaccatggttccaaattttctatactttaaaattcattttcttcatttatacttcataccattctac

SEQ ID NO: 149530 - DNA, 520 bp, Homo sapiens
  misc_feature (1)...(520): n = A,T,C or G
nnnnnnnnnnnnnnnnnnnnnnnnnnntgcggagtcagaggaattggaagataagtctatctggatagccatatcaggacagacatggctgagaacaaagcattgtctgtaatagaacatacaaattcttctttagaatgtagtaaagggactcctttattcatatgcagttcctgccacactctgaatgcatagattcttttgacttgacataaatgccacagatttgtttttattttaatgaagcccaatgacaggagatccaccaataaactggaggtagcaagtagctattgaaagttaagaagtttatgaaattattagaaaatgccttattgaaactttctgttacccatctcctagcattcaatatctaccctcatcaaattctattagtaaatttaataatcactttttgcacaatcaaatttttattatgctggttgttaagtgggacatacaccatggttccaaattttctatactttaaaattcattytcttcatttatacttcatacc

SEQ ID NO: 149531 - DNA, 633 bp, Homo sapiens
  misc_feature (1)...(633): n = A,T,C or G
nnnnnnnnnnnnnnnnnnnnnnnnnnnnnatatgtatttattagaacaaattaagacattattgaacaatggtgcaaacagcaattaacaataacaaaaggctaaaatacaaaattattaaaataataataacccaacaatttttaaattgggagtcaatataaaaagatattgaagagatccaaatgtcaaaatgtgtgtgtgtgttgggggggatayaggtaataaatgtttatagctttttgtttctctcctttttgttctttgcaatcaaagttaagttttcctcagtttaaaaccactggttacaatgatattctttagcctcatggtaactagaaaacaaaattcagtaacagacaccctaaaaataatagacacctaaaaagcaaacaattaaatcacactcccagagaaaattacctcactataaatacagacaggaagaaagggaaggagggaggaaaggaaaggaagaaagaaggaaggagagagagaacagaaagaggaagaaatgaggagagaaataacaaaagaaaaaagagagtagcaaaacgaccagaaaacaagtaaaagtggcagtagtatgtttttacttgttagtaataaccttgaatataaatgaattaaatt

SEQ ID NO: 149532 - DNA, 412 bp, Homo sapiens
taaagtgcagtcatccggttgcctgatgtcttctgaggtggttcacccagattcacaatacagataattaaattcagagctgcagagatagggaaaataagatgtggaaatagacttcttctgaagtattattcaggtctcctccttttcttccaaatgccatcccccccatcagtatactcaaggcatctgatggcattgatgagcaactgaaaaatcatttaattaatcatcaggttctttatccttasttaaaaatgtagaggcacaaaagtcatgtgtcaaaatatgctcttttttaatagagtatggtccactacccactgtgtgtcctcttaacctttccagagtaggtgtccttacagcataaatttagcataaaattagacacgttccagtataaaataaaatg

SEQ ID NO: 149533 - DNA, 522 bp, Homo sapiens
gcatgcacagttgggtgtcaaagcccattttatttgagggctctctaggcaagtaaaagattttggctttgcaaatatgcagggacctttctgccgttaacatgaaaagcacctcatgaatatttgtcctcccctttgtaaattaaagtatacacatcaggatgtaatttgaatattatcttgyagtaattttcttcctgccagctctgttttacactgtcttaaagaagactcgtaaaaatacaaatcagtcgtgagaaagtataaaaacaaaagtaacccatccagaactaacagagcaaatcacgtaagggaacattaagtcctaattgtagaaataacatacattaatcacccttctagtgctaccagggggatgggcttgctgatgacctgacacacaaaaaagaaaatacagagccaggccaagttttcaacttgaagctgtgtattcagaaggccgaatgggcatatagctacatcattttaaaaattataatggagagaaagccctggtaatac

SEQ ID NO: 149534 - DNA, 338 bp, Homo sapiens
cggtttgtactctgattcacagaaaagcagtgtaagtagtaaaacaaaaatattgctttcacttagtgcgtaggttttaccrgggatttaatcctcatgtgaagatttaatttgtcatgtgacccattaacatatatgtatgtaagcgctgaactgtgtatttagaaagcaattttagtaaattgaactattttttagacctggaaactcagcaaaattgagacttttagttcagcatgaaataaacactctaagagcccaggaaaaacatggccttcaacctgctctgcttgtacattgggcaaaatgccttcagaaaatggtgagttttaaagtat

SEQ ID NO: 149535 - DNA, 338 bp, Homo sapiens
cggtttgtactctgattcacagaaaagcagtgtaagtagtaaaacaaaaatattgctttcacttagtgcgtaggttttaccagggatttaatcctcrtgtgaagatttaatttgtcatgtgacccattaacatatatgtatgtaagcgctgaactgtgtatttagaaagcaattttagtaaattgaactattttttagacctggaaactcagcaaaattgagacttttagttcagcatgaaataaacactctaagagcccaggaaaaacatggccttcaacctgctctgcttgtacattgggcaaaatgccttcagaaaatggtgagttttaaagtat

SEQ ID NO: 149536 - DNA, 338 bp, Homo sapiens
cggtttgtactctgattcacagaaaagcagtgtaagtagtaaaacaaaaatattgctttcacttagtgcgtaggttttaccagggatttaatcctcatgtgaagatttaatttgtcatgtgacccattaacatatatgtatgtaagcgctgaactgtgtatttagaaagcaattttagtaaattgaactattttttagacctggaaactcagcaaaattgagacttytagttcagcatgaaataaacactctaagagcccaggaaaaacatggccttcaacctgctctgcttgtacattgggcaaaatgccttcagaaaatggtgagttttaaagtat

SEQ ID NO: 149537 - DNA, 516 bp, Homo sapiens
gtcaccattaggtgtagatggtcagccttttgaacaaactgacactacagaagaggcaggtttcagctatctaaaaatggcaactgttaaaaagcagttgggattgctacgttagggtggtatcattagaagcatttaaaagttgagtgtagaggccgggtgcggtggctcacacctgtaatcccagcacgttaggaggccgaggcgggcagatcacaaggtcaggagatcgagatcattcctggctaacacggtgaaaccccgtctctactaaaaatacaaaaaaaactctactaaaactacaaaattagccagacatggtggcaggtgcctgtaatcccagctacttgggaagctgaggcaggagaattgcttgaacctgcacggcagaggttgcagtgagttcactggtattaaggtggtttagttattacagtatttrgaagttgaacaaatgactattgaggtaccatttggttttgacttgaaattttagccagttcttacaacttgtaa

SEQ ID NO: 149538 - DNA, 545 bp, Homo sapiens
gcaaacctacagagacagattagcggttgccaaggctgagaggtttgggtaaaatggggagtaactgctaataggtaaggaattcctcatggagtgatgaaaatcttctaaaactgactgtggtgacagtgataatactctatgaacatagtaaaagccactgaactgtacactttaaatgggtgaagcgtatggtatacgaattatatttcaattgaactttttwaaaaaaccctccttcgagttaattctgctgggcaattaggtttggttaccactacacagttgtgtctcagcacacttacagaggcaccctcgggatgcccagatcaaagacataaaaaaaaatacaggcaatttttatctaactgtgacaccacgcaaaggcacttatgagagccctgcaagggtagaaggaaaagagaaaaggaaaaaagtagaaagtcactttaaggactgaaagcctaactcccacaaaaaaagtgggctatggaataaaagagcaatgtgagctttggccaacagcctaactatacaccaaagct

SEQ ID NO: 149539 - DNA, 545 bp, Homo sapiens
gcaaacctacagagacagattagcggttgccaaggctgagaggtttgggtaaaatggggagtaactgctaataggtaaggaattcctcatggagtgatgaaaatcttctaaaactgactgtggtgacagtgataatactctatgaacatagtaaaagccactgaactgtacactttaaatgggtgaagcgtatggtatacgaattatatttcaattgaactttttawaaaaaccctccttcgagttaattctgctgggcaattaggtttggttaccactacacagttgtgtctcagcacacttacagaggcaccctcgggatgcccagatcaaagacataaaaaaaaatacaggcaatttttatctaactgtgacaccacgcaaaggcacttatgagagccctgcaagggtagaaggaaaagagaaaaggaaaaaagtagaaagtcactttaaggactgaaagcctaactcccacaaaaaaagtgggctatggaataaaagagcaatgtgagctttggccaacagcctaactatacaccaaagct

SEQ ID NO: 149540 - DNA, 588 bp, Homo sapiens
atgaagcttgaaataaaatttttattttgttttgaattaaatgaaccatgattattcacagtgcagtaagtgtgtatcatctgtttgatattttcatattacagttttgatagtgctcttcagtctgcraaatcttctttgggtggaaatgatgaactgtcagctactttcttagaaatgaaaggacatttctacatgcatgctggttctctgctcttgaagatgggtcagcatggtaataatgttcaatggcgagctctttctgagctggctgcattgtgctatctcatagcatttcaggtaagtcttccacttggagcaattgacatttcacggagtcttgatgtgttttaaatgaaggtgtgctctggtatgtaatgacaatatgtgaacaaacctgtggaattaaagttgaaatgaaatagtcaatttgatacagtggaaaataactaagcatacacaatactggtgaggctggtgaaacagggatgttgagtgcactcttgtcgaaagcctgcattgccatgatttgtttgtagacaaatttgaagagtttgatctttttactctgccatttttgggaacatg

SEQ ID NO: 149541 - DNA, 279 bp, Homo sapiens
atttttattttgttttgaattaaatgaaccatgattattcacagtgcagtaagtgtgtatcatctgtttgatattttcatattacagttttgatagtgctcttcagtctgcgaaatcttctttgggtggaaatgatgaactgtcagctactttcttagaaatgaaaggacatttctayatgcatgctggttctctgctcttgaagatgggtcagcatggtaataatgttcaatggcgagctctttctgagctggctgcattgtgctatctcatagcatt

SEQ ID NO: 149542 - DNA, 279 bp, Homo sapiens
atttttattttgttttgaattaaatgaaccatgattattcacagtgcagtaagtgtgtatcatctgtttgatattttcatattacagttttgatagtgctcttcagtctgcgaaatcttctttgggtggaaatgatgaactgtcagctactttcttagaaatgaaaggacatttctacatgyatgctggttctctgctcttgaagatgggtcagcatggtaataatgttcaatggcgagctctttctgagctggctgcattgtgctatctcatagcatt

SEQ ID NO: 149543 - DNA, 570 bp, Homo sapiens
ccatgattattcacagtgcagtaagtgtgtatcatctgtttgatattttcatattacagttttgatagtgctcttcagtctgcgaaatcttctttgggtggaaatgatgaactgtcagctactttcttagaaatgaaaggacatttctacatgcatgctggttctctgctcttgaagatgggtcagcatggtaataatgttcaatggcragctctttctgagctggctgcattgtgctatctcatagcatttcaggtaagtcttccacttggagcaattgacatttcacggagtcttgatgtgttttaaatgaaggtgtgctctggtatgtaatgacaatatgtgaacaaacctgtggaattaaagttgaaatgaaatagtcaatttgatacagtggaaaataactaagcatacacaatactggtgaggctggtgaaacagggatgttgagtgcactcttgtcgaaagcctgcattgccatgatttgtttgtagacaaatttgaagagtttgatctttttactctgccatttttgggaacatgataaagatgtaatctcgtatgatgggt

SEQ ID NO: 149544 - DNA, 588 bp, Homo sapiens
atgaagcttgaaataaaatttttattttgttttgaattaaatgaaccatgattattcacagtgcagtaagtgtgtatcatctgtttgatattttcatattacagttttgatagtgctcttcagtctgcgaaatcttctttgggtggaaatgatgaactgtcagctactttcttagaaatgaaaggacatttctacatgcatgctggttctctgctcttgaagatgggtcagcatggtaataatgttcaatggcgagctctttctgagctggctgcattgtgctatstcatagcatttcaggtaagtcttccacttggagcaattgacatttcacggagtcttgatgtgttttaaatgaaggtgtgctctggtatgtaatgacaatatgtgaacaaacctgtggaattaaagttgaaatgaaatagtcaatttgatacagtggaaaataactaagcatacacaatactggtgaggctggtgaaacagggatgttgagtgcactcttgtcgaaagcctgcattgccatgatttgtttgtagacaaatttgaagagtttgatctttttactctgccatttttgggaacatg

SEQ ID NO: 149545 - DNA, 437 bp, Homo sapiens
ttgtcatttcaaacttgttataaaaataaaatgatacataggtggcctttgaggattggctttttctacttagtataattttctggagatgaatagtgtgtttcctgttattgctgagtagcatttcatggtatggatgtcccataggttttttaaccttttacctattgaagaacatctgagttgtttaccttcttttgctgttaaaactaaagctgtaatgaacatgcatagaaagattttgtgtaaatataaattttcatttctctaggatatctgcccaaaattgtaatttctkggacatgtggtaattggatgtttagttttataagaaactgataaacatttttcagagtggctctaccattttgtaatcccaccagtgattgtgtaaatgattcagcttttccacattctcaccggactttggtgttttc

SEQ ID NO: 149546 - DNA, 420 bp, Homo sapiens
gaggactcaaacctgccagaggaaaaaggctctagctattattaacagcagttgtactatgaattacataattgctattcttcgagcctgcagccaagtgccaagattcctcacacgaaccacgtgaagagggcaacaatatccccaccttacagctggaagaaaaaacagctcagaaagtgacctgctttaaaaaaagaaagacggcgatttgctgaaggtcacagagtgcatcctggactaggatgagacgggagaggcactcgcgtaaggggcaaaatctaagaggcgccaaaaaaactcaggaaccaaaaccaatratattttaatacattttaaaaaccaaaatgtaaaaattcatgatggataaaatatcaacattttaaataacatcttatgtgacctgcctcatctccttca

SEQ ID NO: 149547 - DNA, 449 bp, Homo sapiens
agatgtaactcctttacctagattctgccccccccagtctttggcccatctgtgttctatttacgcatgcccacgcacacacacacatatgcaagcacatttttytgaaccatttgaaagtaggttgcaaacatcatgacaatttaaccctaaatactttaacacatacctcctaagtaaaaggacactgatttacataaccacacccccattatcacacctcagaaatttaatgctgaatagcattttttaataaacagtccatattcaaattctccaactgtacctaagaaggtttttttttttttttttttttttaaagatggggtctcattctgctgcccaggctggagtgcagtggcacaatcactgctcactgcagcctcaacctcctgggttcaagtgatgctctggcctcgacctcctgagtagctggacgaccagaggta

SEQ ID NO: 149548 - DNA, 444 bp, Homo sapiens
taactcctttacctagattctgccccccccagtctttggcccatctgtgttctatttacgcatgcccacgcacacacacacatatgcaagcacatttttttgaaccatttgaaagtaggttgcaaacatcatgacaatttaaccctaaatactttaacacatacctcctaagtaaaaggacactgatttacataaccacacccccattatcacacctcagaaatttaatgctgaatagcattttytaataaacagtccatattcaaattctccaactgtacctaagaaggtttttttttttttttttttttttaaagatggggtctcattctgctgcccaggctggagtgcagtggcacaatcactgctcactgcagcctcaacctcctgggttcaagtgatgctctggcctcgacctcctgagtagctggacgaccagaggta

SEQ ID NO: 149549 - DNA, 449 bp, Homo sapiens
agatgtaactcctttacctagattctgccccccccagtctttggcccatctgtgttctatttacgcatgcccacgcacacacacacatatgcaagcacatttttttgaaccatttgaaagtaggttgcaaacatcatgacaatttaaccctaaatactttaacacatacctcctaagtaaaaggacactgatttacataaccacacccccattatcacacctcagaaatttaatgctgaatagcattttttaataaacagtccatattcaaattctccaactgtacctaagaagktttttttttttttttttttttttaaagatggggtctcattctgctgcccaggctggagtgcagtggcacaatcactgctcactgcagcctcaacctcctgggttcaagtgatgctctggcctcgacctcctgagtagctggacgaccagaggta

SEQ ID NO: 149550 - DNA, 447 bp, Homo sapiens
taactcctttacctagattctgccaccaccagtctttggcccatctgtgttctatctacgcatgcccacgcacacacacacatatgcaagcacatttttctgaaccatctgaaagtaggttgcaaacatcatgacaatttaaccctaaatactttaacacatacctcctaagtaaaaggacactgatctacataaccacaccaccattatcacacctcagaaatttaatgctgaatagcattttctaataaacagtccatattcaaattctccaactgtacctaagatgtttttttttttttttttttttttaaaagatggggtctcattctgctgcccaggctggagtgcagkggcacaatcactgctcactgcagcctcaacctcctgggttaaagtgatgctctggcctcgacctcctgagtagctggacaaccagaggtaagt

SEQ ID NO: 149551 - DNA, 531 bp, Homo sapiens
tctaatatgtacaaattaattttrtaatcagaaaaataataggagaagatggcattgcaattatgaaaaaagtagaagctaaattatatatcagttgggttttatataaagacagaatgcagacttcaagtaaatgcagagtttagttgattcatcaaacgtttatatgggtaggaaatctatatttatacttccctataatccctttgacaagaaaacttttttttggtaaacttattcttgttgaaatttagtcaagaacaaagatagactgggcatgatggctcacacctgtaatcatagaagtttgggaggctgaggcaggaggagtgtttgagtccaagagttcagaccagcctgagcaacaatgaaacatcatctttacaaacatttaaaaacaaaactaaactaaacaaaaaaacaggcatggtggcatgcacctgtaatcctagttactcaagtggttgaggcaggaggattgcttgaacccaggaggtcaaggctgcagtgagctatcattatgccactgcg

SEQ ID NO: 149552 - DNA, 531 bp, Homo sapiens
tctaatatgtacaaattaattttgtaatcagaaaaataataggagaagatggcattgcaattatgaaaaaagtagaagctaaattatatatcagttgggttttatataaagacagaatgcagasttcaagtaaatgcagagtttagttgattcatcaaacgtttatatgggtaggaaatctatatttatacttccctataatccctttgacaagaaaacttttttttggtaaacttattcttgttgaaatttagtcaagaacaaagatagactgggcatgatggctcacacctgtaatcatagaagtttgggaggctgaggcaggaggagtgtttgagtccaagagttcagaccagcctgagcaacaatgaaacatcatctttacaaacatttaaaaacaaaactaaactaaacaaaaaaacaggcatggtggcatgcacctgtaatcctagttactcaagtggttgaggcaggaggattgcttgaacccaggaggtcaaggctgcagtgagctatcattatgccactgcg

SEQ ID NO: 149553 - DNA, 531 bp, Homo sapiens
tctaatatgtacaaattaattttgtaatcagaaaaataataggagaagatggcattgcaattatgaaaaaagtagaagctaaattatatatcagttgggttttatataaagacagaatgcagacttcaagtaaatgcagagtttagttgattcatcaaacgtttatatgggtaggaaatctatatttatacttccctataatccctttgacaagaaaacttttttttggtaaacttattcttgttgaaatttagtcaagaacaaagatagactgggcatgatggctcacacctgtamtcatagaagtttgggaggctgaggcaggaggagtgtttgagtccaagagttcagaccagcctgagcaacaatgaaacatcatctttacaaacatttaaaaacaaaactaaactaaacaaaaaaacaggcatggtggcatgcacctgtaatcctagttactcaagtggttgaggcaggaggattgcttgaacccaggaggtcaaggctgcagtgagctatcattatgccactgcg

SEQ ID NO: 149554 - DNA, 530 bp, Homo sapiens
ggtggcttgggttagtcagctcagttagactttctaccttgttacaaggacagagggctttttgtatcccgggttcttgccttggtgtactggaagaatcagatcacacatcagcttggagaatgagtgcaaggttttattgagtggaagtagttctcagcagatgggagagccagaaaggagatgattttcccttggagttgggccacttagctgcccaagctctcctccaactgccctggccaaactgccttgttccacaagtcaatggcctgctggcatgccagtgtgctcctatgccggtgtgctcctatcctggtgtgctyctatgccggtgtgttcctctcgatgtccagctgtctgtgtgttcctctgctggtgtgctcctctcgacatccagccacctatgtgtctgcctgctacagtctcagagtatttataggcacaggatgggggcatggcaggccagggtggtcctgggaaatgcaacatttgggcaccaaggcaggagtgcctgtactcacctaggt

SEQ ID NO: 149555 - DNA, 540 bp, Homo sapiens
tgcccttcccttcccagaacttctgtatcaacatgacaggctaaattaaagaggtgaggaagtgcaattctccattcataaggagaagagataatggaaacagtagaaatgtctacatcttttatgtaacctactaaactctatttacaagtatcttatgactcataatrgaagacacttaatacaaaaatgatcacattaaaagacttttagccctattctctctgctaaataattccaactcttctcaatctctattataatctcaacttctaaactttttaaaaaatttgtataaatttaagcagtacaagtgcagttttgttacatgggtatattgtgtattagtaaagcctgggcttttaatgtaaccatcacccaaatagtttttcttcattatttttctgtactcctctttgaaagctagatgttaatttatatagcaaagtgagaaggtagaaaagcagagtaataggaaagcaggtaagattcatattcaaatcccagctctaaaattcactagctgtgtggtcttggacc

SEQ ID NO: 149556 - DNA, 533 bp, Homo sapiens
gctttgccactgagcaggtacagagatgtgaagtgactttctattgcctcagtttgctcatcctcaccctgccatcttgtcctgttataagaaaatgcgcttacatactttttggtgtcacagaattagaatgaacacatctgtcgagaattgattcattttctttctagttgagatgtataccatgcactgggtgatgaagctttggtatgcatgctgggcaagaataagtagtcagctactccctgaagtgtgaattccctctccatggcaacgaaaactctctgccattagaaaagtgggcttttgtgtrtacatatacacaaaatattttttatgtttacatatctcagaaaaagtactaaagatgaggcactttttaaaattaaaaacttgtctttgagtttaaaaaaaaaactaaatgtagcagatttaacattttctgttgttccacaattagtcaacaaaaatcaaagttgaggaaaagagatgagaattactctaaattctatagagaattgcaaatgatttgg

SEQ ID NO: 149557 - DNA, 565 bp, Homo sapiens
aattcttactttttcattaattgcaagcatatttcctattactaaatggctgctttaaagtttttgtgtgccaattccaacatctagttcattttggcattcgtcttttctctctagtcttattaaatttttctgtaccattatatgtataattttggattgtatcctgcgccttatgaatgttttgtttgtctgtttcctttttttgtggagacttatgtctggtaatgttccttcrgagttttcagtggttttaaaaggcaattaacttcatttaactcaaattgcaaacactgatttttgggtgacagctcaaaagttgagtgacagttgggctagtttgtgaatgctttgcatatatgctttgttcattttccgtcaggtacttgagcagagtttatgcatatcatttggggcagcccccttttagctctctcctttgcaatattcctcttttactttccggctctcctcttagataaactgaattttctaccagtgttttagcctttctgtgcagtgtctgcacttaagctaaaagttataaaagagggagtgttagcca

SEQ ID NO: 149558 - DNA, 617 bp, Homo sapiens
ttggtaatccactttatctaatcctgatataggcaatgtaggcttcttttgattggcatatatttaaagtggtttcttgtaggcagtatacagttgttgcgtttcatgatatttttaaatccaatgtggcaatctctgcctttaattattcaggacatttacatttaatgtagttatagatattggtttaagtgtactatattctttgtttactatttgtccaatatattatttttttttacttctatttctgtctactttcaatttccgtagttttatgcctccattttttctcattttttggattattagctgcaacgctctgttattttggcaaatgatttaaggctaatagtatacatcgttaacttatcatgtctcaccttcaaataatattataccaattcacatatggtatacagcttacaaaagtatacttcgttttcccctccccgcctttgtactagtcttgtyatacattttgtttcctcaatgctgtaaacttcacaatacatttttgttcctttaaacagtctatgatcttaagagtttttttaactaagaaaatgatcttcattatttacctatatatttacaaattctggtgctattaattc

SEQ ID NO: 149559 - DNA, 559 bp, Homo sapiens
tttctatataatttgaagagaaggtaatattagatgcattaaaattataatttttatataatatatcctgataaacagacccctttgtcattgtgaaaggtgttctttgtcatgaataatgttgtttatcctagaaatctgcttttttctatattaatttgactttactggcttttttcattagtttttatagggaatacattttgccatccttttactttcaacttttaggtgtccttatatttaagatgtgtctcttataaacagcttaaattatattttatttgtatgtycattctagaaatatttattggagaaaaaatatgttttaattcggacacctcttcaggttatctgattctagcctttctcctttaggctatgttgtaactgtaaatttatagacatgcaaattatgccctacttggtttggtgcagatgcaattgtcttccttcataccctgtaggaaaaatttttgcctctatctgcgtattcatttcatcattcctgatttataagtgagtctgttttttggattttcttttgaactaatttgta

SEQ ID NO: 149560 - DNA, 559 bp, Homo sapiens
tttctatataatttgaagagaaggtaatattagatgcattaaaattataatttttatataatatatcctgataaacagacccctttgtcattgtgaaaggtgttctttgtcatgaataatgttgtttatcctagaaatctgcttttttctatattaatttgactttactggcttttttcattagtttttatagggaatacattttgccatccttttactttcaacttttaggtgtccttatatttaagatgtgtctcttataaacagcttaaattatattttatttgtatgtccattctagaaatatttattggagaaaaaatatgttttaattyggacacctcttcaggttatctgattctagcctttctcctttaggctatgttgtaactgtaaatttatagacatgcaaattatgccctacttggtttggtgcagatgcaattgtcttccttcataccctgtaggaaaaatttttgcctctatctgcgtattcatttcatcattcctgatttataagtgagtctgttttttggattttcttttgaactaatttgta

SEQ ID NO: 149561 - DNA, 517 bp, Homo sapiens
agtacaaactttctaagatgaatatattctgaagatctaatgygtagcatgatgacaatagttaataatgtacttgaaatttgctaagagtagattttaagtgttctaaccgcaagaaaacaatggcaattgtatgaggtgatagatgtgataataagcttaattatggtaactattatacaatatataggtatatcaaaatatcaggttgtgcactttaaatatatacaataaaaacattttctccttgtcttatcacatcaataaattgccccatgtgttatttcaccttctttgcattcagatgtcaaagacatagctgagattgcatcttttccagatatatttaggtaatttgccaatttgggattgaaagtctaggattaaagactcctaaaattattttatcttaaccatagatcaggggacaagataaattcatattagcttcataacatagagcacattaaggcaaactcaatgcttttgataggttcactattccccccaaaatggc

SEQ ID NO: 149562 - DNA, 517 bp, Homo sapiens
agtacaaactttctaagatgaatatattctgaagatctaatgtgtagcatgatgacaatagttaataatgtacttgaaatttgctaagagtagattttaagtgttctaaccgcaagaaaacaatggcaattgtatgaggtgatagatgygataataagcttaattatggtaactattatacaatatataggtatatcaaaatatcaggttgtgcactttaaatatatacaataaaaacattttctccttgtcttatcacatcaataaattgccccatgtgttatttcaccttctttgcattcagatgtcaaagacatagctgagattgcatcttttccagatatatttaggtaatttgccaatttgggattgaaagtctaggattaaagactcctaaaattattttatcttaaccatagatcaggggacaagataaattcatattagcttcataacatagagcacattaaggcaaactcaatgcttttgataggttcactattccccccaaaatggc

SEQ ID NO: 149563 - DNA, 630 bp, Homo sapiens
gctatatgcaaagtgctgtggtaagcactgtgggagaaagaaccatgaattagatgtgaattttattctcaaggagtccataatttcagaagggcaacaaaagcctctacctaagaaaagccaagagggactgagatggtagactgatgacatactttggtatctccacccgttctttccctggcatctgaaaataatagattacatatattttagcaacagtactgagtgcccttcatgggcaagacagttttgaggaattcctaaaaactgagaaggcagatgagattagatggaaggaaaaatccatagtcaagagacatgcggatgtggggcagccacgggcattccatgctctgaagagaagggtatcaagaatgagaagggctttggggcaactgagcagcagtgtaattggctggaggctggcaggaggagtggctagcaggcttccccatctcacatccttcctgtgccaggtttgacctatctctctctctctctctatctctctctstgtgtgtgtgtgtgtgtgtgtgtgtgtgtgtgtgtgtgtatgtgtatgtgtgtgtgtgtccatgggtgctggactctatgaggtaaagcatgtccccctggggctggcaacca

SEQ ID NO: 149564 - DNA, 584 bp, Homo sapiens
atgaacagtaggaagctcccagtcaatctctgatgctggcaatcccttcttcagaggacaaggattttcatcctactrttaaaaattaagctaagggtgaaagcccttgtatattagtccattctcacactgttataaagatactacctgagactgggtaatttataaaggaaggaagtttaattggctcacagttctgcatggctagggaggcctcaggaaacttacagtcatggtggaaggcaaagggggagcaaggcacatcttatatggcagcaagagagaaagagagagtgcaaaggggaaactgccaaaaacttttaaaaccatcagctcttatgagaactccctcactatcatgagaacagcatggggaaaactgcccccatgatccaatcacctcccaccaggtcccttcctcgacatgtggggattacaatttgagatgagaactaaaccatatcaccttggaagaataaattgctaatttttctctctcttgggaattgattgatgtggagaaaaagaagaggattaaaatgtgagggcattgagcacctgggggcaggtgtggcaagataggt

SEQ ID NO: 149565 - DNA, 618 bp, Homo sapiens
cactgccatggatggctgggctcagccccactggaaccctctgtggcgctgtccaggatgtgcctgggaatggcccacttgaagacgggagaggcagtcgttatctgggggcgttcacaactttcgcccttttaggcttcctcatgattcagagtggctgaccactttgccatgggcatttcacaggcaaggagtaaagaagcctggggacagcaaggagagagagagtgggggagctctagcagtcggggacgcaggactctctggttacatttgcttacagttggtgtcttcagtaaaggatgtggtaacagggcaggtaaagaggatgtgagatgaggcacaagaggtgtctgatacatcctcctaccagaagattcctcttttgtgttgaaacttcaatcctgtggtattattcaaagtatcttccacatgttgaagaccacaagtagagacctgatggattttgtttatgcttagggaattatttagaattttcctaactgagggcaaataaaaggagtgacattggccaaggatctatgatgcatcctagactgcrctagaaggaggcgtgaggggatgaatataacatgagttgctgtctttaagaaagtg

SEQ ID NO: 149566 - DNA, 255 bp, Homo sapiens
ctagatctctagcaaggctggggaacttttcctcaattcttctctcaaatatgttttycaaacttagatttctccttttcttgggaaaaccagttattcttagatttggtcatttaacatgatcccaaactccttggaggctttgttcattaaaaaaaaaaaagaatgtttttttcttagtctttgtcagattgggttaatttgaaaggcttgtctttgagctctgacattctttcttctccatgtttgattcta

SEQ ID NO: 149567 - DNA, 539 bp, Homo sapiens
aagtgctaagccagttgctagatgcttcctgatggctttgtctcattctattctcacgagaacttgtgtagcatattattattcacattttacagaagaggagagtaagacttcaagattataactgacaagctcaggtttatgttcctagtaatctatgaacttggtgatttgaatccatgtcccctaaatcaaggccctctgcagacttttaaaaatttggttttattaatgcattaaaaaatttgtattttgtttccttcccctgtataaatggctggttgcttcagcagtatttcaccattcctaggaattayatgtagtataccatggcagaaagagtaatggccaggagtttggagcaacactccagtcacagcgctaacctgctctcttaatcacttgaggtgatcagtgaatcccgtctatgccttgcttcccccagctatgaaggaggagagtaatatctattctgcatgagtgagttacacattaaagtccaaaaatgatcatatgtgaaaaaacatgcatgattatga

SEQ ID NO: 149568 - DNA, 503 bp, Homo sapiens
atctatgtgataagccagaaaataagggasaaatattgcatgcctctgctgagctgtcaacaatgaaacatatgggaatcaagcattatgagaaacagaatgggaaatcctgtatctgtgtttcgtaacaatggcttattatcgatgtacacataacggtctcatatctaacttccatgcatgattaggcacattagctgattttgcaaaatggactcccaagttccaaagatgataatcaattgacttgtcttatttatttaacaatagcagcatacttaataatctaaagtcctgactcagagctttcacaagtgacacatatttatcctagctaaaaaaatcaaaagtccacagtttcaaacagtgccttatttgcctcacagaaccattcctatgatttgttagaaagaaaaactgcctcctgtggagatgtttgatttctgtagcattccttctgttcctaatctgtaccaacgtggagtaataagtgacacaggaag

SEQ ID NO: 149569 - DNA, 501 bp, Homo sapiens
ctatgtgataagccagaaaataagggagaaatattgcatgcctcygctgagctgtcaacaatgaaacatatgggaatcaagcattatgagaaacagaatgggaaatcctgtatctgtgtttcgtaacaatggcttattatcgatgtacacataacggtctcatatctaacttccatgcatgattaggcacattagctgattttgcaaaatggactcccaagttccaaagatgataatcaattgacttgtcttatttatttaacaatagcagcatacttaataatctaaagtcctgactcagagctttcacaagtgacacatatttatcctagctaaaaaaatcaaaagtccacagtttcaaacagtgccttatttgcctcacagaaccattcctatgatttgttagaaagaaaaactgcctcctgtggagatgtttgatttctgtagcattccttctgttcctaatctgtaccaacgtggagtaataagtgacacaggaag

SEQ ID NO: 149570 - DNA, 519 bp, Homo sapiens
ggaacttcactgttgcacttgctcagaagaaaaaccttggagtcctctgtgatcctctctttcttttgcacatcacaggaaatcctaaggcctctaccttcaaactgtgcctagctttaattatttcttgtcatttccactgctaccactctgggcaagtcactaccaactctcacattattacacatttttcacagttggtctcttacttctgcctcccttctcccacccacacgttmtattctctacccaacactggtggtcatttcaatattgacgttaagtcctaccttctgctcaaaagcctccaatgtctttctgtatgactgcagacagaagccaaggccttacagtggcccatgtgccctggaataatctggttcctccctgtacccttctgctaccattcttttccattccactgccaccacgctggcctcctgggctagtgctcaaatccaccaagcactctcaaacctcagaggctttgacttgctctgcctgctgcctaaagaattc

SEQ ID NO: 149571 - DNA, 621 bp, Homo sapiens
actagtgttggcatttttatttcagtttcttgaagtagaaatgttttcattcttattgtgggaagagggaaagtgaagaactactgcaaagtctggtccctagattcatgttgttcctattgttcaaagcaaaatctcttcctcactgtgtcctttaaaaccttgggtatttctacttccaggggattctgatgtaagcaaatccacatggtaaatctggtgtgtcttcctggaaaatcaatttgctccaagactgtagggacaggagttttgaatttttgtgttctgtaaagtttttaacagatgcataagatcaggttattcaacatcattaataacgtaaactcrgaaaaaaagatcaattttatgaactgggagtcattgggaatctggaactattttgtcttcagggagcttttgtgatagaagtcaaaatgaacagaaaacaagtcctcagtgagaactggtgatgctaatacaaaaggatgggagcgtacaatttcttggcaagttagaagaaacctatgttgcttgctatatggagaaagagtttatttcctaagattcagtatttttttggttgttacacataagaaaactgcccacatacaaatcagatca

SEQ ID NO: 149572 - DNA, 621 bp, Homo sapiens
actagtgttggcatttttatttcagtttcttgaagtagaaatgttttcattcttattgtgggaagagggaaagtgaagaactactgcaaagtctggtccctagattcatgttgttcctattgttcaaagcaaaatctcttcctcactgtgtcctttaaaaccttgggtatttctacttccaggggattctgatgtaagcaaatccacatggtaaatctggtgtgtcttcctggaaaatcaatttgctccaagactgtagggacaggagttttgaatttttgtgttctgtaaagtttttaacagatgcataagatcaggttattcaacatcattaataacgtaaactcagaaaaaaakatcaattttatgaactgggagtcattgggaatctggaactattttgtcttcagggagcttttgtgatagaagtcaaaatgaacagaaaacaagtcctcagtgagaactggtgatgctaatacaaaaggatgggagcgtacaatttcttggcaagttagaagaaacctatgttgcttgctatatggagaaagagtttatttcctaagattcagtatttttttggttgttacacataagaaaactgcccacatacaaatcagatca

SEQ ID NO: 149573 - DNA, 621 bp, Homo sapiens
actagtgttggcatttttatttcagtttcttgaagtagaaatgttttcattcttattgtgggaagagggaaagtgaagaactactgcaaagtctggtccctagattcatgttgttcctattgttcaaagcaaaatctcttcctcactgtgtcctttaaaaccttgggtatttctacttccaggggattctgatgtaagcaaatccacatggtaaatctggtgtgtcttcctggaaaatcaatttgctccaagactgtagggacaggagttttgaatttttgtgttctgtaaagtttttaacagatgcataagatcaggttattcaacatcattaataacgtaaactcagaaaaaaagatcaattttatgaactgggagtcattgggaatctgsaactattttgtcttcagggagcttttgtgatagaagtcaaaatgaacagaaaacaagtcctcagtgagaactggtgatgctaatacaaaaggatgggagcgtacaatttcttggcaagttagaagaaacctatgttgcttgctatatggagaaagagtttatttcctaagattcagtatttttttggttgttacacataagaaaactgcccacatacaaatcagatca

SEQ ID NO: 149574 - DNA, 499 bp, Homo sapiens
ccatatgaagaagtcttgccttacttagcctgaggttgaaccaggggaacaagaatcctcctcacccccaccatgcagctaacactaagtaaccagcagaagcaaaccgctgatggaaaagggtttaaagagactccttctgtgattcagacattcaggaactgctgaaatggagggatagaaaaagaataatagagcccctccagcagccccatcctctgtacagaagatggcagcccaatgctgaaggtgtttgacgactgggtcactgaggataatgacagcaacaaaaaaagccaaacccaactcaattattgactagattgagtcaaactctccctgtactaacaamctgagagaactcatttctaggaataaatactatttgcctcagactctaccgctatttgatatgttatgtttagcatctgatcaaaagttatgtgactcacaaaaagaaaacgaaaagaccctttgtaaaaaagataaagtaatttgc

SEQ ID NO: 149575 - DNA, 419 bp, Homo sapiens
cagcatttcttaccttcctcgaggatgctgttaagaaagaactggctactcgaaagtgaagctctggtgtttcaactccagagcttgcatccaaaaagtacatgaggttgtaatgatggatagttgttggaataaccattgttctcactggtccctagaaagggatctgtggctctgcaatggggagaaagacaggttgctgtttgcttctcatgtcagcastatggctcagaaggaagcaccatagccgcagtcaccccagggaagtatgaggcacagtctccaacaccactgaggcatcgccgctgcaagattgattctgccttaggggaggcaagacaaggctgaatgtacaatgtgtaactaccattcgctgagcctccattgttaagcaatctttgtgtcaggtgctttacgca

SEQ ID NO: 149576 - DNA, 431 bp, Homo sapiens
gcatttcttaccttcctcgaggatgctgttaagaaagaactggctactcgaaagtgaagctctggtgtttcaactccagagcttgcatccaaaaagtacatgaggttgtaatgatggatagttgttggaataaccattgttctcactggtccctagaaagggatctgtggctctgcaatggggagaaagacaggttgctgtttgcttctcatgtcagcactatggctcagaaggaagcaccatagccgcagtcaccccagggaagtatgaggcacagtctccaacaccactgaggcatcgccgctgcaagattgattctgccttaggggaggcaagacaaggctgaatgtrcaatgtgtaactaccattcgctgagcctccattgttaagcaatctttgtgtcaggtgctttacgcatgttatatgcctta

SEQ ID NO: 149577 - DNA, 574 bp, Homo sapiens
taaacaaagaagcaaataggtagaaatccaacatatcatattttaactgataaaataatattaaagactcttcaggccataggattactaagttaaattcacagaatcaagagatgaacccaaccagccatagacaataatgacctgggaagcctttcccattattttttgttgcaatgggggttcctatataagggctatcaacttagaggagcaaaggaaagagtgtgtccagcaagctgcccactcgcaaagaggaaactgtgccttccttcacaaattctgccttctaccaaattgcaaggcaactaagggcatggggacaccaggagtgtttctgtgaaaaagcgtcctccacatggagggaaacttcagaagtggaagataaatattccttgtaacaaaactcagttactatcccaaaaatattgttgagaactttgttcattgcattacatagaatataattctttatgaaaatatctgkagtaaattcttacctgatattagcaccagatcagtttcaattataaataatatgaacatatatattgaaaaaagagggagagagaga

SEQ ID NO: 149578 - DNA, 574 bp, Homo sapiens
taaacaaagaagcaaataggtagaaatccaacatatcatattttaactgataaaataatattaaagactcttcaggccataggattactaagttaaattcacagaatcaagagatgaacccaaccagccatagacaataatgacctgggaagcctttcccattattttttgttgcaatgggggttcctatataagggctatcaacttagaggagcaaaggaaagagtgtgtccagcaagctgcccactcgcaaagaggaaactgtgccttccttcacaaattctgccttctaccaaattgcaaggcaactaagggcatggggacaccaggagtgtttctgtgaaaaagcgtcctccacatggagggaaacttcagaagtggaagataaatattccttgtaacaaaactcagttactatcccaaaaatattgttgagaactttgttcattgcattacatagaatataattctttatgaaaatatctgtagtaaattcttacctgatattagcmccagatcagtttcaattataaataatatgaacatatatattgaaaaaagagggagagagaga

SEQ ID NO: 149579 - DNA, 556 bp, Homo sapiens
acacaaaaaagcataaataaaaaaagaaagaaaatggataactgaaaaagtttgctcttcaaaagacactcttaagaaaataaaagacaagcacaaatgggaagaagatattttcaaaacctgtatctagtaaaggacttatatccaaaatattttttaaagtgttacaaaaattccataataagaaaaataaaaatcccaatatgaagtaagctaaagatctgaacagacatttcactaaataagagataaatgaagrtggcaaataagcacatgaaaagatgctcaacatcattagccattagttaaatcgaattttgactgaagattgctatagctattcagggtctttagtggcttcatataaatattaggatttctttccgatttctttttttaaattattatactttaagttctggaatacatgtgcagaatgtgcaggtttgttacataggtatacacatgccatggtggtttgctgcacccatcaacccctcacctatattaggtatttctcctaatgctatccctcccctaaccccccaccccctga

SEQ ID NO: 149580 - DNA, 477 bp, Homo sapiens
tttagagacctcctaaaatgctgttacatcacatggtgcatttgttcttgtgaccaggtcagttttcagttcaagtaattatattttgtggacctaatattcctgatgccattccagttttwgaatgtactgttggcttcttcaccttcaggaaaactcctagcagacagctgtgctgtactgttgacaccacgggctgatcttcataactgcagtgctcagacaatgagcagttcatcaagacacagagactgctttcctttgcaagtcatacacataggaaatatgaataattgccaccggaagaatttgtttccgtcttatttctaaagcaaagcattttctgtgttttcgctgtttgtatacatttgctgtttactatattaaagtagtttatactgtagcatggggggaaaattaattgatagagatttcagcttggtttttgaccatccaaaattcttaactcagacagac

SEQ ID NO: 149581 - DNA, 477 bp, Homo sapiens
tttagagacctcctaaaatgctgttacatcacatggtgcatttgttcttgtgaccaggtcagttttcagttcaagtaattatattttgtggacctaatattcctgatgccattccagttttagaatgtactgttggcttcttcaccttcaggaaaactcctagcagacagctgtgctgtactgttgacaccacgggctgatcttcataactgcagtgctcagacaatgagcagttcatcaagacacagmgactgctttcctttgcaagtcatacacataggaaatatgaataattgccaccggaagaatttgtttccgtcttatttctaaagcaaagcattttctgtgttttcgctgtttgtatacatttgctgtttactatattaaagtagtttatactgtagcatggggggaaaattaattgatagagatttcagcttggtttttgaccatccaaaattcttaactcagacagac

SEQ ID NO: 149582 - DNA, 577 bp, Homo sapiens
gggttacttattttttttcttattaattcaagttccttatggattctggatattagtcctttgtggaatacatagtttgcaaatatttttctcccattctgtaggctgtctgtttactctgtggattgtttcttgtgctgtgcagaagctctttaatttaatgaagtgccgttcatctatttttgttttgttgaatttgcttttgaggtcttagtcataattatttgtctaggttgatgtccagaagaggttttcctaacttttattctaagatttttatagcttcaggtctacatttaagtctttaatccattttgatttaatttttgtatatagtgagagacagaggtccagttttattcttctgttagccagttatcccagtaccatttattgactagggagtcttttccacattgcttatttttgctgactttgtcaaagatcagttggtggtaggtaygttgctttatttctgggttctctgttctgtttcattgatctatgagtccatttttgtaccagtaccattctcttttgattactgtagccttgtagtatactttgaagccaagta

SEQ ID NO: 149583 - DNA, 443 bp, Homo sapiens
ttttttcatattttggtagaattcctctgtgatagcatctgtgcctgattcatttgtgtaagataatgccttgacaaattttttcttcttctatgggaattaatgtaagttttttatttattgagatcaattttgacaaattttacttttctaaaaattacktgcatacaggtataacaatgtcttatattcttttaaattctctctgtatctatagatattttgtatatttatgtttcatctcatttttcttcatgaacttggccatagattttttcgtatcttcaaagaaccaaaattttcaactatttgttgaatctaatattttcctgttctatacctcactatttttttcctttacctttattattttcttattgtgttttcatcatgtttactttgttgttctttgaataacttcttaagttggaaatttaactcat

SEQ ID NO: 149584 - DNA, 597 bp, Homo sapiens
acttattaattctaatacattattcataggttcttttgaattttccaatacatagttatacttcttgtaaataattttagatttacttccacaagtttaatttgaattctacagattcaatctctatgaatgaactctaatagaacaaaatcaaagagatgtagatctagatacatcatagtcaaatttaaaaaactcaatgtagaagatatttttattcatataatttcatttctgttccttccattactccattgtctaagatttgtatataattttgttggtaggtaacctttaacatattccacatcagagggaaacctctcaacattttgctattgaatgtgttttgctgacgtatttttagactctttatcagattatcactttctattgctagtttgctgaaagatttttatcataggtatattataaraatgttttctgagtgtattgatttaattttataaattcccctacctattttattgatttgatgaattacattgattctcaatattaaaatgaccttgcttttagaatcatttcgatatatctcgatgtattactctttttattttctgcttgattcgattt

SEQ ID NO: 149585 - DNA, 579 bp, Homo sapiens
gcttgtgctgttcatgggaggagcaagatttctagatgaaatgacttaattgttcaacaggcagtagatggtgattcaaagcaaagacaagttttaagtcaacgttcccaatcaggacataatcctacataacacattctgctgagtcccttgtggcagagaatacagagagtaaatcagcgccattcagggggctcagcactgagagtggacctgaagcccccctgtctaggagagatgctttagggtgactgctgtgtacccagccctttcagcacatattagygtattagtctgttctcacaccactataaagaacttccctgagactgggtaatttataaaggaaagaagtttaattgactcatagttctgcatggctggggaagcttcaggaaacttacaaccgtggcagaaaagcaggcaccctcttcccaaggcagcaggagagagagaagagaaagccaagggagaatcatcatggatcatggattggattgaatcatgggtgtggtttcccccatgctgtcctcatgatagtgagtgagtgttcatgagatctggtggtcccttatagaa

SEQ ID NO: 149586 - DNA, 579 bp, Homo sapiens
gcttgtgctgttcatgggaggagcaagatttctagatgaaatgacttaattgttcaacaggcagtagatggtgattcaaagcaaagacaagttttaagtcaacgttcccaatcaggacataatcctacataacacattctgctgagtcccttgtggcagagaatacagagagtaaatcagcgccattcagggggctcagcactgagagtggacctgaagcccccctgtctaggagagatgctttagggtgactgctgtgtacccagccctttcagcacatattagcgtattagtctgttctcacaccactataaagaacttccctgagactgggtaatttataaaggaaagaagtttaattgactcatagttctgcatggctggggaagcttcaggaaacttacaaccgtggcagaaaagcaggcaccctcttcccaaggcagcaggagagagagaagagaaagccaagggrgaatcatcatggatcatggattggattgaatcatgggtgtggtttcccccatgctgtcctcatgatagtgagtgagtgttcatgagatctggtggtcccttatagaa

SEQ ID NO: 149587 - DNA, 482 bp, Homo sapiens
ggaggggttaggaggaaggtttgccttttgtgaagagggaagaggtaaagtgaggctgggatgtggttgggcagtcatcatcaagggcagatgaaggctttccaggggcggtggacatgggcaggcttcccaggttcctttttcagctccttacctcctgtctgccctcttccctaaaatgggcctttctgagagtcacgtctgcccctgaaggttatgcccttcctgccacgccccttctcccgttccccacttttggtgtacagtgggcggtcacctggggtggaaaaatccccaagcagtggggccaggcaagaattctgaatggagaatcccaaggtaacaaagggtagagccttggtaagaaacagtgaagggaggctgggcatggtrgctcacgcctgtaatcccagcactttgggaggctgaagcgggaggatcacctgaggtcaagagttcaagaccagcctggccaacatggt

SEQ ID NO: 149588 - DNA, 411 bp, Homo sapiens
gaattctctggcaggatcagaccttgacaggtggatgcatcagactaatgataattgcacaccccttcaaagccatatttttgttcaatatcaaaggtaaggctttgtgggggctggtagcagatgtcarcctcttgtcaatccagctctgggggcatgtttgtacaccattcagtaaaacagtcctccaggtgttaatgaaaactaccttccttggaagtactttattttaacctcagctcatttctgcaagtggcttaaccaagtgttccctccaaacacatacagtgcttggcctgtgaaaggctttgggagacagaattgtctccttcttggtagatttccagtgagttttgggtaatctgcatcctggggagtggtacagtagcccaccccttattgggtcctact

SEQ ID NO: 149589 - DNA, 454 bp, Homo sapiens
gaattttgtttgtttgtttcaatttcatctagttccgccctgacctttgttatttcttttcttctgctgggtttgggtttggtttgttcttgtttctctagtttcttgaggtgtgaccttagagtgtctatttgtgctctttcagactttttgatgtagtcaaaagtttgatgaactttcctcttagcaccacttttgctgtgtgccagagggtttgataagttgtgtcactattatcgttcaaagaattttttaaatttccattttgatttcattgttgttccaaagatcatttaatgtccaaagatcattcaggagtagattatttaatgtccattatttgtacagttttgagggttmcttttggagttaattttcagttttatttcactgtggtttgagagggtacttgatataattttgactttttaaaatttattgagacctgttttgt

SEQ ID NO: 149590 - DNA, 608 bp, Homo sapiens
taattcttgctttggttgatattcgtgaacatttcagctcttcatgagtcctgtacattttcctttattccaatgtcacaatctccaaagttatcagaagcctgtatttgagagcacctgttacagttctacggcttattctaaatcatctcttgaaaaggattaaaacaagacaacaattgtctctgaatagcaaaaatgtccagggtagttacacttggaaacacaattgacaaaggagtttggttttctctgtggtttacaataagttaacataacaaccttaattatgattggtagcataacttagacattagaattttagaaagtcccatacagttttggaacatgtattaatattactcacaaaaatataacctaaacaagattgaacatcattatgacaatttcatttacctagacatgtcaaatcatctcgtttgcctctcttttctggatgtttcaggggccctctggactatctaaaagccaggtatcagraaagacaattatgaaacttaagtttgatttttggaaggctgttaaatatgtttaaaacatttgatattatgaaatagtgttccagattactataaacaattttgcca

SEQ ID NO: 149591 - DNA, 608 bp, Homo sapiens
ttgatgggattgcttgtttttttcttgctggcttgtttgagttccttgtagattctgaatattagtcctttgttggatatatagattgcaaagatttttcccactctgtgggctgtttactctgctgattatttcttttgctgtgtagaagctttttagtttaatcaagcattgtttggrcaaattgttacaaatcattcctgcaggactccattcagcctagataaccatacttttggcccagttctcacagaatttctacagaaaccctacctcctcaaagtaataaaaagtttgcattacaatcggactaatatcaaagaaaataaaaataacaattgggctaattataatgattacctacatagctttctccattaactaactcacaacagctctgttaagtagtcaggacaaatattaccacccccggttcacagctggaataatagtacttgcataataataattcttgagggattcttaaatgctggcactgtgttaatttctttatattcatcgaatatccccaataaccctacaggtagatactattattttccccattttcaggccaggtaattaatgaagcttaaaaatgtaagtac

SEQ ID NO: 149592 - DNA, 400 bp, Homo sapiens
tctgaagacaacttgttctgcctcatttaaaaagattcagtagtcgcctgttatctgttacctgtaggggttatgttccaagatcctccagtggatgctgaaactttggatagtgctaactcctatatatactgcgttttttgatatgataacaggcggttactcagtgactaagggtgggtagtgtgtacagtgtggatactctggacaaagagatgatcatatccctggaggaatggaacaaggatggcttgagatttcatcatgctactgagaatggctcacgatttaatacttatgagttgtttatttctagaattttccatttaatacttcagaccrtggttgaccacaggtaaatgaaaatgcagagagcaaaaacatggataagggggaattt

SEQ ID NO: 149593 - DNA, 407 bp, Homo sapiens
ccttttgcgcataaaaaacatagttataacaattgctgtgatggcattgtttactgattctaacatctgcatcagttctgtgtcagtttccactaggtgatttgtctcctcattatgggtcatactttcctgaatctctgtgtggctggtaatctttgatggatgctaggcagtgytaactttatcttactgggtgttgactatttgtattcctataaatattcttgaactttgttctgggatgcaaccaagttacttggaagtttgatccttttgagttttgcttttaagatttgttggggttgggtgtggtggcttatgcctgtaatcccagcatttggggaggccaaggcagaagtatcacttgaagccagaagttcaagatcagttcgggcaacatagtgaga

SEQ ID NO: 149594 - DNA, 448 bp, Homo sapiens
atgcaaattatctgagaaacagtgagatattagcaacaagatctacttggctgatggattgaagccactgggamcaaaagggccttgagggaacctttgcataatatctctcagtaggaggctctcctgaaattatttctagaagggaggttcagtaagggcttgacaggaaatctgtgcttcctctggtcctgtgaagctgtattcctctgagacaggaccctctagggaactcctgcctggtctgcttctcccgaatgatgcattcagagttggtgaggccctacttttaggactcctgtctctcacacgtataattttttaaaacttgctcacaattctattttaacaatttctacgttttatataaccttgaaggcccagggacacaattattgctgtttgccataaaaactggaatgctacaggattacatgaagagggtaag

SEQ ID NO: 149595 - DNA, 448 bp, Homo sapiens
atgcaaattatctgagaaacagtgagatattagcaacaagatctacttggctgatggattgaagccactgggaccaaaagggccttgagggaacctttgcataatatctctcagtaggaggctctcctgaaattatttctagaagggaggttcagtmagggcttgacaggaaatctgtgcttcctctggtcctgtgaagctgtattcctctgagacaggaccctctagggaactcctgcctggtctgcttctcccgaatgatgcattcagagttggtgaggccctacttttaggactcctgtctctcacacgtataattttttaaaacttgctcacaattctattttaacaatttctacgttttatataaccttgaaggcccagggacacaattattgctgtttgccataaaaactggaatgctacaggattacatgaagagggtaag

SEQ ID NO: 149596 - DNA, 448 bp, Homo sapiens
atgcaaattatctgagaaacagtgagatattagcaacaagatctacttggctgatggattgaagccactgggaccaaaagggccttgagggaacctttgcataatatctctcagtaggaggctctcctgaaattatttctagaagggaggttcagtaagggcttgacaggaaatctgtgcttcctctggtcctgtgaagctgtattcctctgagacaggaccctctagggaactcctgcctggtctgcttctcccgaatgatgcattcagagttggtgaggccctacttttaggactcctgtctctcacacrtataattttttaaaacttgctcacaattctattttaacaatttctacgttttatataaccttgaaggcccagggacacaattattgctgtttgccataaaaactggaatgctacaggattacatgaagagggtaag

SEQ ID NO: 149597 - DNA, 561 bp, Homo sapiens
cactttttcttgaattatttgaagtaagttgtagatatcacacactttgttcctaaatccttcagcatgcatctcctatgaataaaaacatttttgaygtagcccatgcaatatttgggacataattatattataaaattatttgttgtttatctgaaatacaaatttaactgggtatcccaggttttatttgctaaatctggcaactctaccctcagggtgccatggggtggcagctgctggatgggtgagtaaatctgcactcctggacttggtcagatttgatttcatttactggctttgtgacttgggacagccagtgccaccatttctttgtctgcaaaatggggatttttattttgtagtgtcagtgtaaaactcagagataaggtacattataaagcccctagcatagcacctgactttagcagactcacagtagattgcagctggcgtggcagtaatggtaactgaatagtaactgccattctctgagctgaaagtgagaaaataaaaataaagacacactgttttagaaatgttagcagctgtatttacaac

SEQ ID NO: 149598 - DNA, 612 bp, Homo sapiens
tagagtctttgctggtgaccaccaattccaaacactggggaatcaggatccctttaatcatttttaaacgattagtagagggagacgcttgaatcagagcattttctctgttgcaatsttccccttttccctattacaatacctcctccctctcccatacaataatctttccaataaagtctctccttaccaggttagaaaacaaattaatagaggaagcagacaacaagatctttctttttcaaaactgctgaatgataaaaatgcctgacaattctgttgtaatcgattgctcaataaattattgctgactgattcatgtgctatgaatcagtactattctcagtggtgggaattcagagataaaaatcctagttcctgccttgggtgctcatgctctgactctggagtcagatgacccattttgattcccgcctctgcaacttactagttctctgtgcttccatttccttatctataaaatggggataaaaataggacctcctccacatggtttttacaaagattgagtcaatgagtcatgtataaagtgcttagactagtgcctagcacataattagtgatacttaagtgtttgctcttactattagt

SEQ ID NO: 149599 - DNA, 612 bp, Homo sapiens
tagagtctttgctggtgaccaccaattccaaacactggggaatcaggatccctttaatcatttttaaacgattagtagagggagacgcttgaatcagagcattttctctgttgcaatgttccccttttccctattacaatacctcctccctctcccatacaataatctttccaataaagtctctccttaccaggttagaaaacaaattaatagaggaagcagacaacaagatctttctttttcaaaactgctgaatgataaaaatgcctgacaattctgttgtaatcgattgctcaataaattattgctgactgattcatgtgctatgaatcagtactattctcagtggtgggaattcagagataaaaatcctagttcctgccttgggtgctcatgctctgactctggagtcagatgacccattttgattcccgcctctgcaacttactagttctctgtgcttccatttccttatctataaaatggggataaaaataggacctcctccacrtggtttttacaaagattgagtcaatgagtcatgtataaagtgcttagactagtgcctagcacataattagtgatacttaagtgtttgctcttactattagt

SEQ ID NO: 149600 - DNA, 436 bp, Homo sapiens
ggattaaagaatttatgctgcaataagccttcacttataatgtcactgttagtgattagtttcctatactatttaaaagtttcatttgggatcaacacttattaaacatattttataattacacattctctttaccaataaataatgccatttcagaaatttaggtttatcttagagaatgtaatgtgtaaaggaaatctacatgaatagggaggagaaaaccaaaaggaataagtagattaaccactacagacacatatttcactattctattcccaacttcagagactgatgtgtttgggaccactaatacaagtagccaaaggaagaaaggggaaaatcactttcttccccaaraaattatgcctgatgttagagcctactctgttaacaacagttagaattatagcaccccataatcaccttctccaaagca

SEQ ID NO: 149601 - DNA, 406 bp, Homo sapiens
acatattagtttttgcttataaaagaatcaatttgggctgggtgcagtggctcatgcctctaatcccagcaccttggaaggctgaggcaggtgaatcacttgaggtcaggagttcaagaccagcatggccaacatggtgaaacctcgtctgtactaaaaatacaaaaattagccaggtgttattgtgggtgcttataatcccagctacttgggaggctcaggcaggagaatcacttgaacccaggaggtggaggttgcagtgagctgagattgtgctactgtgctccagcctggagctctgtctcaaaaaaaaaaaaaaaaaaaaraaatcaattcagagttttacttcccactgtttgtttaaacaaattcgtaagaaattaaagacaaacttaaggaatcaacc

SEQ ID NO: 149602 - DNA, 501 bp, Homo sapiens
gtgcctgtggttccagctacttgggagactgaggcagaagaatcacttgaacccaggagatggaggttgcagtgagctgagactgtgccactgcactccagcctgggtgacagagcgagactctgtctcaaaaataaaaaaaagtgctaattaaagaaaaggtaaaaaattaccttaaagtttctaacctagttggtttgtcattgtaagggtgaatcayaactattagctaaaagcatctgactacagctaatgccaaggataggtaattatcttacgtgacaaaacttaaaacacaaatagctgccccaatgctgcacagaaccttgaaaacggaagtctcagaacactggcaaaaagtgtacacatctaacactttctgagagataccaacttcccttccctgaatatggtctacctccttctttattaccattctgtttcactttaagaaataattgttttctgtcagataaaactgcctggctataactatgcgta

SEQ ID NO: 149603 - DNA, 484 bp, Homo sapiens
ttagtcccataattcttataatggctttgttttcctgatggatacggtctgatagaggaaacataaaaataagcggtctcttataaatcagtgtaaaaagcactaacttcacaggcatatgaacatatgggaaatgaacaacattctgagttctgaaaaaagcttcagagttagccaaatgaatattatttcagagactgaaaaggagaaaggaacttccaaggactaaatgaaacagattcaggatgaagagggagagaaaaaactggagagggaagcaggggctaatgttcccataggtttccttctggcgtgcctaactatgtgggttccaggccctttcatcattagttccrtcggacattgttttcacaagctcacccccaagaactcccatttctgctatacaacactatagagttttattggtacccagaatttatctagaagaaaattttaaataaagagctttaaatgcaggttc

SEQ ID NO: 149604 - DNA, 554 bp, Homo sapiens
tttaataataacccatcagtgtaacaatccatgtaagttcagtgggctgagaacagtggacccattcctataaacctctctgttcaccataccaaatactagtagcaaagaaaaaaagctacctgagaatcaaccaatactagagcagaaggactttcacatatagtctttacccatccatgcagcatgagactggcttgctgctgccacaacaggtcttcaaatcctgaaaaaagaaggacacaaagatgaggactgaaaagagcaactaaaatgtacatgtgtagtactcaggacaagtgatgaacaccaccatccaagattcatttggttccactcttctttctagttttgctgcccatgagcccaaacatcatgccacattcctcaagtctccaaggctcattgctatcttttcagggaagggaaggaacaaggatgagtgggttacctcaatcagcaaagccagtttttccaataagaatagtaagrggcagccattgccagattttttccatctagatcacttctggttgatgacaaaaggcagatct

SEQ ID NO: 149605 - DNA, 577 bp, Homo sapiens
ggaaataaaaagaatgaaggcagattatcagagagytgtcaacttctctagcagctgtcacaagacttatcttccagccaagatgcttgggaatcttagaacaagattttgttcccccaatctcagacatcctgctgccttgtatatgagctcatttctgagaccatgcagtgaaaacaactatctaactcataccaatgggtggcctagtcaacctgataaggtaacaattcttgaactctgacatatggatgtcagacaacatagtgaaaatgtcatatttgttatctctcttagtttggatttatcgaaaagtaaacccaaaaacaagaatttgagtacaggtaacttacttaggtgcaaaaagattgataatccttagaaatgagctcttaaatcatgccattaacttataagattatctcctgcatagagagacgatagtctagcaaatagcaagacaatttcttgtatatcgagaaagaaccaacccttgcaattaacttaaaatgaactcccaggcccacctatactagttgtctaactgcctggccacccagctttattcattcgagga

SEQ ID NO: 149606 - DNA, 577 bp, Homo sapiens
ggaaataaaaagaatgaaggcagattatcagagagttgtcaacttctctagcagctgtcacaagacttatcttccagccaagatgcttgggaatcttagaacaagattttgttcccccaatctcagacatcctgctgccttgtatatgagctcatttctgagaccatgcagtgaaaacaactatctaactcataccaatgggtggcctagtcaacctgataaggtaacaattcttgaactctgacatatggatgtcagacaacatagtgaaaatgtcatatttgttatctctcttagtttggatttatcgaaaagtaaacccaaaaacaagaatttgagtacaggtaacttacttaggtgcaaaaagattgataatcyttagaaatgagctcttaaatcatgccattaacttataagattatctcctgcatagagagacgatagtctagcaaatagcaagacaatttcttgtatatcgagaaagaaccaacccttgcaattaacttaaaatgaactcccaggcccacctatactagttgtctaactgcctggccacccagctttattcattcgagga

SEQ ID NO: 149607 - DNA, 204 bp, Homo sapiens
acttttccggtatctcttcagatgcccttgattcaratcaaatggaggatatggtttacaaagatgagaaaataaaccaagcaagagttccctagataaaggaaacagaagacccaacacagaataaaggtaagtaggagggtttaaaatcaaaatggatgattgaatggttaattaaaatattgtttaacataggatacatgt

SEQ ID NO: 149608 - DNA, 460 bp, Homo sapiens
taagaaaaaggcaagacagaatttgatttccaggagaaccccaattttctttcagtatctgatggagagtacatcagctacttgtaacagagccccagtgacctctggtgaaagaaagatccagtattaaccagtctaaccctggcatggtgattctgcaaagtcaggagagactcaagactcttccatcctttcactaaactatccttagcatttgacctctgtactcaagttccccttctgaactaagaagtgaattgcaagtccacaggacttcacctactaggcagaggaaggagggagcggcaagggcaaaataaaaaaaaawttttttttttaaatttaaaaagcgtagaaccctccagctgaatctactcctttgaagcaaccttctctaaaacctcatgcccctttgcctacttctcgctggcctgcagtaattcacatgaccacacccaaa

SEQ ID NO: 149609 - DNA, 562 bp, Homo sapiens
aaaattatgtctgataattcctaaggaaaagcctactacactttaataacttaaaaaagctctaggcagaaaatttagattaaygtcaacctgttttgtcagtaccaatagagatctgtcagaagtaaatataaatccatcctgcaagtttatacttaaaattgcctcaaagaattctcatagaaaaattccaatttagaggagcttacaaatttaaaaaccccaaaacacatcaggaaacaagttatcatcagtaggagctggcatgaacacaacaatttggtagaaataaagatatcagtatatactggtaagataatccactcactagaaagaaaaacaattctaaaatttatggcactagtaacatagcttcaaaagccaaattaataaaattataggagaaagtcactaatcttagaaatgcttcggaaaataccagatagcaaaacttaaacaaggccgataaagtggaacctagaaattaattaccttcttaccttagaaaagagaaaagaatgacataattgagccgagtatccaaatttagaacttaataaaa

SEQ ID NO: 149610 - DNA, 562 bp, Homo sapiens
aaaattatgtctgataattcctaaggaaaagcctactacactttaataacttaaaaaagctctaggcagaaaatttagattaacgtcaacctgttttgtcagtaccaatagagatctgtcagaagtaaatataaatccatcctgcaagtttatacttaaaattgcctcaaagaattctcatagaaaaattccaatttagaggagcttacaaatttaaaaaccccaaaacacatcaggaaacaagttatcatcagtaggagctggcatgaasacaacaatttggtagaaataaagatatcagtatatactggtaagataatccactcactagaaagaaaaacaattctaaaatttatggcactagtaacatagcttcaaaagccaaattaataaaattataggagaaagtcactaatcttagaaatgcttcggaaaataccagatagcaaaacttaaacaaggccgataaagtggaacctagaaattaattaccttcttaccttagaaaagagaaaagaatgacataattgagccgagtatccaaatttagaacttaataaaa

SEQ ID NO: 149611 - DNA, 312 bp, Homo sapiens
agatgacatttcaggtagacagagaaagtgaaatatatatatttcactgtctgcatrtattatatatgcatatatgtgtatattgccaccacagaagcccaacagcgttcaaaggtggagttgacttcctatgttcagtgatgccaatcaggaaatactttcttgctttccactctttttccccttcatctattttgctattcatgttttaaaatttattcttttggaagaagtgtataggtagaaggagaagaaaatatttcattgaaagcaatagtatagcacatttgctttatagaaaagaaaatcaaa

SEQ ID NO: 149612 - DNA, 312 bp, Homo sapiens
agatgacatttcaggtagacagagaaagtgaaatatatatatttcactgtctgcatgtattatatatgcatatatgtgtatattgccaccacagaagcccaacagcgttcaaaggtggagttgacttcctatgttcagtgatgccaatcaggaaatactttcttgctttccactctttttccccttcatctaytttgctattcatgttttaaaatttattcttttggaagaagtgtataggtagaaggagaagaaaatatttcattgaaagcaatagtatagcacatttgctttatagaaaagaaaatcaaa

SEQ ID NO: 149613 - DNA, 589 bp, Homo sapiens
tggtggaaacttaacatctgaaaactgaagtacaaaatattctttttttagggtcttacatgatgttgaagttgaatacctttcggaactattagagaggtggagaaaattgttccactttttaaaatttggttttattataagttgtgtttattcttaataatctttagtttgttgtcaaacaagattgagaagttaaagcgattctgatatcacatttgttaaaggcccactctgttctaggcacttatttcacttacttttatttaaccattatttccatattgaaccagcattttctcttgacataaggggaaactgagagtcaaaggggttaagtgtcttgctccgagtcacccatcaaaaagtggcagaataaaaacaagktcagatcttctgacacaaggtctaatgacttttccattcaacttcaattgccagttttgtgtgtaataggggcaggttcctctatctgtcttttctgagagggaaacgtattccgaaatgtaaagtttaaactgtgctgttaaaaggaagaactagagaaggtgagactttccactaagattccaaagatataggaaagtaa

SEQ ID NO: 149614 - DNA, 588 bp, Homo sapiens
aagtttgcaactccacctatgacttaactcaagccattttttattaatgcaaattaaaataataaagatttatctaaaatgaatatatatgcatgaattaataataaaaatcaataaataacatgtacatatgcccttgaactgccacaatgtatttaagtatattctgattaagtacacattaattaggttttaaaaagtataaaagagcaaaacataactatttgttgagttctgcaaatggaaaaaaaaaagatgccctcctcatcaaattttgcaacttcagtaaaataaatattaagcatatgtctcaaaccatctgttgcaaactttcaaaaacacaaaaacaatttagcaattccaaagagatctgggtttgcgaattctctgttctttgtaattgagttccaggttaaaaaaaaaaaaaaaaaaagcagggtatttctcaactacatttttaatgcaacattcaaataccgtagtattggactaatccyacagacattcgtactacaatgtataatagctggaattacacaacaggcttccaaatggatttctcacattcccatacaaagcatggtgagc

SEQ ID NO: 149615 - DNA, 600 bp, Homo sapiens
agtgacaaaattaggcattcccaggctcacggtttctaatcaatcagcctgtcacgtatctgaggagatatttcagagtgaagatagcgtatgggaaagcaatttccttggacttctgcctctgagttctatgtctggagtagaaatgaggtgcttagtgttaaacaaagccaagtagggagacagtgatgtractcttatgcatgcctggaccaaaatggcaaatgtgtgcctggggaagccacaggaggctcccagaagcagccttccaggttctgcagacacttaagaaaacagccacaattaggtccaagggaagggtgatattctctccaaagacactttaaataagaaagagctgttaaagctttcctgtaggctgaggatagaccttttaaaatgatatttagtctcaggaaaaaagaagacatattgttataatgtgttgtcagttctctaaggaaatggcataaaaaggagattttattgtggcttaatcctttgttctggagaatctgcgcttttatatacagtatatattttaatgaaaaccatgacaagattactattcataaatcagcagtgaaatactaaggacat

SEQ ID NO: 149616 - DNA, 600 bp, Homo sapiens
agtgacaaaattaggcattcccaggctcacggtttctaatcaatcagcctgtcacgtatctgaggagatatttcagagtgaagatagcgtatgggaaagcaatttccttggacttctgcctctgagttctatgtctggagtagaaatgaggtgcttagtgttaaacaaagccaagtagggagacagtgatgtaactcttatgcatgcctggaccaaaatggcaaatgtgtgcctggggaagccacaggaggctcccagaagcagccttccaggttctgcagacacttaagaaaacagccacaattaggtccaagggaagggtgatattctctccaaagacastttaaataagaaagagctgttaaagctttcctgtaggctgaggatagaccttttaaaatgatatttagtctcaggaaaaaagaagacatattgttataatgtgttgtcagttctctaaggaaatggcataaaaaggagattttattgtggcttaatcctttgttctggagaatctgcgcttttatatacagtatatattttaatgaaaaccatgacaagattactattcataaatcagcagtgaaatactaaggacat

SEQ ID NO: 149617 - DNA, 620 bp, Homo sapiens
tgtgctctgaattttctataggacccattccagcagaaagacttaatgaaattattcattctccactgaagcactgggatttccttataatgtgggctgtctgagtcctaaatgccacctgaaaaagagtttaggacaccaagactagaaaaaagtcattgctgcttatctattaacttcattttttcccatccaatagtaaaactgaataaatgatactaatcagtaatgtgcayatcagtacaatttctctaatattaggaataccagtcagttgccttatgcttattcccatcacttggataagggagcagaaggtgtcttccttggaatcttgagacaacatcactgcaagcaagaagcagacatctattgctaaactaaagttgaatttttgtatctactccttttccccttttctgggcatggctcttggtagatttagcagcaatttagagagcctgggggagtgtaggaagaccacaggtttcaccagtgcatagcccatctgtagaaatagttgtcagagctgagtatctctagttatattctatgtttgtaataattagcttcccagaaaacaatttgtcttttagatagcttgctagtacagtgttcac

SEQ ID NO: 149618 - DNA, 620 bp, Homo sapiens
tgtgctctgaattttctataggacccattccagcagaaagacttaatgaaattattcattctccactgaagcactgggatttccttataatgtgggctgtctgagtcctaaatgccacctgaaaaagagtttaggacaccaagactagaaaaaagtcattgctgcttatctattaacttcattttttcccatccaatagtaaaactgaataaatgatactaatcagtaatgtgcatatcagtacaatttctctaatattaggaataccagtcagttgccttatgcttattcccatcacttggataagggagcagaaggtgtcttccttggaatcttgagacaacatcactgcaagcaagaagcagacatctattgctaaactaaagttgaatttttgtatctactccttttccccytttctgggcatggctcttggtagatttagcagcaatttagagagcctgggggagtgtaggaagaccacaggtttcaccagtgcatagcccatctgtagaaatagttgtcagagctgagtatctctagttatattctatgtttgtaataattagcttcccagaaaacaatttgtcttttagatagcttgctagtacagtgttcac

SEQ ID NO: 149619 - DNA, 470 bp, Homo sapiens
attcccaaatctatccacaaccattcatacttgataaaatgtaagtttactgtaaaatgaatgaattattgatgtacttagcaaaacattatatctgcacaaagtcataaattaaacaaactctaatacattttatgataagcataatttgacctgagtccttgttagcctcaaagcataatataatgatcagaaaaattgggggtctaatcaattaatttgaaaatctgcaatgagattattatttatctagagtgaacgctttactagcatacaartaaagtttttataaatgaaatagaataaatatctaattattggaacttttccattaaataactgatggcataaagaggtttctgcttttaaaaaaaaaaaaaaatagttgctgatataaacctgagaatttaaatgtcaattatggcaaaaatattttctgtacaactttgttgttttttaaaacattatta

SEQ ID NO: 149620 - DNA, 499 bp, Homo sapiens
catcagtgactgaagtcactgtgataaaaatccttatttctgggcaagggagacattaaacaatacaggatgtaaaagaatgattaattctttatccaaagttagaataatgtatgcataaaatgaaccagagttctgtgactttatcttttactttcrttagattcaaagaatgaacttccgaacacctggcacataaagcaattaaactcataatggacttagccattgcccatattgtcaatatggtaagagcagattaaaatgaaaaatagaaacataattactttccaggtattgtaatattgggtaaggagcacagactaatcaaaatcattgacttggtcatgtctctagaagacggatctgccagatttaaatggagaaatagagactttgatagaagatggattagaaccattgtcatctaagaaaagagtctcaaatgcactaaagcaatcatgatgacctgaagtacaataacttcataaataatatt

SEQ ID NO: 149621 - DNA, 396 bp, Homo sapiens
tcatgtagcatttagacacaaaacagcaggataaataagccacctctattaccaaaatctcccaaatggagtctcaaaacattagagcaaaactgaaatatctcaaatggcattttattgcaaaaataaaacattctatatctataaaaagaaatgtatgtttatattaacctgtctctgttatggtttttaatgtgctgacaagcaactattcaaaaaaaaaaaagcaagtaacaataaaaataaaacaaaaaacarcagtgaaagccataacaaatttacttataagtacaatgtcactggaaatctcttaggatctttatttctttttggacctggcacatgtctaattatatatccactgataaatctttttaaaaagtataattataataa

SEQ ID NO: 149622 - DNA, 396 bp, Homo sapiens
tcatgtagcatttagacacaaaacagcaggataaataagccacctctattaccaaaatctcccaaatggagtctcaaaacattagagcaaaactgaaatatctcaaatggcattttattgcaaaaataaaacattctatatctataaaaagaaatgtatgtttatattaacctgtctctgttatggtttttaatgtgctgacaagcaactattcaaaaaaaaaaaagcaagtaacaataaaaataaaacaaaaaacagmagtgaaagccataacaaatttacttataagtacaatgtcactggaaatctcttaggatctttatttctttttggacctggcacatgtctaattatatatccactgataaatctttttaaaaagtataattataataa

SEQ ID NO: 149623 - DNA, 621 bp, Homo sapiens
tggcaagctttttctttgaagttcaggtggtaaacattattgactgcaggctttatggtttctgttgcaactgctcaactttaacattgtagtgtgaaaagtattatataaaatatggaaataaatgaatgagcctggctatgttccaataaagctttatttaaaaacagtcatctggctggatttagcttaagggctgcagtttgctgaccctcattctagagagaatttactgttgtctctgataaattgataatcaaggtgcactagcaatckgatgctaccttattccaataagaaattgagataattcaaagctagacttctgttctcattaaagctgatctgtattgtattcatctaaatccttattgattagaacagggtttctcaaaactggcactattttgggccagataattctttgttgtagagggctatcctgtacattggagaatgtttgggaacatcatggtctccagcccctacattcagtaacacactccacattacaattctgataactaaaaagtctccagtgatggccaaacagccttgggggcaacaaaattgcccctagtcaagaaccactggcctgagggtccccttgatggtcagatc

SEQ ID NO: 149624 - DNA, 560 bp, Homo sapiens
atgttggtcttgaacacctgacctcaggcgatccacctgccttggcctcccaaagtgcttggattaaggcatgagccactgtgccaagccatatagagcacttttaatggattttgtttcctaaatttgtctttcattaaatgtaattggcagtggaaaaaaagttcaatarattcttaatagattccagttatactaaatgtcaaatttattttaacttttctatgtacattagtcagttaattataatgttattatccaacttaaaattaaataattcaatttccctggggaaaaaaatagactacatgctaggcttttcaaagtcaatttggaaatctaatcttgatataatttatttattaatcataatttagtactaaaataaaacgtgtatattatttaaagatattagattttgtaatggataaaaatgatttaagtaaaaattttaaagaaaattaagctttagttttttcctagaatagtgctaattgaatttgttgtagttttaattatgtcattatcaaggacttaatatgttcagtgtacctgggtct

SEQ ID NO: 149625 - DNA, 560 bp, Homo sapiens
atgttggtcttgaacacctgacctcaggcgatccacctgccttggcctcccaaagtgcttggattaaggcatgagccactgtgccaagccatatagagcacttttaatggattttgtttcctaaatttgtctttcattaaatgtaattggcagtggaaaaaaagttcaatagattcttaatagattccagttatactaaatgtcaaatttattttaacttttctatgtacattagtcagttaattataatrttattatccaacttaaaattaaataattcaatttccctggggaaaaaaatagactacatgctaggcttttcaaagtcaatttggaaatctaatcttgatataatttatttattaatcataatttagtactaaaataaaacgtgtatattatttaaagatattagattttgtaatggataaaaatgatttaagtaaaaattttaaagaaaattaagctttagttttttcctagaatagtgctaattgaatttgttgtagttttaattatgtcattatcaaggacttaatatgttcagtgtacctgggtct

SEQ ID NO: 149626 - DNA, 560 bp, Homo sapiens
atgttggtcttgaacacctgacctcaggcgatccacctgccttggcctcccaaagtgcttggattaaggcatgagccactgtgccaagccatatagagcacttttaatggattttgtttcctaaatttgtctttcattaaatgtaattggcagtggaaaaaaagttcaatagattcttaatagattccagttatactaaatgtcaaatttattttaacttttctatgtacattagtcagttaattataatgttattatccaacttaaaattaaataattcaatttccctgggraaaaaaatagactacatgctaggcttttcaaagtcaatttggaaatctaatcttgatataatttatttattaatcataatttagtactaaaataaaacgtgtatattatttaaagatattagattttgtaatggataaaaatgatttaagtaaaaattttaaagaaaattaagctttagttttttcctagaatagtgctaattgaatttgttgtagttttaattatgtcattatcaaggacttaatatgttcagtgtacctgggtct

SEQ ID NO: 149627 - DNA, 607 bp, Homo sapiens
atgactcccattcactgtcattaccaacaagtcttttaaggatcatcctagaaacaaaaaaaatataaatatgggaactattttttaaaaaggattttaattattgacatatctatatttaaaagttgtccatgctaatcstcactaatcattgagctgatttccctttaatgatgaagcttagaataatatttcacacagaagctccctgcattattaactaataaacattcaccaagcacttaccttatattctgcttgagacataagggcagcaaaaggaatacaagctttgatgtctacactcaagaagctttcagtcttattgatccccaaaatagcaaaaacataaagcaagccaatttattttaaataaaattactaacttggagtgtgacgaaaaattctagcaagtcagagaatgctcaagacgttgtgtttgatgaaggagagaagactagagttggaccttcaaaaatggataagtgtctgtcctaaagggagaaaaaaattatctcagacagcatgagacttcttaatttcctcacttctcacacctgcttgttttggaatggcattagggctcagccctggcacccctgtctga

SEQ ID NO: 149628 - DNA, 627 bp, Homo sapiens
attcactgtcattaccaacaagtcttttaaggatcatcctagaaacaaaaaaaatataaatatgggaactattttttaaaaaggattttaattattgacatatctatatttaaaagttgtccatgctaatcgtcactaatcattgagctgatttccctttaatgatgaagcttagaataatatttcacacagaagctccctgcattattaactaataaacattcaccaagcacttaccttatattctgcttgagacataagggcagcaaaaggaatacaagctttgatgtctacactcaagaagctttcagtcttattgatccccaaaatagcaaaaacataaagcaagccaatttattttaaataaaattactaacttggagtgtgacgaaaaattctagcaagtcagagaatgctcaagacgttgtgtttgatgaaggagagaagactagagttggaccttcaaaaatggataagtgtctgtcctaaagggagaaaaaaattatctcagacagcatgagacttcttaatttcctcacttctcacacctgcttgttttggaatggcattagggctcagccctggcamccctgtctgatcactcaatggttatgactatgcagatct

SEQ ID NO: 149629 - DNA, 355 bp, Homo sapiens
ttcccaagctttcttgaccatgaggctctttgttctttgagtaccaattaacactcataagaattagtgtgtgcagaacacagcaagcccctgctgtataaaacactagcagccaactaacagcatagagaaggcagagaaaagaaatacagaggaagagacactgatacaggaaatacgaaacccaatgattgatttaacctttttcgcagctttgctagaayctgtcgtgattatttaaatgctggaacaatcttaatgaatggcatgatcattaattataaaaatataaataatgctcatttaaattgccaaaagcaaatatcaatagttactataaatatcagctgagtct

SEQ ID NO: 149630 - DNA, 440 bp, Homo sapiens
gccacacaatgctttgtgcacaaagtaaattgctagtttcctgtgatctttctgacaagtaaattactgcagaaaataacatagatgggaatacaatgacaaaaatgcagagacttggtcgttcaaaggagttattggacctctgacacaacmatttctaaagaaccttagaccctcttttcaatggaaagaggattttcctccatctttctatagtgtattttgaagagaaataatatatgatgggcagggtaagaagtggaattctcagtaatcaaatatcattttttcatgataggaagatattaaaattatgcataaagagaagagcttgctttggggattgctgtgcctgtgatcattctagcttggcactgaagatcacagtgatgcagtctattttgcataaaagatagcttctgagaggtctttttatatct

SEQ ID NO: 149631 - DNA, 431 bp, Homo sapiens
atcatgaaaacttttatatatgcaggtttatctgttactactatgaagaatcaaaaaattccaaagccttctagttcagaaaacgttaggccagattctgtaatcacctatgttaaagaacaaagctaaacagctaaatcaggaagtakataataaaagacagatcacatttagacaaagacatggttacttttttatttgaagaaaaaaaaagtatgttttaataaatactgcggaaacattgaccaaacaaacatacacagtgacttcaacagtttaaaaaatgcaacaaaagttctgctttataacagttataacttattttctttttacaatatttaaatacagaaagcactcgccagctattttgtaatactgcccaaagcataatgctgcatcaatcaaagcatattatgttggtaaaatgtctg

SEQ ID NO: 149632 - DNA, 500 bp, Homo sapiens
tgtttccagtttttggctattatgaataatgctgctatgagcattcatgtacaagtctttgggtggaaatatgctctaaattttcttggtagatgcctttaagtggagatgctgagacatatggtaaattgatatttaacttatgaagaaactgccaaattgttttccaaagtggttgtaccatttcccttcactttctgattcctttttatgtatccttgattttayaaggatctaagagccaggaaaccggtcttccatgacttcctttgaaaattgtgcatgtggagtcctgcatctttcatattagtagttatcagatggtcatatctatagatatcaagtctgcaagagtcccattttaacatcttcttataatatagagattgattcttagcacaagaacctcttaggaaaagttaagcacttcttaaaaatgatctcctgtgactctttaaaggacacacacctcaaaagtattggaaaacaaggtctatgtg

SEQ ID NO: 149633 - DNA, 437 bp, Homo sapiens
agcttttaaagaaactttgtgttcaaacatatagattgcacttagcagttggctcagtaattttttatcattttctggcaatgaatgaaggaatgcacaagtgagttctaagtattttcctggcaytttggtcacattccctggaaccttgggatattttatctagagttgccaaaaaccttgttttgttgtgttatagatgctgtccctatagactcctcaagtcttccaaaagtgcagaagcctggaaagctgttacaaatgagaatcactatttaccagacccctcccagagaacacatgtgcattttgtctttggtcttcaagaggctctaacacacagcttcttccactttcctcttgatatttgccttttccaggtttaaagcagaggttctcaaagtgtggcatatggaaccatagggatcccacaggcc

SEQ ID NO: 149634 - DNA, 582 bp, Homo sapiens
gtcttcgatgggatgggagggtaatgggaaatcgttgaaaggttttataaaaacagtaacttaataatatttgtyagcattgaatattccctttcacatcaaaaattgtgctgtgcgtggtatgtgcttgagtagttgtgtatttttttagcttgtcttgctaatgtcaaaaggagccagctaaggttgatattcattgaatcttgaacttagcccaagccaaaatacttgtatgagtaactgtgtgtctgtgtgtgtgtgtaagtgttcatgtaaaaatatcaaattatttgtaaatattcaaaattttataaagaatttccatgccaaaacattagaaagtcattttcagtctcatttgttctctaaaggagggctaaaccttaccacactttgtgattctccaaatgtctcgagctattttttcagatgctttggttttggcaggtcttaaggccaatgtttgctgtcctttttcccttaatttctaaacccacatgtatttcaagagaattttatacatatgttttatattcatttacacttaactcatcaaaaaagttttaaggatatttgaagtcc

SEQ ID NO: 149635 - DNA, 582 bp, Homo sapiens
gtcttcgatgggatgggagggtaatgggaaatcgttgaaaggttttataaaaacagtaacttaataatatttgttagcattgaatattccctttcacatcaaaaattgtgctgtgcgtggtatgtgcttgagtagttgtgtatttttttagcttgtcttgctaatgtcaaaaggagccagctaaggttgatattcattgaatcttgaacttagcccaagccaaaatacttgtatgagtaactgtgtgtctgtgtgtgtgtgtaagtgttcatgtaaaaatatcaaattatttgtaaatattcaaaattttataaagaatttccatgccaaaacattagaaagtcattttcagtctcatttgttctctaaaggagggctaaaccttaccacactttgtgwttctccaaatgtctcgagctattttttcagatgctttggttttggcaggtcttaaggccaatgtttgctgtcctttttcccttaatttctaaacccacatgtatttcaagagaattttatacatatgttttatattcatttacacttaactcatcaaaaaagttttaaggatatttgaagtcc

SEQ ID NO: 149636 - DNA, 582 bp, Homo sapiens
gtcttcgatgggatgggagggtaatgggaaatcgttgaaaggttttataaaaacagtaacttaataatatttgttagcattgaatattccctttcacatcaaaaattgtgctgtgcgtggtatgtgcttgagtagttgtgtatttttttagcttgtcttgctaatgtcaaaaggagccagctaaggttgatattcattgaatcttgaacttagcccaagccaaaatacttgtatgagtaactgtgtgtctgtgtgtgtgtgtaagtgttcatgtaaaaatatcaaattatttgtaaatattcaaaattttataaagaatttccatgccaaaacattagaaagtcattttcagtctcatttgttctctaaaggagggctaaaccttaccacactttgtgattctccaaatgtctcgagctattttttcagatgctttggttttggcaggtcttaaggccaatgtttgctgtcctttttcccttaatttctaaayccacatgtatttcaagagaattttatacatatgttttatattcatttacacttaactcatcaaaaaagttttaaggatatttgaagtcc

SEQ ID NO: 149637 - DNA, 538 bp, Homo sapiens
tatctttttttttttactaagacactttccaatccaccattattttgttctgtattttttagtttctctttattagcatttctgtgtcatgttagcttaagatgagaaatgactgctatcagtctttactaagtcaagaatcagaatcagaggcctataaatatttcaataaatgaccattgcaaaactgtggagatagtaaagcatratgagaaaagcaaagcaaggaagacacagaattagatttaaatctaggtaatgcaactactttgctatgtggcctttgatgcattatttgaattcatgagcttttatttctaaaagggctttgacaggctgtgataaactctcaataacctctccagaaaacaagtaaacaaacaaagcatctgtaggaatttcctcaactataagttgccatgatttgctttatagggaataaattatttgttctataggaaatgaataaccattgccactgcagaatgacttgaaaatagggtttgaattaagagccaagactagcaaatgtcctgtg

SEQ ID NO: 149638 - DNA, 459 bp, Homo sapiens
ggtggtggctaatgatacccacccattgtaaagactggatataatagtaaatgcaaagtaaaataatgacgactcatctttgttgaatacgttacacatgtcaggcattattctaaatctttcacttatatttatttaattatcacagcaacaccctaagatgaatagtaagatcatcccctttatgcagatgaagaaaatgaagtagagagagttaaagtgattgacaaagagccctcacttagttaagtggcagtgcttcatacaaacctaggctgactccagcatctgtaatcttagtcacgcacatcactgcatcctaagagtattaagcaagtacaaaayaggttattgatattagaaaagatagttaaacttcataaaatggacatgggctttaatatatctatttagagtttccttctactttcactactgtaagtttactgtaatctcaca

SEQ ID NO: 149639 - DNA, 459 bp, Homo sapiens
ggtggtggctaatgatacccacccattgtaaagactggatataatagtaaatgcaaagtaaaataatgacgactcatctttgttgaatacgttacacatgtcaggcattattctaaatctttcacttatatttatttaattatcacagcaacaccctaagatgaatagtaagatcatcccctttatgcagatgaagaaaatgaagtagagagagttaaagtgattgacaaagagccctcacttagttaagtggcagtgcttcatacaaacctaggctgactccagcatctgtaatcttagtcacgcacatcactgcatcctaagagtattaagcaagtacaaaataggttattgatattasaaaagatagttaaacttcataaaatggacatgggctttaatatatctatttagagtttccttctactttcactactgtaagtttactgtaatctcaca

SEQ ID NO: 149640 - DNA, 523 bp, Homo sapiens
tcaaaactgaggctcagacaaattaaaatgttttttcaaggtcagagattgagacaggcttgaacctgcaccttctagtactaattcagtcctctgaaatctgtagtattttctaatgaaggtcaggaattagaagcatcacaaatgacatttccacttgctctttgcctcatagctcatgtttctaggcagtttaaatagcaccaaacaattaaaatatttattccttgacattcaatgacatttttttttttttttggcaatagcctacaaccaaatggcctttgagtcggcaaagttattgctttagctgcccttycgccttccaaagatcaggtgactgttttcaaatgtagaaaggagccagcccataaatcacagggaaaagaactcactttgaacaagctaagctgccttgtagaacaagtgctggaagtcacattgctcatggcctattaattattgggctgctctcacttctcccaggacaagtcatttccagaattcctctctttaaataaga

SEQ ID NO: 149641 - DNA, 520 bp, Homo sapiens
tttcttccacaaacttctggaatgtctggacttttgccctcaccagaccaacacaagggtttctcaagtgggataccatttttatctcaaaccacctctttggagggaagttactgaaaatgccttggccaagattctgtacttcaaaccatgtcacgtttctctctggggttttatgtatcggctcctcctacccaggacwtccaggaagccccatgctgccctcattgtgggcttgcactggaggaacatgaagtacaaaactgacggagctgtgcgttcctcggccaggacgtgtgggactctaatgtgcaccttcacatctaaatgctgaggcagtcggttctttggtcaccacagaagagctaacaatcaggacagtgaaagggaagccagctcatgggatcagccacacatccacccaagggctgtggttactgcacatggtggagcaagcacagtcatgacgtgtagctgtgggctagagtgtttgagggacccactggtccagttcagagtg

SEQ ID NO: 149642 - DNA, 520 bp, Homo sapiens
tttcttccacaaacttctggaatgtctggacttttgccctcaccagaccaacacaagggtttctcaagtgggataccatttttatctcaaaccacctctttggagggaagttactgaaaatgccttggccaagattctgtacttcaaaccatgtcacgtttctctctggggttttatgtatcggctcctcctacccaggacttccaggaagccccatgctgccctcattgtgggcttgcactggaggaacatgaagtacaaaactgacrgagctgtgcgttcctcggccaggacgtgtgggactctaatgtgcaccttcacatctaaatgctgaggcagtcggttctttggtcaccacagaagagctaacaatcaggacagtgaaagggaagccagctcatgggatcagccacacatccacccaagggctgtggttactgcacatggtggagcaagcacagtcatgacgtgtagctgtgggctagagtgtttgagggacccactggtccagttcagagtg

SEQ ID NO: 149643 - DNA, 520 bp, Homo sapiens
tttcttccacaaacttctggaatgtctggacttttgccctcaccagaccaacacaagggtttctcaagtgggataccatttttatctcaaaccacctctttggagggaagttactgaaaatgccttggccaagattctgtacttcaaaccatgtcacgtttctctctggggttttatgtatcggctcctcctacccaggacttccaggaagccccatgctgccctcattgtgggcttgcactggaggaacatgaagtacaaaactgacggagctgtgygttcctcggccaggacgtgtgggactctaatgtgcaccttcacatctaaatgctgaggcagtcggttctttggtcaccacagaagagctaacaatcaggacagtgaaagggaagccagctcatgggatcagccacacatccacccaagggctgtggttactgcacatggtggagcaagcacagtcatgacgtgtagctgtgggctagagtgtttgagggacccactggtccagttcagagtg

SEQ ID NO: 149644 - DNA, 525 bp, Homo sapiens
agtgctacttctaggagcaaaaactattatgtctacctaatatgcaacaataggaggataattaaatccataagtttattaggtagtaaaatatatgttttaaatatgataaatgtgaacactgcacaatgtagatatcagcataaaaatattaagcaggattttataaatagtatgattttattcatgtaaaacatatttgaatggaataaaatgggaatatgagaaaatgaaaactgtgtatttgtcatatagtggtagacttttttttaaattcagtattatcttatgagtcacaatattacaaggaaatcacagtttttaattttaaaaagtagcaaaaaactcaatattttctgatcaataataattatatggcaaaatatacaaytggcatgttatatggaaatctgaagctttctttttggcctatagttttgtcctacccgtgaaatagtgtaagttctttgagaaattttagtttttttaaaatttagttttatttttgatttctaaatattgccc

SEQ ID NO: 149645 - DNA, 560 bp, Homo sapiens
aattgaagtatttgttttctatctgaaaatagaatttagatgataacactcttctcatgatggtacaaatgaccagtcgtgtggacttagaacattttctaagcttcttcarcccaactataaagcaagctgtagttcatgtcacctcatcattcttatagcaccagcagttcctaaggatgcttgttccgttataaacgaataagtgcaagaggctgagtttagccacaaaaatgcacttaaaacatctgaccatgccacaactgctaacatctcactggccaaagtagcctgttgaccaagtcccgcatcaatgaagtggagaatatattctaccaactctggtagaaagttctagaaagtcacatagcaggaaacttggatgtactgttttagtataagtgtggtgtaaagaactggaagcaattcaccaatataatagaatctaccgtgtgcctatcacactgaatgtagagtgcttggtaaataattgcttctcttttcttcttctacatgtaggataatgtcctcctttcttctaagaaacatcaaaggttaaa

SEQ ID NO: 149646 - DNA, 560 bp, Homo sapiens
aattgaagtatttgttttctatctgaaaatagaatttagatgataacactcttctcatgatggtacaaatgaccagtcgtgtggacttagaacattttctaagcttcttcaacccaactataaagcaagctgtagttcatgtcacctcatcattcttatagcaccagcagttcctaaggatgcttgttccgttataaacgaataagtgcaagaggctgagtttagccacaaaaatgcacttaaaacatctgaccatgccacaactgctaacatctcactggccaaagtagcctgttgaccaagtcccgcatcaatgaagtggagaatatattctaccaactctggtagaaagttctagaaagtcacatagcaggaaacttggatgtactgttttagtataagtgtggtgtaaagaactggaagcaattcaccaatataatagaatctaccgtgtgcctatcacactgaaygtagagtgcttggtaaataattgcttctcttttcttcttctacatgtaggataatgtcctcctttcttctaagaaacatcaaaggttaaa

SEQ ID NO: 149647 - DNA, 573 bp, Homo sapiens
gggaaattatttgaaaatatagttctgaatgattaaacaggatgtttttacatacacttactgctttgtcctacctacttgatacttcaggctgttcacaattaatctatcattatcttyagcaaatcttgagcacaagttcatcatgaaaaaggaaaataaaaacaacagaacatttactgtggtcatgcatcacttcatttagttatccccatatttcagcaacgtggatggcctctgctccccatccttccctttactgtcaggaaagctcaggctaagagaaattaagcatgtctcaaaggctggactctaaagactgtataatttttattacaccaactcaccaacttctctaataataaaatattctaccggttgaattcatcaagagttctagtttgtatcgacttgattctcatatattaagagatgccaaatgtcattgaataatctaagcatcctctcaccagttgataaccagaaatgcagtggttctacttctcagctgaagttcatagagaggtagaggatactgtgatggaaagctaagcttcttacactgttgccctt

SEQ ID NO: 149648 - DNA, 555 bp, Homo sapiens
atatagaaagaagaaaagccaccaaaataaaaacaggcataaaaatactactcctaatcaggaagcatcatatcaacaataaagagagaaagtaaattaataaaagaatgggaatatggtgcactgtgatattttcccccagtcatatatcggctggaattaattaattaaagctatttataaattatttgttaggcagtacctttcataaaggtgttagcaacaagtatttgttaatcaatttatcttatatttatatgtagtatgatagattgagcattccaaatcccaaaactggaaatctgaaatgctccaaaattggaaactttcttragcattgacatgattctcaaagaatgttcaaagcattttggattttgaatttttggattagggatgctgatccagtcagtatataatgcaaatatttcaaaaactaaacaaattccaaatacacaactcttctggtcccaagcatgttagagaagagataatcaaactgtattcattttatactaaaaagaaaaataagtgaaattatgttaaataaattct

SEQ ID NO: 149649 - DNA, 568 bp, Homo sapiens
gatgaaggtccatgtcctgctgggcacacgttgtcattgataaacatcttaacaggaaacagggttcaggagcagacaaccagtctgactagaatttcaccagcctggaattttccaatcctagcaagcctgggggtgctgaaggagaccagggcatatttcatcccttatctacaactgcataaratagacactcccagagcagccattttcgagacctccccctgggaatgcattcttttcccagggctgttccttgctgagaaaaataattcagtgatatttctcctattcgcttttgcaagaagagaaatatgactctgttctgcctggcaccgcaggcagtcaggctttatggttatctcctttgttgcctgaaaatcgctgatatcctgttcttttaggatgcctagatttcatattgttcaaacacacatgttttacaaacaatttgtacagataacaatcatcacagggtcctgaggtgacatacatcctcagcttacgaagatgacgggattaagagattaaagtaaagacaggcataggaaattataaaagtattaat

SEQ ID NO: 149650 - DNA, 568 bp, Homo sapiens
gatgaaggtccatgtcctgctgggcacacgttgtcattgataaacatcttaacaggaaacagggttcaggagcagacaaccagtctgactagaatttcaccagcctggaattttccaatcctagcaagcctgggggtgctgaaggagaccagggcatatttcatcccttatctacaactgcataagatagayactcccagagcagccattttcgagacctccccctgggaatgcattcttttcccagggctgttccttgctgagaaaaataattcagtgatatttctcctattcgcttttgcaagaagagaaatatgactctgttctgcctggcaccgcaggcagtcaggctttatggttatctcctttgttgcctgaaaatcgctgatatcctgttcttttaggatgcctagatttcatattgttcaaacacacatgttttacaaacaatttgtacagataacaatcatcacagggtcctgaggtgacatacatcctcagcttacgaagatgacgggattaagagattaaagtaaagacaggcataggaaattataaaagtattaat

SEQ ID NO: 149651 - DNA, 517 bp, Homo sapiens
tatttctatttataccagtttcatcttgttgacatatttactacattgttatgaagttagtcaatcagcaactgtstttctctatggaattctcaagaattcagaattcctatagcgtctatagattaggtatatcctgatgtattttcttaatctcttcataaactgtttcttgaaagctctggactatacaatttgcttcagaaatgacttcgcctcttccctgatcctacaatgtcacacacacacacacctccctctttttttttcctttttttaaaaaataaggttttattttgttttatgttattttatttattttattttgttatactttaaattctgggatacatgtgcagaatgtgcaggtttgttacataggtatacatgtgccatggtggtttgctgcacccatcaacccatcatctacattaggtatttcccctaatgctattcctccacttgccctccacccactgacaggccctgacaggtgcgtgatgttcccctccctgtg

SEQ ID NO: 149652 - DNA, 560 bp, Homo sapiens
ctgtttcttgaaagctctggactatacaatttgcttcagaaatgacttcgcctcttccctgatcctacaatgtcacacacacacacacctccctctttttttttccttttttwaaaaaataaggttttattttgttttatgttattttatttattttattttgttatactttaaattctgggatacatgtgcagaatgtgcaggtttgttacataggtatacatgtgccatggtggtttgctgcacccatcaacccatcatctacattaggtatttcccctaatgctattcctccacttgccctccacccactgacaggccctgacaggtgcgtgatgttcccctccctgtgcctatgtgttctcattgttcaactcccatttttgagtgagaacatgcagtgtttggttttctgttcctgatacacacctcttagaacaaagagaataaaagtcaagaaataatttaatgaaataaaaaaatgaaataaaaaaagagaggttcagaaagaaatggctaacaacaatatgctaccagaaattagaagaaaatgaatgatt

SEQ ID NO: 149653 - DNA, 524 bp, Homo sapiens
agaaaataaaagattatagaatttttcaagtttagacaactggtkggatgaaaatcacattgagacagaagataagagaagaagcagatttggaggccaagataatgaatcatttgggggcacatttaagagcctgtgggacttctggatagggaggcaaggtgcgctattggaaatacgagtctagagcttgggagagaagttggtggttttagttttgggagacatcagtgaagagagtttagggaaaccccaagaatggttgagatcacccagggagagtgagtagagtaaggagaaacgttaaggtgaaaactgtggggatatacatgttgatgagtaggaggttaatgaaagtatcaccaatgagaccaggaaagaatagccagagttgggagcaaaacccaggaagagggtggccgtagcaggcaaagaaagacaattttatttctcttttcttttctttctttcctatttcctttttctttattattcatttatttttattaggaagacaattttaa

SEQ ID NO: 149654 - DNA, 524 bp, Homo sapiens
agaaaataaaagattatagaatttttcaagtttagacaactggtgggatgaaaatcacattgagacagaagataagagaagaagcagatttggaggccaagataatgaatcatttgggggcacatttaagagcctgtgggacttctggatagggaggcaaggtgcgctattggamatacgagtctagagcttgggagagaagttggtggttttagttttgggagacatcagtgaagagagtttagggaaaccccaagaatggttgagatcacccagggagagtgagtagagtaaggagaaacgttaaggtgaaaactgtggggatatacatgttgatgagtaggaggttaatgaaagtatcaccaatgagaccaggaaagaatagccagagttgggagcaaaacccaggaagagggtggccgtagcaggcaaagaaagacaattttatttctcttttcttttctttctttcctatttcctttttctttattattcatttatttttattaggaagacaattttaa

SEQ ID NO: 149655 - DNA, 524 bp, Homo sapiens
agaaaataaaagattatagaatttttcaagtttagacaactggtgggatgaaaatcacattgagacagaagataagagaagaagcagatttggaggccaagataatgaatcatttgggggcacatttaagagcctgtgggacttctggatagggaggcaaggtgcgctattggaaatacgagtctagagcttgggagagaagttggtggttttagttttgggagacatcagtgaagagagtttagggaaaccccaagaatggttgagatcacccagggagagtgagtagagtaaggagaaacgttaaggtgaaaactgtggggatatacatgttgatgagtaggaggttaatgaaagtatcaccaatgagaccaggaaagaatagccagagttgggrgcaaaacccaggaagagggtggccgtagcaggcaaagaaagacaattttatttctcttttcttttctttctttcctatttcctttttctttattattcatttatttttattaggaagacaattttaa

SEQ ID NO: 149656 - DNA, 474 bp, Homo sapiens
tcttgaaattcattgatatatgagaaactgaggccaccaatgacagaaattgtgtatgttagtaaattgcgtatgttagtaaatacgttagtaaataagggtagctaaggaaaaccaagcctctgggattgtattgaacagtttcatagctgtggttctgtgagtgaatgggacagggctggcttcctgcatgtgggggttggctggtgaatgaggaaaattagcatggctgggttgatttttctctttgaaaagactttgttcccagatgtcatacatattatttagcttgaataaatatgaaatattctggggaaataaatataagtccctgsagtgcagagactctctgttgctaacttcagttcaggtgctttcagttacaagaaaggaggtgacgtttgtctccagtgtgtgtgagtgctcccttggcttttggctaaggtactttgcttcttttgccttttaaaattc

SEQ ID NO: 149657 - DNA, 635 bp, Homo sapiens
tggccctgcttttcagtctattcctacaaacgcccaatcactcctttgactgggacccgaacttttctcctggatactgctcacactggatacttggccgaatcctatgcatttcctgtcattaaccaataacctctggataccactggaactatccatccttggcttttccctgggtctcyccattctgtggagttttgaatgccctccattataccacatgtgggacttgatttaggactatcaacgctgaggaagtcaaaatttgctttgtttgcttcacttcctgcctcccaactggactccttttgcttaggtgtggggttggcttctgcataccatagaaggcagatgccagcttcctttcagggcctcggcaggagcagctcagtgtaatgtgaaatgcaaacctgggattgcccataccttggaggcctgctttgcattcctgtgatgttatgaggttgtgtttcttaatggtcacttcatgtttaggctaaacttttacgaagagctgtgagtgctggcttttgctggtttgagtcttgagtcttggaaatggtatgtggagctaatgattgtaatgatttcagataaaggggagctaccaaggaaagagtaaatctgtgtatctt

SEQ ID NO: 149658 - DNA, 635 bp, Homo sapiens
tggccctgcttttcagtctattcctacaaacgcccaatcactcctttgactgggacccgaacttttctcctggatactgctcacactggatacttggccgaatcctatgcatttcctgtcattaaccaataacctctggataccactggaactatccatccttggcttttccctgggtctccccattctgtggagttttgaatgccctccattataccacatgtgggacttgatttaggactatcaacgctgaggaagtcaaaatttgcyttgtttgcttcacttcctgcctcccaactggactccttttgcttaggtgtggggttggcttctgcataccatagaaggcagatgccagcttcctttcagggcctcggcaggagcagctcagtgtaatgtgaaatgcaaacctgggattgcccataccttggaggcctgctttgcattcctgtgatgttatgaggttgtgtttcttaatggtcacttcatgtttaggctaaacttttacgaagagctgtgagtgctggcttttgctggtttgagtcttgagtcttggaaatggtatgtggagctaatgattgtaatgatttcagataaaggggagctaccaaggaaagagtaaatctgtgtatctt

SEQ ID NO: 149659 - DNA, 635 bp, Homo sapiens
tggccctgcttttcagtctattcctacaaacgcccaatcactcctttgactgggacccgaacttttctcctggatactgctcacactggatacttggccgaatcctatgcatttcctgtcattaaccaataacctctggataccactggaactatccatccttggcttttccctgggtctccccattctgtggagttttgaatgccctccattataccacatgtgggacttgatttaggactatcaacgctgaggaagtcaaaatttgctttgtttgcttcacttcctgcctcccaactggactccttttgcttaggtgtggggttggcttctgcataccatagaaggcagatgccagcttcctttcagggcctcggcaggagcagctcagtgtaatgtgaaatgcaaacctgggattgcccataccttggaggcctgctttgcattcctgtgatgttatgaggttgtgtttcttaatggtcacttcatgtttaggctaaacttttacgaagagctgtgagtgytggcttttgctggtttgagtcttgagtcttggaaatggtatgtggagctaatgattgtaatgatttcagataaaggggagctaccaaggaaagagtaaatctgtgtatctt

SEQ ID NO: 149660 - DNA, 591 bp, Homo sapiens
gaaacctttatttaaaggttcctcacatggtagctgtaaggagtcttttaataattcagtccaagtgtttagaaacaagaataggatatctgccatttctggagcgtgtaaattagacttggctggagagatgtcaggtttatctgtgaaggctttgagatactgtgaaccaatgtctagccaaatggaatgagtcacttaagaagatttgcatattctttctcccaagtgcccaagtctcagtgtctgtcactactatctccttagctgcccatatagaaaattattctcagtattcccctcttatttgatccctatatccaatcgatctttgagtcttactaattccacctcctcaataactccctaatctgcgtacttctctccatcctgactgtcaacacttgcagtcaccaccatggctcacctggacaactgacccagcttctacctcatctaactgatgctttctgcytctggtcctgctttttgtgaaggaaaaaaatctaattatatcactccctggcttaaactcttcagtgacttcctgcagctctcaaaataaggccccaagagtatcatacattgtcc

SEQ ID NO: 149661 - DNA, 424 bp, Homo sapiens
atatttggattatctttagtttcactattgcaaacaatgctcctatgaaatggyatcaaccatttgaatacaggtagcccttgaccaacacaggagtcaggggcaccacccccatcacagtaaaaaatgcaggcataacttttgatttccttaaaacttcactactaatagcctgcggttggccagaagaaaccttaccaatatcgtaaacagtcaattaacttacaaatacactagtatcgacatatattttatgcattcaggacataccttttcttaatttttgcaacatttctaggctacgtggtttgtctgtgagttttttcaaattgttgcaaatctccaaaaaattttccagtatatgtattgaagaaatgtgcatggaagtggacccatgcagtttaagcctatgttgctcaaggat

SEQ ID NO: 149662 - DNA, 485 bp, Homo sapiens
ctatgattgagtttatctcttgtcatgtatgaacatgaaaatcattaggttataagttttctgtgtgctactaagatttcaaatggtgagctaaatagaaatgcatccaagtagaactgggtgtatgccccgactacccaatcagttacttttattattcataatatgcaagaacggtgaatacagccatacttaaccagtatggccatacatatggttaagtattgctgtattcttaaatttaaatatttctttagtagtgggtaaacagccactgcscaagccctccaaaccgtcccctctaccaccttagcttccctggcctcttctctgtgtcccctaaaccttcacatatttcaggaacaaaatgcctcacttcctaagggaggtccatttcttcagctagcatccattctcagtggcctattcctctaccatactgcctgttaaagattttcaatatttcccctgcctaattctcattc

SEQ ID NO: 149663 - DNA, 615 bp, Homo sapiens
tctaacacatcacaagatgtcattagtaagacatgggtgaggacaaacagtcctgcctttttaaaaggaggattcagatacatgattcttagattatttcacaaactgctgacacagttaccacattatttttattgagttctcaataatatttagactttttttcctaaaatgaagtattttatctaatgtgataaattaacttttataaggtattytatactttagattcttttagataagggcaatgaatggttctacatttcgaattatttcagataaggttgctgaatgctttctttataacacaaggcattttaaaacaatctctattattcagacagttttgagatgggtgctgacagcaataacagaaacaaaacgaaatactttcctattcttttgaattagaaactatttctggagtcctgttttctgtgtgaaataaagctatcaatccatcagtctatccatatgtatttttcttttcagcaccagtgtcaggcaatagaaatccaagctttctgttaatgttttctttagtaaaatctttgtctacctgcagtgctaatctttagctttaaattcaagataagatttactttattttgtatt

SEQ ID NO: 149664 - DNA, 585 bp, Homo sapiens
gaatgatttatggctatgcaataaaaatgtacaagtcattactggcaaattatcaggatagcttaacacacttggcaattttaatgaagcctacataattcctgtcttatttatttatattttaataatctgtgcttttatgtaatcattgttgccataataaaacaacatgcatgcagaagtgatggcagttagatacatagaccaagattcagaattgagcattgactttatccagatatttgaagttatctatcacacataacagataagttttgagtaactaattcatcagatgtgtaggaaattttactcctgaaatggrgttaccattgaaatatgctcaggtctctaatgtatgtttcatttatttaattaattcaacacatatttattatgtgactactaagtgtatgctaacactggggaatattattttgaaacattctcgctccttgttgaatttacagtttaatggaggaggataacaaattttagttcaatgttataatgtacataagattcaaaattgcacctctttttgtgtatagaaagggcttaagggtgttagtaatcagtaagatc

SEQ ID NO: 149665 - DNA, 460 bp, Homo sapiens
catttataatgccacttacagctgtgccttaggcccagaggagaacttgggaaaagaaagtattttatttgttaagtgtgaaaaaagcgttttggtgttccttttatattctacatgttcattattcttattacctatgatttctcaatatttgaatgtaaccaacattgtgattttcctataaacaaattatttatttttctttatagttcatcacattttacccaacattaacaatctatcgtgctgttaactracgtgaatgtctctaaatagattcattggtatttgttcttattttaacacattttatttaatataaataatattttttaaacatttccaattatttacagagtttaaggaaaatgattgaagcactgttaaatacctagcagcaacactttgtgttcttcaggttttgtctgggtgtcatatcctggtcaacagccccaaagta

SEQ ID NO: 149666 - DNA, 590 bp, Homo sapiens
ctgtataagttgttccccacactagagtctacaacaagctaaatgcctgcttcttcactcacccatgaatggataagttctgctccagtcatttctatgaattaggactgctgaatcttgcctccttggtggatccaggagagcatgacaacttcgtactaaagtcagacacaattttgacagctgcctctaatacataaacatctgggtaaacttgggcaaattctttaacttgtttatgtccaatttttccttatatgaaaatggaaacaataaaaatatcgacctcaaagcattataatgagaattaaataaaattgaacacaaaaatcagggccgtgtccaatagatatttaaagatttataagcatctctcttaatgagttttgctaaattcttttccagacactcaagtaaaacccatgcaggggaaattcgatctagatgtctctagtattgaatctaatcccctgggatagtactgtatagtctcaattgtragcatctcccttttgggaattacagaaatcttgagactttcctagtatccagtctataactattcccaagagacaaaagtactgaataac

SEQ ID NO: 149667 - DNA, 581 bp, Homo sapiens
gttttacaagacaaacctatctctattttgtctgtgtgagaatactgtgggaaaatgccacagtattagaagacaaaaatctcaatgatgttgctgtttgaggggtaattgtaattagaggaatttagaaaagacattagcctttcaaaagaaagtaaacaatgaaaatattgtacggtaagagaagtcagcattttttgaaacaggtggtaatataaatgaaaatgaagaagtgtatatgttttggaaaaactctcatactgtgttccttatttgmacttgcagcaacagagcagtcaacacagaagacttctgtgataaaatgtgtgtgggtttttccccatcaacaagctgtggatacaggctacatattctccaattcaattctgatactatctacctgagaatagtgtcaaatcacactggtttagagctcagtccccaagacatccccctgctccaaatatcagtcacaagtttcaagtctgggcctctggaattctgatcaaacagcttcaaactggggtttccaccacttctgctttgggtttgattaatatgtggagtagtttacagaactc

SEQ ID NO: 149668 - DNA, 581 bp, Homo sapiens
gttttacaagacaaacctatctctattttgtctgtgtgagaatactgtgggaaaatgccacagtattagaagacaaaaatctcaatgatgttgctgtttgaggggtaattgtaattagaggaatttagaaaagacattagcctttcaaaagaaagtaaacaatgaaaatattgtacggtaagagaagtcagcattttttgaaacaggtggtaatataaatgaaaatgaagaagtgtatatgttttggaaaaactctcatactgtgttccttatttgaacttgcascaacagagcagtcaacacagaagacttctgtgataaaatgtgtgtgggtttttccccatcaacaagctgtggatacaggctacatattctccaattcaattctgatactatctacctgagaatagtgtcaaatcacactggtttagagctcagtccccaagacatccccctgctccaaatatcagtcacaagtttcaagtctgggcctctggaattctgatcaaacagcttcaaactggggtttccaccacttctgctttgggtttgattaatatgtggagtagtttacagaactc

SEQ ID NO: 149669 - DNA, 474 bp, Homo sapiens
tagtgtggacacagaagtctcagaacatcctcgttttggggtcccaaagtgtgaaatcccaatcctcttgagaacaatgattgatgagacatgcaaactactgaaaagtcacactcagttaggtattgtctccctcttaggaccgaagattatcagatttttgaaaaaaaaatagtagaaaagaactctatatacgcaggtatacaagatggatttggtaagggaataacaaaacgttacataaaaattagaaatatataattgaaacaggaggtcaaacatccaactaattggagcttggggaaragaaaataaaaaaaataagagaaaattttcaaagaaataatgtaggaaatgtctcaagctgaatcacacaatactttagattaaaagatctatatagactaaagtaactatttaccatatttgaacattgagaacaacaaggctaaagaaaaggaggagtttgttgtt

SEQ ID NO: 149670 - DNA, 474 bp, Homo sapiens
tagtgtggacacagaagtctcagaacatcctcgttttggggtcccaaagtgtgaaatcccaatcctcttgagaacaatgattgatgagacatgcaaactactgaaaagtcacactcagttaggtattgtctccctcttaggaccgaagattatcagatttttgaaaaaaaaatagtagaaaagaactctatatacgcaggtatacaagatggatttggtaagggaataacaaaacgttacataaaaattagaaatatataattgaaacaggaggtcaaacatccaactaattggagcttggggaagaraaaataaaaaaaataagagaaaattttcaaagaaataatgtaggaaatgtctcaagctgaatcacacaatactttagattaaaagatctatatagactaaagtaactatttaccatatttgaacattgagaacaacaaggctaaagaaaaggaggagtttgttgtt

SEQ ID NO: 149671 - DNA, 555 bp, Homo sapiens
taaatagtacagatataagaaaggaagaaaacacactgctattatttgcaaattatatatctacgcacctaggaaatcaatgacaactaaatggaagtattttaaagtaagaagaaagttgaaatgacctttgttttttaagaccaatataaaaaatgtcattttctgatatcaggacaacagagataaataattataaaatgtaataagtaacggtcaaatttatacactaagaaataaaagagtaaataccttgaatatttgttagttatgtaaacaattataaaaatcaggccaaatcatacgtgaaaaggggaaatactgtatttctgtttcagaagactcaaatatcagactgatatggtttggctgtgtccccaacccartctcatcttgaattgtaactcccacaattcccacgtgttatgggagggatccagtggaaggtaattgaattatggtggctagtctttcccatccaactctcatgatagtgaataagtctcgtgagatctgatggttttaaaagtggaaccgctttctcttggttctctc

SEQ ID NO: 149672 - DNA, 605 bp, Homo sapiens
ccattaaacctctttcttttgtaagttacccagtctgatgtatgtctttatcagcagcatgaaaatggactaatacacagaccaaccccaaatcttattgaaatgtcaaccaaaattttaaatgtgcatactcaacacttataaaactcaacatttgtaagctcaacacttgtaaaactcaaaagaataaaatttgtatacttrcataccaggacattcaagtattgtttgtattaccaaaagattgaaaaataactggaaatgacacaaataacatcaacaagaaaatggcaaagattgattttcaccctttaaatcattggttaatgtattgttggtatgtatgcagtaaatgactaactcagtaactgtttgttgtccctgcctatctcaaagaaaggtatgacacttgttcctcactcctgaaaggaaatctctaaatccctggaatatcctgtttctgaagaatgtctttgttttcatagagactttgggccatgacagaaagggcttggaacacttgacatcagcttgacctaccttggagcttccctggtttggaatatagtctcgcaccacataacaacgttttagtcaaagagact

SEQ ID NO: 149673 - DNA, 490 bp, Homo sapiens
tgctaaaacatacatgcatcatcaatctcaggagtccattcagcaccaggggttttgtagacagtggaaaaccatctcatatgttgccaacctattgactaaaaaacctaatgatcagtactattaaatgttctcttctgagataggttagctgatagttggttcaggctaagaaaagaatttctaagaagttaccrttttagaagtcttctttcaactgtttctaatgcaatagaaaatatatatttacgcacaataaataaggtaaataatagattatcattaaagcctgaaatatagtaacataattaagccttaaagcaatagaaaaagagccaaggaagttatcattcctttataggctgtaattgaatcaagcacacttaatgataacaaaattatatggggttctacatttataacctctttgcctcttttattgccaaggaatgctcaaaggaagagaggaggcagaaggagtttgaactaa

SEQ ID NO: 149674 - DNA, 376 bp, Homo sapiens
atgtccaacaatgccatccatgaggcattcagatactaggaatatcccctcttggttatgtatccatccatcctgtgtttttcaactggggtcaaaaccccaatcgagtgctcttttagatcctcctcwgagtatgtaggtagttcaaggtcaaggattattccaggtgttaatggtgttagtaaagtttgggggatcttttctcttgctgcggtctttgcagccttatctgattattgctttttgccaccaaactgtctgtctgttgatgcccaacgcaatgaactacagccacttctttggagcccatgactgcctctagcagagctaaaatctctttagcatgtttaatttctttgttgccagcagttaaaaa

SEQ ID NO: 149675 - DNA, 520 bp, Homo sapiens
atcatacacagcaatagttttaaaaaataaattatttamttacaacaggtacaaaacccaagcttattcactacacttcaaactgagatttctttattcccaattctctcacccagataagaaactaaattgcaaacatgttgcagctgctgaatgactcagcctggcaagcttcctgtctggaataatgtgctgctctgggaacttctcatcaaacattcaccccaatagcataagtatatactttcaacagttatttatcagatattcattactgaaagtatggatcgtatggaatatagcaggagtctaagatatgttctctgccctcatgacactgaccatcaaattaagaaaagaaggcacgagtaaataaaaataatagaaagaatgctatagatagtataaaaccaaatgccaaataaatgatgtcaaaaattaattccacaatctaagaagggaaaatatcagcataagctggaacattcatgagagatgatggagtttatattaagactgt

SEQ ID NO: 149676 - DNA, 569 bp, Homo sapiens
catgcctgtaatcccagcactttgggatgccgaggtgggtggatcacttgaggccaggagttcggggccagcctggccaacatggcgaaacaccgtctctactaaaaatacaaaaactagcctggcatggtggcacgtgcctgtagtatcagctacttgggaggctgagacaggagaatcactacaacccaggaagcggaggttgaagtgagtcgagattgcaccactgcactccagcctgggtgatagagcaagtctccgcctcaataaatgaataaataaataaagtcttactttgaaataacaaaaattttgatgggatatctgataagatattaaaattrtatgttgatacaagtaaaattcaaatcattattaaaaatgtacttaataaaaatgtcatgtgaagaataatgaaaaacatcaattcataataataaaagcaattcttaacatttaaagaactaagatgagactcaaactcaaaaatactattttatatagttttttaaatcaaagcatttgcaaagcatattattggtacttcaataatctgttagaaaacactc

SEQ ID NO: 149677 - DNA, 569 bp, Homo sapiens
catgcctgtaatcccagcactttgggatgccgaggtgggtggatcacttgaggccaggagttcggggccagcctggccaacatggcgaaacaccgtctctactaaaaatacaaaaactagcctggcatggtggcacgtgcctgtagtatcagctacttgggaggctgagacaggagaatcactacaacccaggaagcggaggttgaagtgagtcgagattgcaccactgcactccagcctgggtgatagagcaagtctccgcctcaataaatgaataaataaataaagtcttactttgaaataacaaaaattttgatgggatatctgataagatattaaaattgtatgttgatacaagtaaaattcaaatcattattaaaaatgtacttaataaaaatgtcatgtgaagaataatgaaaaacatcaattcataataataaaagcaattcttaacatttaaagaactaagatgagactcaaactcaaaaatactattttatatagttttttaaatcaaarcatttgcaaagcatattattggtacttcaataatctgttagaaaacactc

SEQ ID NO: 149678 - DNA, 537 bp, Homo sapiens
gtagcaaatgaacagaggctctgggctgttaatccttaagggaatattctataacctagtgagcgtgggctcactatcatctagttatcttttttaatgcttaactctaaacattaaatggaactctaaaattaaaaaaatgatgaacaaagagatgagtctttgcactgcaagtttcacgtaagtatttcttttttaactgggattcctcaaatactagcctaatgtgactgcatatgattcttggttacttttccaggcaaaattaatgaattttaacactttttataaawcttcaaattctatatttcacttctgtaaaatgaggttttgttttatctgtttcagaagctattgatatgacagtcattttctggaggtcaatcacataggagatacttaaaatttacaaacaggaagttgcaagtgattttttgtacattttaatgatgtattttacttatttattttattttttaataacttcaacttttattttagatatgggggcatatgtgcaggtttgttacatgagca

SEQ ID NO: 149679 - DNA, 537 bp, Homo sapiens
gtagcaaatgaacagaggctctgggctgttaatccttaagggaatattctataacctagtgagcgtgggctcactatcatctagttatcttttttaatgcttaactctaaacattaaatggaactctaaaattaaaaaaatgatgaacaaagagatgagtctttgcactgcaagtttcacgtaagtatttcttttttaactgggattcctcaaatactagcctaatgtgactgcatatgattcttggttacttttccaggcaaaattaatgaattttaacactttttataaatcttcaaattctatatttcacttctgtaaaatgaggttwtgttttatctgtttcagaagctattgatatgacagtcattttctggaggtcaatcacataggagatacttaaaatttacaaacaggaagttgcaagtgattttttgtacattttaatgatgtattttacttatttattttattttttaataacttcaacttttattttagatatgggggcatatgtgcaggtttgttacatgagca

SEQ ID NO: 149680 - DNA, 624 bp, Homo sapiens
acttcaacttttattttagatatgggggcatatgtgcaggtttgttacatgagcatattgtgtcatgctgaagtttgggatactatcatccagagagttagcatgttacccaatagttagttttccaacccttgacctcctccctccccgctctagcaataaccagtgtctatcgytgtcatctttatgtccatgagtacccaatgtttagctcccacttcttataagtgagaacatgcattatttgattttctgttactgcgttgatttgcttaggataatggcttccagctgcaaccatgttgctgcagagcgcaagattttgttctcttttaaggcttcctaacatcccatagtgtagatgaatcgaattttctttatccaatctgtcattgatgggcatctaaattaattccatgtctttgctatcgtgaatagtgctgcaatgaacatatgcatgcatgtgtctttttggtaaaacgattcattttcctttgagatatataaccagtaatgcgattgctgggttgcatggtaggtctgttttaagttctttgagaaatttccagactgctttccacagtggctgaactaacttacattcccagcaacagtgtgtaagta

SEQ ID NO: 149681 - DNA, 624 bp, Homo sapiens
acttcaacttttattttagatatgggggcatatgtgcaggtttgttacatgagcatattgtgtcatgctgaagtttgggatactatcatccagagagttagcatgttacccaatagttagttttccaacccttgacctcctccctccccgctctagcaataaccagtgtctatcgttgtcatctttatgtccatgagtacccaatgtttagctcccacttcttataagtgagaacatgcattatttgattttctgttactgcgttgatttgcttaggataatggcttccagctgcawccatgttgctgcagagcgcaagattttgttctcttttaaggcttcctaacatcccatagtgtagatgaatcgaattttctttatccaatctgtcattgatgggcatctaaattaattccatgtctttgctatcgtgaatagtgctgcaatgaacatatgcatgcatgtgtctttttggtaaaacgattcattttcctttgagatatataaccagtaatgcgattgctgggttgcatggtaggtctgttttaagttctttgagaaatttccagactgctttccacagtggctgaactaacttacattcccagcaacagtgtgtaagta

SEQ ID NO: 149682 - DNA, 632 bp, Homo sapiens
ggattcagaagattactgataaaacaccatggaagaaaataataattgtacaaacgaaagtgggaaacaagaaaaagaaataccacactctgcctaatatgagccctacatgakccaggtaaaaaaaaatggtaaacaaataaactctaaaaaaaattcaaaaaaaaatttataattatcagtgaggctatttaaaatatgggtttatgcccactgtttataaaaataagtttcatcttaaacacatgttgtaatttaaaatactggtcaatgatagtatcagatcattgcaagtaacaagtcattttaaaaactaaaaatctggaacacaaagacaaataccaaaagttgatgggtggatttttaaatatgaacatcataattcactaaccaatagccaatgacacatttcttaaatttgaatctataatagttgtaaaggcaagtattaatgtgatataaatttagaatcttttaattgctgcaacataatctatttaagaaaaatattaaaaaatattaaaaataataaaccacttaaacattaattactagaaatatcataaaaattttaagtgggagcaaaaataaatgtacttctttgataaatataataattagtccttaaaata

SEQ ID NO: 149683 - DNA, 456 bp, Homo sapiens
ggaagtaactagtttcacaaacaaataattccgaaactactctcttacattcacggatctaggtcacatttcattagagctaaatatatcatgtgtattagcttggataaactatgcacattaccttcttcaaatagaattagtaactttctgtttaccaagtaattttacaaattctcatccaacttgcaaattgaatatatcaagcattcaggatatcctggtggtttctgagatttttaaaacaatttacaacaagacacacataagaattatttgtaagaaaattattttaccttcctttcttgaaattataggtataatttatttttaggttaatcaattcctttctaaaacaaagataaaactctggtaattcaaaccaaawatttcctcactgaaaactatgcttgttaatgaagtataagcggctacatgatcagcagctttacctgt

SEQ ID NO: 149684 - DNA, 618 bp, Homo sapiens
atggataaaacacttcttttgtaatttttattgcttttatttttattttagcttaaagttcaaattccctaaataggccctctatggtcttagttcttctgaccccatccacctccaactccaactcttagacaatgttggtatgtccaagaaaaaaaaattcattttctcaaatacaatgcttttctccttggtagtaaactcttgcacagattgtactcatctgattaaaayagttttcccctctgtctttacatttccattttcttttcacccttaagacctcacttaataaatgacttcttcccagaggctttccctaacttcttaactgcgtgaagtgccactgctctctaccccatacaacactccactgcccataacatgcacttaccaccatgtgttgggacaatctggctcttctctcattccctttcttgcccatgaactccatgagagcataatacatgtataagtacactcccaagtatgtggacaatgtttagtcactatttgttgagtgaatgaagcatgaataaatgtgaatgttgcaatagatttgatttccaaaagtggaaaatctcctagaataaatatactgctcagttgaggccaaaa

SEQ ID NO: 149685 - DNA, 572 bp, Homo sapiens
taaaacctaaataggccttgttccatgttttcactaacctcataataagaaaaatctaggagaagactcttcatagtaacgaaaagctagggaaagcctcttataactcccagtgagacaatgggctttcctagaaagtcatattttaatgttcctaccaatttaatttgttttaactttaaaaatataaatgttaagtgtggtgcccaggtaacagctgacctttgaaagacacaagctagaattcaatttttgccaggggagttttgcctagtcaagttgaacagatattttatattttaccytaaaatttaagaatctcaggcccagtgaattttttttccattatgtaaattgttcccaagctttccatatgattccctttcaagggaaaattttctagttttgtgtggttcatgtttttttccacccctgaaattccaagatcacttaactgtgattaaataacagctcacttttcttttactttgccatagcttaaaagctcttgctctagtggcccctgaatgcaaaacaagcattgcctggccacaggcatgcttggccatggc

SEQ ID NO: 149686 - DNA, 451 bp, Homo sapiens
tataaagtgaatttatctggttttgttcagagaccatagctcaaaaatcaggcaccatgtgtggttctcattccccacttgtaaatgttgaaaccccattaaagaaactaccagagcattgtcataaatatctcaaatagaagtttgcaagaaaacactgctgttaaataacaataagccttgaaacttacactgtgatgaagccctaaggttgataattcaaaccaagacatttctcttttatgtgatttgctaggatattttcttgctttattttcttgaagccatatgactagttaaaaatccatrcatttggtatctaggaactaactaaatttaaaaccacagaaccaatctttcttaatgtgtgtttccaactatttcacaatttgtgaacattggctttaaattggcctgtacatctgagctggttgtggtcattagagaattc

SEQ ID NO: 149687 - DNA, 555 bp, Homo sapiens
ggagctaaatgttgtaacacctctacattatttggtaggtgatataagtactaatttatgttagacttgatacatcaaaaatgcgtttagcaaagtctagagtaaacactaaaataatagcttaaaaaacataactacyaaattaatgaagtagaaaaaatgaaatagaacaaagaaacaaaaaactaatccaaaagacagcaaacaaaaagaggaagcaaagaatcatagaatagtcaagaaaataagaagtaaatagtgaggggaaaatcttaatcctaaatatatttgacaacactacattgcatgtgaatagaaaaaacaccccaagtaaaggtttgagtgttagataatattaaaaagttaaaaagacaaactatattttgactctaaaagccacactttaaatgcaaacagagaaattgatagtaagcacacacacaaaagactatgccaaaaataaaaaataacactagccccaggaaaggtctatttatattggtattagacaaaaagacttgaaggtaaattttttaatgtacagagaggtatttt

SEQ ID NO: 149688 - DNA, 532 bp, Homo sapiens
taaaagcaagaggaaagttgggaggattcagtatcattaaccaaaggtagttataagttctagagaaaatggcatggtagaaataaatccatacttcactagagcatatctgaaagactttcctactttagtcattacagttataaataaaataatcaatattaaaatttctagaggattttcactaactgaagcactgcartaactatagatattaaaagacattacattgtattaaattcaatagcttatagtctagtttcatttagatgaacaaatattctactcagcataatatttaatataaactccatactttgtgattagcatttgaatttgtaaagttaccagtatataagaggtttgtcctaaaaataaggagatctctttttacaaatacatcatccaaataaacactgcccttcatttcattacataggtaggtcatgtattgctccattgatgctgcccttattcatgatgattaaagcctttgggaggtattccttcagaataatgtaagtactacaga

SEQ ID NO: 149689 - DNA, 630 bp, Homo sapiens
tactcttaacttggagtgtagcctgcattcaagctctacaatcatttggaaacgtgagattcatagactattgcggatggaagggcctttaaaaatcrtctaggcctaccatcaatctgaacagctctcagaagcttgaacaatcccactgatgtggaactcacttctccctgaggcaacctattctatctttggaccaagtttgtgctctgggaagaatgaaagtaacagctgtgcttgagctgcattgctatgctggtctgacacacaaactctcctctcccatgctttcctagcatagactaggctacagggagaagttgagagcattttagaaagaaaatggaaagtttcctatttagattgttttgacagatagaagcccaaaatcttcaaaacaattacagtgtcaataaaactttcatatcataaacaatcacttattaatattaactaaattatttcccaaaatcaatataaaagattatgataaacactaactgtgattacccgtattttagttgtctcatgtatccgtgtgaagagaccatcaaacaggctttgtgtgagcaacaagtctgtttatttcatctgggtgcaggtgggctgaatccgaaaaaggagtcagca

SEQ ID NO: 149690 - DNA, 594 bp, Homo sapiens
ttaatataattcctgaacgcatccctctatgtgaaaatggtcaaagtgagcccatcaaatcccagcttgtcattcatcccaactttcattaatcttgaaaatcatatctaaacccctactcccaaaatgctaccaaatgcagtactgaagtgacatattcagtttgctcagctatcagggcaacactacttttcatctaaatcagctaagaatttctttatttaggaatttcttactgctttgtgcgaggtagctgggttattgacaagaaaaagaaaaagtagcccctaacgaaagagagcagaaaagggaagccttgatgaattccaaaaagcatggcttatgtctaagagttccttctttcctttctggttcctttctggtttacccagagaaagaagcctcatttaaaaagtttatgttttcytacaaaatttaaagcactctgggaaactaagctttgtgtttctaacccagagaaaatagaaggaagaaaaatacagaggaaaattaggctatagtgctggctttcttactctggtttttcttcagattatattatttctatattatgatcacatgttttatgaagcc

SEQ ID NO: 149691 - DNA, 583 bp, Homo sapiens
gggcgtggtggctcacgcctgtaatcacagcactttgggaggccaagggaggcggatcacctgaggtcaggagaccagcctggccaacatggcaaaaccccatctctactaaaaatacaagaattagccaggcatgatggctcatacctgtagtcccagctacccaggaggcttaggcaggagagtcacttgagcctgggaggtgaagttcacagtgagccaagatcgttccatggcactccagccttgaggaaaagagtgagacttcatcacaaaaagaaataataaataaaagtgtgtagtaactcccccttctccctcttccttcttcttcagcaatgtaaggtgtacctgcttcccctttgccrtctgttatgatcataaatttcttgagggcttcccagccatgtttactgtacagcctgtggaacagtgagccagttaaaccttttctttttttatagcaatatgagaatggagtaatatggaaaattggtagcagaagtatctttatattgctataaggataccgaaaatttggaagcagctttggaactgggtaaacaggcagaggttggaacag

SEQ ID NO: 149692 - DNA, 583 bp, Homo sapiens
gggcgtggtggctcacgcctgtaatcacagcactttgggaggccaagggaggcggatcacctgaggtcaggagaccagcctggccaacatggcaaaaccccatctctactaaaaatacaagaattagccaggcatgatggctcatacctgtagtcccagctacccaggaggcttaggcaggagagtcacttgagcctgggaggtgaagttcacagtgagccaagatcgttccatggcactccagccttgaggaaaagagtgagacttcatcacaaaaagaaataataaataaaagtgtgtagtaactcccccttctccctcttccttcttcttcagcaatgtaaggtgtacctgcttcccctttgccatctgttatgatcataaatttcttgagggcttcccagccatgtttactgtacagcctgtggaacartgagccagttaaaccttttctttttttatagcaatatgagaatggagtaatatggaaaattggtagcagaagtatctttatattgctataaggataccgaaaatttggaagcagctttggaactgggtaaacaggcagaggttggaacag

SEQ ID NO: 149693 - DNA, 587 bp, Homo sapiens
tcataaaactcaatacatgagttttcaataagcccaagagaagatacttagcatcattagtcatcaaggaaatgcaaattaagaccaaaatgagataccactacatgtctattagaatggttaaagtcaaaaaractgtcagtgccaaatactggtgagaatatgaagcaactggaactctcatcagtttctggtgggaattcaaaatgataaaaccactttggaaaacaatatggcactatcttataaagctaaacatatatttagtgtatgacctagcaatactacttgtaggttcctacgtaagggacattaaggcatacattctcacaatgatttgaacacaaatcctcattgtagcattattcattatatctagaacaggaaacaagtcaaattcatcaattggggaatatacaaaggcacagtggcatattactcaaaggaacactataatatggctgaatccaaaagcatcatgctaagttaaaaaggaaaacgttatgctcttacctactgtatgaatccatctatgtgagatccaagaaactgcaaaattgtagtgagctaaagcagaccaatctgtt

SEQ ID NO: 149694 - DNA, 587 bp, Homo sapiens
tcataaaactcaatacatgagttttcaataagcccaagagaagatacttagcatcattagtcatcaaggaaatgcaaattaagaccaaaatgagataccactacatgtctattagaatggttaaagtcaaaaagmctgtcagtgccaaatactggtgagaatatgaagcaactggaactctcatcagtttctggtgggaattcaaaatgataaaaccactttggaaaacaatatggcactatcttataaagctaaacatatatttagtgtatgacctagcaatactacttgtaggttcctacgtaagggacattaaggcatacattctcacaatgatttgaacacaaatcctcattgtagcattattcattatatctagaacaggaaacaagtcaaattcatcaattggggaatatacaaaggcacagtggcatattactcaaaggaacactataatatggctgaatccaaaagcatcatgctaagttaaaaaggaaaacgttatgctcttacctactgtatgaatccatctatgtgagatccaagaaactgcaaaattgtagtgagctaaagcagaccaatctgtt

SEQ ID NO: 149695 - DNA, 587 bp, Homo sapiens
tcataaaactcaatacatgagttttcaataagcccaagagaagatacttagcatcattagtcatcaaggaaatgcaaattaagaccaaaatgagataccactacatgtctattagaatggttaaagtcaaaaagactgtcagtgccaaatactggtgagaatatgaagcaactggaactctcatcagtttctggtgggaattcaaaatgataaaaccactttggaaaacaatatggcactatcttataaagctaaacatatatttagtgtatgacctagcaatactacttgtaggttcctacgtaagggacattaaggcatacattctcacaatgatttgaacacaaatcctcattgtagcattattcattatatctagaacaggaaacaagtcaaattcatcaattggggaatatacaaaggcacagtggcatattactcaaaggaacactataatatggctgaatccaaaagcatcatgctaagttaaaaaggaaaacgttatgctcttacctactgtatgaatccatctatgtgagatccaagaaactgcaaaatygtagtgagctaaagcagaccaatctgtt

SEQ ID NO: 149696 - DNA, 504 bp, Homo sapiens
aaacaccaacctcaataggggactcaggagaaaagacgagagaggaatcgaaggaagaaagcaattgatgttaccatgtgggaaaaataaatttatttcaaaacaaaacgttgaaattgtgaaaattgttcatgtagtcatttccttgagcaagttattaatttttaaaaaagatgccagcaatgtactgtcaattgatcatagttaatgtggagctgtgtgattcaacctgccttttactatagggagagtgtcttgtgcttaacagcatccaagctgtcaaagccaatgcaagtaatctccgaatcatagatttcaatatatttttaatttagaaaactaatagattgatttatctgtttttcaacaacttgagaaatatgagcattcatttcctgaagaaaactaatgttcatattcttcaaatttatttcartaatattaccactgtctcaatcataaaacatacaactccaccaaaaatttttcactatttaaagtaac

SEQ ID NO: 149697 - DNA, 635 bp, Homo sapiens
tataattatcctaccaaatataaaagaatttaaaaaccatgtaacataaagttaaaaagttatacatgatgtttatttaaatgaatcaatatctgtcactgttagaacctaagagagatttgggacacataacacaaagatctgaattagcagtaaaacttattacctaaaaaaaatgataatttgtcccatcytttgtgagtcaagggtcaggagagccacaaatagcattatcataactgacaaactaaaattatctgtaactttcttacctgtttcaatgaaaaaaaaaagtttgactttatattaaaatgttaacataaaaagagactcgaaattataaactgaaaacactattaagtcaatcgtatattgcataattaaatgattctacctgtaaattgtgatctacttttataagtaaaattaaaaggtaccattatttgacagccgttaacttctttttcttgttaaatcatatgttgttatttcagtagattattcactgtgaaaccaaattgtttagatagataacttgtcaccattttttggtttttagttatttattcataagttcaggcattcatccattcatataacaaattcttattgagggagtcaccacatgtcaaaca

SEQ ID NO: 149698 - DNA, 245 bp, Homo sapiens
tctcttgtagtcaaatcctccctctacttttctggctctaactaatatgttttcctctctctaactgcctttctcaaaatgtcatataaatggaatcatgcagtatgtagccttttcagtctggctttttttcacttagaaatatgcatttgagattcacctgtgctgttgcatgtactggtagtttgtttcttttcattgctaaatagtattccattrtatggatgtaccacagtttgtttacc

SEQ ID NO: 149699 - DNA, 584 bp, Homo sapiens
gtcaactccaatcacctgcctggtggtatctaygaagagtgctttttggaggaattagtagtggtaagtttaatattagcagaaaagcgtattgtgatttgttaatcatgtctgcataggcctaatagggagatacaggtgcttttcatgtagttacctgacctgatttcaaagggaaaaatcagaaagcccagagaaataataggatgttggagagtgtgagaaaaggagccaaaggtcactgtcagatttctaatttgagctgctgcatagattttactgagtcttactaatatgagaagggaagaaggttttgcacggtatatgtgtctgtgaacatttgtgcacatatctatgtatttgggggcaaagttccatttttcattacagcgaggtggaattccctacaggacattcaggtagagatgtaaatccctacaggacattcaggtagagatgtaaatcagagagttagctatgtaaattattctgaagctaagagagagttagagaatcatagttaagagtgattagcctattggcactcggtttaaaaaatcaggaaatctaggagaaaatcaaac

SEQ ID NO: 149700 - DNA, 389 bp, Homo sapiens
cttaactctattcactttttttgtgttttcttaggataaagaaaatatttagaagatgagattcctgtgtttctggctttcatgtaagaattttatctgaaaaaagaagcatagacatgtagaaattttatatttttatagataaactcattggattatctgtttttcatcttggaacacactatcaacattttctttagaagatatrcaggacaggtggctttcagtgggaagaaagtgtcctaactaaaaacctcaaggaagatagggcatgtggaaataaagaccatccaaatgagaacaaacataagctatgtattcagagcttgctacagcaagggcatccatgccaccacttcaacttgtcagaggctgaaaggcagacaaag

SEQ ID NO: 149701 - DNA, 509 bp, Homo sapiens
gaggctatactctaaaggtacctgccattacacgttaatgtttaagaagggatgctaacagaacctaatacaaaatatgtatctactacacaaggattgattgttctttgatcacttcagatgttacctttgtctctttctttctttctttcttctttctttcctttttttttcagggtctcactctgtcacctaggctggagggcagtagcatgaacatggctcaacacagcctcaaccttctgggttcaagcaatccmcctgcctcagcctcttaagtaggtaggactacaggcctgtgctaccacattcagctaattaaaaaaaatttttttttacagacagggttccactatattgcccaggctggtctcaaactcctgggctcaagtgatctgcctgccttggcctcccaaagtgctgggattacagacatgagccactgcgcccggccaactttgttttgttaagtgaatcttaggctgttcaggtgatattgaagtaacctc

SEQ ID NO: 149702 - DNA, 510 bp, Homo sapiens
attacacgttaatgtttaagaagggatgctaacagaacctaatacaaaatatgtatctactacacaaggattgattgttctttgatcacttcagatgttacctttgtctctttctttctttctttcttctttctttcctttttttttcagggtctcactctgtcacctaggctggagggcagtagcatgaacatggctcaacacagcctcaaccttctgggttcaagcaatccccctgcctcagcctcttaagtaggtaggactacaggcctgtgctaccacattcagctaattaaaaaaaatttttttttacagacagggtyccactatattgcccaggctggtctcaaactcctgggctcaagtgatctgcctgccttggcctcccaaagtgctgggattacagacatgagccactgcgcccggccaactttgttttgttaagtgaatcttaggctgttcaggtgatattgaagtaacctctgttatcccattgataaatgaggttga

SEQ ID NO: 149703 - DNA, 528 bp, Homo sapiens
attagcttaatagtagtacatagctcatagtgttgcagtaaagatgacatacgacaatataggtgagcattaagcattgtgtctgttatataatatattttcaattacttatttacatgggttttggttaaatttcatgatacaattgccactaatattagttaaaatgatactgtatgtacatctcactctgtatatacttacaatgtatgcataacagacctacatacacactcaacaacacaagtacagagacctgatgtggagcagtattggaatggaaggcttttcacttcccatyttagtccattttgtgttgctataacagaataccatgaactgggtaatttataataaacagaaatttactggctcccagttctggaggctgagcaatccaagattccctagggagctgcatctggtagggccttcttgctgaatcataggatggcagaaggggaaattgagagagcaagaaagagagaaagtgggcacgggagacaaaacacatatgctagagggggc

SEQ ID NO: 149704 - DNA, 570 bp, Homo sapiens
ggatatttctttaacatctagtaatagagcatccactcaaaaggatcattcaagcaattcctccttttctaactattctcaagaaaggcattacatgtatttttgtaatatgtgtgtatatcttttggggaaagaaccaaagcycttgttcatatttatgttttatctttcattgattttaatatatattaaaagcagtcccaagtacaggcctctgttccccgtaaaatattcatgccagtttagctgagctctgagatctgcccttcgtaaaacttgggctgcttccccggaaagcctattagagtagagctgtgcatcactgcctatgatttccgcagttcttctgtgatggagactgcctgcctgtaattcctgctgcttgaacagagtcacattctatctcacatgaggccgctctcctcccatctttggaataggagtagatacctgattcaagagcagttgcttcacaggcagtcaataaacataagcctggctcgaaaaagttgagatggaccaatcagagtcctttctcaggaatttgcttgttagacaaaggatctgagg

SEQ ID NO: 149705 - DNA, 634 bp, Homo sapiens
gaatgttggagctaagtagctcacggtttgtgtgatgtgattacccaccatgttttgcatgtcactgccaagatactgtttttacttcatacctggcaaatgtgatcattgccaagacaattctatccttttttcagatacaaaaaaagtgtttaggagctcttttgggattttctagatttccctaccatctaacctacttggatgccattcatattcttttctctagctattataaatttcatatctgtaccatgcaaagtcatcagagaattgtatattttgatcagaaatgtttggcttcaatgaactaggctttctctgttatatttccttattatactctcaaacctgatatgagaaattatgtatgaaaaagtcagacaaaatgttttatattgtaaaattacaacatacattatatctcacartgttcacaggatttgtgcttccccttaagttttgctttgccttcaggctttggaatcttgtgtgtgtgtgtgtgtgtgtgtgtgtgtgtgtgtgtgtgtgtgtgtgttaatttaatttagttaccaggaatattaacctgctgtcttcttccacaattctatagtgtcacacaacctgtgtttccatctgatattcttaccgc

SEQ ID NO: 149706 - DNA, 587 bp, Homo sapiens
tgcagaaaatttattcaaaaaaataatgggaggggtatggacatctaaagccatgaagcttagagattccaaaacaggattaacctgaagaagattatatatagacacattctaattaacttatcaagaattaaagacagataattttgaaacaagcaagtaaaacaccacataaaagggcattttcatgagtctatcgcagatttctctcagcagagaccttacaggctaagagagaatggaatgatatatacaaagttttaaaagaaaaacagcttccaaacaagagtactactcccagcaaagctctgggagagatatggatcttctcagacaaataaaagctgaaagagattgtcaccattagccctgccttacacaaaatgttaaaagatgttcttcatattgaaatgaaatgatgctarttattttatgctattaattggtaacatgaaaacatacgaaaatataaaactcattgatacaggtaaacatatagtcaaattaaaaatactctaatacagtaataatggggcatatattatttaaactttagtataaaaattaaaagataaaattatttcaag

SEQ ID NO: 149707 - DNA, 588 bp, Homo sapiens
ttgcagaaaatttattcaaaaaaataatgggaggggtatggacatctaaagccatgaagcttagagattccaaaacaggattaacctgaagaagattatatatagacacattctaattaacttatcaagaattaaagacagataattttgaaacaagcaagtaaaacaccacataaaagggcattttcatgagtctatcgcagatttctctcagcagagaccttacaggctaagagagaatggaatgatatatacaaagttttaaaagaaaaacagcttccaaacaagagtactactcccagcaaagctctgggagagatatggatcttctcagacaaataaaagctgaaagagattgtcaccattagccctgccttacacaaaatgttaaaagatgttcttcatattgaaatgaaatgatgctaattattttatgctattaattggtaacatgaaaacataygaaaatataaaactcattgatacaggtaaacatatagtcaaattaaaaatactctaatacagtaataatggggcatatattatttaaactttagtataaaaattaaaagataaaattatttcaag

SEQ ID NO: 149708 - DNA, 285 bp, Homo sapiens
gaattctagattctaaaaaaagggatcgagcctctgggatccttgctaaaacttttctgatgggtggatatacarcctctacttgacacttctctcaactgctcaccaacctaattactttcctctggacaaattccagtttgtcccactgtgattttttttcaatattgatttcactcatcagaatttggaaaattaatacaagataatatttgcattgggtatcattgttttcagtacaacaataatgacatctcaattctgctactttctatatgtgtgaca

SEQ ID NO: 149709 - DNA, 434 bp, Homo sapiens
agatctaacttgtacatgtaatttttcctcatactcacattgcacattttatttcttgaattgtcaaatttttaaaaatcaggtcttttcgggtcattaagctcccagcaaagcatttatggtctatttattctttctcttgcctggaaagaatatrcctacacagaagacaataactaaagaaaagatgatcagcagatcagagaatcagcagagtattgagtcactaaaccaatgttaagttttaacaaggccaaggaagacaaatgtctccctaagttttcttcttgcagttattgcaacatgtgtaactcctttgtgcctcaagatcctttttttctgttccttttcagggatgcagttttcaaaaatcacatggcagtttatttcttatttttcagttttcagctcaaatacaatcccctcagaaatga

SEQ ID NO: 149710 - DNA, 434 bp, Homo sapiens
agatctaacttgtacatgtaatttttcctcatactcacattgcacattttatttcttgaattgtcaaatttttaaaaatcaggtcttttcgggtcattaagctcccagcaaagcatttatggtctatttattctttctcttgcctggaaagaatatacctacacagaagacaataactaaagaaaagatgatcagmagatcagagaatcagcagagtattgagtcactaaaccaatgttaagttttaacaaggccaaggaagacaaatgtctccctaagttttcttcttgcagttattgcaacatgtgtaactcctttgtgcctcaagatcctttttttctgttccttttcagggatgcagttttcaaaaatcacatggcagtttatttcttatttttcagttttcagctcaaatacaatcccctcagaaatga

SEQ ID NO: 149711 - DNA, 646 bp, Homo sapiens
aagtagcctgtggtttttacttgctagttgtatttaagtcttttacagaaaaataaattgtcaagtttggtacactctacaactagttacttaatgcagtattcatgggatccataaataaggtttgatttgtgtttttttttcctaggaattatttttctgttctgctagtgaagtatttggaggttcattcctagcctaagacattcatctcaattattttaattggctccctgcagatagcccttaatatgtgatatcattcacttacaaagtrgttgccacagatatctgccagtgctcaacctggtggcaaagatgtgtaaaaaccatttcaaatgatgtctttagacatgcagagaatatcactataacataatgtttagtactacaatttttcttcattcactgtctctacttatctagtctcctatgtcagcagcattgtcactgctaaatcttttggaacatatagtggtaaattagtttggctgttaagttaggtgggaaaataaaaggtatacatttactaattttttccttgggatttctgattagatactatggcttactggtcctgtattattattgttgtaattacaatatctagtacttttctttgggcaagtgtattagtccattcttg

SEQ ID NO: 149712 - DNA, 564 bp, Homo sapiens
agtgttgacaggagtgagttttaatgcaaagccccacaattgctgtgcttttcttcttccaagcacatagattctctctccccacccctgaggccactgccagggaataggagatgggtggcatcggaaawtcaagactgtctttactactctcttcagtgtctctttcagcgatatgaagttaaaaaaccaagtactgtgatcactcacctgagttttggtttttagaaggtgcttttttgtgtcaatagttgttaaatttggtgttcctgaagggaggatgattgatgaaggcttccatttggccatcttgcttcacctcccactcctaaatagaatgtgattttcaaaaattgtgcacaaaattatattttataacatatgaggacacaaaaatgccactaaattgagatgtatctaaggtatttctctatcataatatattttcaatatgggaaaggaatccacctcaaagaatgaatatgcaaactaatttttgttaagctgagtcatagttaaattattttatgcaaattaaagacaacagtcgtttggaattttgag

SEQ ID NO: 149713 - DNA, 329 bp, Homo sapiens
tggctcaaacgggaagtgttttattaagaaaatctccatggttcttttgtagttaaacctgtaaggtcttagctaactgtggaactatattttgtactagtctttttaagcattcacrggtaaggagaacaaaaatatttgagaatgggaaaggtagctctgaacaaatagtaaaaccactcatctccccaaaataccgtatttagcaaaattttcttaaaatgggttctgttcagtgctacacaaagatatttccttcccttccttactctttcctgactcagtaagtgcagaagctctttcttgactcagtaagtgcagaagctcaa

SEQ ID NO: 149714 - DNA, 329 bp, Homo sapiens
tggctcaaacgggaagtgttttattaagaaaatctccatggttcttttgtagttaaacctgtaaggtcttagctaactgtggaactatattttgtactagtctttttaagcattcacgggtaaggagaacaaaaatatttgagaatgggaaaggtagctctgaacaaatagtaaaaccactcatctccccaaaataccgtatttagcaaaattttcttaaaatgggttctgttcagtgctacacaaagatrtttccttcccttccttactctttcctgactcagtaagtgcagaagctctttcttgactcagtaagtgcagaagctcaa

SEQ ID NO: 149715 - DNA, 488 bp, Homo sapiens
gaaccgttaccgctctaggcttgtatattagtgtcctattgcctctgtaacaaattaccccaaactttgtggcttaaataacacacatttctcatcaaacagctctggaagtcagaagtctgaaaccagtttcactgtgctaaagtcaaggtatccacaggatggagttccttctggaagctctagtgggagaagctgtgccctttccttttctggcttccggaggctgtcctcattcctcacttcatgtcttcacatcatatcactttttctcacctgattccagtctgtttttgactgtcttttctccctcttagaaagactcttgtgattatatttagcacccaggcaaataatccaggataatctcatcccaacatctttaacttaaackcatctacaaagttccttttttcatataaggtaacattcacaggttctgaggattaggacaaggatatctttagggactactattcagcctacca

SEQ ID NO: 149716 - DNA, 594 bp, Homo sapiens
ttaaatttctgccatttcaactttacactacccaacactgattaaacccattatgttatttaaccacctctatcctcaaaccacaatatatatttaaaccatgctttaaaagagtccctattctaaagaaacttcaactggttaccttcttcagctgcatcatcccatcttttttctttagataataaatatttcccaaccgcttccagactgacttcttatttcaacattcttaaaccagctcctttaaggtgtttaaggaccttcttatcacccaaactgcctttcctttgtatattatcataagttggcactttctgaataattctttgcyctcttctactttgatgtctctattctgcattctcctgcttccttctccctgttccatgaaggcagtttttgtacctatattccttatcctcttctgcaatcactccggtttgttaatctcatctataatcatagcttcataactgtctctctacaaatggttcccaaatatatatccctggcttagcctctcttgaatttcccaatttctaatgcctatcttttctaggggctttaccggtaatgaaaatgagcatacat

SEQ ID NO: 149717 - DNA, 613 bp, Homo sapiens
tattattgtataaatctctgaaactcagtactactgacagctgaattattgtggcaagagtttaaagactttatgaactgaaaacattgaactttacctgagctctgtgctcccagaaaatagaaaagaatgaaaagccctctcaccactattttgtttctcaagctccctctcaagctgtgtrttccaactgcaaagaacccttccacatttgactcaaataagactcaaatgtccattcttcctcatgactctcaaaaggctacaggtgactcctatgtttacctgcttattaaaatatatatatatataaaatctggcattttttaaaacagtaaagaagactttattcacgactattgcagtaggggttaacttcactgcaatagaggagagagatgaggctcaagcccaaatacaagaaaaagtgaggatttgcaaccaaagagcagagtgaggaggttaatgaatgtaaaatatttaaaaggagaaatcacaggtagaaggattcttgctaaactggcctaacatgattctccctttaaaacaggtcaagaacttatacatcaaaggtaaggatgaagaatttgatcagatagcaagggtggagggt

SEQ ID NO: 149718 - DNA, 613 bp, Homo sapiens
tattattgtataaatctctgaaactcagtactactgacagctgaattattgtggcaagagtttaaagactttatgaactgaaaacattgaactttacctgagctctgtgctcccagaaaatagaaaagaatgaaaagccctctcaccactattttgtttctcaagctccctctcaagctgtgtgttccaactgcaaagaacccttccacatttgactcaaataagactcaaatgtccattcttcctcatgactctcaaaaggctacaggtgactcctatgtttacctgcttattaaaatatatatatatataaaatctggcattttttaaaacagtaaagaagactttattcacgactattgcagtaggggttaacttcactgcaatagaggagagagatgaggctcaagcccaartacaagaaaaagtgaggatttgcaaccaaagagcagagtgaggaggttaatgaatgtaaaatatttaaaaggagaaatcacaggtagaaggattcttgctaaactggcctaacatgattctccctttaaaacaggtcaagaacttatacatcaaaggtaaggatgaagaatttgatcagatagcaagggtggagggt

SEQ ID NO: 149719 - DNA, 565 bp, Homo sapiens
aacgtgtcctcctccccaccccatttggtagaatgaaaccttaagtatgagattttttttttaaatctttaaaatcttaaataatttaaagatgaattaaaatagtgttataagtgggaaattctagaaagataattacctcagaacaattttttgaggaaagcttaacccattgaatagaactaggctggttggtagaataatgtcttcttagtgtcaatgatcatttaaaatatagttttgaattgataaaaataggcactgtttatagacaatcatttgcaacagaatatttttataaaaaatrtttttctattagggagaaggttttaattagtttttaatctcaaactctaatacatctagacttttgaaaatttaagatttaataaacaagagatttaatttaaaatatgaaacacattaatgcattaaacttttttttttagtttcaggaacaaaaccttaatgcattgcttaaatgggaagttattgcctcacaaacgtgagaaaaacgatttatggcagacatgttttgagatagcttgattcgagatttaaatga

SEQ ID NO: 149720 - DNA, 457 bp, Homo sapiens
gtcccttccaatggagttcaaggcagtctctctgatgtcatttctaagagacccaatctctgggttctagtttgtgaaaggtttcgttatcatcagttggtaggtcacaatgggtttctttaacctggtgaaaatatgatttggcataatgcatgaaagccttgcactgttgggtcatgccagagtttatgagtgagagatacatgaggttctattgttatggggataggacatccagtaactatttcacagatgtcagtctatgttttcmagtgggcgtaaatctgattgccaccaaatagtaatacctttgaacaagtcaatccaattgattcagttagctttgcctaatgccattgggcttgtaatgtcttatttaactttttacaattgtccagtgtaagtacttatatcactggagatatctccagaaatgtcctgtgagggaaacacattt

SEQ ID NO: 149721 - DNA, 582 bp, Homo sapiens
caaacttggttattataaaccattttggcaattttgaaacaatcaccccaccatttttttcatgatttggatcattttatcttttccatgatgaatcatagagtgcagagcttccataataatggaagatttaaggactcaagaaggaccaggtggccatccaggctctacttgagtccacattaatgttaaatttgcatcctattaaataaaaawtttgttcctccaagtgaatagttctgtttttaaataggttaacataggttaacacaggttatttgactgggatcaatgttcaaatcttaacaatttcagtactggctcacttagcatccaaatctgccaaatcatttccttagtatttaatcaattattgttctgcttgacattgggttagaagttttataaattagttcattttttcaagagagctctgagaattcttagtcaatggtatgatcttaaagttatcagaaacctgtacttgtcagataccttttcagtattctccttgaagacaaaccactttaggcttcttgtagttcaggaaagtaccaaagtaaacaattaactgtttatgag

SEQ ID NO: 149722 - DNA, 577 bp, Homo sapiens
ctatactgttgacttcaaagatatactgatgttaatgtcttatttacattatctttagagtagtatcttaaaatttcttattttcttaatttattatttctctgaaagtgaagtgttaaattaaatttggcttaaagctgcttctgtacatagcaaattgtaacctaacttaataagtaaacaaactacaacctaacttgagaatatattctttttacaagttactgagtcttggtcaatcatagcagcagctgagctttttttttttttttttttttgagacggattcttgctctgttgcccaggctggagtgcagtggtgtgatatcagctcactgcaagctccgcctcctgggttcatgcyattctcctgcctcagcctcccgagtagctgggactacagacgcccagctaattttttttgtatttttagtagagacagggtttcaccatgttagccagaatggtcttgaccttctgacctcgtgatccacccacctcagcttcccaaagtgctgggattacaggcatgagccaccacgcctggcccatagcagctgagtttttaaacaagcac

SEQ ID NO: 149723 - DNA, 494 bp, Homo sapiens
gcaccaggcattccactgtcctgtccatcaactgaagcaacagaaaccaccccatagtagacaaagatcaagtactactcatctgcttgtgccacagctggcttttgcctataagtgccacctactggcctgcactttgaacagcacaggctaatataaaacctgctgaaagaggcatgtagggctacagaggcaaagacaaaaggccctacccaacaaattctatagtcactccccttgaagaggggagaagagaggaggacaaaaaaaaaaaaaaatggaaaaggaaaaaaaccctgtctacatgaaaatagtataaaaaatttgaagtaccagscactccacatgggaaggaagcagtataataattctggcaccatcaaaatcagaatgttctagcagtggatactaaccaaaatgaaaactgagaaataaaatattaagaatccaaagtatggattgcaaggaaactcaatgagatccaagacaagatt

SEQ ID NO: 149724 - DNA, 268 bp, Homo sapiens
gtaaaaaaaaaaacaaaatatgggattatgtaaagtgatcaracctatgacttattggcattcctgagagagaagaaggaaaagaaagcaagctgaaaaatatttgatagaataattcaagaaaatttctctaatcatgctagagagatagaaaatcagacaaaagaaattcagagaacacctgcaagatactatagaaaatgaaaaccaccaaggcatatagtcaccagactatccaaggtcaatgttaaagaaaaatatcttcgcg

SEQ ID NO: 149725 - DNA, 537 bp, Homo sapiens
tcttggactacagtggaataaatcagaaatcaaaaccaagaagaactctcaaaactacccaagtatatggaaattaaaaacttgytcaagaatgacttttcaatggacgagaaaattgaggcagaaaccttaaaaagtatttgaaatgagtgaaaatagaaaaaaaaatccattccaaaacctctgagttacagcacaagcaatgctaagaggaatgtttgtaacacaaacatcaaaaaaacagatctcaaattaacaagctaatgtcatatctcaaacaaatagacaaataagaaaaaaaaaactaaatgtagcagaagaaatgaaatagcaaagatcagacaagaactaaatgagactgagatcaagaaaatcatatgaaggattaatgaaaagaaaaagttggttttttgaaaagataaacaaaattggcaggtcagtagctagactaaccaagaaaaaagagaaaattcaaataagtactatcagaaattataaagctgacatcataactgataccaggtaaatacaaaagat

SEQ ID NO: 149726 - DNA, 610 bp, Homo sapiens
gcttagcttttcacactgttctaatgatatgtattcggttttcttratgaatagaaaacttggaactatgaatccaggctattttgccagaaacatagatacttcccaaacattcatatcatgataaatagtgcatgtgtctgtattaggcatttggaaggacaactatgtaacttttaaaacaaatacatatattttatatttatatatatatttgtttatatttatatttatataacaattatatatttaacctttaaaacaaatgtgtgtgtgtgtatacatatatattttatacttagctctgcactgatcaaattttagtttccaagttttgaataggcaagttttgtcaaatgaaatcaaaggcacttcacaacaaaaaataataagaatattaaaatgtaatttcatatttgtacttttttcatctgattgtaaacttgtgattttattaagaaataaatatcaacaaatgaaaaagtgttataaatatgattaaaagtttgatatggaaaggaatatgtttgcatcaatattccttaacataaaatgctaatcagtgttgcgtagaaaatatattattgtaaaattcattttttaaaaatgt

SEQ ID NO: 149727 - DNA, 618 bp, Homo sapiens
tctagacatctaatgccgtgctgcaatactggcaygtcagctagaggaaagaatgggagggaagaggtgcatggtgagccctgactgttcagtcaacaagtgctaattgagcacctgttctttgctatgtgctatgctaggcactagaagtacagagcagaaaagacacagctcttgctgcctgctaaatgagaacattatccgaacacttgttaaagatggtaaggcagactttattcaagagagctacggtgatagggtcaccaccatggggtcttgcagtggagagattggacagttccaactccaacaaggataagtgggaatttataaccaagggtggggtcagtggatggaaaattactagaggaaacatcaaggataaggagttcctgattaaagtgactggataggattactgctgaaggcaggccatgatgataagatatcaaagtggtcagataccaagggtgggagattttttcactaatctgatttagcaggattcctgctcaaactagattctataaggacacagaattttaatcctagttctctatttttctgttcagtaggcttttagaactctgcatattttttaaaagttgattctaacct

SEQ ID NO: 149728 - DNA, 417 bp, Homo sapiens
gttctgcaaaactcagtctgtcaattcagagatttaaaggtgagaccccaaaagctagcccactcctgattctcaattacttgccattgtcgtagacaaatgggttgaatttaaggaccttctgaagggtatggtctatatgagggtcagaaggacacaggtcactcttttggttatcygttagcctgatcagacttctttttttttttttttttttgagacagagtctcactctgatgcctgatgcccaggctggagtgcagtggcgcgatctgggctcactgcaatctccacctcccgggttcaagccattctcctgcctcagcctcctgagtagctgggactacaggcgcccgctaccttgcccggctaattttttgtatatttagtagagacacggcttcaccatgttggcca

SEQ ID NO: 149729 - DNA, 671 bp, Homo sapiens
agtagctcttatataatttattgcatgatttcccagcatttgtaaaaccaaatattttttatatattcataacatatggtaggggccagtttatttcagcacttgtacatgctcacattttgtcagcattcataatatctgcagtacaaaacagaatgttataagatacctttttcctataaaggatctgatgattaaagccactggatttttaaaaacagatttgcaaacaagttttcttcatcctctgtaatctaacactatttgtatttaaatcattgccctttgtgtcattaaagcaagtcacactttccttgttccacttcagaatattttagagacatctactggaaaagagcattattgcaaattttataaaacagatttaagtgtatgttactgctgactttttgaaaagtatcttgaataccatatcacaaaattaggtcctttctaaaggcaaaacccttgtgcaaactgtctttgatgactcactcctcattatgtacaaatatatatgtttgaaaagagaaaatgacataacaaatgtaaaacatatcagaactattactttgatgttggacttagtrctccttttttcccccaataaagttctattcatttagatttttaaaaattggtttccttttgataatatgatgaatattttt

SEQ ID NO: 149730 - DNA, 567 bp, Homo sapiens
aacataaatacgccttttactaagaattattataaaattccaagaatggtagaaaaaagaacaaatatgagtttattctaaatcaaccaggtttttttcataaacaaatgcaaatatttgggaagctttcttctttatattcacatattaatcctcatatttcacattcagtatgattaaatattgattgtgtacctgctataaaccagagactttgctagctctgaaaataagtccctatatgcaaagatactacaaattcattatgattattatgtagtgtcgtaagtgcagtgaacaggggaattcaaagagacctgtaggagcgattagaaaggccacctaacttcacctgagaaggcttcctggagttattattaggtgtgaaaagagagaacgatggcaaaagagggcccattgttagtcacaggggcagacagggaagaaaggtgggtttaacaaacagcacatattgtaccagagaaccacttatttgaatagccsgaagtggcggaagatgaggttggggaggtaggcaggaggcagatctaggatggcatcgtgtga

SEQ ID NO: 149731 - DNA, 555 bp, Homo sapiens
gtctggtgtcttgactttgtattattacatgtaaaaactatttgtaagtttagttttgcaatactaaacttctagtattccaaacatacagatgactctgagcattaaatgaataaaatattgacccacccagatattttttctttgtttattttgatttgactatcacttcttttgaaaaccctctttaacaacactcctttaaatttgttttattttatttcaaccactcaaattgctctaactttaaattaaaattaatttgaaaaataagttttctgattcatcatattcatgatggcaacacaactcaaaataatcatggtactagcaaaatttgagttgttgagcacctattctgtgaggagcatgcatctaagcacttttcattcatttttatctgaacgagaaccctgcaaagttttatttttattgacattcctygtattaaatctgtagtttccatatgaagaaactgaggttcacagacatcaactgagttgctcaaaatcatggaactagaccatactgaagccaggattgcacccctggtgt

SEQ ID NO: 149732 - DNA, 555 bp, Homo sapiens
gtctggtgtcttgactttgtattattacatgtaaaaactatttgtaagtttagttttgcaatactaaacttctagtattccaaacatacagatgactctgagcattaaatgaataaaatattgacccacccagatattttttctttgtttattttgatttgactatcacttcttttgaaaaccctctttaacaacactcctttaaatttgttttattttatttcaaccactcaaattgctctaactttaaattaaaattaatttgaaaaataagttttctgattcatcatattcatgatggcaacacaactcaaaataatcatggtactagcaaaatttgagttgttgagcacctattctgtgaggagcatgcatctaagcacttttcattcatttttatctgaacgagaaccctgcaaagttttatttttattgacattccttgtattaaatctgtagtttccatatgaagaaactgaggttcacagacatcaaytgagttgctcaaaatcatggaactagaccatactgaagccaggattgcacccctggtgt

SEQ ID NO: 149733 - DNA, 617 bp, Homo sapiens
aaccctcattcttctgttggggtagtctcagagaaggccaacagaggagccagaaatttcttcatcaagaagcctcgcctgagtacactgccatggctctccaaaagctgagtgaaaagaaaagaatgaaaatcagtagcttcaaggcatggcaggtcttcactgagtgactttggaggaaaggtcctccaaaggctagagataaggcaagaggttggaaagatgtcttccaaggtatagaaatscaggggtgggtctggaaagaaatgagaatgtactagagattgttttaaaaatgatttttcgttgcaagtagaagaagatttttcattgtaaagtagtgttttaatcatcctctcttcaccccattggtgagggaggaattcccaccctaaggttataagaatgggtgaacacatgatgtctagtgttgaattgatgagattggaagcagtttatacataaactaaagccctggggaagagggcacagcacatcacgcagggccacaccagggctgcactcgggaatacagtgaacaatcaacaatgctagaaggcggactttgtaatatcaagagtatgaggtgtcccctggctcccacaggcggatgtgac

SEQ ID NO: 149734 - DNA, 617 bp, Homo sapiens
aaccctcattcttctgttggggtagtctcagagaaggccaacagaggagccagaaatttcttcatcaagaagcctcgcctgagtacactgccatggctctccaaaagctgagtgaaaagaaaagaatgaaaatcagtagcttcaaggcatggcaggtcttcactgagtgactttggaggaaaggtcctccaaaggctagagataaggcaagaggttggaaagatgtcttccaaggtatagaaatgcaggggtgggtctggaaagaaatgagaatgtactagagattgttttaaaaatgatttttcgttgcaagtagaagaagatttttcattgtaaagtagtgttttaatcatcctctcttcaccccattggtgagggaggaattcccaccctaaggttataagaatgggtgaacacatgatgtstagtgttgaattgatgagattggaagcagtttatacataaactaaagccctggggaagagggcacagcacatcacgcagggccacaccagggctgcactcgggaatacagtgaacaatcaacaatgctagaaggcggactttgtaatatcaagagtatgaggtgtcccctggctcccacaggcggatgtgac

SEQ ID NO: 149735 - DNA, 616 bp, Homo sapiens
tgacaaacgcctttgtatgtggaaatacagcatgaacaaagctttgtaactttttctcttgaataaattgagaacatggacaaaattagtcttaaccttttcttgaaaattagtagagaaagaaattgtagcttttaagggcatgcaattttgtttctaaacaacagatggcactatcaaattctagatttactaaaaattttttctatttttctcccttttttaaaattaaagaaagtcataataactgtcttagcttcagaaacacaagtagatyaaattatagaattacagcctttactggcattcaatcttgaagaacaatatttgtaggatcttgaataaaatactgctttttcaaaattaacacttgatggtagttaaaaagctgtttgatcaaattttagaagtattaacatcaaaacaaatgaaatcaatgctcataattgatttacaccaatagcaactgaattctccactttacaactaggatattctcttctgagcatcagtagagataaggatgttctgtgagggaagaggctgacctggactacactagaactgagtagcctctgggaagcccaatatctgacagtcacatagaacttaaaat

SEQ ID NO: 149736 - DNA, 501 bp, Homo sapiens
tatgttcttagaatgctcagtgattgttttacaatttcataggaatcttgaatactgggccacactaatcactagatactttaaatatcatctttggatataagcacaatggagcttacctgttgccacaccatgcaccactccctccttggttttggagcctacaaaaacaaattcaagacataagtctcaagctagccttaaattgctgattagctagttttcaatacaactaatttaaaaatctcaatcttcagaagtatatatattattatatcttcagggaaagaaaaaaatatatatatatatcctaaaactagaagaaggaactccagtaaccaccacaataaatagaagaaagcccagctaacaggaggtcctctccaattacgattttagcacaaaataatgactttatcccctttgttcccacatcacatgtcaacttacagaggagaaaaaagaatgagataacmccggggcccagtgagaagataattt

SEQ ID NO: 149737 - DNA, 388 bp, Homo sapiens
tattccagtgaaagtcatttaaattcgaatagaaaaatttaacttgagatstgcccttatgaaaagtggtgagaattcaaatagttctcgaaccctatttgtcatatcacttcctgaaaggatactcaatctcttaatttttttctattattttgtactttatggaaaaatatttaggaagattatagaaagaaaatttttaggaagtagcgtctctagttttcctaaaatttatgtcaaacccggcattatttattttacatataaaaagatcataacttttactctttgttaaaactatattaaaacaaaagagaagcaacccactaaataataattgattaatttcatttggaggtcttctatgtttagtatgtttatggacttt

SEQ ID NO: 149738 - DNA, 414 bp, Homo sapiens
ggaattcaaggatgcagtgagctatgatagcatcactgcagtccagcctgggcgacagagcaaggccctgactctaaaaactgaaaataaaaaactgaaaaaaaaatgtgttgtgaactttgatgagatgcattcatataaatcatcccaagtataaaatttcccccactgatctatgttgaagagatagtgtagctttctttcactttgcagacatagacrgagcacatgtttcagctaggcaactcaatgtggtcatcctccacctgactgttcatcctgtgactcttactgctatagttgccaccagagaatgtgaaaaagctcagaggagaaagaagagaggaagaatgggcaatgtgtctgtgttgagtgtgtgtgtctatgcctgtggatgagagtgtgtgtctattc

SEQ ID NO: 149739 - DNA, 394 bp, Homo sapiens
tgcagtccagcctgggcgacagagcaaggccctgactctaaaaactgaaaataaaaaactgaaaaaaaaatgtgttgtgaactttgatgagatgcattcatataaatcatcccaagtataaaatttcccccactgatctatgttgaagagatagtgtagctttctttcactttgcagacatagacggagcacatgtttcagctaggcaactcaatgtggtcatcctccacctgactgttcatcctgtgactcttactgctatagttgccaccagagaatgtgaaaaagctcagaggagaaagaagagaggaagaatgggcaatgtgtctgtgttgagtgtgtgtgtctatgcctgtggatgagartgtgtgtctattcttttccaaggaattca

SEQ ID NO: 149740 - DNA, 479 bp, Homo sapiens
aaagggtaacagtatgagttagaagcatggaagctggaggcttagggtcaggggtatccttaacatgaatcccagaagaaggctaacaggttgatggtggaaaggcgtaggcaacagaactaactgctcactcggggtgtggttcaamctcaggcaaacagcaggcccaagtgtgatggttctaatccatccaacatccacccccgccctcagctatctaccctgagcaggcgccgctcacactcgcgggccgtctccaaccccgcgccagccacccgagggggcgttctcagcctccaccctagcggaccccgcgccagcacttgttaacccgttaccacctgttgacttggcctccttgcacttccatttcattatttgccaaacgcagcttgcttactttacagagaaaaaccaagagagcgggcagacagattttatgtgagagaaaagttggatgctcacgctccatggagcat

SEQ ID NO: 149741 - DNA, 479 bp, Homo sapiens
aaagggtaacagtatgagttagaagcatggaagctggaggcttagggtcaggggtatccttaacatgaatcccagaagaaggctaacaggttgatggtggaaaggcgtaggcaacagaactaactgctcactcggggtgtggttcaaactcaggcaaacagcrggcccaagtgtgatggttctaatccatccaacatccacccccgccctcagctatctaccctgagcaggcgccgctcacactcgcgggccgtctccaaccccgcgccagccacccgagggggcgttctcagcctccaccctagcggaccccgcgccagcacttgttaacccgttaccacctgttgacttggcctccttgcacttccatttcattatttgccaaacgcagcttgcttactttacagagaaaaaccaagagagcgggcagacagattttatgtgagagaaaagttggatgctcacgctccatggagcat

SEQ ID NO: 149742 - DNA, 479 bp, Homo sapiens
aaagggtaacagtatgagttagaagcatggaagctggaggcttagggtcaggggtatccttaacatgaatcccagaagaaggctaacaggttgatggtggaaaggcgtaggcaacagaactaactgctcactcggggtgtggttcaaactcaggcaaacagcaggcccaagtgtgatggttctaatccatccaacatccacccccgccctcagctatctaccctgagcaggcgccgctcacactcgcgggccgtctccaaccccgcgccagccacccgagggggcgttctcagcctccaccctagcggaccccgcgccagcacttgttaacccgttaccacctgttgacttggcctccytgcacttccatttcattatttgccaaacgcagcttgcttactttacagagaaaaaccaagagagcgggcagacagattttatgtgagagaaaagttggatgctcacgctccatggagcat

SEQ ID NO: 149743 - DNA, 478 bp, Homo sapiens
tagacagaatggtatacacatgcacactcacaatattatgacattatgtatactaaagaaagcagtaaaattatttgccatgtcttttcaaatgtaaaagagacatgtgtttaatgactttatctctgtgtaagtgtctgtggcaacaatcaattaaatgagaattcaatctccttaatcatcttggattatgcccttaacctgtagggagctaaaataacatctyaaggtagattaaaagtcaaagtggatttcaaactggacaggacaatctgacatgacacttcccaaatataatcatcctttattttctgttatacaagtagtatatgctcattaaagaaaagtgattaaatgcagataagaaaaagaaaaaaatcagtatgcctagcaataggagataaacttctactttcctactaaaaattaccttttctaaaaggtaatttaaaaatatgtatcaaaatccctcaatatg

SEQ ID NO: 149744 - DNA, 478 bp, Homo sapiens
tagacagaatggtatacacatgcacactcacaatattatgacattatgtatactaaagaaagcagtaaaattatttgccatgtcttttcaaatgtaaaagagacatgtgtttaatgactttatctctgtgtaagtgtctgtggcaacaatcaattaaatgagaattcaatctccttaatcatcttggattatgcccttaacctgtagggagctaaaataacatctcaaggtagattaaaagtcaaagtggatttcaaactggacaggacaatctgacatgacacttcccaaatataatcatcctttattttctgttatacaagtagtatatgctcattaaagaaaagtgattaaatgcagataagaaaaagaaaaaaatcagtatgcctagcaatargagataaacttctactttcctactaaaaattaccttttctaaaaggtaatttaaaaatatgtatcaaaatccctcaatatg

SEQ ID NO: 149745 - DNA, 478 bp, Homo sapiens
tagacagaatggtatacacatgcacactcacaatattatgacattatgtatactaaagaaagcagtaaaattatttgccatgtcttttcaaatgtaaaagagacatgtgtttaatgactttatctctgtgtaagtgtctgtggcaacaatcaattaaatgagaattcaatctccttaatcatcttggattatgcccttaacctgtagggagctaaaataacatctcaaggtagattaaaagtcaaagtggatttcaaactggacaggacaatctgacatgacacttcccaaatataatcatcctttattttctgttatacaagtagtatatgctcattaaagaaaagtgattaaatgcagataagaaaaagaaaaaaatcagtatgcctagcaataggagataaacttctactttcctactaaaaattaccttttctaaaaggtaatttaaaartatgtatcaaaatccctcaatatg

SEQ ID NO: 149746 - DNA, 364 bp, Homo sapiens
ggggattaatctattcatgagrgatctgcccccattacccaaacaccttccatgaagccccatgttcaacattggggatcaaatttcaacgtgaagtttggagaggtcaaatatcctaatgatagcagtatggctaaaataataaagaaaattgaaaagcttcacagttatactcattctaggtgaggctggtcaatgaagtagctaccatggttgatggtctgacttgaccttctgaactgccagaccttgattgagacctaggtctcatccacgtgcataggcagagctaaaacctgaaaattagaagaaatgacttcaatcaacgtgggatataaatgaatacatttttacatattatgcc

SEQ ID NO: 149747 - DNA, 364 bp, Homo sapiens
ggggattaatctattcatgagggatctgcccccattacccaaacaccttccatgaagccccatgttcaacattggggatcaaatttcaacgtgaagtttggagaggtcaaatatcctaatgatagcagtatggctaaaataatraagaaaattgaaaagcttcacagttatactcattctaggtgaggctggtcaatgaagtagctaccatggttgatggtctgacttgaccttctgaactgccagaccttgattgagacctaggtctcatccacgtgcataggcagagctaaaacctgaaaattagaagaaatgacttcaatcaacgtgggatataaatgaatacatttttacatattatgcc

SEQ ID NO: 149748 - DNA, 364 bp, Homo sapiens
ggggattaatctattcatgagggatctgcccccattacccaaacaccttccatgaagccccatgttcaacattggggatcaaatttcaacgtgaagtttggagaggtcaaatatcctaatgatagcagtatggctaaaataataaagaaaattgaaaagcttcacagttatactcattctaggtgaggctggtcaatgaagtagctaccatggttgatggtctgacttgaccttctgaactgccagaccttgattgagacctargtctcatccacgtgcataggcagagctaaaacctgaaaattagaagaaatgacttcaatcaacgtgggatataaatgaatacatttttacatattatgcc

SEQ ID NO: 149749 - DNA, 591 bp, Homo sapiens
gccgcatctggtgagggccttcttgctgtgtcatatcatcgtggaagggcaagtgaggacgtgggacaaagagaaatggggtctgaactttatcctttgatcaggagcccacccctgaggtaattaacacactggcattaatctactcatgaggtcagggtcctcacaacctaatcacctcttaagggccccatctcccaatccattacacaggcaattaaatttcaacatgagttttagaggggacattcaaagcatagccccattcagtacttatctttcagtgcaatgcttgggggcataatagtgcacatttgaagtatgaggttaggaaagtacctaaaagtggtagttttgaggataacaagtagacacagattcctttctagttaactcgakgattttctattctctttaatgcatatcctcctgactggagtgaggcttctagttttaccttctaccatgaatgcttttcagatcttatgagatccatgtaagacattctaataggtggaaaggagagaaaaatatcacagaatagaaaggaaatgatgagagacttgtatcaacaaagctggacaacaaaga

SEQ ID NO: 149750 - DNA, 608 bp, Homo sapiens
tatcaaagggccgcatctggtgagggccttcttgctgtgtcatatcatcgtggaagggcaagtgaggacgtgggacaaagagaaatggggtctgaactttatcctttgatcaggagcccacccctgaggtaattaacacactggcattaatctactcatgaggtcagggtcctcacaacctaatcacctcttaagggccccatctcccaatccattacacaggcaattaaatttcaacatgagttttagaggggacattcaaagcatagccccattcagtacttatctttcagtgcaatgcttgggggcataatagtgcacatttgaagtatgaggttaggaaagtacctaaaagtggtagttttgaggataacaagtagacacagattcctttctagttaactcgaggattttctattctctttaatgcatatcctcctgactggagtgaggcttctagttttaccttctaccatgaatgcttttcagatcttatgagatccatgtaagacattctaataggtggaaaggagagaaaaataycacagaatagaaaggaaatgatgagagacttgtatcaacaaagctggacaacaaagataaaattt

SEQ ID NO: 149751 - DNA, 565 bp, Homo sapiens
gactgagatttccatgatgcagctgtgccttgttcagggtcccttgaagagatgctcattttgagtcacgtgactgtagggaggacttgccacttattcctaaatgtcccagtttagccaacacttagctcagctcagaaaataacaccaaaatcagctctgccacyaacaagaaaaagaccattttttaaatttatttatttatttatttatttatttatttatttagacagagtctcactctatagcccaagctggagtgcaatggtgtaatctcggcttactgcaactctgcctctggggctcaagcgattctcatgcctcagcctcccaagtagctgggaccacaggtgcgtgccaccacacccagctaattttttcattttagtagagatggggtttcaccatgttgcccaggatgatctcgaactcctgaactcagtgatctgcccacctcggcctcccaaagtgctgggattacatgcatgagccaccatgcccagccaaaataggccatttctatggagaaaggagaaaaataggcttatggaaaattgaatttgca

SEQ ID NO: 149752 - DNA, 565 bp, Homo sapiens
gactgagatttccatgatgcagctgtgccttgttcagggtcccttgaagagatgctcattttgagtcacgtgactgtagggaggacttgccacttattcctaaatgtcccagtttagccaacacttagctcagctcagaaaataacaccaaaatcagctctgccactaacaagaaaaagaccatttttwaaatttatttatttatttatttatttatttatttatttagacagagtctcactctatagcccaagctggagtgcaatggtgtaatctcggcttactgcaactctgcctctggggctcaagcgattctcatgcctcagcctcccaagtagctgggaccacaggtgcgtgccaccacacccagctaattttttcattttagtagagatggggtttcaccatgttgcccaggatgatctcgaactcctgaactcagtgatctgcccacctcggcctcccaaagtgctgggattacatgcatgagccaccatgcccagccaaaataggccatttctatggagaaaggagaaaaataggcttatggaaaattgaatttgca

SEQ ID NO: 149753 - DNA, 565 bp, Homo sapiens
gactgagatttccatgatgcagctgtgccttgttcagggtcccttgaagagatgctcattttgagtcacgtgactgtagggaggacttgccacttattcctaaatgtcccagtttagccaacacttagctcagctcagaaaataacaccaaaatcagctctgccactaacaagaaaaagaccattttttaaatttatttatttatttatttatttatttatttatttagacagagtctcactctatagcccaagctggagtgcaatggtgtaatctcggcttactgcaactctgcctctggggctcaagcgattctcatgcctcagcctcccaagtagctgggaccacaggtgcgtgccaccacacccagctaattttttcattttagtagagatggggtttcaccatgttgcccaggatgatctcgaactcctgaactcagtgatctgcccacctcggcctcccaaagtgctgggattacatgcatgagccaccatgcccrgccaaaataggccatttctatggagaaaggagaaaaataggcttatggaaaattgaatttgca

SEQ ID NO: 149754 - DNA, 395 bp, Homo sapiens
cctcactctgttgtgctaaagagcttgaatacatcccgatggcggttatatgacacagtggcagtcatggcagataatggtttggttagatttgtgatttagaacaacaaacacatctggtaaaagttgacttcctgggcyggacatggtggctcacgcctgtaatcccagcattttgggaggctgaggttggtggatgacctgaggtcaggagtttgagaccaggctggccaacatggtgaaaccccatctctactaaaaatacaaaacttagccaggtgtggtggtgcttgtctgtaatcccggctactcaggaggctgaggcaagggaatccaggaggcagaggttgcagtgagccaagatcatgccactgcactccagcctgggtgacata

SEQ ID NO: 149755 - DNA, 395 bp, Homo sapiens
cctcactctgttgtgctaaagagcttgaatacatcccgatggcggttatatgacacagtggcagtcatggcagataatggtttggttagatttgtgatttagaacaacaaacacatctggtaaaagttgacttcctgggccggacatggtggctcacgcctgtaatcccagcattttgggaggctgaggtkggtggatgacctgaggtcaggagtttgagaccaggctggccaacatggtgaaaccccatctctactaaaaatacaaaacttagccaggtgtggtggtgcttgtctgtaatcccggctactcaggaggctgaggcaagggaatccaggaggcagaggttgcagtgagccaagatcatgccactgcactccagcctgggtgacata

SEQ ID NO: 149756 - DNA, 537 bp, Homo sapiens
tagttcgctgaaaatcagcctcagagtttacaactcctaaattctcaattgtccttcccctattttcagatcagttatggaaaacagggaactgaacttcctgaagatcagtaggcatttttattaagctttttattttgagaaaattgtagatcctcatgcagttgtaagaaataatagagatcccatgcacgctttacccagtctctcccaatagtaacatcttacaaaaacacagtacaatatcacaacaaggatactgacattgatacagaaaatttccattatcataagcatccattttgttgcctttttatggccacactcacctctcttccaccccactgctccttaacccctgataagcacttttcttttctccatttctataattttgtcatttcaagaattctatataaatggagccatacagtgtgttaccttttgggtttggattttttcacccagcataattccctggagatccattcasgctgttgcacttatcaacaatgtgttcctttttattgccaagta

SEQ ID NO: 149757 - DNA, 430 bp, Homo sapiens
gggcgctaaggagtctcccggacgcgcgcgactcctggcctgtcagagcctgcggatcgcttggagagaaaaacccaggagtcattctcagactggggcccaggaccctggttggaggctccaacagccccctccctgaggaagctccgcggtgcaatgaattgctgttgggattaagtctaccgggaatgggggktgggggagacggactacgtgttttttaaatgtttagaaagaagggggaggggagaactccgggagaggaaaccaatcccacgtttccgggggccggacagttctcatcgcgccgccttaccacccagccgctgcgcaacgcgtgcttcccgcacagcaactgcgcagctccaatcagcctggaaccgctaaacggcttcggtctgagggctaatggaggttaaagagcaccgag

SEQ ID NO: 149758 - DNA, 430 bp, Homo sapiens
gggcgctaaggagtctcccggacgcgcgcgactcctggcctgtcagagcctgcggatcgcttggagagaaaaacccaggagtcattctcagactggggcccaggaccctggttggaggctccaacagccccctccctgaggaagctccgcggtgcaatgaattgctgttgggattaagtctaccgggaatgggggtkgggggagacggactacgtgttttttaaatgtttagaaagaagggggaggggagaactccgggagaggaaaccaatcccacgtttccgggggccggacagttctcatcgcgccgccttaccacccagccgctgcgcaacgcgtgcttcccgcacagcaactgcgcagctccaatcagcctggaaccgctaaacggcttcggtctgagggctaatggaggttaaagagcaccgag

SEQ ID NO: 149759 - DNA, 552 bp, Homo sapiens
ttatgaaatgtgagagtgaataaaatattatttccacattagcattatttatatgatggactgcaaatgttatcataaatgcataaataccatgaatagacaactggctttcttctctattagcccaaaagtttatatatatattcaatttactccccagattggtatcttttcattggaaaaatgaatgatcatcttttttttttgagagcagggtatttatcacttttctttaactgttatatttccactgtgtaatggactgcctgaaagataataattgcttcaaaaatatttaattaatatacaaaataattagacaccattagtatataaaaaagcaggggtactagacatatccccaaatccacaaacatcytaagttaaaacatccttgttaacaaatccactttgagattcctgaaactaataaaatacacagactattttgaaccaatattagaggtcatctaatccaatctctatttttcagatgaggaaatcacagttagaacaattaaatgcccttctgcaagacagctgggattagaa

SEQ ID NO: 149760 - DNA, 584 bp, Homo sapiens
gaagacagcagcggacctcctagcacagtgctcgagctctgctaagggacagactgcctcctcaagtggatccctgacccctgtgcctcctgactgggagacacctcctagcagcagttgacagatacctcatttcggggagctctggctggcatctggcaggtgactctctaggaagaagcttccagaggaaggaataggcagcaatctttgctgttctgcagcctccactggtgatacccaggcaaatagggtctggagtgaacctccagcaaactccagcagacctgcagcagaggggcctgactgttagaaggaaaactaacaaacagaaaagaatagcatcaatatcaagaaaaaggacatccacacaaaaaccccatctgaaggtaaccaacatcaaagatcaaaggtagataaatccatgaagatgaggaaaagccagcacaaaaaggytgaaaattccaaaaaccagaaagcctcctctcctccaaaaaatcacaactactcaccagaaaggaaacaaaactagatggataatgtgtctcgtgaattgacaggcttcagaaggtggataataacga

SEQ ID NO: 149761 - DNA, 523 bp, Homo sapiens
ttttaacccatttgtgtcagaagttacaggttggtggtgctccaaagtaggctcagtgggcaagagggagagctgggtcatagcmctcatagggactctcttcctgtggatgttttctgcaatgcttggagtcagaaaagagaatatttgagtcgacaaacccctggctttatggggcatatagacaaattctaaccctctcactctgcttcttaaacaaagcagtcaactgtgatacagactctccttacagtgtggtgagtcacaaggttagagtcagaaaacctaggttcaaatcctggctctggccaatctccagctataaacactaggtatatgatttaagtctctctctgagcctccgtttcctgagataacacatataagtgtttaacatagtatatagttatagcaaacattaaagaaatatttgtctctgttaccattactattactactattccatctaagaagaaaaaaaataattttttctggcccattcacaaagatagtgccaagcaag

SEQ ID NO: 149762 - DNA, 397 bp, Homo sapiens
tggtacatataccacatttcttctttatccaatccactgctgatgggcaattaggttgattccatgtctttgctattgtgaatactgttgcaatgaaccaatgactacatgtatatttttggcagaatgatttatattcctttggatatatacccagtaatgagattgctctgttgaatggtagttctgctttaagttttttgatgaatctccaaactgctttcyacagtggttgaaccaatttgcattcccaccaacagtgtataagtgttcccttttctccacagactttttaataatagccattctgactggtgtgagatgatatctcactgtggttttgatttgcatttatctgataattagtgatgttgagcattttttcatatgtttcttg

SEQ ID NO: 149763 - DNA, 543 bp, Homo sapiens
gttgcaatcaacacacaagtgcaggtgtcttttttatataatgatttcttttcctttgggtacatgcctagtagtgggattgctgggttgaataatagttccatttttagttctttgagaaatctccttactgttttccatagaggttgtactactttacattttcaccaacagtatataagggttctctttttaccacatccatgccagcatgtgttggtttttgactttttagtaatagccattctaactggtgtaagataatatctccttgtggttttactttgcataactctgatgattagtgatattgagactttttttgtttgttggtcacttgtatgtgttcttttgagaaatgtctgttcatgtcctttacccactttttaatgggattgtttctttttcttgttgagttgtttgagttcatggtagawtctggatattagtcctttgtcagaggtataatttgcaaacattttctcccattctgtaggttgtctgtttactctattgattgtttcttttgctatgcagtagctt

SEQ ID NO: 149764 - DNA, 526 bp, Homo sapiens
aagtcaagctgctcaaaggtaaattyatgggaagcttttgcaatgggcaagctgaactctttcctacaattgtgccatcatgctagcagctctaatgtatcaagcttaaaatattgccaattttgatgttcaaattgctattctagagcaattggatttgcaaaccaggaactggtaaatggatgttggataaagctcacaatggagacataaatgctttttggcactatgacttggcatggatagatatcaaagcttatttgctcatttttccctgaactggaggcattttaacctatttaaagttctagattttcagagtcaatgttctatgagttcattataaatctgtgccataataaccttctgggaagctcaaggatttcaattatgtacttcagttctattattttttaaagtccagtattccattcctcttttgggtatccaacactgcatcaccatggcatgaccaccatcagcacttctactactaaaaataccatttaatgaaccctcctacaag

SEQ ID NO: 149765 - DNA, 558 bp, Homo sapiens
atatcacaaggcaaatggaggcagggcgagatcacaggaccacaggaccggggcgaaattaaaattgctaatgaagttttgggcaccattgtcattgataaaaacttatcaggagacagggttttgagagcaaccggtctgactaaaattgattaggtgggaatttcctcttcctaataagcctgggagcactataggagactggggtctatttcacccctacagtctacagaccataaaagacgagcacgcccagtgggccgtctatagacatatacccccaggcgtgtattctctttcccagggatgtttcttgctgagaaaaagaattcggcaacatttctcccatttgtttttgaaagaagagaaatatggctctgttccgcctggctcacgggyggtcagagtttaaggttatctctcttattccctgaacaattgctgttatcctgttcttttttcatggtgcccagatttcatatttgttcaaacacacatgctctgcaatttgtgcagttaacgcaattatcacatggtcctgaagtgacatacatcttc

SEQ ID NO: 149766 - DNA, 504 bp, Homo sapiens
tttggagctaaaaataaaagcatttgttcacaaaagaatcttgtttgcatgtccctcaagtataaaagttacattttgtggaaaaaagtatgtattctactagttcactaacaccagctagacgttaatatgtagtttaatacattttctgtcttcccactaccttatgaagatactggataacagtttcctggtctttgggataagcaccattttcaagcacatacaattggaaatcagtaggaaatcacctctcttccaattacatagcccatggttattcagtatggctctgagtagcaggaaagaagcccctaaaattaattatctacttgtaccttgaacytgagcaaagaaaactaaagatggcaccacaaggacaggggaaaacaatggaaaactgatgaaaagtaaaagaggtaaataatatgagggcattagatagtaaacaggaatttgaagaaaaaatgcaagggaacaaaaaaattaaggagtgaggtaaga

SEQ ID NO: 149767 - DNA, 606 bp, Homo sapiens
gcaggaaagaagcccctaaaattaattatctacttgtaccttgaacctgagcaaagaaaactaaagrtggcaccacaaggacaggggaaaacaatggaaaactgatgaaaagtaaaagaggtaaataatatgagggcattagatagtaaacaggaatttgaagaaaaaatgcaagggaacaaaaaaattaaggagtgaggtaagaatatcacttttacatcctgaatcttggggttcttcgtggttagatctgggtcagctgtgtgatgttgggcaagttactttacctgtttaatatttggctttcttatttgcaaaatgaagataataacggcactttataagattgttctgaagattacataaaatactgcacatgaagggtttactgcctggcatctaataaacaataaatgaaaaaaagagagaacatagtaagtattcaataaatgttattagagaagaaaggaaacacagatacattacatgagtgaaaaccctgagaaggatcgagaaagttatgaaagagaatacatacttaaatgagaagtgacaggggtgaaagaacaaatcccatttagataataaacaatgttaagtgtgtga

SEQ ID NO: 149768 - DNA, 561 bp, Homo sapiens
cttgaacctgagcaaagaaaactaaagatggcaccacaaggacaggggaaaacaatggaaaactgatgaaaagtaaaagaggtaaataatatgagggcattagatagtaaacaggaatttgaagaaaaaatgcaagggaacaaaaaaattaaggagtgaggtaagaatatcacttttacatcctgaatcttggggttcttcgtggttagatctgggtcagctgtgtgatgttgggcaagttactttacctgtttaatatttggctttcttatttgcaaaatgaagataataacggcactttataagattgttctgaagattacataaaatactgcacatgaagggtttactgcctgrcatctaataaacaataaatgaaaaaaagagagaacatagtaagtattcaataaatgttattagagaagaaaggaaacacagatacattacatgagtgaaaaccctgagaaggatcgagaaagttatgaaagagaatacatacttaaatgagaagtgacaggggtgaaagaacaaatcccatttagataataaacaatgttaagt

SEQ ID NO: 149769 - DNA, 606 bp, Homo sapiens
gcaggaaagaagcccctaaaattaattatctacttgtaccttgaacctgagcaaagaaaactaaagatggcaccacaaggacaggggaaaacaatggaaaactgatgaaaagtaaaagaggtaaataatatgagggcattagatagtaaacaggaatttgaagaaaaaatgcaagggaacaaaaaaattaaggagtgaggtaagaatatcacttttacatcctgaatcttggggttcttcgtggttagatctgggtcagctgtgtgatgttgggcaagttactttacctgtttaatatttggctttcttatttgcaaaatgaagataataacggcactttataagattgttctgaagattacataaaatactgcacatgaagggtttactgcctggcatctaataaacaataaatgaaaaaaagagagaacatagtaagtattcaataaatgttattagagaagaaaggaaacacagatacattacatgagtgaaaaccctgagaaggatcgagaaagttawgaaagagaatacatacttaaatgagaagtgacaggggtgaaagaacaaatcccatttagataataaacaatgttaagtgtgtga

SEQ ID NO: 149770 - DNA, 514 bp, Homo sapiens
atctgctcttgctgttgggtaggtattatcagccccattagacctcatttctgcaggagtagatcgaatgagtgtatctctgacagaatttccatgctcccagctgaagcaggtgtagctgggtggaggaaggccaaagaaactcaagaaggtaagtattttaaatggrtgattctgaattttcaagtttcctcctggcctgaagaagttaagttgtcagttatctacccagtggcttagacagggagaaaagagaccacaatgcctgatactccaggtccttttttaatatggaggaaaaactgaaaatcattctttcattttaatttaaaagtatgaactcagattcttagaagaggcaaaccaaggaaagtgtaaaacgacttactgataagaaatgtcttctgccacagagctggttggagctagtcagtaaccaaagccaacacatgaagtaataaatatagcattgtagctaaccatgccttgctaaatcacctatcaccataacatc

SEQ ID NO: 149771 - DNA, 514 bp, Homo sapiens
atctgctcttgctgttgggtaggtattatcagccccattagacctcatttctgcaggagtagatcgaatgagtgtatctctgacagaatttccatgctcccagctgaagcaggtgtagctgggtggaggaaggccaaagaaactcaagaaggtaagtattttaaatgggtgattctgaattttcaagtttcctcctggcctgaagaagttaagttgtcagttatctacccagtggcttagacagggagaaaagagaccacaatgcctgatactccaggtccttttttaatatggaggaaaaactgaaaatcattctttcattttaatttaaaagtatgaactcagattcttagaagaggcaaaccaaggmaagtgtaaaacgacttactgataagaaatgtcttctgccacagagctggttggagctagtcagtaaccaaagccaacacatgaagtaataaatatagcattgtagctaaccatgccttgctaaatcacctatcaccataacatc

SEQ ID NO: 149772 - DNA, 514 bp, Homo sapiens
atctgctcttgctgttgggtaggtattatcagccccattagacctcatttctgcaggagtagatcgaatgagtgtatctctgacagaatttccatgctcccagctgaagcaggtgtagctgggtggaggaaggccaaagaaactcaagaaggtaagtattttaaatgggtgattctgaattttcaagtttcctcctggcctgaagaagttaagttgtcagttatctacccagtggcttagacagggagaaaagagaccacaatgcctgatactccaggtccttttttaatatggaggaaaaactgaaaatcattctttcattttaatttaaaagtatgaactcagattcttagaagaggcaaaccaaggaaagygtaaaacgacttactgataagaaatgtcttctgccacagagctggttggagctagtcagtaaccaaagccaacacatgaagtaataaatatagcattgtagctaaccatgccttgctaaatcacctatcaccataacatc

SEQ ID NO: 149773 - DNA, 581 bp, Homo sapiens
tgccttcatattttatgttcctttgatgtaccccagatatcatcctggatttcttctcctgatgttacaccatgggcatttctccatgttgttgtatgatcctcgatgtttccatgctctgtggctgtaggctgttctgctgcgaatcacaagcttcctctgttctctcaccctgctcagcctccccacagcctcccacagctggacatcagacttcaagatgaaggcactgtgtccctctgtgtgtttagaagggagcacatttctgagaagtctcttttcctaagaccccaaactggaacatcaaataagaacaaatatgtctacaatgatttttactagggtggctcatcaacaggtgagcctgtgcaaatatctgcttrtaactgctatattgaagtccaggaggaaatggaaggtaacgactctctaatgccttcatttgcccagacattcagcaggaacggcaatttcacttaggggaaaatttcagcaggaatcaatttttctaaatcaaattcaagggtcactgattgttaaggcaaccatgggtacgctaatgatgctattcatagtttggt

SEQ ID NO: 149774 - DNA, 642 bp, Homo sapiens
gttaaaataatcatattcctatcttgggcttaaaccaattataggattctttgttccgttctttgtaggtggttattgagcaaaatctggatctcccagctgcttgatttgcttctttttcagactcaaggcacagaaacagtgctatttcttttctctccagcacttcagggccaaggagtttgaagaagtccaaggtagagctttctggaaaatcctctggagaggttgatcagaaaccttctcccacataaacaaaggacccaggaagaagctaaaaatgggccatgagattgtctttattcatcaagcctgaagttttctgactctatctttcttttcccgtggccactgttacctctccagamcagaccccatcacctgaattctgcctgagcctcgacagatatgctcagctgctctcccatgctggctgttgttaccccaacccacttaaaattccttgaggtcttagaagctctctcccaccaaggtgccgaaagaagtatttcacaggttctcagtgacaattgtttattgaaatttacactgatgagaagtggtccctattaagggaattcaatccaaggagattggctctatactttgaaccgctgtggccaaataaatagatgactgctt

SEQ ID NO: 149775 - DNA, 590 bp, Homo sapiens
ggcactcaatattaaacattacagatagtttgcctatttttgaatcaggttatttgtttgtttttgcttttgcttttgttgttgttagtggtgttttcgtgttttgttttgtgttgtttttgctatttagttatatataagttccttatatattttggatatatgatttgcaaatattttctctcattatgtaggctgccttttcattttgttgattgttttctttgctgggcagaaactttttaatttgattgtgacattgtgaaatatatctttagcctttgttccagtctcctgacatatagctcctaaaatcyttggaatctctagagtgataaaagtgtcttcagtgtactgagttgactgatggctgggggcttctgggtaccctgagagggtcatgggaactctgatttacggccactgttcagaaggtccagaagcccaaacttgcaattggcatctgaagtaggggatgagcccttaacctgcaggttctgacaatatctccaggtagatagtgtcagaattgagctgaattgaattagaggacacccagctggtgtctactgcagaatctggagaatttg

SEQ ID NO: 149776 - DNA, 617 bp, Homo sapiens
tatctttggtttaagtggaagaccttgctggcatttttaaaggatggagcatggagaggagaaatatagaagacagtctcagaggtccaaaaaggctgtttcaatacttcaggcaaaacaggtgagggccaacactagggcatagttacagtgaaaacagaaaggaaacagtaaatataaattgtattttagaggcagaatcaacaggacggctccttggatcaatgtttctcaaggtgtagattaaaggctcaatcatcagaatcacctaggatactggttcaacttgtggattcctgggtcatattccaggcctgctgaatyagtatctctgggtcctgcattattcccaaaactccccaggtgcttacctactaattaagaaccacagggttagctgtcctgaagatcagtggaaattgggatttgataataaataatgctaccttgagttattagaaatgaaactgtattgctaaataagctaaataaaaggaaggttttggagagaagtaacacatgtatttgtgacactttgagcttaacatctgtgagagctttctgggggacaagtccaggatataggaagaattgacatctaaacacaagaaaagttt

SEQ ID NO: 149777 - DNA, 617 bp, Homo sapiens
tatctttggtttaagtggaagaccttgctggcatttttaaaggatggagcatggagaggagaaatatagaagacagtctcagaggtccaaaaaggctgtttcaatacttcaggcaaaacaggtgagggccaacactagggcatagttacagtgaaaacagaaaggaaacagtaaatataaattgtattttagaggcagaatcaacaggacggctccttggatcaatgtttctcaaggtgtagattaaaggctcaatcatcagaatcacctaggatactggttcaacttgtggattcctgggtcatattccaggcctgctgaatcagtatctctgggtcctgcattattcccaaaactccccaggtgcttacctactaattaagaaccacwgggttagctgtcctgaagatcagtggaaattgggatttgataataaataatgctaccttgagttattagaaatgaaactgtattgctaaataagctaaataaaaggaaggttttggagagaagtaacacatgtatttgtgacactttgagcttaacatctgtgagagctttctgggggacaagtccaggatataggaagaattgacatctaaacacaagaaaagttt

SEQ ID NO: 149778 - DNA, 617 bp, Homo sapiens
tatctttggtttaagtggaagaccttgctggcatttttaaaggatggagcatggagaggagaaatatagaagacagtctcagaggtccaaaaaggctgtttcaatacttcaggcaaaacaggtgagggccaacactagggcatagttacagtgaaaacagaaaggaaacagtaaatataaattgtattttagaggcagaatcaacaggacggctccttggatcaatgtttctcaaggtgtagattaaaggctcaatcatcagaatcacctaggatactggttcaacttgtggattcctgggtcatattccaggcctgctgaatcagtatctctgggtcctgcattattcccaaaactccccaggtgcttacctactaattaagaaccacagggttagctgtcctgaagatcagtggaaattgggatttgawaataaataatgctaccttgagttattagaaatgaaactgtattgctaaataagctaaataaaaggaaggttttggagagaagtaacacatgtatttgtgacactttgagcttaacatctgtgagagctttctgggggacaagtccaggatataggaagaattgacatctaaacacaagaaaagttt

SEQ ID NO: 149779 - DNA, 617 bp, Homo sapiens
tatctttggtttaagtggaagaccttgctggcatttttaaaggatggagcatggagaggagaaatatagaagacagtctcagaggtccaaaaaggctgtttcaatacttcaggcaaaacaggtgagggccaacactagggcatagttacagtgaaaacagaaaggaaacagtaaatataaattgtattttagaggcagaatcaacaggacggctccttggatcaatgtttctcaaggtgtagattaaaggctcaatcatcagaatcacctaggatactggttcaacttgtggattcctgggtcatattccaggcctgctgaatcagtatctctgggtcctgcattattcccaaaactccccaggtgcttacctactaattaagaaccacagggttagctgtcctgaagatcagtggaaattgggatttgataataaataatgctaccttgagttattagaaatgaaaytgtattgctaaataagctaaataaaaggaaggttttggagagaagtaacacatgtatttgtgacactttgagcttaacatctgtgagagctttctgggggacaagtccaggatataggaagaattgacatctaaacacaagaaaagttt

SEQ ID NO: 149780 - DNA, 605 bp, Homo sapiens
agcttaacatctgtgagagctttctgggggacaagtccaggatataggaagaattgacatctaaacacaagaaaagtttcggagatgtgaacttgaagtctcttgcaaaggtatactgttgaaaatgtgtaagtgggtgagaatacctaggaaaagattagagaaaaatataagaaagaagaatattttgtgaagaatattctatgaaatttgtcagagaggcagaagggagatgaagagttcaggaaattaagtgaagaaagaaaagttcatgaaaggcagaagaggcagtgtcaaagttcaaacagaataaggacttcaaagtgtcctttggatttagcaaataggaattcataataattcaaaattgcattgaatacaagagaatatgcagagataatgaggtagagcagaatctgaggattcaggaaagaagaaaataagtgttgtagtgaagtttctaattgaaacaaatggaatgtgaaccrgaacaactggagaacttagcttgagcgaggggagaaatatttctgctatggagacaaaaagtaagaaaataaatagaagtgctgaattgcaagtatatttctggggaagagtagaaa

SEQ ID NO: 149781 - DNA, 637 bp, Homo sapiens
caggttcttcatttaaaattattttctgtgcatctcctgtcatttttccaaatgtaccatgtgttgccaaacttaactactttccacttccccaaacaagctgtgctttcatgcccctgagcctccgcatatgctttyggttttcctagaatcatcattctacttttcttgtcctatcaaaatttgcatgatcctttggtgacctagccatagttagttccaacaggaagccaaaacctctcatctctcctggcttttattggtcctcttttgagttcctgtagctccccataaaggttatggtacttaatacacttgctatgattcttggtacaactttctgttctgctagattgcaaatgcttgagaacaggtggctacgtctttcatctgtgtacatcattctcctgggttgtctggaaaacaaaaggagcctaatgatttttgaacaagagtctgaatgcaaaggagagcttcttgatgttgagaaaatcagtctcttttctgagccagtttttgttgatttttttctaaacatgtgactagcgttggcactcagcaccatctagaacaatcaatcaataaattacacggatattggatctgaacaactggtttaaaatttatcacaaacagc

SEQ ID NO: 149782 - DNA, 394 bp, Homo sapiens
ccaaaagttctcgtttcctgctaatactttttagtgtgttgtgtatagtgctgtttccttttttatttctatggaaaagatatatactgatgctgtttactataacctcaactgttatatatttatcacttttgtcttagagtgtaaagttaatttatacatgtatcatgtttttatttgttgctggttttttcaaattagtgttttcgttcttatgaataatataattgagattgtgatggaatatacayttattaaaaatgcaacccctttgctactggccgctgccatagcagtgaggctggctgggaacacagcacaccttgtttaaaataaagagctggctcttcactgactgccctttagttttgcacccaagaagtaccatgtgttg

SEQ ID NO: 149783 - DNA, 655 bp, Homo sapiens
aaatataccaccttttctgtatccgttcattagctgatggacatttgagttgtttatgctttttggctattatgaataatgcagcaatgactatctgtaagttttgtgtagatatatgtttttatttmtctcatgcatacaattaagggtggaattgctggggcatatggtaactctattcttaaatttggaggcaaagttaccaccaaactgttttccaaagtaacagcactatttttacatttccaccagcatgaataaaggttcctttttctccacattctcaccaaaatttcttcttgccttttttattaaagccatcatagtgggtgtgaagtaatagtttattgtgggtttgatttgcattttcataatgagtaatgatagcaatgatttggatgtcttttcatgcgatcattgtccatctgtgtatcttctttggagaaacacctcttcaaatcctttgtttatttatctaattgggatttttgtctttttaagtattgagttataagagttcttttataattctggatacaagtcacttattagatatatgtcttgcaaatattttgtgctattctgtgagtagtctcttcactttcttgatgatatactttgatgcccaaaagttttcaaccttaatgaagtctaa

SEQ ID NO: 149784 - DNA, 512 bp, Homo sapiens
attgtttattcttgtcactctttttaaatatcagttgactatatgttcagttgatgaagggatagacatataggtccatggaacagcacagactccagaagtagacccacacaaacatggtcaattgatatttttgactaaggtgtcaattaactcattggagacaggatagtcttcacacagaatggtgctggaggaattaggtgtccatatttwaaaaaaaaataatcttgacacataccttgtacctctataaaaattaagtaaaaatgtatcatagaccaaaatgtaaaacctaaaactataacactgctagaacttcctggcccgttgtgctggccacatgtggctatttaaatttaaactaattaaaacaaaataaaattaaaaaattcagctcctcagttgttgcagcaacatatcaagttctcagaagtcacatctggctagctatacccagtgtattggtgagcacagattatagaacatttctgccataacagaaagttata

SEQ ID NO: 149785 - DNA, 351 bp, Homo sapiens
gggctcaatttcttatcttatttaaaataagtttcacttctgctgtacagtgtctcaagagccttcaataacagtcctttgttattctgtcttatgtaaaggtgacttttactgtcatataatttgtcttctaacaagcacgtatgttatcaaaatctgtaaaaaaaaaaaaaaagttttggcgaaaaagttttggcaaaaacccaactctgcttctataagtatgtagttatgattgtaacagtttggaaggagtaaatttccctccctgccgctcaaaagtcaggctaagggtctcattrttagccttaaaataactatcagaaactttcaggcctttgcccattaagg

SEQ ID NO: 149786 - DNA, 485 bp, Homo sapiens
aactttacaacaaaggagtcttcagttggtggcctggcttccttttcacttccacagccgcggcctgatgcctcctcagttagcagccctattcatctgtcttcataagtgatcccatcgcccaccctccctccgtccctatccttaaggctccccactgatgtgggttattggccaattctttgctcaggtagtcatattcctgataattttaagtaccaactacacatctaatgttcttttctgtttctctagaagaatggttctcaaacttcagcatgcgccagaatcacccagaacatttgttaaaacacagatcagaaacagagtttctgactcagtaggtctggggtaggtcccatgaatctgcktttctaacgatttcccagatgatgtagacgttgccggtctggggactacactttgagaaccactgctctagaagaggtttttcactgataatctccaaaatcggacaagatcat

SEQ ID NO: 149787 - DNA, 531 bp, Homo sapiens
catggtaagaatacaaagctgaccaaatgtagttggatttattattgtttttaaatttctgcagacaacacttcccctgttgcctacacaggtttggagtgcttcccctgccctgactctggcagtatgctattgctcttgctagacccagagattagcaggtttttgtaacactctcatagtaacaaaattaacaatagactgttgtacaattcaatacgtggaaaatgataaaatatacaatccatatacttttctttaaaaaatgacaatgtattccagccaacagaaacaaytcaaaattgtaaacttaagaatgtggaagatataaatttgtgtctttccttaacaaatttggaccagttatatattaatccagaaggattcttcagttcacagtgtaaacaacacccttcatcaattctctacatgattcctctttcacttgtagtcatttttgtgtatcagcaagtagtttttctggggcacactttttcccccacagttcatacaggaaattttttttaagca

SEQ ID NO: 149788 - DNA, 585 bp, Homo sapiens
tgcaccatgctgattggtggtaagagagcatcttcttttatactaagaagaggaactatgcctacctaactgtcactgcctgtttgttctgtcctgaaatacaaaacagataaactgattaacactggaagattctaaaagcactaattagacagtctagatgcaaagctgtagttgtctctgtggttccatgtaaaaaaggacttgagagattaacacacaagagcatgcatttaagaagaatggagcaagattaacacgtggggctcctcttatgtagaatcattacctcatccagcttactgttttatcctgcaaaggtaagatgaagtaagaggtggctatgtaggcaaacttataatacacatttgccctgcccactaggatatgtactctggacagtggcttagaacctgaattttcctagatcctccaacttacttttacatatgccctctttctggtccacattgtggccytgaaactatggatcaagtctgtttcagactcttcactcagtttcttcatctttcaaatgaggtattaggcaagatgcaactgtggttctttctatctctgatgtaa

SEQ ID NO: 149789 - DNA, 389 bp, Homo sapiens
gacccagagattagcaggtttttgtaacactctcatagtaacaaaattaacaatagactgttgtacaattcaatacgtggaaaatgataaaatatacaatccatatacttttctttaaaaaatgacaatgtattccagccaacagaaacaactcaaaattgtaaacttaagaatgtggaagatataaatttgtgtctttccttaacaaatttggaccagttatatattaatccagaaggattcttcagttcacagtgtaaacaacacccttcatcaattctctacatgattcctctttcacttgtagtcatttttgtgtatcagcaagtagtttttmtggggcacactttttcccccacagttcatacaggaaattttttttaagcagc

SEQ ID NO: 149790 - DNA, 599 bp, Homo sapiens
tatgcacaaagataaaattgaagagaaaaaagggaatagatattgcaaagaatataatgagtcataaaggataaaaagaaggaaagcaaaaggaactgaagggaaggaagaaaaagtggagagaaaaaacaaaaagagacagagggaggagagggagagagataaaggatggaaggcaggcaggcaggcaaaagaaagaaagaaaaagagtgagtgacaaagacagaaagaaacaaacttaaaaagagtagagaaatccctaacagtagaaagcaggctaaggagaaccarcatatgtatattgcttgttaatacataaataaattttaataagagtcagcagattcaagggaagacttttcactatatagcattttacataattttttaaaaaaattttgataacatgaattattgcatgtaatttttttaagcaagaagaagagaactagctagatagaggcacaatagaaaggaaggaaaataacaggcttgattcaaccatttatgtattcaaatattgtattagttaattctcacactgctaatgaagacatatccaagactgggcaatttataaagaaaaagaggtttaatgg

SEQ ID NO: 149791 - DNA, 499 bp, Homo sapiens
gagcttatgatccagtttggaggagatgggcttaaacatgtggaaagagttttaatgataccaggcagtaaatgctaagtgccacatcagttaggaagttcagaagcagtgagagtttcttggaaagacagtgccatggcacagttgttcaagtagcatgctggggctgcagcaactgtaacaagctcttggctgatgtagagcagtgacagcctagggagcagagaacaggaattctcattttctgaagagctacaatgtgccaggccctgtggtgactgttttayatccagcgttatgacttttataatttccattctctgtgatatcccatatttcagccaagcaaaatcacaagcattttgcagataaacacagtctatacttatttaatacttgcccatgtttcttctactcctgatgataattttgggaaatgctcaaagcctaattctactaatttgacatttcaaaaaatccataagataattgagcttat

SEQ ID NO: 149792 - DNA, 445 bp, Homo sapiens
aacttccatataggcatctgtaattatggagtgtacaaaccactaatatatgggaggaatatttaaaactataaatcagagagatttaaagcaaaaatagtttctaaaaattatacatagacaaaaccatgtgaactttgagaacacccaaaacaaataagtaattctaatagcttcagatgaatatcagaattaatgagcgaattcaataatgtttatggacacaagatsaatatgcaaaaaatcaattgcatttctatatactagtaacaaattagaaataaaatataaaaaatgattacaaataattaaatatgtatgaataattataactaaaaatttgtaagacttctatacagaaaattacaaaacattagtgagaaaataatggaaggatgtacaatggtgatggttgctaacaatggactcacgttgcaaaaatatc

SEQ ID NO: 149793 - DNA, 380 bp, Homo sapiens
tccaaattcatacttctgcattttagcacttttaaagctggctgggactggcttattttgttggcaacgttttatgttgctgtgactgtaccttacaacgtttgctttattggcaatgacgacctgtccacaactcggagcacaaccgtcagtgacattgcagtggagattctttttattataggtaagaacaaacagctgctttcctacgatatttgcatatgagaagtgwagtgtgttccagatttttctgacatgaatttgaactaagatccatttgcatgggcttgattcagcctctgttgcaaattttggagaagcacatactgtatttggatttctgaaaattgcctcttccaacttttcctgtccctttattc

SEQ ID NO: 149794 - DNA, 604 bp, Homo sapiens
ataaaatatgaaatagtggtgcttgttttgaacaaggcagggatattaagaatggaatgttactaaatttagaaacccaggagaaaattgtgagttcttgatttagaaacttaatgtaatgaaagggtttttttccctcttaccaaacgagttctgctatgtcattctctcttctttccacttttcaagtatgttttcttaaagtataaaaaaataaaataaaattctactctcaaaatagaaaaggcattattcacatggtttgtattttccatctcagtccatggtgttagcatttcctattggaataacctcctcttcccrtcactccaatagttttaagatcagtaaatacataagtaataaatgataaaaacaaatatatattgaatatagtgaaaagttatttaaatatttttagatgacagaaaacattctggctacctgtgtgtggatgtaagtctttatgtagtcaatgtattaaatatttgttgaggaccaaaatgatgtcacccaagagagctgatgtggcaattacttagaagcatagaagacccttcagggtcttgactccttatttctatccttttctccatcaccactt

SEQ ID NO: 149795 - DNA, 572 bp, Homo sapiens
atctctttgcagggagtggaggatgctttatttgtttacaagaggacgtcaataaatatctaaaaatgtacaagtagaccttgcatgttttcttatatctcarttaatatatgtatatattattttagctactatcacttctaaggtttaatcaatgatattgaattagtctctgaagaactccattagcatcctaatgtgagttctgatttgcagctcaaaagcttcaggtctgaatcctgcttcaggaatgtgattttgaatcaggcatgtgattttgaccaaaatgacctcaatgtgtggtttttcattaaacaatctcagatttgttgtctatgagtgtggcaatactgactctcatgagtactcacttcacatagtatctggtacatagtgtgtgcttgcagttggtaactgccagcattatcaccaccacctctgctcttattgttaattgaagccctctgaaactccagccacctgttcaaacttatatcgatgagcaatgtagaactgaaatagcaatactcttaaagtctagtgaagaggtgatatttttgtatcagtcatga

SEQ ID NO: 149796 - DNA, 566 bp, Homo sapiens
actttggtcttagcattcacttttgctattccgatctacaactggaagatacataaaagtgctttgcattgcaaatttgggataacttcaaaaatcccatggttgatgttagggatagcactaagcatttcaattccaggagaataaaagaaattccgatttgaaatgaattcctcatttggagggaaaaaaagcatgcattctggcacaacaagatcaaattatggaatacacaagtggctccttcccatgtgcagtccctgtcccccgtccagtcctctgcacacccgaactgtttctgattggcttttagctttttttttttccttctaacacttgtatttggaaactcttctgtgattttgagaagtatgcttttgagtatttaatgaagtttttttctaaaagtaaaaaaaaaaggattgaattctttagcctattatgcaagatctctaataaattttgctgaaagtttactctcamttttgtctcccgcagcatccattacacaccaccacgcataatgtgtgtaatatttttctcaaatgatattctaacatttttgt

SEQ ID NO: 149797 - DNA, 410 bp, Homo sapiens
gaaacaaactgagaatcactgttctatgttatttggaggagtgatgttacagcccagttaaagatataatttaagaactgtaatggtcatggagaagtaagatattctgttgctgaatttccatggaagactgtcacaagaacaratttgcaatttaggatgaatcatgttttacaattttatatttgaatacaaaaactcaattctcacttagtttatttgaaagttggaaataaatttttaaaagttgttttataagcagctagcagtgatgttgctattctgttcgtgaaagaggcccattatatttttttctactatgtaagcataaaaaatccagctgaggtctcttgactttctctcattcaatgctggaaaataattgctgacacatgtatatatttattata

SEQ ID NO: 149798 - DNA, 662 bp, Homo sapiens
aagctgtgttcaatcttaataggataaaatcctatttaaacacacaggaggatcctgatatgtacattattaatgagaatcagattgtagtaggttttacagagaaggtatgatatcatataggtcagtactaagataggatgaagtcaaaacgaacataaaccagagtctggtggcagaattgactgaactctatagtgcagaaaaataaattygaagaataaggaaaggctgtgtctaatagagtatatatagaggtttagcaatataatgacaaatgttataaacaaataatctccatgtgatttctaaggtaaatgacatgtctatatcattctgaaccaaattactctaaaatgcaaagaatgctattgacacctttaagaaaatggtaattctacatatgaaaaaatctattttattttttcctatatttcaacaattttttttaatttactcacaccttgaactaagtttcaggcacttttttttttagaaaatgacttcctggttgctgaaatattttgctaatcagctcgatgaatagtgagaaaaatacctccttttggaatgattataataagttcttttgggaatagtcttttttgtgattttttaaaaactttaagggttcctttttaaaaaaacacatttttaatctt

SEQ ID NO: 149799 - DNA, 610 bp, Homo sapiens
gaaaggaaaatatcttgggtccccaaaatcactaagataaactcaagctggaaactgcytgggcaagcctgcctcctgttctattcaaaatcacccctctgctcactgagatagatgcgtatctgatttgtctcattaggaaaggctaatcagaaacctaaaggaatgtaaccatttgtgtctcacctatctgtgacctggaagctccctccctgtttccactcttcctgcctttgcttcaagttgtcccgcctttctagaccaaaccaatgtacttcttacatatattgattgatgtctcatgtctccctaaaatgtataaaaccaaactgtgccctgaccaccttgggctcatgtcgtcaggacttcctgaggctgtgtcacgggcacgtcctcaaccttggcaaaattagctttctaaatgaactgagacctgtcttggattttctggtttcacacctagctggaatgaaaggagatagaatgaaaaaggaagatgcacgtgcaatttttttttccttaggatgttagcacctcctcttgatgtgcaaaccaaattaagaagaaaataaagcccaacttgagttatttagactccaagttgtctaga

SEQ ID NO: 149800 - DNA, 567 bp, Homo sapiens
taaacaatacatttaaaatgtattaaggcaatgaggtgaagtactaattattattattctattgtatttaatgacataatttaataggattctaaaaaatgaattgcttcattatgttacaatatgtacacatttgcctgtacaaatagagaatgattgacaatccaaatatcctttatctattagtgtattagaatgacttacgttcttatcatctatgggctttctattctgtaccaggcttttaaaatatacaaacacatataattttctcagaaagyttacaaagtttttattatatccattttatagaatatgcttttagatttggaaatattaattaacttagccaaggttacatagcagtaaggagaaaagcccagttttgcttccagaattctatcttcttagtcactactgttaagccagttgcctaggtaatcctcaattctattacaaagacacaagttcttattttagggataatttctctttctctgaaatagttcatccagcattctggggccttatcaattagtctgtacaagtagtgccctattcttacct

SEQ ID NO: 149801 - DNA, 402 bp, Homo sapiens
gacttaaggataccatcatcagctggcactgtgctctccctaaatctccagctctcaaaccctttcaaccactgacatgagtgagagattcaccgcttactttttttaaactaaacttytttaaaaattttgtttaaatttagttaaagttacaattacagtagtaatcttcttacatgcatagatcgcatagtggcaaagtcagggttttgggggtttctatcacccaaataacatacattgtacccactaagtaatttctctttatccaccctcttccaaccccctcatcctgagttttcattgtctaccaatccacattctatgtccatgtgtacacattatttagctctcacttagaacaaaattcagtgtttatgtctgacttagttctcttaagat

SEQ ID NO: 149802 - DNA, 573 bp, Homo sapiens
  misc_feature (1)...(573): n = A,T,C or G
naattcaacattttgatttgcttattttaaggacacttggagataaagccctaraaattggtgtggatttacttgacattataattcctgagatcataacaagaggtctactttgtaaaacatattatgctgactgaatcttccaagtggctgccaggacattttccttcttcctagcttggagttaattaggtgttaacttgagtgttcagaggaaaacggctaattttcagaggaaaaaaaaatggaactcaaaatatgttagactcatcaattgaattatcatttgatatatgctgatttttatgacctacaaatactttagaacacatctattttggagaaggtgtctatgttcaaaatacctggtcagaattggccaaatttacatttaagttctccctccttgatatgacatctgtgtaaagccatgggaaatcctctgtccaaggggccagacacaccttacagctgaccccggctaagcacagcagacagtagcctcacttgactcatgcccaagctcttggaactttacccaggaggcacattaacgtccacaccttttgttct

SEQ ID NO: 149803 - DNA, 561 bp, Homo sapiens
  misc_feature (1)...(561): n = A,T,C or G
nnaattcaacattttgatttgcttattttaaggacacttggagataaagccctagaaattggtgtggatttacttgacattataattcctgagatcayaacaagaggtctactttgtaaaacatattatgctgactgaatcttccaagtggctgccaggacattttccttcttcctagcttggagttaattaggtgttaacttgagtgttcagaggaaaacggctaattttcagaggaaaaaaaaatggaactcaaaatatgttagactcatcaattgaattatcatttgatatatgctgatttttatgacctacaaatactttagaacacatctattttggagaaggtgtctatgttcaaaatacctggtcagaattggccaaatttacatttaagttctccctccttgatatgacatctgtgtaaagccatgggaaatcctctgtccaaggggccagacacaccttacagctgaccccggctaagcacagcagacagtagcctcacttgactcatgcccaagctcttggaactttacccaggaggcacattaacgtcca

SEQ ID NO: 149804 - DNA, 540 bp, Homo sapiens
gcctcttcccctcccctactttttattttgttttaatttgaaggaaatgggctttacatagcttttgttatagctctgtaactacaaacagccaaataatttataatcagatgtgagtgcaagtgagccactcttccaatcaggcacttctgctgcatcttctttcacaccacagttcctgccaccccacccttggaagggagtctactcccagatgaacccagttgaggcagtaatgcttgcaatggggcagtctatatgggtgtagctgctgtacgctatggatttaggagctagcaaacatttattaccaaaccctaggatagcagacaaataaagcatggcttatgataacattggctttaaagaaaaggaaawcaaaaacagtcacccacagaaattatgggtggagggaataggctgcatatatcctgaattaagtgtgcaatctcaataaagttatcaaattcaggaaattcaaaatggatatacttaaatccacagtctatatttcaattttgtcaacgatctcaataatat

SEQ ID NO: 149805 - DNA, 580 bp, Homo sapiens
aagcttgtttccatttacaggctgtggaattaccctagcctctgaaaattcaccaagagcaaatactgctgcaacctgcacttctttggtgactaagacccccctaaggctcagagggaaggcttgcaratatatgtttatcttgatgagcacatatcacattgcctgggcttttcaatccaggccagtaattgtccctctttgtttggaaaatgcacagggatcgaatatccatcagtctaaggtagtatataggggaaagaggaggaaggagcagggcagaagttgttgccacacacccatggccatgctactttctcagctaaaaatgtgggggggtgtagtatagcagtgacatcctggaagaggcttctaaagaaggaaaggctaatacaggacactgcccaacccctaacccaggacacacatcccaaattggtgcagactttttcttggctgtccataaatagccaatctcaatgcagccatccaggcagtcatttccaactcatcagacctggtatataagaagaaatctgcttcatgtatttctgcataaggacatagtataatctttccc

SEQ ID NO: 149806 - DNA, 603 bp, Homo sapiens
tgaattcatgtcttctggtttcaaatgccacactttgttcactgggccgcagaatgactaggggttctagttgtcccagaaagaaggaacttccagtggctttgtgcctttctttattgtctgagccatggtggaagaagatatstttttctccaaacagctgactgctgattagaacagttgttcattcttcagtgagtgctcttaaatattctaaatagatagctcaattgacagacatatatgtggcaggtgtattttagccacaaatcctttctcttgagaaatatcttggtctctaatggagcccaaggcatgccagacacaaataacagatgtagatatagaattgggatagggtgggggaagagacaagaatcattagttttctaatcctttcagcccctttataaaatgtgtttgcgtatcatgtagtgggataggggaggggaatgagagacaagatgaggacaagttgcaggaaatctataagaccagtttgcttactcaggactgacgaaaaattgttaagccaccacaatcctcaggaaagagcatcctttcttctgttatctctaggagatattaatattcaggatttcc

SEQ ID NO: 149807 - DNA, 416 bp, Homo sapiens
gcatcttctggaaatgactgtgtgtcttaagggacatgtattcaagtggcattttagaacccaagctctatgcrtcaaaccctgaacaggtaaattggacagcctaactctaggctgtgattgaaattccagtcagttctcccaagagcaagttcccagataccaaggaaggccattgagaacatagccctaacttctcagtaccacctacagctcttgggagagtgcccttaagacccagaaaaatatttcccacccactttggatgccagcctatatgccagagttcttgttgttgccacccccacccatcttggtttttcttagtttacaaagacagaaaggcaaattagagaaacatccattgctttttagcagaactggaatttttagagttgcaaagccaccaaccatgg

SEQ ID NO: 149808 - DNA, 601 bp, Homo sapiens
gatcactaaagcatctcatttgcatagaactaatctccgctccagtgctcaatcctggtagtgaagccatttgggaacttgttcaccaggactccaatttgacagtgtgaatgaatgcatgaagagaaacatatcccaccagcctttgcccacatattttgtgttttgccttcagatggctttgaagtgacctacatttttcacatggcctccccatgagaaaggatgagtttctgagtacgtgaggaggctggctgtgtccctgtggaacacagcaaagctaactggtcctttggggggttaggccttacatgtagtcctcactgcacagaaccacagtcagctrgaataacaacctggagaaagccagtcattgctactccactgtccttatggttctctgatggtctgatgagttcatgtagattccacatgtgtccgggaaactctcaggatatggttgaagtcctacctaactctcactcctgatcctggaaaccacagagaatgaaaagaaccttgagtagtcatgtggcttctcagtcttacttctcataggaaaccttacactcattatcccagagaaaccagaaataagacc

SEQ ID NO: 149809 - DNA, 601 bp, Homo sapiens
gatcactaaagcatctcatttgcatagaactaatctccgctccagtgctcaatcctggtagtgaagccatttgggaacttgttcaccaggactccaatttgacagtgtgaatgaatgcatgaagagaaacatatcccaccagcctttgcccacatattttgtgttttgccttcagatggctttgaagtgacctacatttttcacatggcctccccatgagaaaggatgagtttctgagtacgtgaggaggctggctgtgtccctgtggaacacagcaaagctaactggtcctttggggggttaggccttacatgtagtcctcactgcacagaaccacagtcagctagaataacaacctggagaaagccagtcattgctactccactgtccttatggttctctgatggtctgatgagttcatgtagattccacatgtgtcckggaaactctcaggatatggttgaagtcctacctaactctcactcctgatcctggaaaccacagagaatgaaaagaaccttgagtagtcatgtggcttctcagtcttacttctcataggaaaccttacactcattatcccagagaaaccagaaataagacc

SEQ ID NO: 149810 - DNA, 627 bp, Homo sapiens
tacacacgcatataaaaatacacatgcataaatatggctatatatagtccattttttgaaaaaggttataatatatgttatacttacattcaattttgattcattgcaaaattatctacagtcgcatttacactcctaccaacagtatatgagaatgtctacttttcagcatctaaacttaagatgtagaatatgaggaagaaaacataaaggctaaagtatcttagttttggttttcttacttttaaaagtcagctaacaatattttkcaagcctttttgtgaacattgaatgagatgatatagagatagaaatttcatacatttagcctggcccacaaaatatgtatgaataaatgataatagttcatattgttattgctatcatcatttggtttatctgacacatcaaattacttttatatagtggtcctagttctatcttttaatggtaagaaaataaatttagcttttctaaccttaagacctggagttactatctttaataataaggggctaggaaatttaagtgatgtgagtcgagcaggctacagtctctagggaaaaaaatatgtatcttctatactatcttgctaatcagtcatctgactacaattttctattgatt

SEQ ID NO: 149811 - DNA, 393 bp, Homo sapiens
tccaaaccatcaaataggagtgcttaggaatttctagttctttagggttgccgaaggacctgaaaaggatctgaataggatgagattatgataatcctgatgatgaaaataataacaacctttattgagggtcaaaatgacagataccatgctaagtatatacagaccacaaccccattaggtaagtgtattagtccatttacacactgctaataaagacatacccgagactgggtaattcatacaggagaaaggcttaatggacttacagctccaagtggctggggaggcctcacaatcatggcagaaggcaaggaggagcaagtcatgtcttacatggatggcagcaggcaaagaacttcygcaggggaactctcctttttaaacccatca

SEQ ID NO: 149812 - DNA, 342 bp, Homo sapiens
ttgttggtggtgatgaagccatgttatttgtcttttaraatttacatatagtggaaatttagaaactcgacacagtgtagtttaacagatttttctgttgcctgtaggttctgttgtttagatccagatgcttaagggattcaggtctggcaagactccttcctagatggtgctatgtgtacttctatcagtgggtacatagagtctggctgtctctcttttgtggtattagtgccttcatgctcaatgcctaggtgcgttcatttattaggatttacacaatgatgatattcctccttcatttattcatggaacacttccattaagaggaactacttctca

SEQ ID NO: 149813 - DNA, 416 bp, Homo sapiens
cctgcccaaccacatttgcctctcctctcccttaatccaaatgtttcctcacatgttgtgttgcaaaaccaatttgtctaagagaagagttcatgctccttagggtcattggtgaaagatctcaataattaaatgtcaaaagttcatatttgactataataataatgtctaacatacattgagtgtttactacttgccagcctctgcacttaagtgrctttctatatcatcccttggaatcttcacattcccatatataataagaactgttaggatcatccttgtttcacagttgggaaaagtgaggctttgtgacatgaaggagctcccaagtcacagagccaagaagtggcagagctgagatccaaactgggttgtcaggctgggagcctgcactcctcatcacagcacaaggc

SEQ ID NO: 149814 - DNA, 585 bp, Homo sapiens
tcacccctccaactgctttttgttttcagaaagaaaaaaagaactagtttgactattgttattatctaaaacaacagattggacaacctatttaaaagtatgttgatgctgcattgggctcttgacttaaccaagggaacctgaaaatacgtctagattgcagtgaaacaaaatggcatatcttcttaatgaaaatgacttcgtttaaagtttgttaaataaacactttttatagcatactttatttaagaactaggtgccaayttttcatggggtgaagtgatacctagatttattgatattggattagtttgaattttcttgacctcttaccttgatggtaggagaggttgtttgctattatggagtcactgctcctaaaggttttattttagagattaaaaagatttgagatattgttgatacctaaagaggagtttgcagttaatcccatggtcatttatctttagctggataaaatcctgagaatttatatatttttatctgaacttttcaaacatctatcatcatggtttggagaatttcagcagagaaagttttaagagacagagaaaaacatcaata

SEQ ID NO: 149815 - DNA, 458 bp, Homo sapiens
cctgaacatctaatcttctcaccaaacctgatcctctttctgtatttcctgttttaactgtgacaccaccttccaccccactcacctttcatcgtaactttagtcatctttgaattcttccattggcaatccatagcttgattttggttcagggctggttaagccagaggcycagtgaagttatcgcaaggtgctgtctctctagctccgtcttctgaaggtcagtgtcattctaaagctgattcccaggacagctgccggtagtgccctctgcctttattttattccacaacagggacacttgggtcacctgttcacctctgaacatgactgtggctgggctagggaatgtgctgatttaacattctggtgaaaaagccaatttagactcacccctagagtgaggagtggtatcagttttccctgaagtgtgggctgcatgggaatggaaggatatg

SEQ ID NO: 149816 - DNA, 458 bp, Homo sapiens
cctgaacatctaatcttctcaccaaacctgatcctctttctgtatttcctgttttaactgtgacaccaccttccaccccactcacctttcatcgtaactttagtcatctttgaattcttccattggcaatccatagcttgattttggttcagggctggttaagccagaggctcagtgaagttatcgcaaggtgctgtctctctagctccgtcttctgaaggtcagtgtcattctaaagctgattcccaggacagctgccrgtagtgccctctgcctttattttattccacaacagggacacttgggtcacctgttcacctctgaacatgactgtggctgggctagggaatgtgctgatttaacattctggtgaaaaagccaatttagactcacccctagagtgaggagtggtatcagttttccctgaagtgtgggctgcatgggaatggaaggatatg

SEQ ID NO: 149817 - DNA, 574 bp, Homo sapiens
ttgaacatgattatgtgctaaatctgaactcagactaaatcaattcaagcagcgttagctaggaactgagtcatagctgttgytgcagccgagtgcttatgtttgcaaaaagcaggagggggtgaatctgacaccagagtttcttctttgaggtgggggaggtgtaattctgcagatgagcctcctgaggttaaggtttgacaattttctgccttcgagatgagcaggaagttgaggcattttgcaaattgcttggcttctgttaattgctctgtgccactcagagcagccacacatgttctgggcatcctaatgcatcccgggcatgggctgaatagaaatccgttcttggagtgactaaagagctggtcgtctgtcatttagggagcatggtaagaggagataattagaggtttgtggaaattctatttgaaggctataagtgcagaccagtaacgctaagagcacccttccaagctcaggatttcaggctgtctccaaggtcattcaaaccaaaagcagttcatggaaaggagttacagcaaatatttcacacggggacagatggcagggt

SEQ ID NO: 149818 - DNA, 574 bp, Homo sapiens
ttgaacatgattatgtgctaaatctgaactcagactaaatcaattcaagcagcgttagctaggaactgagtcatagctgttgttgcagccgagtgcttatgtttgcaaaaagcaggagggggtgaatctgacaccagagtttcttctttgaggtgggggaggtgtaattctgcagatgagcctcctgaggttaaggtttgacaattttctgccttcgagatgagcaggaagttgaggcattttgcaaattgcttggcttctgttaattgctctgtgccactcagagcagccacacatgttctgggcatcctaatgcatccygggcatgggctgaatagaaatccgttcttggagtgactaaagagctggtcgtctgtcatttagggagcatggtaagaggagataattagaggtttgtggaaattctatttgaaggctataagtgcagaccagtaacgctaagagcacccttccaagctcaggatttcaggctgtctccaaggtcattcaaaccaaaagcagttcatggaaaggagttacagcaaatatttcacacggggacagatggcagggt

SEQ ID NO: 149819 - DNA, 494 bp, Homo sapiens
aacaacgggaatagatcaggggctcatcaacagcatacggctcagcaatgcactctccacaccacatgagatactcctctctcaaaaggaaggcatactagccagggagtatggacacgggggatccagcatcacccatattccagcctgggaagtaytcttcattcccccagtgtggtgactccctttccccaactagaagtaccagatggcccaggctgcataaaccaccctctaacccccagtcactaccagcactacacagtgggtatcacagcagagccaaataagccaaacagacaaatggcgctacaaaagatctgacaattaaattttcactggaaccatgacatgaaggccagcacctataaagactaaacctaaagagaataagcatgttaaaataaagatttaataagatacagagtcttctaacataataaccaaaatgtccaggatacagttgaaaatcacctatcacacccaggaaccaa

SEQ ID NO: 149820 - DNA, 494 bp, Homo sapiens
aacaacgggaatagatcaggggctcatcaacagcatacggctcagcaatgcactctccacaccacatgagatactcctctctcaaaaggaaggcatactagccagggagtatggacacgggggatccagcatcacccatattccagcctgggaagtactcttcattcccccagtgtggtgactccctttccccaactagaagtaccagatgkcccaggctgcataaaccaccctctaacccccagtcactaccagcactacacagtgggtatcacagcagagccaaataagccaaacagacaaatggcgctacaaaagatctgacaattaaattttcactggaaccatgacatgaaggccagcacctataaagactaaacctaaagagaataagcatgttaaaataaagatttaataagatacagagtcttctaacataataaccaaaatgtccaggatacagttgaaaatcacctatcacacccaggaaccaa

SEQ ID NO: 149821 - DNA, 622 bp, Homo sapiens
ttttctttctttttttttttttaattttttagacagtcttgcttggttgtccaggctggagtgcagtggtatgattttggctcactgcaacctctgccttctgggttcaagagattctcctgcctcagcctccctaatagctgggattacaggcacataccaccatgcccagctaatttttgtatttttattagatatggggttttgtctctttggccaggctagtctcaaactcctgacctcaggtgatccgcctgcctcagcctcccaaagtgctgggattataggcatgagccaccacgcctggcctcaaaatatttttcattgtatccgttgtgaatgtaaatttgacttttacctacagaatcaaggctcagacatccttgacagtttctagttctctgcctcctcccagttcctcaatgtagtccatccagatatttgcyttgtacaaccacctcctggtgaccacttccctataggacagctggatacagcctacttgactcagcagtgaccctcatgccttgtgcgggctgcctgagaatgccacagaaaccacctctcagacacagtgtaactccgtggaactcatgtctgtgggctctaaactaccagttag

SEQ ID NO: 149822 - DNA, 372 bp, Homo sapiens
ttcagtaattttggattttatataggaaacacacattatttggggataactggacttgtataatggaatgagaactacatacaattacaatgtagttaaagtataattatattaaacacaaacccagtacaagcctgttatggcatrtaacaactacaccaccatgtactacatattaggattccagtactaacttctaatacatccagagtttggtgaaaaccttggggaaacatggcctttggccaagaaaacctctgtttttcactcttgttttgtcaactttattctttgtaacctgcttcccatatcccagtggaaggacaaggtctttctgcatcgtttatgactaactatagggaattctttatc

SEQ ID NO: 149823 - DNA, 365 bp, Homo sapiens
tgccagtaatataaaaccaaaaaaccatccttcaacaagtaactgtttggctttctcactttgtcccactctctttctttctagctctttcttttaarttaaatataatgtcttcctcattgattaaatatgtctagcttatacagaaaccatagatattagttagagaaaaacaactaagtgtgtattgtgctctaatcatgactgactatcaggttcttgtagacctaatcatacagtgctctgtgcctcagatttctcatagataaaatgaaggttttggtcgtgatgaatactcaatcttttttaactgtcagattttaatgattttttttcattttgatatctactcacttagcagtaag

SEQ ID NO: 149824 - DNA, 365 bp, Homo sapiens
tgccagtaatataaaaccaaaaaaccatccttcaacaagtaactgtttggctttctcactttgtcccactctctttctttctagctctttcttttaaattaaatataatgtcttcctcattgattaaatatgtctagcttatacagaaascatagatattagttagagaaaaacaactaagtgtgtattgtgctctaatcatgactgactatcaggttcttgtagacctaatcatacagtgctctgtgcctcagatttctcatagataaaatgaaggttttggtcgtgatgaatactcaatcttttttaactgtcagattttaatgattttttttcattttgatatctactcacttagcagtaag

SEQ ID NO: 149825 - DNA, 365 bp, Homo sapiens
tgccagtaatataaaaccaaaaaaccatccttcaacaagtaactgtttggctttctcactttgtcccactctctttctttctagctctttcttttaaattaaatataatgtcttcctcattgattaaatatgtctagcttatacagaaaccrtagatattagttagagaaaaacaactaagtgtgtattgtgctctaatcatgactgactatcaggttcttgtagacctaatcatacagtgctctgtgcctcagatttctcatagataaaatgaaggttttggtcgtgatgaatactcaatcttttttaactgtcagattttaatgattttttttcattttgatatctactcacttagcagtaag

SEQ ID NO: 149826 - DNA, 517 bp, Homo sapiens
gttgaagtgtgtggaatcatctttgaatccaagggataaatcccacttggggctggtgaatgatccttctaatgtgctgctaaatgtggtttgctagtatttactgaggatttttcatctatatttataarggctggtgtactgcagttttctttttgtgtgctgtcattggctatgtttgatatgagactaatgctaacctcataaatgaggcagacaaatgatcagataaaaaaatgtaaatttacatgtctggattaaaaacaatacaaacaaacaaaacaaatagattttaaatggagaatatgttagtccagtggcatataaatatgtatgtaagtccagccctacgcatgaatcatcctttgtccagtgtgtctgtgctgtgtgcactacctgcccgttcttcattgacatcgtctgtccctgacatccagccatccacatcatcacagcttgatgatctgggatctccctaagcagattatcctgcttctgacccatcctatgaaggtca

SEQ ID NO: 149827 - DNA, 285 bp, Homo sapiens
ggcttcctgccttccagacactctagggtgatggccctrtccctatagttttgagaagcccagtatagtgggtaattctgtgcctggagacaacctcgaaggcagttctctgagttggccccatctctgcagtggctctgtgcctgggctgcatgcccctggcctcctgtggctggaatcacacactagtagctcttcttgttcatggtcagtgggagtggctccatccccatggctccactgggcactgccctaatgagagctctttttggtagtccttccctt

SEQ ID NO: 149828 - DNA, 402 bp, Homo sapiens
actcatgttgaagttgcacactcttctgagtaacgtgataaaatctggtgccatcctgctccctcttgccagggatgtgaatcctccttttgtttagtggatacatgctgtagatctatggtaaccacaaatcttccactgtgaaattgtggaagaaggcaaaagaaatttatgctagttttgctgtcacactwcaagctgcaaaagttacagccatagtgtgtgatagggcttagttaagatgcagacgacattgcatttgtaggtggaagacatgaacagaaatgtcttccaattgctgcaattcggttcagtgctacctgcagtttcaggcatccactaggggtcttaaacttgctaggataagaagggactaacgtatagtgtgagaagagaaatgag

SEQ ID NO: 149829 - DNA, 402 bp, Homo sapiens
actcatgttgaagttgcacactcttctgagtaacgtgataaaatctggtgccatcctgctccctcttgccagggatgtgaatcctccttttgtttagtggatacatgctgtagatctatggtaaccacaaatcttccactgtgaaattgtggaagaaggcaaaagaaatttatgctagttttgctgtcacactacaagctgcaaaagttacagccatagtrtgtgatagggcttagttaagatgcagacgacattgcatttgtaggtggaagacatgaacagaaatgtcttccaattgctgcaattcggttcagtgctacctgcagtttcaggcatccactaggggtcttaaacttgctaggataagaagggactaacgtatagtgtgagaagagaaatgag

SEQ ID NO: 149830 - DNA, 402 bp, Homo sapiens
actcatgttgaagttgcacactcttctgagtaacgtgataaaatctggtgccatcctgctccctcttgccagggatgtgaatcctccttttgtttagtggatacatgctgtagatctatggtaaccacaaatcttccactgtgaaattgtggaagaaggcaaaagaaatttatgctagttttgctgtcacactacaagctgcaaaagttacagccatagtgtgtgatagggcttagttaagatgcagacgacattgcatttgtaggtggaagacatgaacagaaatgtcttccaattgcwgcaattcggttcagtgctacctgcagtttcaggcatccactaggggtcttaaacttgctaggataagaagggactaacgtatagtgtgagaagagaaatgag

SEQ ID NO: 149831 - DNA, 393 bp, Homo sapiens
agttgcacactcttctgagtaacgtgataaaatctggtgccatcctgctccctcttgccagggatgtgaatcctccttttgtttagtggatacatgctgtagatctatggtaaccacaaatcttccactgtgaaattgtggaagaaggcaaaagaaatttatgctagttttgctgtcacactacaagctgcaaaagttacagccatagtgtgtgatagggcttagttaagatgcagacgacattgcatttgtaggtggaagacatgaacagaaatgtcttccaattgctgcaattcggttcagtgctacctgcagtttcaggcatccactaggggtcttaarcttgctaggataagaagggactaacgtatagtgtgagaagagaaatgagct

SEQ ID NO: 149832 - DNA, 558 bp, Homo sapiens
agtgtaaattttaaaaatccaattaaacatgagttaataatattttgaatcacctggctttagcattggaatttcattgaaaactcttttcttgaaatcttcctcgacaccagacaatactgaagataataaaatatcatcacaaatatggaagtttttggaatcaaaagaccccatcttagtatcttaggattcctttacatgggtaaatgaaatgccttttctgtcttgtttacctgatggaatcctattgatcctctaatattttacttgaatatcatttactcaaagacactttcccttatcatcatctccctgcttgtacatcaaacattttttatcacattctctgttgagytacaaatgtaccttattcgaaacaccactcttgcattttatggcattagcataatttttatgcatatctgctcccctgattagacttcattttgaagaaagcaagaattatgactccttcaacatcgtattttgtttctttaatataatacccagcacagtgtaaatgcttcagtaaatacttgtgaattaattaaaggc

SEQ ID NO: 149833 - DNA, 571 bp, Homo sapiens
gtgttctttaattgtaaatttgtaactgaacttcacatgaatattaaaattcatcttctacttatcttttttctccataagttcttgtatttacttctcatttagaaatgacattaactattaatattttttaacatcaagttcacatatagccatttgttactaaatctcgtatttgggaagaggaaatgacttagataactgatggtgcaaggaattaaagttattattcattatcatatttgtctatattatgtattgacaatgcaataaaatattctwgacttggtaaacaaagcaaaaccatgaatataatagtttcaattttgcttttgtcaataaattgtgttgagtcatttttaattctcctaaaactaacaattttttatattattcaagaaataaatctcatcctatttcaattaaactattcaatatcacactgtagtttataagctccacagatcagaggctaaaataaaaaaattcaattaaaaatacaaagtgatttggacattctaattgacaattaccacagaaagcaaaactatttagggtttatactaaagct

SEQ ID NO: 149834 - DNA, 494 bp, Homo sapiens
cacaaatattaccatttactatgaccttctttttgtaagtgaacagctcttctaaacaaacaagcttgaaaggacataatttctgagaacataataattttttaaataaagcaatctagcttcatggaaattttactacaaagcttttattttcttatttttccatgaatacatgacagtgtcttaatagaataggaatgatcacaagaatgattattttgtagatcacagaatctcaaatggaattccaaattctgctayaaagagcaatccaatacctggatatcatattttgaacatatcagacatacagatgtttaaacatcttttccttcaagaaatatttgttaaatttctcatctgtgtcaaatttctatctctaagccaagaaatgacagctatatacacaaataagcaacaaaatattataggcatacacatatgagcattacatatattctatgtgcataatctactgtgcaacaaaaacatca

SEQ ID NO: 149835 - DNA, 494 bp, Homo sapiens
cacaaatattaccatttactatgaccttctttttgtaagtgaacagctcttctaaacaaacaagcttgaaaggacataatttctgagaacataataattttttaaataaagcaatctagcttcatggaaattttactacaaagcttttattttcttatttttccatgaatacatgacagtgtcttaatagaataggaatgatcacaagaatgattattttgtagatcacagaatctcaaatggaattccaaattctgctacaaagagcaatccaatacctggatatcatattttgaacatatcagayatacagatgtttaaacatcttttccttcaagaaatatttgttaaatttctcatctgtgtcaaatttctatctctaagccaagaaatgacagctatatacacaaataagcaacaaaatattataggcatacacatatgagcattacatatattctatgtgcataatctactgtgcaacaaaaacatca

SEQ ID NO: 149836 - DNA, 621 bp, Homo sapiens
ttaaatctgtgaaaaatgaaaataaaaataggtgtacttgaaatgcctgactgaaacagttgtggtgaaaaactaatgaatgcaatgtttatgcatgacagttttacttttgctttgattaggtgaataaaggttattttcaacttcattatttaaaaayagcaaaagtttgcagatggcagatgtaacttttatcttcagtttatgaaggtcaattttcagacaccttatttttttttaataattattttcttctttttgagacagagtttggctcttgttgcccaggctggagtgcaatggcgtaatctcggctcactgcaaacttcgcctcccaggttcaagtgattctcctgcctcagcctcctaagtagttgggattacaggcatgcgccaccatgcccagctaattttgtatttttagtagagacggagtttctccatgttggtcaggctggtctcaaactcctgacctcaggtggtccactcacctcggcctcccaaagtgctcggattacaagcaggaaccaccacgtctgacctcagacatcttattaatacattatttcaaagtattttactcatcaaagtacacttgatccccttagaacctcaagacag

SEQ ID NO: 149837 - DNA, 621 bp, Homo sapiens
ttaaatctgtgaaaaatgaaaataaaaataggtgtacttgaaatgcctgactgaaacagttgtggtgaaaaactaatgaatgcaatgtttatgcatgacagttttacttttgctttgattaggtgaataaaggttattttcaacttcattatttaaaaacrgcaaaagtttgcagatggcagatgtaacttttatcttcagtttatgaaggtcaattttcagacaccttatttttttttaataattattttcttctttttgagacagagtttggctcttgttgcccaggctggagtgcaatggcgtaatctcggctcactgcaaacttcgcctcccaggttcaagtgattctcctgcctcagcctcctaagtagttgggattacaggcatgcgccaccatgcccagctaattttgtatttttagtagagacggagtttctccatgttggtcaggctggtctcaaactcctgacctcaggtggtccactcacctcggcctcccaaagtgctcggattacaagcaggaaccaccacgtctgacctcagacatcttattaatacattatttcaaagtattttactcatcaaagtacacttgatccccttagaacctcaagacag

SEQ ID NO: 149838 - DNA, 602 bp, Homo sapiens
aaggtcaattttcagacaccttatttttttttaataattattttcttctttttgagacagagtttggctcttkttgcccaggctggagtgcaatggcgtaatctcggctcactgcaaacttcgcctcccaggttcaagtgattctcctgcctcagcctcctaagtagttgggattacaggcatgcgccaccatgcccagctaattttgtatttttagtagagacggagtttctccatgttggtcaggctggtctcaaactcctgacctcaggtggtccactcacctcggcctcccaaagtgctcggattacaagcaggaaccaccacgtctgacctcagacatcttattaatacattatttcaaagtattttactcatcaaagtacacttgatccccttagaacctcaagacagagaatgcaaactagtgaatgatccttggttaacagttgtctttatttacagggacgttgtcctgaaaaattgctttcagaatcttaagacaaagtgattcattttttatggagggattttataagttgtattttaattttttttaacaaattttacttaatgtgctctttcaagtgaaaacacctaaa

SEQ ID NO: 149839 - DNA, 602 bp, Homo sapiens
aaggtcaattttcagacaccttatttttttttaataattattttcttctttttgagacagagtttggctcttgttgcccaggctggagtgcaatggcgtaatctcggctcactgcaaacttcgcctcccaggttcaagtgattctcctgcctcagcctcctaagtagttgggattacaggcatgcgccaccatgcccagctaattttgtatttttagtagagacggagtttctccatgttggtcaggctggtctcaaactcctgacctcaggtggtccactcacctcggcctcccaaagtgctcggattacaagcaggaaccaccacgtctgacctcagacatcttattaatacattatttcaaagtattttactcatcaaagtacacttgatycccttagaacctcaagacagagaatgcaaactagtgaatgatccttggttaacagttgtctttatttacagggacgttgtcctgaaaaattgctttcagaatcttaagacaaagtgattcattttttatggagggattttataagttgtattttaattttttttaacaaattttacttaatgtgctctttcaagtgaaaacacctaaa

SEQ ID NO: 149840 - DNA, 602 bp, Homo sapiens
aaggtcaattttcagacaccttatttttttttaataattattttcttctttttgagacagagtttggctcttgttgcccaggctggagtgcaatggcgtaatctcggctcactgcaaacttcgcctcccaggttcaagtgattctcctgcctcagcctcctaagtagttgggattacaggcatgcgccaccatgcccagctaattttgtatttttagtagagacggagtttctccatgttggtcaggctggtctcaaactcctgacctcaggtggtccactcacctcggcctcccaaagtgctcggattacaagcaggaaccaccacgtctgacctcagacatcttattaatacattatttcaaagtattttactcatcaaagtacacttgatccccttagaacctcaagacagagaatgcaaactagtgaatgatccttggttaacagttgtctttatttacagggacgttgtcctgaaaaattgctttcagaatcttaagacaaagtgattcattttttatggarggattttataagttgtattttaattttttttaacaaattttacttaatgtgctctttcaagtgaaaacacctaaa

SEQ ID NO: 149841 - DNA, 602 bp, Homo sapiens
aaggtcaattttcagacaccttatttttttttaataattattttcttctttttgagacagagtttggctcttgttgcccaggctggagtgcaatggcgtaatctcggctcactgcaaacttcgcctcccaggttcaagtgattctcctgcctcagcctcctaagtagttgggattacaggcatgcgccaccatgcccagctaattttgtatttttagtagagacggagtttctccatgttggtcaggctggtctcaaactcctgacctcaggtggtccactcacctcggcctcccaaagtgctcggattacaagcaggaaccaccacgtctgacctcagacatcttattaatacattatttcaaagtattttactcatcaaagtacacttgatccccttagaacctcaagacagagaatgcaaactagtgaatgatccttggttaacagttgtctttatttacagggacgttgtcctgaaaaattgctttcagaatcttaagacaaagtgattcattttttatggagggattttataagttgtattttaattttttttaacaaattttacttaatgtgytctttcaagtgaaaacacctaaa

SEQ ID NO: 149842 - DNA, 615 bp, Homo sapiens
  misc_feature (1)...(615): n = A,T,C or G
ttaaaaatcctgcccaaacaggttttccctctgtcttcatggaggcaagaatggattggagtaagccaatgagcagtgacctggtactgagtgcccagcggagttcatttaccgcctgcacctcacctggttctgcttcaagaaagcctggacatgcccacaagcaagctttgtccggtaggggatcaaacctttcttccaaacctactgcacctcttcatgtgtccttttctccttatcaagtaaagtaggcttgaggtcctttgaaccttcaaatgcatatgaatattaaggacaattggattcctgcattactcatgcttctgccacttacccaccgaacagtacaagtgtgtgagatgctcagggtctgtctggaactcctgttttccccctctctgcctagaggactagaatattcagttgtatattttaagagatttgytttatcttgaatctgcaggcattcatcaccatatgcagcagcttgaaaaataattatattcaaaannnnnnnnnnnnnnnnnnnnnnactgccaagcagagattagaagggaaacctacaggcttattggaatatctggattttgagacactaaaggccagatatcagac

SEQ ID NO: 149843 - DNA, 554 bp, Homo sapiens
taaactggatattctaaagactcactgtccacaggactcaggatcatgaagaacggagggaggtagggactatacttcaccaggggaagccaaagtttcataatagccaaagacaattcataacaaaccttgactgaattctggatttaatgtttaaaaatagctatcaaggacatttggggaatacctgagggcatccaagtatggactatgcattgagtggtgcaactgaaataaaattgatattcttgggttaataatggtattgaggttaggaaggcaattgtccttatttttgggagacccaactgaagtgtttaagggtaaaattttatttgtctgcaaacaagtgttttgccaaggtggcttggcaaaaaggaagtgtctgtatatattgaaaagaagagacacatggaacaggagtgccaagatgttcagccagcaaacctggccagggggcagagaggtgctcatcacaccaccctttyaacatgaaaaataagtgaattttttaagagtttaaaaaaagaactggggctctaaagtcagccagt

SEQ ID NO: 149844 - DNA, 574 bp, Homo sapiens
caatcagatttgtgaaaaagactctaacaattactcttaaatagaggtttggggttttttgtttgtttgtttcttgttttttgtttcragatggagtgtcaccaggctggagtgcagtggggaaatctcagttcactgcagcctctgcctcctgggttcaaatgatcctcccacctcagcctcgtgagtagctgggattacaggtgtgcaccacaacacccagctaatttttctattttttgtagagacaggggtttcaccatgttggccaggctggtttcaaactcccaacctcaagagatctgatcgcctaggcctcccaaagttctgggattacaggcatgagccacagcatctggccagagattttttcttttttaaataactttaagaacaattgactaaataaaaaaattcagaactctaagaagaaactgatgaatttgtgagacaacaaatcatgtcaagcagaacaaaaattaattacatgagattaaataactgatgaagataatgtttttataacttatatttgaaacattattggttcttcacttaagtgttttgttttcca

SEQ ID NO: 149845 - DNA, 526 bp, Homo sapiens
tgggcatgcaagccagaccacagtgggcgaggagaaaacaggaggcaaagtggtaccagcctccatagatgctctcagaggaacttcagaatgttggccrggaggggaagctgctaaagtcagggagggaaaagaggagctaatatttacctggcaaggggcttccacaaaaagtcctcaccaactgtactccacaatcctgggagaaagggatcaccccagaaagagagaagaggaaatcaaggctcagtgaaattgctggtccaaggtcacaagaccagtaaaggttgagtttgcacccaggaatttgcacctaagattgtatgactctgatttttctgctacattatgcactggagaaggaaacaaagatctaggaagggcccttcaggctgggagggactggcgttcatgtacaggtgaagagaatacatggtggaaattgtcccacaggtggtgggaggtagggggagaatgccacaggtacataattggttgaaaaattcaacaaataacaaaaccatgg

SEQ ID NO: 149846 - DNA, 526 bp, Homo sapiens
tgggcatgcaagccagaccacagtgggcgaggagaaaacaggaggcaaagtggtaccagcctccatagatgctctcagaggaacttcagaatgttggccgggaggggaagctgctaaagtcagggagggaaaagaggagctaatatttacctggcaaggggcttccacaaaaagtcctcaccaactgtactccacaatcctgggagaaagggatcaccccagaaagagagaagaggaaatcaaggctcagtgaaattgctggtccaaggtcacaagaccagtaaaggttgagtttgcmcccaggaatttgcacctaagattgtatgactctgatttttctgctacattatgcactggagaaggaaacaaagatctaggaagggcccttcaggctgggagggactggcgttcatgtacaggtgaagagaatacatggtggaaattgtcccacaggtggtgggaggtagggggagaatgccacaggtacataattggttgaaaaattcaacaaataacaaaaccatgg

SEQ ID NO: 149847 - DNA, 393 bp, Homo sapiens
ttctgcagttgtctaattctcctctcaggatgttcagattcattgggttttctttcagttcatcttctcgaagaaacctcctcctcatgacttctgactgcttgagtcttcactggtctcttcacctcatgcacacctgtcattcttgaatcttcctttatcaccatcaatttcacctytctcctgagatcccttgttttccagagcctatcccttctttcttcttggtttatacccttgttttattgaaattcgccctccacaagctttcttagaaagagtgcaagggactcttgaaattttttgagatgttgcatgtctgaaatgtcttcattccaccttgatacttgagactgatacttcggttgggtgcagaactctaagtcaaaaata

SEQ ID NO: 149848 - DNA, 539 bp, Homo sapiens
cctggacacatgctcgggagactcacttgtcaccaaaaggtcagactgctctggaatactgtcctactgcttcaggatcctgcagccctttgccccatctcatttccatgcctaatgcaattttagagcatgatgtgtagtaagcatggctaaaaattctggaagatttattacattcccttgttctatagatcaaggacaatttttaataaatccttgcttttgctgaaygatttaatatgccattgtctaggcaacagaattgtcttcaattagattttaaaactaatataggaagaaactttcccctttccttgccaacattattagataaggccataagtcctgatcaagaacaaaatttgctggtgcctcatggggaccttgaaaccggattctcttttgcagcagtatggctccctaccttttattccagggcaggcaccctgttgaggtggttgaggctaccagtgggaagtgcccacagccacatagggccaggtgctgctcatatagagagatccgcccccgccagagga

SEQ ID NO: 149849 - DNA, 509 bp, Homo sapiens
cctttttgttgttgctttttttgttttgttttgttttgttttctgtgtcttcaaggtattttggaactattaggttgttgcaaaagtcatcgtggtttttgccattaagagtaatggtggtttttgccattactcttaatggcaaaaactgtgatgactttcacaccaacctaaaaaattcaatcagagattgtttttcctgcttctatatctccagcctctagctctgcacctggcacataatggaaaccccctatgtgctcgttgaaaaactgaggctgcatttggggccactaacctgaagtcattcataacatttttacttttaaatttaccatttattatctttaaaaatgaaaaataaaccmtttccctcttatcagcagcctcctcaagggcaccagtgttaatattcttagaaatcagagaaaaatgtacccacagatattttaaaacacacatggaatcccagtgtccacactgagctgcaccttgctttttttcagcta

SEQ ID NO: 149850 - DNA, 506 bp, Homo sapiens
ctactgaagtctttaataatttttagattgtctcagatggagacacacagataattagttaatgcaaacaaaatattgacacatggttttaaaaataaagagaaacaggatatgagaggatataagcccttgcagcagaaaataatacaagacaaacagcagcctccatgcagcccagcctcaacttccattttctgaacatacgtacatttcctcaaataacaaagtcataaccattgttatactttaaaaactacctaccttcctctgtcctttccctgctccctcccmtaaagagcaattcagtggatggttctatacatcaactaggtttgtggcaccactgtaggtttacagttcaaactgtttttctagagagagctaaggaagaggctaacagaagttctctggttaaccttgtcctcactcttacagggccacctccaagtagggcgaggaggagacccattaggctctgtgggagccaagactgccttgtctggcag

SEQ ID NO: 149851 - DNA, 450 bp, Homo sapiens
ggcactgaaattttgtcatgtttcagagtgttggaaaagaatggtggtctcccattattggtggcaatataaatcggcacaacctttgtggrgaaaaatttggaaatctcaaaattacaaatgcaagtgccctatggtgcagcgattctacttatagttgattctatgcagatgctggtgaaattgtattccagtattggctgtaacttaagcaaaagatgagaggaaggaaggatccaccttttttttttttttttttttttaagagagtgagtcttgctctgtcacctaggctggagtagggtggaacaatctcagctcactgcaatctccgcctcctgggttcaagcgattctcttgcctcagcctcccgagtagctggggttacaggcatgtgccaccacacctaggtaatttttgtatttttagtagagatggggtttcaccatg

SEQ ID NO: 149852 - DNA, 479 bp, Homo sapiens
atcactacattatctgtgcaggttttaggcatcccccaaacattcctaactccccttcacaccttcaccctctccaggattgcaatccgatcacatctgcttcctgcctgctctggtaagaacagtgggtctctcaytcactgccttgaaagatgaaagcccaatcctgttaagagagcactgccgttacatcgacattgcccaggcctcttgcaaggacgattattaactccccaacagacttaagtatggactcaactatacttgggtaaatgaagaacagaatacggcactagatttcctcacctgtaaaaactacaagttaaacaatacagcaaatcttcaaacagcattatggtcacttctgtacatgcattaattacaaccagtatttattgaagaccttctacatggaaaagtccctgctccaagaggcccaaaatcccaaataggggagacagcctgagacagtcaccaat

SEQ ID NO: 149853 - DNA, 479 bp, Homo sapiens
atcactacattatctgtgcaggttttaggcatcccccaaacattcctaactccccttcacaccttcaccctctccaggattgcaatccgatcacatctgcttcctgcctgctctggtaagaacagtgggtctctcattcactgccttgaaagatgaaagcccaatcctgttaagagagcactgccgttacatcgacattgcccaggcctcttgcaaggacgattattaactccccaacagacttaagtatggactcaactatacttgggtaaatgaagaayagaatacggcactagatttcctcacctgtaaaaactacaagttaaacaatacagcaaatcttcaaacagcattatggtcacttctgtacatgcattaattacaaccagtatttattgaagaccttctacatggaaaagtccctgctccaagaggcccaaaatcccaaataggggagacagcctgagacagtcaccaat

SEQ ID NO: 149854 - DNA, 470 bp, Homo sapiens
tgatcactacattatctgtgcaggttttaggcatcccccaaacattcctaactccccttcacaccttcaccctctccaggattgcaatccgatcacatctgcttcctgcctgctctggtaagaacagtgggtctctcattcactgccttgaaagatgaaagcccaatcctgttaagagagcactgccgttacatcgacattgcccaggcctcttgcaaggacgattattaactccccaacagacttaagtatggactcaactatacttgggtaaatgaagaacagaatayggcactagatttcctcacctgtaaaaactacaagttaaacaatacagcaaatcttcaaacagcattatggtcacttctgtacatgcattaattacaaccagtatttattgaagaccttctacatggaaaagtccctgctccaagaggcccaaaatcccaaataggggagacagcctgaga

SEQ ID NO: 149855 - DNA, 326 bp, Homo sapiens
ggctagtcagtgaggccattctggttactgttgctgcagctacccagactcataccccagctgagtagggtcttccagcccggttccacagggacagatctccaacttagagtctctaggcttcttgctatgattccatcattctgggatcagactcaagctgtctcctacttctctttgccagcctccgtgactctgacmccacttgcttgccctctcttgcctatgctcttcctgaccttctttcttcttttggtgcctgccctacaatcctcagatcttctggccctggtcctttccttttgaaattcctaggtaagcagcca

SEQ ID NO: 149856 - DNA, 398 bp, Homo sapiens
tcccctgggctagtcagtgaggccattctggttactgttgctgcagctacccagactcataccccagctgagtagggtcttccagcccggttccacagggacagatctccaacttagagtctctaggcttcttgctatgattccatcattctgggatcagactcaagctgtctcctacttctctttgccagcctccgtgactctgaccccacttgcttgccctctcttgcctatgctcttcctgaccttctttcttcttttggtgcctgccctacaatcctcagatcttctggccctggtcctttccttttgaarttcctaggtaagcagccaactcctcagggcctacaggatacccacttctgtcccaaagtcctagtactgcaaccaaagaccat

SEQ ID NO: 149857 - DNA, 432 bp, Homo sapiens
tggaggaagaaaggaagacattatatatatttttaaagtatgttagaatagccatgtctagacattttaaaaagtgatggcaataaagcaactcttgctgagagaaggtaaataaaaataatattaaacatttgacaatagaactgtagaagataaagctctgtcagtgtgatgtggtgttttgtaaagatctgtctgcttgtgagcaagaactggaaggtgataaaaatgaaaatcagttcattaaagagtacaggttttgtaactttaaaatcttgaacgttgctgttccatcatctatttgatatttcttaagggaygagttattcaatctctgtctcatctgttctaggcacagcgacttggacagtggcaacaccctatggagtaagacacgcatgccggtatctgtgtgtattttgttttaaagac

SEQ ID NO: 149858 - DNA, 458 bp, Homo sapiens
cacactcacagcagatattccattgttawccttttcattaacacttgaaggatattaatctagtttatgttcttgctattcctaagataagacacctatgcattcttacccaactttactaatccttcacccagtcatcaggtagggatgagcccctgctcccaaaatgttgccacagctttataacaggatccaatgatgagtacctgtacacaacaccaagaatcacttctcttttaacaaaaataagttacatacacacacacacacacacacacacacacacacacacacacacatctgagactggtctgaacttccacaaggaagcactgctttatgtttgggatcctttgatcctttgagagagagacagagagagacagaaagcagggattcatattcccaacgggcaactgaggtaatgggggttccaagaggtgaggtcacttatacac

SEQ ID NO: 149859 - DNA, 497 bp, Homo sapiens
attttctaaatcatcctcggatacatcttgcaatgagaataaagtattggagctacaatctgacagctgcaaatccttcaaaggtgtagagggaaccaagattgtttcagctaattagatatttgagctcttatatttatatcatatttgcacatatcttccctctctaccttcccctaaatcaaggggaaaatactatttcagcatctccagaratgactggattctatacatttttactactaaaagtgcaataaatgtactgatcaatcactgtgtatgtgggatgtggcactggatctctacaggacaaggtgctcagagtttcccatgaaagaagaggggcatgataaccatccctagctctggaggctgttgtcaaagcctgctgggtctctctggatgacggaggtaaaaggcacagtgaacctgcactgcctttcagtgccctctgctgctgggtagctgggtggccgcaaaagagctgggagagaaat

SEQ ID NO: 149860 - DNA, 497 bp, Homo sapiens
attttctaaatcatcctcggatacatcttgcaatgagaataaagtattggagctacaatctgacagctgcaaatccttcaaaggtgtagagggaaccaagattgtttcagctaattagatatttgagctcttatatttatatcatatttgcacatatcttccctctctaccttcccctaaatcaaggggaaaatactatttcagcatctccagaaatgactggattctatacatttttactactaaaagtgcaataaatgtactgatcaatcactgtgtatgtgggatgtggcactggatctctacaggacaaggtgctcagagtttcccatkaaagaagaggggcatgataaccatccctagctctggaggctgttgtcaaagcctgctgggtctctctggatgacggaggtaaaaggcacagtgaacctgcactgcctttcagtgccctctgctgctgggtagctgggtggccgcaaaagagctgggagagaaat

SEQ ID NO: 149861 - DNA, 514 bp, Homo sapiens
atgcagcaaaaaagaaaaacaagataaaagagagaaagggaragaagaaaacagggaggaatgatttacagtaaaagtgttatttgtttaaataagaaaagaaaattattaagcttatttagtctgactgctataaggtttctgccaacacatattctctgccttgaaccctgcctcagccatactccctgcctctctctaaataattcactagtcatagcattagtagttactgataaatgtccatgctcaaggtcccaatttctcttttttccaaaatgtattagctttctggataaattgtaaagtttaagtctcaggcataccataagaaaaaatcctaacattactcagagtggcaccaaaaggtaaaccaataatgagaattcataaaaaacctcaaacacaatcactagagaaagtgacgccttaggtctcagggttggaaaatctgaaaatatctggggaaaagtagaactgtgaggtgggcacctgttaaatgctttgtatttct

SEQ ID NO: 149862 - DNA, 587 bp, Homo sapiens
ctcttgtcccacacaccaaaaaggaggataccaaccaaaagaggccagatgactgaagaccaagttataggacacactgtagctgaggagtcaattttagactttggcttagcagttgtataggctagagttctattcagtggagggcaggacagaaaactcctcmacagaacctgggaggtgatgggaaactgtctcatgatagcattccaaaggagatagggaagtgagtgggagatggccttaaagtacatctcacaatcttcttgtcctctcttgttctgggaggatcaatggatgttccaccaaggctcagattagctgtggttcaagcctctgcttatgtggcctatttggatacctgcaggttctccagggtgccatggtaaaagtgctcccctacaccaccagacatccctgtaagttgataactactccttacaagacctgagtttcatatcctggtgacctgctgaacataactctcatttactaaggtctcattgtgaatgtgctgtccacatttaaattctaacaaaggctggtagtatcattaccataaacagaacaatagcgaatggacttgt

SEQ ID NO: 149863 - DNA, 644 bp, Homo sapiens
ttctttcactttacactcaagaatattttctggttatctgttgtgtagtaggttcttcctgtaccggctgctgaagaaataggggagtggataccaccccttccactcaggtaaatagatttgtgaaactattatgttcaggagagtcaaacatcctgctacctgtggttccacagtcctcacaggtagaagactggtgatatgtctttgttgggctttcatgggcattgcttgggtttggaagtatatcacaattcagtcgtcactatcacagtctccttagtacccaygctgaccaaaccaaaatgaagagactcgcaaatgaggtgagaggcgattctacccaaagtctttagatagaactacccctcaaggtactgtcccaccactaggtggtgagaattcctatggctccacatccctcagtcccaactacttgatattgtccaacagatttaatatttgatatctgttttgtgcaaaatagtataccaacattctcagagtgagaacatcacttttggtctgaaatttttgagaccttcagagagttaaagagtcattttctatgtgtggcattagaagcacaaatcaaaatccttttataagaatgtcgaaaaaaataaagaaaagaaaaaggccca

SEQ ID NO: 149864 - DNA, 486 bp, Homo sapiens
atggagtggtcaaaaatgaaaaaaaaaaactactctattaaagacatgaaaggagcttacatatttaatattcaagaaaatcacaggggcaatctaaactccttggccaaatcagatagagagtctgtgaagggtcgaaatatgraattcaaagtgaccctttgaaaatatttggaatttctgaataacaagaagagtcacaataacaatccaataggagcttgtatgtatttgggggttagaattcactgtttcatttatgttaccatatttaatccactcaataatacagagaagtagtttttcttgttctcatttcataggtcagataactgagttttggagacaatgtcatgcagctcaaggacctctgcccaggtgtctggctttgagctctaggctttgggcaccaccatactccataggacaggttttccaaaagggaaaactccaatcatgtagcaggaacaaagctccctcaccttt

SEQ ID NO: 149865 - DNA, 538 bp, Homo sapiens
atcaaacaaagatgtttgaatttgtcattctgataaaatgacccacaataggaatcttcacagagcaagttttcttcccctcctcccaattcagtatatcacatctccctctccaacccacaaaaatsaatttgcagagataaatttacatataaataaaagtatgcctgcaggttgtaagttcaatcaataaagccacaagcatttgttaaatgcttcctatatgcctagttatgttttaagtgcttggaggtacaaaagagctacatggaatctctctggattcatttaaaacctattttgttacattgaaaatgtatcaaacgttccaaagaaaaaaaaagagagacaaagcctcttcaggaaccctttccttttgcgagcctttgaagctcatgttaaatactatagaagagtttttgaaacttagattcttaaagggaaaaataataggttggcctgaggtttgaaagaaatgttgtaacagtcactgtgaggcatccttcaggaaaaatagtgctttcagtgtttataagtt

SEQ ID NO: 149866 - DNA, 538 bp, Homo sapiens
atcaaacaaagatgtttgaatttgtcattctgataaaatgacccacaataggaatcttcacagagcaagttttcttcccctcctcccaattcagtatatcacatctccctctccaacccacaaaaatcaatttgcagagataaatttacatataaataaaagtatgcctgcaggttgtaagttcaatcaataaagccacaagcatttgttaaatgcttcctatatgcctagttatgttttaagtgcttggaggtacaaaagagctacatggaatctctmtggattcatttaaaacctattttgttacattgaaaatgtatcaaacgttccaaagaaaaaaaaagagagacaaagcctcttcaggaaccctttccttttgcgagcctttgaagctcatgttaaatactatagaagagtttttgaaacttagattcttaaagggaaaaataataggttggcctgaggtttgaaagaaatgttgtaacagtcactgtgaggcatccttcaggaaaaatagtgctttcagtgtttataagtt

SEQ ID NO: 149867 - DNA, 582 bp, Homo sapiens
tttataaactcctattttatttattttttattttaacaaaccccttagatactgatgttctgtgggttctattcttgcttctcccctttcttgatttctcttctctttcttctcattctgtaatagcctcgaacagcctgaataggctgatgactcccaaaactctctctttagctttgtcattttccctcagccccaaatctataatatccaactgtctgcttgatatctctaatctggatggtatgcagacacctcacacttgctagggactttagacttcagggatttagactttagtgattttgatctatggggatttcaacattagggattgtggggtttgggattgtgtcctttgggattatgttccaaacccaacctcatcattccttccatttgccaactgagaatatttgcaattgttctctactcctttctctccctaacagcctacrtccagtaagtcacccaagtcattatagttttacctcctaagtcctttgattatcccctcttatggtggtgaccctaggaaaataactttaccttcctgtgtttcaacttcttaatgaaacaaag

SEQ ID NO: 149868 - DNA, 545 bp, Homo sapiens
ctgtaatttcgcatgcttactttagcttatgtaaaatgtagatttcctgagcgctaatcagagcctcacaagaatgtaaccactggcctcattgcttgctgtctcttttttttccttcccttcctgcttgctttttctcctttacatattaatgtttccaaaaccatctttggaaaaggtgcaagtcacaggtcctaccatgatttttgtttcttcttcctgggtgcatyctcaaccttggcaaaatgaacctctaattaattgagatctgcttcagtcactttttggtttgcaccgattaaagcagagtgcctggtggaggcacctgggcatggttatgcttttgagcttcccagtgcaatctgggaagagaactaccattttagggcaagcatttcttgaagaccgcagtaaggagtttgctttttagtgaggatgtaattggaagtatctgggaggtttcaagcagaaaaatgacatcctcaccttcactggtttaaactatcaaaagaactcgttggtggaaagaaaccagctttatgaaa

SEQ ID NO: 149869 - DNA, 421 bp, Homo sapiens
gccatgacaagcaagtctcaggagtacactggtagggacccagagcaacagcttccaacccagacagacacccagacgcaatagcatcccgaaggcagacccaggtctggagtggaggagactctgcagaccacctcccccgcccygccaccccagtgtgagaattgcaattcaatctttctttcccagtgactgtaatacaatccaggatacaacaacctaaaagtggacctttaagggatgtatatgatgtacatgatgaaagaaaagcaagtcatgtatgttaattccaagcatttctcctcctcccatgcttaacagaattttgtttggacccttctcactcaacttccatccatggaccatgctgctttgtgaaataagccctttggggcctggtaatgcagaggaaggaaattgg

SEQ ID NO: 149870 - DNA, 421 bp, Homo sapiens
gccatgacaagcaagtctcaggagtacactggtagggacccagagcaacagcttccaacccagacagacacccagacgcaatagcatcccgaaggcagacccaggtctggagtggaggagactctgcagaccacctcccccgccctgccrccccagtgtgagaattgcaattcaatctttctttcccagtgactgtaatacaatccaggatacaacaacctaaaagtggacctttaagggatgtatatgatgtacatgatgaaagaaaagcaagtcatgtatgttaattccaagcatttctcctcctcccatgcttaacagaattttgtttggacccttctcactcaacttccatccatggaccatgctgctttgtgaaataagccctttggggcctggtaatgcagaggaaggaaattgg

SEQ ID NO: 149871 - DNA, 257 bp, Homo sapiens
aatctttctttcccagtgactgtaatacaatccaggatacaacaacctaaaagtggacctttaagggatgtataygatgtacatgatgaaagaaaagcaagtcatgtatgttaattccaagcatttctcctcctcccatgcttaacagaattttgtttggacccttctcactcaacttccatccatggaccatgctgctttgtgaaataagccctttggggcctggtaatgcagaggaaggaaattggggagtaggt

SEQ ID NO: 149872 - DNA, 632 bp, Homo sapiens
gaggaacaggcactcccccagttttgggcacggagacacagacaagcaatcccaacacaaatgtggcatattgtcatgctctgacatacatggtcatgcacagacggggaaggtacatggatgcatgtgtgtgcatctggccctgcaatgggtcaggaagctgargagccacacagcataaacgggaccgaccgcagtactaagtgtcctggctcaggggcactgagcacccaggcagagctcgtccagctccccaggaagccagccagggcagagaggaaaacttgttaatgggttgttaaattgtggttctaaatttacctttttcaatgtagataattaaaaatagcttagcgtcattaggtggggatctgaatttgtctttttaaaatacagataactgattgtcatggtaccatttattcaattgtcctgtttccccattgatatcaaatatattatccacattttcttatgtgtatggatctatttctgacctttctgttctgctccagttgtctgattttatccccgcacccgtacttccctgctttaaacacagtagttttgtaatcagtcttaatgtctgataggatagatatcttctgattcttcttttcctcttcctggga

SEQ ID NO: 149873 - DNA, 632 bp, Homo sapiens
gaggaacaggcactcccccagttttgggcacggagacacagacaagcaatcccaacacaaatgtggcatattgtcatgctctgacatacatggtcatgcacagacggggaaggtacatggatgcatgtgtgtgcatctggccctgcaatgggtcaggaagctgaagagccacacagcataaacgggacsgaccgcagtactaagtgtcctggctcaggggcactgagcacccaggcagagctcgtccagctccccaggaagccagccagggcagagaggaaaacttgttaatgggttgttaaattgtggttctaaatttacctttttcaatgtagataattaaaaatagcttagcgtcattaggtggggatctgaatttgtctttttaaaatacagataactgattgtcatggtaccatttattcaattgtcctgtttccccattgatatcaaatatattatccacattttcttatgtgtatggatctatttctgacctttctgttctgctccagttgtctgattttatccccgcacccgtacttccctgctttaaacacagtagttttgtaatcagtcttaatgtctgataggatagatatcttctgattcttcttttcctcttcctggga

SEQ ID NO: 149874 - DNA, 626 bp, Homo sapiens
tccattctctttggatagcatcatgttcttgtttcacagatgctatcctacctatttcctttttcctgtcctattcttgtttcctacctgttgcctttttctgtctgcctactagcttgtttggtattcaatcattcacattagagtcattctcacattctcaaatctctgataattatatttaagagtggggacctaaagcattgattgaaagtcctgagctcattgtggcacttgttgattgtgaactacactgttaagtgatacagctgggccatttgctagggaacctcaatgtaagtctcttcagtctttcttattgagctactcagattccccagaaacatttattctaatctcctgctaggaagttaaagggctgtgttctgggattcaaagagggcacagagtagaggagaaagcctcggagtctaagcatccagtttgcattcagtcattytgtctccctattttcagtatggtacccataacattgactatgcctggtgtcctctatctatggacactctcttttacctctccagaaaataaaccccttgtatcttggccaggatgttagggcttcctaacccatcagcaaggaatgagggagaaaatgtaggagt

SEQ ID NO: 149875 - DNA, 565 bp, Homo sapiens
aaagactctgtgttttctatttaactattctgtttcccaaagagtcactgaaactcatgaagattaagtaatttagctaagattgcacaggaaataacagaactagattttaaaataagttctggccctaaagccactgttttatccagtacaggtgatgattgacagcaacaggtgtattgccggcaggtgtatccctggggcccccacaattggaagaatatgagctctctgagtgaggatgccaagatactcatggcctttgaggctctctggatgtcccatgaacatgacggtgctctttgaatggtagatagttctcaatttaaaaaaaaagaaaagaaaagaaatgccctgccattagatgacttgacctagaagttactccctaaaaattatccacaggtcatcccatctacctggggcatggtgttatggatgttccttgaacacgtagagctgyctgagtgtttgcccaaagagaacattggcatcactcacctttgaaatacaaaagagaagccgtttgctttacttaaatcctgaatctttgatcatccacatc

SEQ ID NO: 149876 - DNA, 578 bp, Homo sapiens
gaggcacacagttttaaaaccccttgctactcaaagggaggtctatgggctttgcatccatatcacctgggagcctcttagaaatgcacactctcaggccctgacccagactgactgagtcagaatctgcattttttttttaagacagagtctcactctgtcacccaggatggagtgcagtggcacaatctgggctcactgcaatctctgcctcccaggttcaagcaattctcctgcctcagcctcccgagtagctgggattacaggcatccatcaccatgcttggctaatttttttttttgtatttttagtagagatggggttccaccgtgttggccaggctggtctcgaactcttggcctcaagtgatcagcctgcctcaggctcccaaagtgctgggattacaggtgtgagccacttgcccagaatctgcattttaataggatcccaggtgattcctgtgcataccaacgtttgggaaatactgctctaaacctcaatctycctgttatagaaagtgggaatcataccttgtaggattaaagaaggtaccccctaaaaacttcttgcccaatagt

SEQ ID NO: 149877 - DNA, 528 bp, Homo sapiens
acactggttgagaataatgtaggaccagttgctccatgaggttcctttcatctctaaaaattggtattctatccatgtgtgcaaagctggcaagaagataaatttctatgcttccacatggatcagaggagattgtgagttgcctagatatgatgccttttttttttttttttttttttttttttttttttcagattcaggtcatcaggctcaragaatttgctgttattgccagtccgtcctcacaatgtagtaagtcctcactttccacatgctaggctaaaccttttagttattaccactcatgtccaaccggttggctccactgagagaccaacaggtgaagcaaagtcaaccacccaaagaattttaaaaccttcaaggatttttatcaaatctcttgccttgtcccattttttcagctacttctgcaaagacaagccagagagaggaagcaaaccttctcacatatcttctaataagggcaataatcttgttgtgaagcctccacctgataacctgattatc

SEQ ID NO: 149878 - DNA, 528 bp, Homo sapiens
acactggttgagaataatgtaggaccagttgctccatgaggttcctttcatctctaaaaattggtattctatccatgtgtgcaaagctggcaagaagataaatttctatgcttccacatggatcagaggagattgtgagttgcctagatatgatgccttttttttttttttttttttttttttttttttttcagattcaggtcatcaggctcagaraatttgctgttattgccagtccgtcctcacaatgtagtaagtcctcactttccacatgctaggctaaaccttttagttattaccactcatgtccaaccggttggctccactgagagaccaacaggtgaagcaaagtcaaccacccaaagaattttaaaaccttcaaggatttttatcaaatctcttgccttgtcccattttttcagctacttctgcaaagacaagccagagagaggaagcaaaccttctcacatatcttctaataagggcaataatcttgttgtgaagcctccacctgataacctgattatc

SEQ ID NO: 149879 - DNA, 211 bp, Homo sapiens
atatcaatataccgtagttgaaaccagaaccgtctccagcygtcagcagtcttggcggctactgtacagctgtcagcatgactacaggcagcgcccgaggctatctggggtaagaagtgggcctgcacatcacatcggtgagtcagtgagagtcagggccagagggaaaagcaactcggaggctgaggctggcacagatacacacaaggga

SEQ ID NO: 149880 - DNA, 211 bp, Homo sapiens
atatcaatataccgtagttgaaaccagaaccgtctccagctgtcagcagtcttggcggctactgtacagctgtcagcatgactacaggcagcrcccgaggctatctggggtaagaagtgggcctgcacatcacatcggtgagtcagtgagagtcagggccagagggaaaagcaactcggaggctgaggctggcacagatacacacaaggga

SEQ ID NO: 149881 - DNA, 600 bp, Homo sapiens
agctttctgttgccaagggcttttcagttgctttctggcaagggggtttggagctaagttcaacattcatttaagaaacaggaaaaacctgaagtacaattatcttttttaatgacaggttaatcttgctgtagtgaacctgatcagagaagagccaaactctaaagggaggaagcacagagtccttctgggggaggggaactcagacaataaagtttgagaaagagttcacagttttcttggttgcctgcaatcattgagaaataaatgcactctgcaaaagatcttgaaactgagcaaggagaagtgsccacataaggggaaactccagtgatgtggaagtgagcacaagggcaaggtaatatccatccctgaaggctaccaacagggcagagaaggaaataatcaaaacatatcggcatttcctctaggttaacaatttagttctaaagtcagacacctttgctaaggtttataatatcattaatgacttaaccagaaaaaacagtagacaaagactggtttgattttgaaaactatcagataagtttgataaattcaagttcaatcaccattaatctctaatcaaagcagaatttc

SEQ ID NO: 149882 - DNA, 592 bp, Homo sapiens
aaaggaggaagaggagaaactcaaggaagctgaccagaacttgattctaaatgattctaattattaaaaaggtcacccttatattgattaaaagagttgctttcctgaaattgtagaccattaatcctagtcttttctctggatcagmtgagaataagtttgcttcttcttcaacagaacagtatttcatatctaaataaaatgttcatatattcctttaatgatcttttctccgaatcaatcatcctcaggtctgtcagtaaattcttatgtaacaatgctctcagaacatccaagcctcagccatgtttctgtgatgttctcatccgatatcatgatttataggtgttcagagtaaattttagccaaaatattccaccctctaatctagttaaattttaccttcaggtttttcaccatctctgtaatattaagtaattgtaatacctgtataattacttaatattttaaattcatttcactttttctactaagtagtgatatacataaattcagttatgattttgatgggcttatgatggtttttctctagtaaataaagtaaaatatgtaggaagactaaatgtactgt

SEQ ID NO: 149883 - DNA, 592 bp, Homo sapiens
aaaggaggaagaggagaaactcaaggaagctgaccagaacttgattctaaatgattctaattattaaaaaggtcacccttatattgattaaaagagttgctttcctgaaattgtagaccattaatcctagtcttttctctggatcagatgagaataagtttgcttcttcttcaacagaacagtrtttcatatctaaataaaatgttcatatattcctttaatgatcttttctccgaatcaatcatcctcaggtctgtcagtaaattcttatgtaacaatgctctcagaacatccaagcctcagccatgtttctgtgatgttctcatccgatatcatgatttataggtgttcagagtaaattttagccaaaatattccaccctctaatctagttaaattttaccttcaggtttttcaccatctctgtaatattaagtaattgtaatacctgtataattacttaatattttaaattcatttcactttttctactaagtagtgatatacataaattcagttatgattttgatgggcttatgatggtttttctctagtaaataaagtaaaatatgtaggaagactaaatgtactgt

SEQ ID NO: 149884 - DNA, 568 bp, Homo sapiens
ctgaccgcagggcagttcttggagggggtatttaggctgtttttaagtacaaaagaaagtatgtggttctgatgtgtaatgaaactggtgtggtgtggggcaccactcagctcaggctgctgagaagtctctccctgtctgccagtgcagtgcttacaaactgagctttgctttccattctgagtctatggtcttttttcacagacagaattgctcatccggtcccagactgccgtcgattttcacccaagagcaatgtccataagtcaatatctacaatgtttaggattcaactttcctatctgatttcgaagcttaggattacaattttgcctattttaatcttctgattgccaagaatcctcaaagattatagatagtgagtctgagattacatttgcaagttcctttagtatcctgggatggaatcctctgagttacgaatttaaacttccytagacaagcagtcacttcttacttccccatctgccttgagtagtcattgtacttttacattttgtcttctgttcttaccggtttaaaacccagtttagttgctaaagaattc

SEQ ID NO: 149885 - DNA, 642 bp, Homo sapiens
gcccttcttttccactcctctttagctaatttacatctaatttatcctgatcaaatgtaatctaacctagactagctattctttctctgcctcctcccccatcctgtgctgttcttcatctgacctcccatctcagtgcattgccattgcttactcattctggtcccctagcttatactgtctgtaagctcctggagagcaaggactgtgctttcatcgatgtagccccaggtcttagtaccgagactggtacagataagtcttggcaggtgcttaccaaaggaagtggttaatggagttttgcttccctccagttgtctggctctacttccagagctgattcttggtaagctggggtagggaaactatcctttactacctaaccctttcttccacctctgcacacagaaaagtaacttcagcaagtttccctggtcaccgaggagccattctaggttgaaataaattctatccrtctgaacatactactctgtggtgtctgcttgacctcaccaatgaacagcctttaactttgatttctctcctctagccagacatgaaaaactgttttcttagaattccttgttctcattaaagttaggtctaagtcttccatttttcagtcttcttaaccccagcatc

SEQ ID NO: 149886 - DNA, 555 bp, Homo sapiens
gaacatggattttggagtagggtgggtccccagcctcttctcctaactagctatgcgacttaggaaagttactggacttctctccgtctgtttccctgcccataaaatgcaaataataatcmccctgcaggattgtagtgaagttacaggaggcagcataaagtaggcaataaaaacatacatttttacatcagattggatttgaatcttctctttgccttttactcactttctcttttagggaaagttaatttccctaagtctcagttccttatctaaaaagctgatcaaacaatcacagacagatttatttgaaacattaacttacaggaaggtatgtgaaagccttttgcaaagtgtgaatacttagtacatgcccattacagtttattaaaggatgtagcattatagttggtgtctaagaaataaagctatttttatgatgatgagtttgttgtgagacaatggtaacttgatataaaggtctgacaggtgggggtcagcagcttgggcacaacagagcgaaagtcattgaacccttgtgtccttgcctag

SEQ ID NO: 149887 - DNA, 529 bp, Homo sapiens
acttttctggcctgtatgactccaaatccctcaggttgtctttccaataagccacaastccaatccaaggccccgaatgatgtttgtcatgtactctctgcgtttttgacatatccttaggaaaatggagaaagaaaatggagatgctgatggctctgctcagcattccctcttgtaggagctgtacatttctaggtggtggtgaccaaagagttacctggccttggtggtaggtacctccaactaaactctgcagatttattgagagaactgagtcctatatgtaaaattaatcttcaaataggtatttctttctctccttccttctcctttcttgcttcctttcctttcttttcactctttctcttttcttcctttagataaatgagtacacagatgaacagatacagtgtgaggcaagagtctacatgaaccagggaacacagagcccagatcaggggtatttcacatccagcagcctgcagttcatcaaccttgccctctacatttatgtctcagacctgctcgc

SEQ ID NO: 149888 - DNA, 529 bp, Homo sapiens
acttttctggcctgtatgactccaaatccctcaggttgtctttccaataagccacaagtccaatccaaggccccgaatgatgtttgtcatgtactctctgcgtttttgacatatccttaggaaaatggagaaagaaaatggagatgctgatggctctgctcagcattccctcttgtaggagcygtacatttctaggtggtggtgaccaaagagttacctggccttggtggtaggtacctccaactaaactctgcagatttattgagagaactgagtcctatatgtaaaattaatcttcaaataggtatttctttctctccttccttctcctttcttgcttcctttcctttcttttcactctttctcttttcttcctttagataaatgagtacacagatgaacagatacagtgtgaggcaagagtctacatgaaccagggaacacagagcccagatcaggggtatttcacatccagcagcctgcagttcatcaaccttgccctctacatttatgtctcagacctgctcgc

SEQ ID NO: 149889 - DNA, 568 bp, Homo sapiens
acatttctctgagtctcagaattttctgtaaaacagaaataataatcctgctttgaacagcactttctagtttcatacagtatgtttgcatgccttgttgcttctgtttcttgtaacaggataagtattactgtgttcagtaatggaaatggaagttctgagaggttaaattttgccttttaaagctagttagtggtaaaacattgattaaaactcagcacgcaaggccacctaccttacagaactgaggtgagaatcaagaagaacaccaaatagaatactctgtaagttgcaaatcattcattaatataaagatttggggagttgctgagtcacatcacagaggccactggctttggaattgggcttctcaatttctggatccagttctgtcaccagataactgggtgcttttgaaaagttgtaaaacttgtatgggactcagtttcctcayttgtagaataaaatgattttttttctgggtgattgctactatctaatgatttttctaaagaataaaaatattttcttatggtcacttacacagcctctgtcccattaaattcag

SEQ ID NO: 149890 - DNA, 273 bp, Homo sapiens
tgagtggacaaaatgaggtggctaagtaactgagttattggtaaccgtgagaagcagctgccatccaaaggacttggaggacaaagggaggaggcaaagcgaggaccaccagaaggagcccctcccctacaacagcctgtgctggcagctggaggagatgccagacaaatcygtgggggtgacaagtgccaggaccaggctcagaagggagcctgcatacagttgataaaatagcaaagggctcagccaggagcttctcttggatatggaaat

SEQ ID NO: 149891 - DNA, 630 bp, Homo sapiens
ttagtgctattactcttcctggcactagaaatctttcctactacaatctcaggggttctcagttttcagagatggcactacaatgtatgtggatgagtaattaagaatgagttacatatcagtatcaaaactcacaatttgccaatcctcagtcttgggctgattcctgcctaactaaaaaggaggattttgtgtgttaaaagccagtgggccagtcctggagtcacaccaagagagattctttacacaccatcctctttgtgagtggaagggcatcaggcccccaaaataactgttgaccagtgagatgacttgtgacaggccagtggtagtwctaacaccctgtctatcttctgaaaatgaagcaagaagatagtaaacacactgtgcttccactgcaccagcaaccggactaagccttttacttacattgattcactgagtcctcttgtcaggtaaggatgattttaatctgcatttacagatgaagtaaggagaggttatttcatccttccctggatcatgggaatcatacattgcagagctgagcttcaaactgtcttaaaacttaggtatccaggcacttaaacactaacccatgccactgctcaatccaaagaaacaatgaaa

SEQ ID NO: 149892 - DNA, 600 bp, Homo sapiens
agctttctgttgccaagggcttttcagtygctttctggcaagggggtttggagctaagttcaacattcatttaagaaacaggaaaaacctgaagtacaattatcttttttaatgacaggttaatcttgctgtagtgaacctgatcagagaagagccaaactctaaagggaggaagcacagagtccttctgggggaggggaactcagacaataaagtttgagaaagagttcacagttttcttggttgcctgcaatcattgagaaataaatgcactctgcaaaagatcttgaaactgagcaaggagaagtgcccacataaggggaaactccagtgatgtggaagtgagcacaagggcaaggtaatatccatccctgaaggctaccaacagggcagagaaggaaataatcaaaacatatcggcatttcctctaggttaacaatttagttctaaagtcagacacctttgctaaggtttataatatcattaatgacttaaccagaaaaaacagtagacaaagactggtttgattttgaaaactatcagataagtttgataaattcaagttcaatcaccattaatctctaatcaaagcagaatttc

SEQ ID NO: 149893 - DNA, 600 bp, Homo sapiens
agctttctgttgccaagggcttttcagttrctttctggcaagggggtttggagctaagttcaacattcatttaagaaacaggaaaaacctgaagtacaattatcttttttaatgacaggttaatcttgctgtagtgaacctgatcagagaagagccaaactctaaagggaggaagcacagagtccttctgggggaggggaactcagacaataaagtttgagaaagagttcacagttttcttggttgcctgcaatcattgagaaataaatgcactctgcaaaagatcttgaaactgagcaaggagaagtgcccacataaggggaaactccagtgatgtggaagtgagcacaagggcaaggtaatatccatccctgaaggctaccaacagggcagagaaggaaataatcaaaacatatcggcatttcctctaggttaacaatttagttctaaagtcagacacctttgctaaggtttataatatcattaatgacttaaccagaaaaaacagtagacaaagactggtttgattttgaaaactatcagataagtttgataaattcaagttcaatcaccattaatctctaatcaaagcagaatttc

SEQ ID NO: 149894 - DNA, 583 bp, Homo sapiens
caagaattcattatatctgcacrtggtaacatgaaagggtttctgcgagtagaaacatgtaagctgcagagagatcatttttgtaaactccatgcagatagatgcacagagaaagagctggaagaacccacactgcatggttggcactgggaaggaagaacaggctttcacgttttacctaaggtatttgttcactgattatgttttaagggtatatgctcattttgaaataaaaaaggacttttcaaaagatgcacccagtaattatatgcattggggaggtgacttagagcaggaatactgctgaataatttggttcaaacatgaaacctacacaagacaaagtcacttgacagaggatgactcttcagatgttcagggaaactcacgcactcactcacacacgatgcatcggccaggctccctgatgcccccaacgcctctcctatgtccaaggaaatacttctgcagagcacgttagagtttccaatgcatgtgtgttatctcagagacaaagggcagaaaggggaaaaaacagaaagtacagtacggtaagtctcaaatttcagcatcctgttgtctc

SEQ ID NO: 149895 - DNA, 545 bp, Homo sapiens
ctgtgttactgcacagtttgcatgcccaagaagccagccctgatggcaagcaagaaagagactgctcttttcctggggaagattattaaacaatgtagaatttgacacatgcaatgacataggatggcagraacacttaccttggtttagtggatcagagatttcttagaagtgacacttaaactgagatctaaagaatgcttttttggcaaagggattatcaatgagtttgaagaaccaaaagatgtttcatattattggagggcatagtgcaaaggagaaggggaatgaaggaggatattttggaagattttatctttattctaaaaacgaggtgaagcactcaaaaacgtttaagtagggatgttttaatcagatttccatctttaaaagtgatttagattgcagagtagaggagaatggattggcgggttcaggggtgacactgaataaatggaatgttattgcaaaaagcctagggaagtttgcactagtatgatggccgctgagagggagagaaagtacatgttgtgagatatttaaga

SEQ ID NO: 149896 - DNA, 528 bp, Homo sapiens
acacacgtatatatacacactgtagtagaacaaatatacatatatacacacacataaagatacagatatgcataaatatattaatgcagatacatatactgtgtacatatatgtcacatatatactaaatacatgtacatatatacacaaatatagagctaaactaaactgtaggtcctaagggccaggatcccttcatattcattatctttgaatatatgtgtatgtgtgtataatatttgtcacatatagtaaatatatatcaaatatatatactaatatatattatatatacacatatgtgccagatatacagaatatatattataaacatacacacacacatatatacagtgagtcctacatctccatggattacgtgtctgtggattccaccaaatgtgggtcaaaaatatttggaaaaataaaaaccaakaaaaaataacaatgtaactattaaaataatacaaattttaaaaacaatacagtatgacaactatttacataacatttacattgtattatgaa

SEQ ID NO: 149897 - DNA, 595 bp, Homo sapiens
tgtgctcttaagtatagcactgacccttttgtgcaaattaatgcatagtaaaatttatccttccaaactgcacaatgatgtgcaacagaaggccatacaagtcttagaaaaattagctggctctggttttatcatcacacgagcaaaaatttgagattttgccgttcattcccctaagatcacccactcatctgcaacagcgttggcagaaagccaccctgccttccaagctgcccttcctaactgaactgtgaagggccgaccttgaaagacagattttcaaagcacagggcagagcgaggactccctttttctgtttgtggagttacaatgacttggagccccatttcttcctttgaaattagatgatgtgctattatgttgactgagcacttgtttttaacttcctttgttttactaatgctratataatttgtgagagatgctaatgttcttaaatggtaataagattatggagtaactatattgtgcatcttcaacaaatacatgctttaagtggtcctcacaagtgatggtggaatacaacatgttgtttattacacacaatcccatggaggttttcaagatcactttc

SEQ ID NO: 149898 - DNA, 596 bp, Homo sapiens
actattaaaaagagatgatagtgaccactgctatagcactgtaaaatgcttagaaaattgtcacacagtcaagttcccaaaagtcttggcaactaaactattgtacttacttgttatatttattgctattacttattaaagatatacagtgattaaaaataaaaatgttaaaagtaaaaaaaaaccacctatttatttaatgtccaaatgaatgatctttccaagatttacaggaagcaactacatcataaaatggaaagatgcatgaatttgacaaccttcaaaagtaaaaattcagtaatcaaaaattaaaatttcagtaaagaaaattaaaaattcttttttttcctctgataatgtacagatgaaaaattatgagaaatgagattaaaacaacacgagatgttgtagaataattattagtttaaattgatatatttatagctaaaagattatatacaaaaaagaggaaatacaaaataaaaattaatttttttatttaaayataaaatggaagacaattcgaagagctcaacattttaacctacttaaatattgaaggttcaaaaaaattggtaatattttaatctcacaag

SEQ ID NO: 149899 - DNA, 493 bp, Homo sapiens
gaacattatacttgattaaattggaaatttaattttaattttaacacatttaattttcacttcttgtgaaactttggcaaagttactttatctctctgtgcctcagatttcttttgtgtaaaatgggtcaacacctaccccatrtgactgacgcatacattcaatgagatggtaaaagcaaatgtcctttgagaagtgcaatatgcttcatcagtgttaagtaatatcatcataatagtagccattttataaggttgcaaaaagaagtgagtgagaaaatcctgaactgtaagccccataagagcagaaatgttcatgtttctgtcactactttacatgcaggatgtggaacaatgtctgacacatagtaggtgcatgataaacatttgttgaatgaacatgtgtaacaagcaaagtgatctttataaatgatccaagtggtgtgttgggtcaattctgtgaataaaacaaaaattatttttgtgtacttact

SEQ ID NO: 149900 - DNA, 449 bp, Homo sapiens
aaataatgcttaactttataattgtgagtcgatgaaataaacatgcaattaacaatttcctcatggtctgaatattataaccagtgtaataaactaactcaacaaggagaattttatggttctggacaaattcaaattttattcctcggattttatttatcattactatgtaaataagttgcaatctaaaattaatagtttatttgggaatctgtctgagtactaaaacaaaattmtttggcttcatgtagttgaaagccaaaaattcaaataaactttatatcatagaaaaggctgtatcagaggactttatttaatggggtgaagaaaatattttctgattttctttttatgactataaggcagatctgacaccattagttttctttctgtcataaatatagatgaatgtaatttgacaggcgtcactacaaaataggttatagata

SEQ ID NO: 149901 - DNA, 449 bp, Homo sapiens
aaataatgcttaactttataattgtgagtcgatgaaataaacatgcaattaacaatttcctcatggtctgaatattataaccagtgtaataaactaactcaacaaggagaattttatggttctggacaaattcaaattttattcctcggattttatttatcattactatgtaaataagttgcaatctaaaattaatagtttatttgggaatctgtctgagtactaaaacaaaattatttggcttcatgtagttgaaagccaaaaattcaaataaacyttatatcatagaaaaggctgtatcagaggactttatttaatggggtgaagaaaatattttctgattttctttttatgactataaggcagatctgacaccattagttttctttctgtcataaatatagatgaatgtaatttgacaggcgtcactacaaaataggttatagata

SEQ ID NO: 149902 - DNA, 580 bp, Homo sapiens
ttagttgttctttgctgacttctttatttacattgtacaaatactaattccctttttatcattatgaatctggattattaacatcaggctccccatagctttctcctctccacatagggagaaggaagaagaattcacttttatagagtgctaagtactatggttatacaacttagaagtcaacagtaaaaaattaaaatagcatttggctgttaatgacactttagcctctccaaataattcttattaaaatactcatgcaaaaacagaaaaataaaaaaaaaatcacaacatctgagccagaygcagcctactgccagcatttcgatggaatttcctcagctgaaaggccactgaaatcatactgaataaagcaactgatggtcagagaagcaggaaatgaaggagatttgcatacttaaaaataggttattttactcatcgttttcctatagactgcttccacaaggtctgtattttgggatactctacatccacctcttgacatgaccagaacactgtttcccatctctattcattagaacctttgttgaactgggttgaatcatagacccaatgg

SEQ ID NO: 149903 - DNA, 563 bp, Homo sapiens
ttgtttttatatttttttgttcctggtaatgaggatagcaaaagtaaataactgatgattcctcttgtttcttgtttttgggttttttttggaaatagagtctcactgtcactcaggctggagtacagtggcatgatctcagctcactgcaacctccgcctcccaggttcaagcgattctcttgcctcagcctcccaagtagctgggactacaggygtgcaccaccatgtctggctaatttttgtatttttagtagaaacggggtttcaccatgttggccaggctgatcttgaactcctgacctcaaatgatccacccgcctcggcctcccaaagtgctgggattacaggcgtgaaccaccacgccctgcccctcttggttttaatcactcatttaataatggtttcttatgaaaaatacttactggtagtgtagattaaaaagtatttaggctgggtgtggtggctcatggctgtaatcccaggactttggaaggccaaggtgggaggattgcttgagcttgggagtttgagaacagcctgggcaacataaggagacctcat

SEQ ID NO: 149904 - DNA, 563 bp, Homo sapiens
ttgtttttatatttttttgttcctggtaatgaggatagcaaaagtaaataactgatgattcctcttgtttcttgtttttgggttttttttggaaatagagtctcactgtcactcaggctggagtacagtggcatgatctcagctcactgcaacctccgcctcccaggttcaagcgattctcttgcctcagcctcccaagtagctgggactacaggtgtgcaccaccatgtctggctaatttttgtatttttagtagaaacggggtttcaccatgttggccaggctgrtcttgaactcctgacctcaaatgatccacccgcctcggcctcccaaagtgctgggattacaggcgtgaaccaccacgccctgcccctcttggttttaatcactcatttaataatggtttcttatgaaaaatacttactggtagtgtagattaaaaagtatttaggctgggtgtggtggctcatggctgtaatcccaggactttggaaggccaaggtgggaggattgcttgagcttgggagtttgagaacagcctgggcaacataaggagacctcat

SEQ ID NO: 149905 - DNA, 427 bp, Homo sapiens
gaattcatgcttgagggggaaatgctcttatttaacccttgccaacttcttcgagaggagtgttgttttattttatttaaattttttgccttagcatgttgcgaatgttgaccatttttggagcatctgtcttctctctattsgctttgtcccctcctgactgtcacccagtgtcagggcgtgactttgttttaggaggattgaaaaggagaagtcagcagttgctgctggaggagaatctgatacacagcaggtgtatccagcacccatttccaaactgtggatgatcccattaccagcttatctcctgacctcgctcaggtgttctcccaacttattgttcacagaaagaaaggatcctctctactactctgcctctgttctaggtttctgctcataccctgggacttcttgtatttttactcag

SEQ ID NO: 149906 - DNA, 572 bp, Homo sapiens
tgccatacggacaccatgttttctgttccaatccccataaatcaatctctcctgctcttcccacaagccatcagacttgacctttgaaatactgctatttttcctagaaagctctttgctcttaaaagaaaaatggaagcaattaaatcctctccatgcagatcaccagaggctatctttgcctccgcaaaactaaagggctgtggaaggtgtcttcatggtaaacactggatcccagccccakatcagataaaaatcatactgtgaggccttggtatgtaaacaaacctcactcctaatctaggcgatctctcatggcacttccaacatgaaggctctgcaggtctgtgattatatgattactcaaaggaggagagagaatagggtgctgattacgagttagataaagatttggagtcagagacacttaggttcaaattctagaagtccctttactagctgtgtgatgctgaccagttgcttaatccctcaaagcctcttcatatcttcctctccaatagggcatgacagcacacctcacaggccactgagggaataaaacagaatggtgc

SEQ ID NO: 149907 - DNA, 580 bp, Homo sapiens
tgattgagattttcagaaaaattcctaagagtgcttctttttagaatgaggatgggctgcaacaaatgaaatgctgaagcaggaactcctgttcctctgatatgaaaatcaaatggagrcgatactctctaggctgagtttaacataaaaggaattgggcagccctgtctggagggggacccacaggtaattgtcttttagatatgaaaattgctgacacccacagctgggtgccccttacgtattgctccaagggctttgtgctttttttttttttttttttttttgaaacagagtttctctcttgttgcccaggctggagtgcaatggtgcaatctgggctcactgcaacctctgcctccccggttcaagtgattctcctggctcagccacccgagtagccgggactacaggcatgcacccccacgcttggctaattttgtatttttagtagagacgggggtcttccatgttagtcaggctggtctcgaactccccacctcaggtgatctgcctgcctcggcctcccaaagtgctgggattacaggcatgagccaccgtgcctggccgctttgtgctt

SEQ ID NO: 149908 - DNA, 580 bp, Homo sapiens
tgattgagattttcagaaaaattcctaagagtgcttctttttagaatgaggatgggctgcaacaaatgaaatgctgaagcaggaactcctgttcctctgatatgaaaatcaaatggaggcgatactctctaggctgagtttaacataaaaggaattgggcagccctgtctggagggggacccacaggtaattgtcttttagatatgaaaattgctgacacccacagctgggtgccccttacgtattgctccaagggctttgtgctttttttttttttttttttttttgaracagagtttctctcttgttgcccaggctggagtgcaatggtgcaatctgggctcactgcaacctctgcctccccggttcaagtgattctcctggctcagccacccgagtagccgggactacaggcatgcacccccacgcttggctaattttgtatttttagtagagacgggggtcttccatgttagtcaggctggtctcgaactccccacctcaggtgatctgcctgcctcggcctcccaaagtgctgggattacaggcatgagccaccgtgcctggccgctttgtgctt

SEQ ID NO: 149909 - DNA, 473 bp, Homo sapiens
ataccaatacattatgtcgatgacatcatgctgattgacaggacaaccaagaactgggtagtcatacacacatgctccaaaggattggagataaaccctatggaagattcagagacctactgtttcattgtttttaggggttcagtggttggggcataccagggcatcactccaaagtaaaagacaaatygctatgttttgcattccctaccataaaaaggaaacaccatgcctggtaggcatctttgatttctgaagaaacatattctatacccaggagtatatattggcccatatgctggccaagaggccatggctgttcaccttgagtggagccaggaacaggaaaatggcctgcagcaggtccaagccatggtgcaattagctctgcttcctgtttcataaaatgctggagaccttagcgtgttggcagtgtctgtggtaggcaaagatatgctagggaattccaggga

SEQ ID NO: 149910 - DNA, 625 bp, Homo sapiens
tgtcatatttcttgaacaccyactatgtgccagataaaaattatgagcgcttagtattcagtcatacataccataggcagaagccctgtcctgatggagcttacatcttagtgaaggatacagatggtgaactagtaaatatacagtagaacatcaaggtatgataaatgctggggggaaaaaagaaagcaatgtaaagggatagggattgacagtggttactgttttgaatgagatggtccacatctcattagatgtggtatctggaagagtgctaaggatgatgaacaaaaatatgaaaaaccctgaagcagaatgttttttattcattcaagaaatattaggaaggactgtgtggcctcagggtggagagaagaaatgaagatggcttataccaatagagagggagctaggagtagaaaatatagatccttgtgggcctgtgatcctgatcctgtgatccctaaagagaactgctcttgctcctctgagttgaaaaactataggtggaacaagatgggggcaggaaaaccagtgaagagtctattatagttctcctaggaagaaatgatagtagcttggaaagaagggatagtaatagacagtttgcttgttttgttttgtt

SEQ ID NO: 149911 - DNA, 625 bp, Homo sapiens
tgtcatatttcttgaacacctactatgtgccagataaaaattatgagcgcttagtattcagtcatacataccataggcagaagccctgtcctgatggagcttacatcttagtgaaggatacagatggtgaactagtaaatatacagtagaacatcaaggtatgataaatgctggggggaaaaaagaaagcaatgtaaagggatagggattgacagtggttactgttttgaatgagatggtccacatctcattagatgtggtatctggaagagtgctaaggatgatgaacaaaaatatraaaaaccctgaagcagaatgttttttattcattcaagaaatattaggaaggactgtgtggcctcagggtggagagaagaaatgaagatggcttataccaatagagagggagctaggagtagaaaatatagatccttgtgggcctgtgatcctgatcctgtgatccctaaagagaactgctcttgctcctctgagttgaaaaactataggtggaacaagatgggggcaggaaaaccagtgaagagtctattatagttctcctaggaagaaatgatagtagcttggaaagaagggatagtaatagacagtttgcttgttttgttttgtt

SEQ ID NO: 149912 - DNA, 491 bp, Homo sapiens
tgtaggaatctttttgaggcacttgttcattttaagagggatttttaacataaggtaatctgtgtctgtgtaaccaggcacaygtaagctaccagatactgcagcatgctgaaaacagtaaacaaaccagtaagagctccactggcttcccttggcatcttaggactctacactcatttcaggaagctttgcatgtggaccataagtgacacccaacctccgactttcaatagaggaagggtgccagaagcaatctgtgttgtaaacattaatagagttaagtgtctttcatatctgttctagatgaaattattattataaaaagaagtccaacattttcatcttgaacactaaaggatctttctcgatagctgcggtggtatttgccagttcagagaccactagtttaaagaataaagccatgtgtggatcaaaaagacttgatacactgcattgcaggtagaaaggaccaggcagtgagaaagccagca

SEQ ID NO: 149913 - DNA, 491 bp, Homo sapiens
tgtaggaatctttttgaggcacttgttcattttaagagggatttttaacataaggtaatctgtgtctgtgtaaccaggcacacgtaagctaccagatactgcagcatgctgaaaacagtmaacaaaccagtaagagctccactggcttcccttggcatcttaggactctacactcatttcaggaagctttgcatgtggaccataagtgacacccaacctccgactttcaatagaggaagggtgccagaagcaatctgtgttgtaaacattaatagagttaagtgtctttcatatctgttctagatgaaattattattataaaaagaagtccaacattttcatcttgaacactaaaggatctttctcgatagctgcggtggtatttgccagttcagagaccactagtttaaagaataaagccatgtgtggatcaaaaagacttgatacactgcattgcaggtagaaaggaccaggcagtgagaaagccagca

SEQ ID NO: 149914 - DNA, 422 bp, Homo sapiens
gatgaaacatttcctgggtttccactcagaatttcaatgattagatgtcaggcccttcacttgtcaatgtgggggtaggaagttgagatcatgatgactgaaattatgatcagttctcacataacttatctgtgttttcttatgcaaattgaagaagctccaaagaawaactaatatcagaggagtgatttactttccaaaactttagacaatttagggaatgagaattttaaagaccaaatggtaaagtccattgaacaatggtctaaagataaccggtgttggggtccccatttcactgtcctccataaaggagaaagtctttcccgtgggctctctgagacagaaaaccattatgatacaggaggaaccagatggagcggaagagatctgaattcttatcctgggtctgtctctaacaa

SEQ ID NO: 149915 - DNA, 451 bp, Homo sapiens
aaataataaattatagtaaaatagtttaatgactatttgaaagaaaaggatttcataaacaaggcagaaataaagcaaaactcatttgaaaaggttgagaatatgactgttatccattacataaatwctggcctttaggaaccatagaaaggggatggcatggttcccagagacaacaggaaaaaaggaacaatggttagaacaggggcgataacagcacgcaacacaaaggcagtcattgcctattctcatatggttatcaagctaagatttttttttgctttttaaaatatttatagacaggccgggcgcggtggctcaaacctgttatcccagcactttgggaggtctaggcaggtggatcacctgaggtcaggagtttgagactagcctgaccaacatggtgaaaccccatctccactaaaaatacaaaaattagtcaggcgtggta

SEQ ID NO: 149916 - DNA, 528 bp, Homo sapiens
gagactccttttcagttttctgcccttcacataagacagaatatcaaacatttttttatgagggaaacaataatgagaattcaaggttcagcaaggttacacaaagtattccaaacccattgagaatggccattctttattagtcttgtccatgattttaaaagcctctgtaaggcttatctgattgcaggacttagaagtacctgtgagcggaagctgcattcttcgtcattactctgatatatatttactacaggttcacttcctttagctctatataattttttgtccctcatgccgggatttcagcttagaaatatatttcaagttatcaccataacccagagttaggtgctgctgaaataagtttcttaagaagaataatttctgttgttgttttcatttacatttacctaagtcgatagaatgtaatctttcttacatgatttgtttagtctaatcaaaatgctgaagcataagtgataaycctccataatgatacaaactgatgaaaaaggtctgcacgtg

SEQ ID NO: 149917 - DNA, 405 bp, Homo sapiens
agaaaccctaggcgctatccttttgtaactaaaaacctcttgtgatatgaataaccatacactaacatastttgttaactgttttcatacactggatttgcttgaagaaagattatacttgtgcttttataagaaatggggcgaatatgtgtaaatatttacacagcatataatttattattagattaacttaaagaaaatagctagtgattttaaagtttgagctgattgtaacttaaaaagttatccttaccgtgctacgtatttcaatctatgaagcagtgtctgtattcctattttaacaaatacactgtggttgcttggtatccaaaatgttgttatagccattgggccagttcaggttcttgactttgccacacaggagaatttgagagttagtccaaa

SEQ ID NO: 149918 - DNA, 528 bp, Homo sapiens
cctttgaccttcagcacatgtacctattttcatgtacctacctatcaatccgccactttttgtaagctctgtatctgtatgtgttctactattagatgagtggtttctcacttggaattacttgtttcaatgatttatttctctaggcctataggctttgatatctagaagtccaggcaaaatcattactaccttctgtttctcttacatgcatcaataccccccasaccaaatccacacacgattccaatatacatattccaatacaacaaaaggaagatagaaacttcatctgcagctcaaccattggaatagacaatgctgctcatggggatagttgaaatccatgataggccaccaaagctgactgtggtgcctctttccatctctcctctactagaaatagtaattcatgctgcaaagtgtgtgtgtgtgtgtgtgtgtgtgtgtgtgtgtgtgtgtgtagaggagagtaaggggtgataaagggaggctgcatgacctttcataagttattctgtattatca

SEQ ID NO: 149919 - DNA, 528 bp, Homo sapiens
cctttgaccttcagcacatgtacctattttcatgtacctacctatcaatccgccactttttgtaagctctgtatctgtatgtgttctactattagatgagtggtttctcacttggaattacttgtttcaatgatttatttctctaggcctataggctttgatatctagaagtccaggcaaaatcattactaccttctgtttctcttacatgcatcaataccccccacaccaaatccacacacgattccaatatacatattccaatacaacaaaaggaagatagaaacttcatctgcagctcaaccattggaatagacaatgctgctcatggggatagttgaaatccatgataggccaccaaagctgactgtggtgcctctttccatctctcctctactagaaatagtaattcatgctgcaaagtgtgtgtgtgtrtgtgtgtgtgtgtgtgtgtgtgtgtgtgtagaggagagtaaggggtgataaagggaggctgcatgacctttcataagttattctgtattatca

SEQ ID NO: 149920 - DNA, 580 bp, Homo sapiens
ccagttattataattcagctatgaaaaaaatgctgtttcaagaaacacaaattctgaaacattcactatctgcttctaggcagtaagtttcgaaagtaggtggctttgaatgcaaaatacataaagagaataatgcggagatgagagggagtgaaagaaaaggaagaaagagaaagcaattaaggttatggaaatgggacattgctatataaagtgagttatatttagaggcccttgtcaaattaaaaacattttttccaaacctttcctaacctaagtcatattttacgttgttaaacctgagaagatctgtaacaaccagaattactgttaactcttattcagtttatttttcacttttctttaaactttgtgacttatggctatgattctaaattatcattcaaagtataaagtgaaatatacacgttaaaccaaaccgaacagcaataaactttgccaagaaaagctaattattcagggaatatttagtaataggtcataatgcaatttatcatttgaaaaggatggatataaaaatagatayagataaatagaaagagatatattcttctaaatt

SEQ ID NO: 149921 - DNA, 624 bp, Homo sapiens
gtagggtggggagccaggcaggaggtcaaggcaatggtgtgagctaggatagaaagtgtagaggttacacagtccaccaagcaggacctccacctagatcctcagagctggagagattcccagctaaatagggttaaagagctcatgctcatattgtagaccccttcaaagagcacagggagccatcttgcacctgctggtttcaataggcacaacttcagcaatagagcatacccctgctcactcctattttctctttttttctcacttttacactctttctctctatttgctaaataaacttgcagtgagaaatattaacttcattttggttgtcccttgcttaaaatgtcaatcactaaactctatgctaatcaccgtaataggacttacacacttagcaaagcattaagatgtaaaattacacaaaaatcttgcctgtactctatcaattgcatcatttatgttgtttgtaagcgctagaagctattaccttaaatgtgcatagtaagactagacaatttctgtaasttagcaactgtttcaagcaagcatttaagaaccattgcaggaagactaaaaaagctaattgaccgatactcatttgtcctttaagatgtagac

SEQ ID NO: 149922 - DNA, 553 bp, Homo sapiens
tcataatcccactgggggttttgctctgggactacatctcagcscactcagatgacagccttgtggtggttcatggccactgggcaatctgaatactctctggcctttcttagtatgtggtcttttttatcaaaggtcagcaatgtgtcaaaataagtgacatcctgccatggcaatgagaaaattaggtttgatgtcacaaactcatctctaaatttgttagaatcttctgaaaatctgccaaacttttatttgcatagccccaatctaccatcaaaaagggaaaatgcattcttgtaatttaccttctctcctctgtcgcttctttaaggggagaatattcctgggcttgtggcagggtaaaagtaggtgccaacttggaacctgattagaaccccactgattatgtgctggagcctgcatacctgcagaggtctgattatggtatggtgtcagttcaggaaccaaatgggatggtggagttgggattcactgggtggactgatcagagactgaaagagcagatctgtcagcaagtattgtttagatttat

SEQ ID NO: 149923 - DNA, 553 bp, Homo sapiens
tcataatcccactgggggttttgctctgggactacatctcagcgcactcagatgacagccttgtggtsgttcatggccactgggcaatctgaatactctctggcctttcttagtatgtggtcttttttatcaaaggtcagcaatgtgtcaaaataagtgacatcctgccatggcaatgagaaaattaggtttgatgtcacaaactcatctctaaatttgttagaatcttctgaaaatctgccaaacttttatttgcatagccccaatctaccatcaaaaagggaaaatgcattcttgtaatttaccttctctcctctgtcgcttctttaaggggagaatattcctgggcttgtggcagggtaaaagtaggtgccaacttggaacctgattagaaccccactgattatgtgctggagcctgcatacctgcagaggtctgattatggtatggtgtcagttcaggaaccaaatgggatggtggagttgggattcactgggtggactgatcagagactgaaagagcagatctgtcagcaagtattgtttagatttat

SEQ ID NO: 149924 - DNA, 547 bp, Homo sapiens
gacttcactgtagcccaccctttgctaagatcttactgttttatttctcagtcttcaaacagctactgtgtatgccttattggtgtttgtataaagacatggggttttgctctagtccttcaagatgatgaggagttaagtacgtaacttcaattgtacctcttttaaacaaggcttgaagaacagaaaagaggagcatttcctaggaccctgaaaaatttctaaagaaggctagtggatataggcatgtcgaaaaagaaaccaaattctccacccaatctcagtgtcctacagtccaacttcaggttgccacttgttagtggttaggcatgttcattccaataaattatatacaaatccccccgaatttcaatttttgtgcaaaactcttatcttgctgagatagkagataggacttgactctggaggtgggactgaaacatggatcaaattgtggactatctaaaacagaaatggagtagaagcagctttccataaaacatgcccaccagtgcatcatgtcagtttactattgtcatggcaacac

SEQ ID NO: 149925 - DNA, 605 bp, Homo sapiens
tatcttgctgagatagtagataggacttgactctggaggtgggactgaaacatggatcaaattgtggactatctaaaacagaaatggagtagaagcagctttccataaaacatgcccaccagtgcatcatgtcagtttactattgtcatggcaacacctgggagttaccatgctttcatggtaatgacttgacaaccccaaagtgactaccctttctctagaaatttatgcataaaccaccccttaatatacatgtaattaaaattaggtatcaatatgactgaaaaattgccctgagttgctactgtcagcacactgcctatggggtaaccctgctcaggcaggagcagtcacagagctgtaacactgccagagctgtaacactgctgcttcgataaagctgttttcttctaccctaccactggcttgcccttgaactctttcctggaaaagccaagaacccttccttgcaggctaagctccactctggggctcacatgccctgcattattactacatkgttttgcagtcttctgtctatgcatctgtctccttgctgaagttaagagttctagacatcagaatctatgtaactaatgcttagc

SEQ ID NO: 149926 - DNA, 493 bp, Homo sapiens
ttaccacccctctccatggcaatggctaaggagtaccaccctttttctagaaatttctgcataatctgccacrtaattaaaagtaggtataaatatgactgcacaactgcccccaagttgctactctgggcacagcgcctatggggtagttctgctccacaaggaacagtgcctctgctgctgctgtgcactgccacttcaacagaagttgctgtctaacaccactggtgcatcctgaatcctttcctgggtgaagccaagaaccctcctgggctaagccccagtttagggactcacttgccctgtatcactttgaacaatgtcatacatctaacccatagaactaaggcaaaaactgaagttgccaatacaaaatcttatagatgtttttagtttttaataaaaaaattattattttttccccttgaaattctctagaaaaataatttccactaaatttgttagtatcctgttcgattatgttttctcactg

SEQ ID NO: 149927 - DNA, 548 bp, Homo sapiens
ttaatcgagaaaaattatgtcttcaagtcagtagatatagaaaaggcatttgatagaattcaacaaygcactgatgattttttaaaaatcctaaactcctttttagcaaatttgaagtgaaagaggaaaagttctcatctgataagaggtgtctacaaaattgcccaaggcaaacctcatactaaaacgtaaagtgttttctttataattagaagtatgacaaacacacttcttataccctcacttcgttactaacatattagaggtcttggctgttgctttatggcaagaaaaatcaatagaaatatgactatagaaaaggaagacattaaattgatatttccctttagtcacaattgtgtatggaaaatttcagctgaatggtattagtttaaatgggttacattatcctgtgataatgaagacacattaaattccagaaatttaaaatagtaaaaacctatcttctgttcacactacattctaacaaaagtgaatagggaattcctcactgaattctctcaaggactgcagatgatggtggccca

SEQ ID NO: 149928 - DNA, 513 bp, Homo sapiens
ctccccatttatttccccttgcccagcccctggcaatcaccattccactttctgtgtctacgaatttgactactttagttacctcatataagtagaatcatacaggatttgcctttttgagactgattaatttttatttttattttttttttatgtcctcaaggtttatccatgttgtactatatgacaggatttcctacctatgtaagactgaataatattccatgctatgtattgcttttatattttttatttayaaattgtaaaatactactcatcggtgtgagtcttatactgtcctcttccctgtttcaatcacctaaaacctcctttttatgttaggtcttttgacattgaatgttttcaatgtcatactcccatttacctgattaataataagttctttatgtttcacttttaaccaaagcaggaacaccagggcaattagtccagtaaagaagaaaagcaaacagtggccatgctgagagtgaagcaaacccatgatatattcat

SEQ ID NO: 149929 - DNA, 513 bp, Homo sapiens
ctccccatttatttccccttgcccagcccctggcaatcaccattccactttctgtgtctacgaatttgactactttagttacctcatataagtagaatcatacaggatttgcctttttgagactgattaatttttatttttattttttttttatgtcctcaaggtttatccatgttgtactatatgacaggatttcctacctatgtaagactgaataatattccatgctatgtattgcttttatattttttatttataaattgtaaaatactactcatcggtrtgagtcttatactgtcctcttccctgtttcaatcacctaaaacctcctttttatgttaggtcttttgacattgaatgttttcaatgtcatactcccatttacctgattaataataagttctttatgtttcacttttaaccaaagcaggaacaccagggcaattagtccagtaaagaagaaaagcaaacagtggccatgctgagagtgaagcaaacccatgatatattcat

SEQ ID NO: 149930 - DNA, 513 bp, Homo sapiens
ctccccatttatttccccttgcccagcccctggcaatcaccattccactttctgtgtctacgaatttgactactttagttacctcatataagtagaatcatacaggatttgcctttttgagactgattaatttttatttttattttttttttatgtcctcaaggtttatccatgttgtactatatgacaggatttcctacctatgtaagactgaataatattccatgctatgtattgcttttatattttttatttataaattgtaaaatactactcatcggtgtgartcttatactgtcctcttccctgtttcaatcacctaaaacctcctttttatgttaggtcttttgacattgaatgttttcaatgtcatactcccatttacctgattaataataagttctttatgtttcacttttaaccaaagcaggaacaccagggcaattagtccagtaaagaagaaaagcaaacagtggccatgctgagagtgaagcaaacccatgatatattcat

SEQ ID NO: 149931 - DNA, 568 bp, Homo sapiens
ttaaaactcaaaattcacagaccaaacaggtacacaggacacaggtacttaggggttggatgttaccaaagggtgaaaaaaaagaagagtcgagagaataggaattttctttctatagcactatctatgagatggagctckgagtataagcaatcatttctggttctccagattggaaaaatcatcaggagatcacatcataatctgtgaagtagaaactatcctttagtggtgccacattttctatttctgattctttggacacacagggactttctgggctatgaaatagtctattcagtgaaactagttatcataaaagacatgcaaaaaccttttcacagtctttgtcctggaatatctcacaaaattaattataaattggcatgcgactttctgatttagcctgacaggattgttcctttccaaggtttaggcactaagctgctgttattaagataggaattgtacaggtggtggctcagccccaagggaggctcggcctgaataacctcactatgcagaagtagagagcacctggggagaagagacaggctccttacatcct

SEQ ID NO: 149932 - DNA, 568 bp, Homo sapiens
ttaaaactcaaaattcacagaccaaacaggtacacaggacacaggtacttaggggttggatgttaccaaagggtgaaaaaaaagaagagtcgagagaataggaattttctttctatagcactatctatgagatggagctctgagtataagcaatcatttctggttctccagattggaaaaatcatcaggagatcacatcataatctgtgaagtagaaactatcctttagtggtgccacattttctatttctgattctttggwcacacagggactttctgggctatgaaatagtctattcagtgaaactagttatcataaaagacatgcaaaaaccttttcacagtctttgtcctggaatatctcacaaaattaattataaattggcatgcgactttctgatttagcctgacaggattgttcctttccaaggtttaggcactaagctgctgttattaagataggaattgtacaggtggtggctcagccccaagggaggctcggcctgaataacctcactatgcagaagtagagagcacctggggagaagagacaggctccttacatcct

SEQ ID NO: 149933 - DNA, 591 bp, Homo sapiens
ttacattttccagactactgaagtttaacatttaagcactgaacccttttattgtaagcatttgtgatgggaagttttctcaaatgcatcacattatttccctgctttgtgaattaaatgtgctaaatgccatctaaccctttgtttttttccaagcaagtagcatttttacttaaattttttttcaagtatgcaatacattwacaatagtccccatgttggacactagggctcttgaagtcattcctcccattcaacaaaaattttatattatttgatcatcatttctctaaacctcaccttctccatagtaaccactcttttactctctgcttctaagagtttgacttttttagattacacatgtaagtgagatcatgtagtatttgtctttctatgcctggcttatttcacttagcataatgtcctgtgggttcatccatgttgcaaatgacaagattttcttcttcttaaggctgaatggtattccctatgtatatataccatattctctttattcattcaaccactgatggatgcttagactgattccagatcttggctattatgaatagtgctgcaataatcatg

SEQ ID NO: 149934 - DNA, 444 bp, Homo sapiens
attgaatgaagagacaatctacctgcaattactattttacataaaatatatattagcctacaaacatatttgtgataaattgtctcaggtggctattcaagccaaagtctgcaaaatcatttgttatccttttaataaggtcaaactataaaatgtcaataaatttcagaaacaaacctccttttatcttcattttaacacaaacagtataatttctagttttcagaattctattttaaatgtactaatatcatagggggaaaaacatctaaaaagagaaagtacttttagtgagtaggttttgcttaagggcatgtttctatattaaaaatcagaatagcaatggtaggtttataaattttgaggcaactagaattttaaattacagwcatttgattgatccatgtttatgtaacatttgttaagggtaggaaatatacggta

SEQ ID NO: 149935 - DNA, 419 bp, Homo sapiens
tgaattcatctgagataaacaaagacccaatgtatccatatatacataggggaattagaatacaactgtaacagtggatgaagcaaggcctggcacggtggctcatgcctgtaattccagcactttggcaggtcaaggcaggcagatcacttgaggccaggagttcgagactagcctggccaacatggtgaaaccccattttatctaaaaacacaaaaattagccagaygtggtggcacacacctgtaatcccaggtactcgggaggctgaggcaggagaatcgcttgaacccaggaggcaggggttgcagtgagctgcgatcatgccactgcactccagcctggacaacaaagtgaaactctctgaaaaaaaataacagttgatgatgcaagagaaaacatataaggacaattattac

SEQ ID NO: 149936 - DNA, 511 bp, Homo sapiens
cgacagaccaaaccactgagttatcttcaggatgtcacatccctgaatgcctcagcattatgtcttataatggaagaacattcaatggcagtaattatctgcttctccctctttcccaatgaaggaagasaaaaattgacttctagatctaaatttgtatcaaacaaaattcctcttatcaaggtaaaagtgaaaatacatacaactctctactttctgtcaacctggagaaagtcacttaacctttcagcacctgtctcacagtgaaagtgaacagtttaggtcaagaatgctttcagctccaaaactctaagtccaatacgatcacagaaaaataaagtggctacatatacgggtgcacacacacacagaggtttgtctgtgccaagagagctccacaggagtctgcgccaacaattttacagactatactatgtgcccagcacaccgatgtaaacatcccacagaatgcctattcttttgaagaataattgtcaggttggaaaccaag

SEQ ID NO: 149937 - DNA, 511 bp, Homo sapiens
cgacagaccaaaccactgagttatcttcaggatgtcacatccctgaatgcctcagcattatgtcttataatggaagaacattcaatggcagtaattatctgcttctccctctttcccaatgaaggaagagaaaaattgacttctagatctaaatttgtatcaaacaaaattcctcttatcaaggtaaaagtgaaaatacatacaactctctactttctgtcaacctggagaaagtcacttaacctttcagcacctgtctcacagtgaaagtgaacagtttaggtcaagaatgctttcagctccaaaaytctaagtccaatacgatcacagaaaaataaagtggctacatatacgggtgcacacacacacagaggtttgtctgtgccaagagagctccacaggagtctgcgccaacaattttacagactatactatgtgcccagcacaccgatgtaaacatcccacagaatgcctattcttttgaagaataattgtcaggttggaaaccaag

SEQ ID NO: 149938 - DNA, 569 bp, Homo sapiens
cagaaatactgcatctacataattagctcgagtttatgccagttatatgaagatgtaagtttttttttttttttttttgagacagagtcttgatctgtcgcccaggctggagtgcagtggcacaatctcggctcactgcaagctccgccttccgggttcacgccattctccttcctcagtctccggagtagctgggactacaggcgcctaccaccacaccaggctaatttttttgtatttttagtagagacagggtttcaccatgttagccaggagagtctcgatctcttaaccttgtgatctgcctgcctcggactccgaaagtgctgggaatacagrtgtgagccaccgcgcctcgccgaaaatgtgagtttcaataaaataattatatatacatttagagctaatgtatatatctgcttgtatattttcaaaggttatttaaaattgccataaactactaaggcttacttaagtttaaacaaacccccaaccactttgtatttagaattatgaaataaagatgaaaagttcctagagttagccagattggactaaaaaaccaataa

SEQ ID NO: 149939 - DNA, 356 bp, Homo sapiens
tctttatttctaggattttcatttgattttaaacagttttctatttctatgaaaataccccacctcttcattcacattatcaaccatcatgccagaccctttaacatattatttacagttattttcaagtctctgctgtctctaagttcgtttctgttaatgccttatcttttaaaatgggtaattatagtgtttatttgttaattttkatgtatcataggttttattgaagagcagacattctctataaacaacaaaaaattagagactgaggtaaataataattaaaaccataatttggcacatcttttctttggccactactttgagatgttgagtaaatctagtaagagatt

SEQ ID NO: 149940 - DNA, 437 bp, Homo sapiens
tacaacttgacttcataatgcattcaatatttttaaattcaaaaacgagcaatagaaatgtgcattgttggactactttgagtcaaggagattaaaaattaatagtaaagaaacagcttaggtaaaactgtggttttcatgttagtttctttttgtagctgtgctttctgaaattgacttcagtttcttcagttaaaatttgaaatgcaaataataaagttatttaaatttctagggattatgctgagrtttctttttaaaagaaataaagcatcttttgctaaaagaaatgcttgaaatgtaatgacctatttagaagacaataagtgtattgaatagagttataaaaaacagtacatttctgcatttaaataacctatgatttgacactttttgtttccctttaaaaataaataagacttacattagccaaggag

SEQ ID NO: 149941 - DNA, 642 bp, Homo sapiens
gggagttccaaacattcccacattttctggtcttcttctgagccctcaaaactgttccagccgctgcctattacccagttccaacattgcttctacattttcaagtatcttttcagcaacaccccacttctggtaccaatttactgtattagtctgttcttgcactgctgataaagacatacctaagactgggcaatttacaaaggaaagaggtttgatgagacttgcaattccacattacaggggaggcctcacaatcatggtggaaggaaaggaggagcaagtcacatcttacatgtatggcagcaggcaatgagagcttgtgcagggaaactcccatttttaaaactggcagatttcatgagactcattcactrtcatgagaacagtgcaggaaagacttgcccctatgattcaatcacctcccactgggttcctcccatgacctttgagaattgtggaagttacaattaaagatgagatttggtggggacagagccaaaccatataaatgctctatgcaaaatgcaaagattcttcccaaaattctagtctaaaaagactttgattttgccccaaaattcttggttggccatactggcttcttagacttaggaactttcttacggaaagggaagaggg

SEQ ID NO: 149942 - DNA, 642 bp, Homo sapiens
gggagttccaaacattcccacattttctggtcttcttctgagccctcaaaactgttccagccgctgcctattacccagttccaacattgcttctacattttcaagtatcttttcagcaacaccccacttctggtaccaatttactgtattagtctgttcttgcactgctgataaagacatacctaagactgggcaatttacaaaggaaagaggtttgatgagacttgcaattccacattacaggggaggcctcacaatcatggtggaaggaaaggaggagcaagtcacatcttacatgtatggcagcaggcaatgagagcttgtgcagggaaactcccatttttaaaactggcagatttcatgagactcattcactatcatgagaacagtgcaggaaagacttgcccctatgattcaatcacctcccactgggttcctcccatgacctttgagaattgtggaagttacaattaaagatgagatttggtggggacagagccaaaccatataaatgctctatgcaaaatgcaaagattcttcccaaawttctagtctaaaaagactttgattttgccccaaaattcttggttggccatactggcttcttagacttaggaactttcttacggaaagggaagaggg

SEQ ID NO: 149943 - DNA, 584 bp, Homo sapiens
acggcactggcacttagagaagaaagaaacgctgtgcaatttcattgccaggttcatagtttgagtaactctagtatgattttctaggtgtggaaaataaggttctaagaagttaaagtaaaacaggtcatccagctagaaaataacatggatgacactcaaatgcaggtatgtctcaattcattttcataccctcaagatggttatactccacctaagaagacaggatttctaattctccctctttttcttttctttctaaatatttgcttaaagtgcttttctatttaaaaattatatgccagggctcataaattggtagatgataaaatgaattcccatcctccccatttccctgtgccctctctctccccttctctatttgcattggcatgagaacttctagttccactaaatgagtcatttgggacaagaaaattaatttatttgagcakatgtatataaacgttactcagaatagaatcacaaaacagcccagtatttacataaggtccctataattgatgaccttttatagttttgtgtgaagaatccaaggagctgactaagaagctacatgggaa

SEQ ID NO: 149944 - DNA, 589 bp, Homo sapiens
gccaattctgtgcatccaataccttcagaagacatatttttgagtacatatgaaacatttctgaaaaccatagggatgataaaaacaaatttcaaataattaaaatcaagcaaagaatataatttgactgcaatacaatttttctagaaatcaataagaaaaaaggaacwagaaaacatactttggaaaatttaaaataattatttataactaacccacaggtcagagaagaaataccatagattttagaaaatattttcaattgaaagaaaaattttaaatatcgtatactgaacgtgcaatgaaagctactacctagtgtgatagctataacccagaatacatatgttaggaaaaaaagaagctagaattcaatcatctcaaaaatttagggaaaataaacctggcaaattaagcccaaagaaagaaaaaggatgagaataatgtacaaaaattatcaggttaaggtaaaactaatgtaaaaatggagaagaccaacaaagccaaagtatgttatctggacacactaaaaaaaaaaaattgaaagacttagagttagactaatgaaaatgaaagagagaagtgggaa

SEQ ID NO: 149945 - DNA, 492 bp, Homo sapiens
gaacaaatattacgttatgagctgcctttgttattgtcttattataaattaataaagccacattccaaattatactgggatcttgagtttggtgtaaaaaggaggagaaggtgcaggagttagaaatcctgattttaaaataaaaaagggattgttatgcaagcagcatgggatatttgttgtgtgtggtagtgaagatgaaaatttaatggaagaataaacaatagtggtgcagggcggaacatcagggatggagctccagttacttaggggtagggaccataatggaattactaagtttgcaattctgttgtgcctttggacctgtaggagccagtgaagcatttgctatattaattayaggggctgggattttgttttagcaggactcaaaacatcgtggtcagatgggagctattcatgttctcattttggaaagagatatgtgtatgtgtgtttgcatgtgtgtgtgtgtgtgtgtgtgtatttaac

SEQ ID NO: 149946 - DNA, 492 bp, Homo sapiens
gaacaaatattacgttatgagctgcctttgttattgtcttattataaattaataaagccacattccaaattatactgggatcttgagtttggtgtaaaaaggaggagaaggtgcaggagttagaaatcctgattttaaaataaaaaagggattgttatgcaagcagcatgggatatttgttgtgtgtggtagtgaagatgaaaatttaatggaagaataaacaatagtggtgcagggcggaacatcagggatggagctccagttacttaggggtagggaccataatggaattactaagtttgcaattctgttgtgcctttggacctgtaggagccagtgaagcatttgctatattaattataggrgctgggattttgttttagcaggactcaaaacatcgtggtcagatgggagctattcatgttctcattttggaaagagatatgtgtatgtgtgtttgcatgtgtgtgtgtgtgtgtgtgtgtatttaac

SEQ ID NO: 149947 - DNA, 636 bp, Homo sapiens
agaatcatattaataataaaaatgaaacctaccggttattgcactttctctcttgccatacttgttactaagcattatctgcattatttcacataaccctcaaattagtcctcagaggtagacatttttatctccattttacagatgaaaaccgtgagctttacaaaatcaaagctgtccaacttatcctactaaattcatatatactatttcaccctctaaccttcttcatgttagcctcacgaatcctttcccatcctgcaggtctgaactgaaacctcactktcttggaaaagcctttcatgaccccaggctagattggattattggagataaacacgctgttagcatcgtgtacatcttcctcactgtctttcacacatttgcaatcatttaattgcctgtagttattaccttcttttccccctccgtatgtttcttgggaggagtgtccatgtctatcctgttcgtcatcgtagccgcggggtttggccctctgctgaacttataaaacaagtcgttcacaatgtttttgtgtctttggtactgtttagaattttagaacttttcacagcacttaaaaaggaaaataaaagattcaaagactcttgagaatgtctgatcacatccataaag

SEQ ID NO: 149948 - DNA, 636 bp, Homo sapiens
agaatcatattaataataaaaatgaaacctaccggttattgcactttctctcttgccatacttgttactaagcattatctgcattatttcacataaccctcaaattagtcctcagaggtagacatttttatctccattttacagatgaaaaccgtgagctttacaaaatcaaagctgtccaacttatcctactaaattcatatatactatttcaccctctaaccttcttcatgttagcctcacgaatcctttcccatcctgcaggtctgaactgaaacctcactttcttggaaaagcctttcatgaccccaggctagattggattattggagataaacacrctgttagcatcgtgtacatcttcctcactgtctttcacacatttgcaatcatttaattgcctgtagttattaccttcttttccccctccgtatgtttcttgggaggagtgtccatgtctatcctgttcgtcatcgtagccgcggggtttggccctctgctgaacttataaaacaagtcgttcacaatgtttttgtgtctttggtactgtttagaattttagaacttttcacagcacttaaaaaggaaaataaaagattcaaagactcttgagaatgtctgatcacatccataaag

SEQ ID NO: 149949 - DNA, 214 bp, Homo sapiens
tgtgtagctcttacttttggatgctgccaaaagtaaaacagtgttgggggtttgtccccttcctatctgattggatctttgctggagggagaattacaaggaaggagaaggttgatctcactctggctccccgaagactgggttaccagtactctcttgggtgtgcagtgragtcctgaccccaatatcttcattccttgccttggcagcagct

SEQ ID NO: 149950 - DNA, 417 bp, Homo sapiens
caggtactcaatagtgaaatgtggtcagtggctaccatattggaccacaccaaaatagaayatttctatcactacaaaagagtcctattgcacaacactgttctagaagcttatcaacagttttgttgagaaatatagaagacgtttgatttcatttatggcagctgatgatatattagctgcaagttcccacacatgttttatagttgtcgtatgttagacaggtttcattcatcatttattcactcagtacaacacctaacaccaaatacttgctcaaaaactgcttaacgactgtttatacaataaaaatggcagctcctatatatctactcaggtgtctagcatcacaataccaaaaaaaaaaaaacaagtaaagatttaattagatttaattggcaggaagggaaacaaagt

SEQ ID NO: 149951 - DNA, 417 bp, Homo sapiens
caggtactcaatagtgaaatgtggtcagtggctaccatattggaccacaccaaaatagaatatttctatcactacaaaagagtcctattgcacaacactgttctagaagcttatcaacagttttgttgagaaatatagaagacgtttgatttcatttatggcagctgatgatatattagctgcaagttcccacacatgttttatagttgtcrtatgttagacaggtttcattcatcatttattcactcagtacaacacctaacaccaaatacttgctcaaaaactgcttaacgactgtttatacaataaaaatggcagctcctatatatctactcaggtgtctagcatcacaataccaaaaaaaaaaaaacaagtaaagatttaattagatttaattggcaggaagggaaacaaagt

SEQ ID NO: 149952 - DNA, 642 bp, Homo sapiens
tttctggcctcttccagcttctggtggttccagggattccatggcttgtggttgcatcactaaaacctctacctctcttgtaaaatggccctctcctcttctgctstctcttcttctctatcttataaggacacttgtcattggatgtagtgctacctacataacccagaatgattccgttgcatgatccttaattacacctgcaaagaccttttttccaaataaggtcacattcacaggttctgatacatgggcgtatctttttggcatatacatgggcataatttatagacaagcaaccaacatctgcattccaatcccattcactcgtgctaaatcagggtacctccaccaaaaggtgccccaatccttgccactgaatttctgccactcttttggtagtaattgatcaagaaaaatgtgaggataagacagatccaggattccactggtttttaataatgtttgcttctgaatacaccacaggatgccacaccctcccccttgcacccctggctggctgggctggtgagtctccccaaagatccctgagaggagcacagcagggtgggttggaccacacagcaagtgctgctttaaaaaaacttcccccagggtgatcctaccacacaatgtgcttct

SEQ ID NO: 149953 - DNA, 240 bp, Homo sapiens
tgtgtctgtgtctgtctatgttttcgtgtttgttgggagtgacacgaaggctgagggaaaaaataaagcataacatttctatttttcgcttgacaaacagtatctttcccagacatcaargatttttatttcagacttcaaatgtccttagcaaaataaagtttttgttggggtgtacatgaaaatagaacaaccataagaaataggccgggcgcagtggctcacgcttataatcccagc

SEQ ID NO: 149954 - DNA, 614 bp, Homo sapiens
tattctaatatttgtttctttttttcaaatctatttttaataacttccagttctttgctaaaattttcagacttgtctcttatctccctgtttatgcaaacagttggtttaaagtctgataattgtttgaagtctgatagcacaaacattggcagccaccatagctgtttctattttccataatttccactggtctcattcatgttgtgttatttccttgtgtgcctagttatttttactgtgggctaaatactgtacgtaaaattattataggagtagcctgatgcctggggtaattttgtatatttcaaacatatatatttatatttgaaaagcttccagcatccccactaatgatccaagattattttaatccaaactgggctgcagtttctgccagagctatcctacttccacttccctcttagtccccaaatcaaaggatagcatgtctaccttggttgatctgaattccartgttttttcctcagctcagtaatgtgttgctctacctcctagtctctctactaactcttgctgaattaggaaatgtgtcaagaggactagtagccctagaatactgggcccacctcttggatttccacctcctccca

SEQ ID NO: 149955 - DNA, 442 bp, Homo sapiens
gttggcaataactccaagctgaattgacaccatacagtattatattcattatataatatatgcccatcatgtttgttggttagcatacaagagaaaacatagatcttacacttgagctttaaacatctacaattttatgggttagtggacagatggatgaagtcatagaacaactctgaggttagggtctctctttgccacagggtcccctatctggtgggctctaagcttcccctacttccttagggttttctcacttttcatcctcatgccactggtccaccccaaacagaggtacctacttcacttattctctctagattaggcatggacaaaacaaarcagaaagaaaaaagcagactttctttttcctcttggaacaacagagttgctgcaaaatttctaaataaaaacaaagtagaagtagacatcccttctgtct

SEQ ID NO: 149956 - DNA, 610 bp, Homo sapiens
tattatcaggaaaaagtaaccgaagatgagacatctggttatagaaaaaaatcgaaaccaaaaaccatatgaggtttccttctccccaaagtaagaacctgcattgtagaatcagctgtttgtatttattataacagtccacatctctctgcagctgcacgactgcacaccacaacggctttttcagccttggtcctggcaacagagcctgtgtgtttccaggggtggcagtaggtctatggaggtaaagagggacacgcttctcttctcttttcttgtttttcttataattatcagaagaataaaacagctcccctggttttcaaaagcaacctgtgtggcratatgattagttacaaccaggcaattaaaaatctgtccccaaaaaatggcaaagcagataaatctctcagacagacatccataccatgtttgagtatttgtttttcttattctggaatagaaggtaatcgacaattattgggaggagaaagaaacctgtatttgtggaaaaagaatctcccttagtgtttgttttacaatcctgcagtacttcctatttctcttcgaaattgtcacctttaaaaagttgaggttgcctcatgtgctc

SEQ ID NO: 149957 - DNA, 574 bp, Homo sapiens
aatgaccattgtgtatatctgtttccaagaagtcttcataaacacagttcattttgtactttatcccctctcaaattataccacttatctttttactatatctctcatttcaccctcaattgcatgctgttttgtattttcaactcatctttttgttaattcttgtcygtattgtaagttaacttttaacttcccaggaatgcaaatatttgaaacaacaaaacaacggcaatgaggaaaactagcaaagcatctttccaggtgttttacatagattaatcttatatttccaactagattatgaacataatgaagccagaaatctgattttatttttttgtgtgtcttccttcccatccaccataccccacccctcccaagaatctggtgaggctaagttacctcattctcttgcaaatttaagccagccagcccaggcccagccattcctgtagcgggcacctcataaatcaggtttcccctctctggtattctgtatgccctaaactggatgccttgccacttcacacttcacttcaggacttattcctgatctttctgagttttaacatca

SEQ ID NO: 149958 - DNA, 617 bp, Homo sapiens
acaaaaaaattattaccaggaccaagggcaaggaaatatttcctatgttttctcctaggagtttaatggtctcaggtcttaaatttaattctctaagttgttttctgtgtatggtataagataaagatcccacttattgtttttcatgtaaatatcyagttgttccaacaccatttgttatagagactaataaccacattgtatattctttgtgcccctctcaaaaattagtggacttttcatgtgtgagtttatttcttggctcttcattttgttccattggtctgtatgactgtttttaagccagcaccataatattttgaatacaatagctttgtaatataatttgaaatcaggaagttaattcctttaacttttttcatttttcttaagattgctttggctgtctgcgtttttttttttttgtgtgtgtgtcatttcatacatattttagaggtttttttccctaatttggtaaaagatgactgaaattttgatagggattttattgaatgtataatttaattttggtagtatggccttttttcaatattaattcttccaattcataaatatgggatataattctcttcatttgtatcttttccaatttcttt

SEQ ID NO: 149959 - DNA, 576 bp, Homo sapiens
ctaaacactgaccagcaataaaggaagagaacacaaatcaataatattataaataaaaaacaaggtcatcacaatagaaagaatacttacagtgtcattataaaaatagttttgacctcaagggctgggtatttttaggtgtgatacacccagagtgtttttagtctttattttgtcacattactggttttaaaattaccttttttatagcttcttaaaaatattattttcagatcaaatgaatcaacatttatcttgatgtttggaatgtttatggccatttttctttctacaggttgattcaatatgttttttaatttgcatgttattttacgaytcccaactgtccactttaaataattttctagttcatgaataacgtacattcaaatcatttacttttgccctaaaaaatgaaaacaactatttaagaatagtattaacattaaagtaggattaagcttttggaatgcctcatctcctctctattatattcactcatttaattacttctgagacctatcaaaaactaagatgcttctaaaatcttaatattttttcctagaaataaaactg

SEQ ID NO: 149960 - DNA, 576 bp, Homo sapiens
ctaaacactgaccagcaataaaggaagagaacacaaatcaataatattataaataaaaaacaaggtcatcacaatagaaagaatacttacagtgtcattataaaaatagttttgacctcaagggctgggtatttttaggtgtgatacacccagagtgtttttagtctttattttgtcacattactggttttaaaattaccttttttatagcttcttaaaaatattattttcagatcaaatgaatcaacatttatcttgatgtttggaatgtttatggccatttttctttctacaggttgattcaatatgttttttaatttgcatgttattttacgactcccaactgtccactttaaataattttctagttcatgaataacgtacattcaaatyatttacttttgccctaaaaaatgaaaacaactatttaagaatagtattaacattaaagtaggattaagcttttggaatgcctcatctcctctctattatattcactcatttaattacttctgagacctatcaaaaactaagatgcttctaaaatcttaatattttttcctagaaataaaactg

SEQ ID NO: 149961 - DNA, 576 bp, Homo sapiens
ctaaacactgaccagcaataaaggaagagaacacaaatcaataatattataaataaaaaacaaggtcatcacaatagaaagaatacttacagtgtcattataaaaatagttttgacctcaagggctgggtatttttaggtgtgatacacccagagtgtttttagtctttattttgtcacattactggttttaaaattaccttttttatagcttcttaaaaatattattttcagatcaaatgaatcaacatttatcttgatgtttggaatgtttatggccatttttctttctacaggttgattcaatatgttttttaatttgcatgttattttacgactcccaactgtccactttaaataattttctagttcatgaataacgtacattcaaatcatttacttttgccctaaaaaatgaaaacaactatttaagaatagtattaacattaaagtaggattaagcttttggaatgcctcatctcctctctattatattcactcatttaattacttctgagacctatcaamaactaagatgcttctaaaatcttaatattttttcctagaaataaaactg

SEQ ID NO: 149962 - DNA, 620 bp, Homo sapiens
cattgaaacaagtgtgctaatcgtcatgcggactgacttcaaagtttataattccaaagcctattttaatatgtccatgcattattttcatcaaaagcaactgaggagctcattaaacatacagatttctaggatccacatcagacattaagaattttaatctctgagttccagttaggaagtataaatacttaatagayaatgagaattctgggtgattttgttactgagattcatagtaagatacataggttctagataatgaggcaccaaatcaaagccaaggagggaagcttaaatggaaacagttggataagcctgagaaataaaaacaagtgacatttttgtttgagtgtggctccacaagggaatcacttggagaacttttaaaaacctccatgtgttaactctactccagacccatgacatgtgggtccttcacatcagtacttcaaaactattcccagatgatttttaataagaaaccaggtttttcattaacatacaactaaaactaatttggaaggatttctcctattaaatgtgacaattgaacaaattaaaacagcctctctgatctctgttatatgtaagaggagatcattggaggtctttagaga

SEQ ID NO: 149963 - DNA, 396 bp, Homo sapiens
gcttttatttgtttttggtgacacctcatccctgagacctttcacttgtttcacctgattcaagtgatgcatckctagcttgttgttgacaatgagttcttattgatttggttatatcactagtctccattccaggtctgatcactgcatcaggcagtcatctttgatggacagtgtcaaagatgacaggaatattccctgacactggcatcctactctttctggcctacccttagtccaaggaaaatgcccacacattctttgctaggacagactttggaagtcttcaaagcagccagttccttcttgactcatccatgagcagggagccagccccgtccttgctctccaggtgttttaggtaagaatcaggcactagactactagatgtcccca

SEQ ID NO: 149964 - DNA, 547 bp, Homo sapiens
caatatcatcagaaatttaggtaagcttattattttaaacattttaatgcagaatatttgttgttttcttataatttaagtttcaaaagaaaggtataaagaatacagagacattcttatttttatttatcttttacatgaaggagatttcttggagttttctytttgtttatgaagttgcaaagttttgatttttaaaaaatttatcaagatctatctgatggatgttacatttgggagattggaaatacaagtgtctgtttagtctttttgattggtttgttttttgctttaccattcaataaattgagaactcaccacgtttcaagggactaattttgtccaaataaatgtattgaatctgctgctagagagaccagcggatgtgaacacttcattgagcctgtggggaacagctccctgctgagcctttatagaagaacaactgtttaaagaagaatggaaagtagaacagacacaaagttaaaagacaaatgtgcagactcctgcttttaatggtattcaagggtttagcaagccattaact

SEQ ID NO: 149965 - DNA, 547 bp, Homo sapiens
caatatcatcagaaatttaggtaagcttattattttaaacattttaatgcagaatatttgttgttttcttataatttaagtttcaaaagaaaggtataaagaatacagagacattcttatttttatttatcttttacatgaaggagatttcttggagttttctctttgtttatgaagttgcaaagttttgatttttaaaaaatttatcaagatctatctgatggatgttacatttgggagattggaaatacaagtgtctgtttagtctttttgattggtttgttttttgctttaccattcaataaattgagaactcaccacgtttcaagggactaattttgtccaaataaatgtattgaatctgctgctagagagaccagcggatgtgaacacttcattgagcctgtggggaacagctccctgctgagcctttatagaagaacaactgtttaaagaagaatggaaagtagaacagacacaaagtyaaaagacaaatgtgcagactcctgcttttaatggtattcaagggtttagcaagccattaact

SEQ ID NO: 149966 - DNA, 568 bp, Homo sapiens
tctttctgggctttgcacaagagcccttaaaactcaaagctagtaacagtgtatctggtttctctcacacttagaatatttctgacttctctttcagctccatttctctgttttcttctattgcatggttctgactccagctagagaatgtctttagctttaaaattttagtatttagattgggtttatctgaataattgaagatactccccttattgtgaattccattgatattgtttggatatttgtcctctccaaatctcatgttgaaatgcaacccccagtggtggrgatggggcctagtgggaggtatttgggtcatggggctggatccttcatgaaagtcttggtgccatcctcacaataatgagtgaattatcactctagttcacagaactggttattaaacagagcctagcatcaactcctctctctcttgctccctttccagccctgtgacacaatgactcctcttcccctcctgccaagattgaaagcttcctgaggtcctcaccagaagcagatgctggtgacatgcttcttgtagagcctgcagaaccatgagaca

SEQ ID NO: 149967 - DNA, 568 bp, Homo sapiens
tctttctgggctttgcacaagagcccttaaaactcaaagctagtaacagtgtatctggtttctctcacacttagaatatttctgacttctctttcagctccatttctctgttttcttctattgcatggttctgactccagctagagaatgtctttagctttaaaattttagtatttagattgggtttatctgaataattgaagatactccccttattgtgaattccattgatattgtttggatatttgtcctctccaaatctcatgttgaaatgcaacccccagtggtggggatggggcctagtgggaggtatttgggtcatggggctggatccttcatgaaagtcttggtgccatcctcacaataatgagtgaattatcactctagttcacagaactggttattaaacagagcctagcatcaactcctctctctcttgctccctttccagccctgtgacacaatgactcctcttcccctcctrccaagattgaaagcttcctgaggtcctcaccagaagcagatgctggtgacatgcttcttgtagagcctgcagaaccatgagaca

SEQ ID NO: 149968 - DNA, 398 bp, Homo sapiens
tgttcctacttatcctttttgtgcacagttctctcattggtaaaatgcatctattaatatctgcctcaaagcgtcatttcgtaaattaaatcagaaaatatatgaactatgtaaagaattaaatcaaaacttatayaaaacacagaagctggcacagcaggcttcagcatgctatccgctcgctccattcactccattagcattgtcatctgtgtctccacacccctttcagattccatacacctctgaaagtctgattttcctgtacttgcctcagcatcttgtgtaacaatttccaaaatacagataatgctcatgcattgtagagggtggagactgggaaaagtgaataccccaaaacctaagctgttgatcaggttcatggactagtagtgaga

SEQ ID NO: 149969 - DNA, 641 bp, Homo sapiens
tttttattgttgccttgtgtccatgggtatccaatgtttaactcccacttataagttagaacaagtgctatttggttttctgtgttaattcacttgggataatggcctctagctgcatccatggtgctgccacagacatgatttcattcttttttatggttgcataatatttcatggtgttaatttaccacattttctttatccaatccactgttgatgagcaccaaggttgattccatatctttgctattgtgaatagtgctgccatgaacatatgtgtgtatgtgtctttttggtagaataatttgttttcttttggatatatacccagtaatgggattgttgggtcgaatggtagctctgttttaggttttttgagagatctccaaactactttccacagtggctgaacaccaacagcttataacaaggrtccccaaccccaggtacccatctgtggcctgctaggaaccaggctacacaggaagaggcaaacagcaggtgagcaagcattaccacctgagctccacctcctatcagatcagtggcaacattagattgtcatgggagtacaaaccctatcatgcaaaccacacatgcaagggatctaggttgccatgttgtgtgctccttatgagaat

SEQ ID NO: 149970 - DNA, 567 bp, Homo sapiens
agtggcaacattagattgtcatgggagtacaaaccctatcatgcaaaccacacatgcaagggatctaggttgccatgttgtgtgctccttatgagaatctaaygtctgatgatctgtggcggaacagtcattcccaaacatccccccgtccccaacacccccccaccccacaggaaaaattgtggaaaaattatcttccacgaaactggtctctggtgccatgaaggttggggaccactggtttttaagcattccctttctctacaacctcaccagcatctgctattttttgactttttaataatagccattctattgcaaatgcaaatcaaaaccactatgagatgtcatctcaccccatgtgtgtgagatagtatctcattgaagttttgatttgaatttctctgatgattagtgatgtgaagctgtttttcatgtgcttcttggccgcttgtatgccttcttttgagaagtgtctgttcatgtattttgcccatttttggatggagtttttttgcttgttcaattgtttaaattcattatagattctgatattagacttttgtc

SEQ ID NO: 149971 - DNA, 630 bp, Homo sapiens
gaacgcatcctcttacgtcttaaatatcagtttcatttttctatttccctcaaaggaataaaatgacatagtagtttcacctgtggctaaccaggttcgagtccaaggcttgaattaaaactgaaaagtaggggacttcaatttcatttcaagtatgctttggggaacatgccagagaagggaaagggatggaaaagaggctgatgcatgctcagagagtggctgcaagcagttcagagctacrcagagggagtggcgggcatcagcggcagtggtattcacagttaattgatttgcttcctcagttgacacatcttttaacgaagactttggaacccaaatgcaataaaccaagcatgagtctattatattctatactcatagaaaatgttttacgaatcaaaatctgaagcttatttgtataattttaattttaatcctaagatacacatatatagaggggtaagatggaaatgggaacccagagaagacagtgtagtaaaaagaggtgggaacttagatccaaagaatccagttctgccactgcctagctgtaatctcaggcagcttccctccaagttatggatttgtttcctccttagaaggaagatcagacttagatgattccta

SEQ ID NO: 149972 - DNA, 357 bp, Homo sapiens
catatactggttggtttgtgttkagttagggttgagttaatatgtataaagtgcttaaaacaatgcctggctgaagtgtttgttttccgttaggagagagggagagacaggaagaaagtagcaaagaatctgagagggaactatctccagttatccgagtcattaccaaatcctcctaactaccttggggttgcatcaccctttctccaagttacctgaacacactatgctgtctcctgtatcaggagccctatgaatgcttgttgttctgcctggaatgctcttgccattgccaactcacccactctttcacccttttttttttcttttttttgagacagagttttgctctcaccc

SEQ ID NO: 149973 - DNA, 578 bp, Homo sapiens
cgaggacagggacagcaaagagtaagcagagtgacctgggggattattcaccggtggcggcatattgtgtccaggagaatgaactgccatgaacagcaagtagaagagccgactcaacatggaatagtagttttagttgaagatatgaagctccccagtcactgcacagccagggtggattttctgccaccttcacaagcctcctgcagggagggtcaccgtgtctcagatctactcactgtggagtttaaatcctccctcctctgyttgtcacccctcagggtgagctgagaaatcagccagagggagcagagtgacagtggctgaagggaaatggtactgggcagttgatagtgaacagagcccgagaggaaaagcccctccccttaaggctgcaagatctgcattagggcaggaggttcttcagtgcagaaagaagcagaggtcgtcaaccagaggatctggcaccagctttttggcacttacccagaagaacagttcacaggccaccaggggaaaacaccagatgttaccaggaggggcgtggaagtcctctggttcttggtctccttgaattc

SEQ ID NO: 149974 - DNA, 588 bp, Homo sapiens
agccaagcttaagctattgtgcaagcctgccccacttgccagtatgtccctggtgttgcccgtgtagaaggatgcaccccacgaggtttggctccagatgaaatctgacagatggatgttaccaatatagccacctttggcaaactcagctatgtccatgtgactatagactcctactcccatatgctgcatgccacatgccaaacaggggaaatagctggtcatgcctggtgacattgttgtcatttgcccatatrggggggtccctaaacaattgaaaactgacaatgaacttgcttatgctagtgatgcctttcaaaattttttagttatgggcagtcacccataaaacaggaattccttacaatcctcgagggcaaggccttactgagtgggtacatcaaacggtacaacgtatgttgaaaaaacaaaaagggggaataggagaccaactaccacctcaggcaaaattacattagccttgcttactttaaactttttgactcctggtacagacggtaagactagcagaacgacattggcaagtgttagaggaaaagaggcaagtttacccaaaggtgttatgga

SEQ ID NO: 149975 - DNA, 588 bp, Homo sapiens
agccaagcttaagctattgtgcaagcctgccccacttgccagtatgtccctggtgttgcccgtgtagaaggatgcaccccacgaggtttggctccagatgaaatctgacagatggatgttaccaatatagccacctttggcaaactcagctatgtccatgtgactatagactcctactcccatatgctgcatgccacatgccaaacaggggaaatagctggtcatgcctggtgacattgttgtcatttgcccatataggggggtccctaaacaattgaaaactgacaatgaacttgcttatgctagtgatgcctttcaaaattttttagttatgggcagtcacccataaaacaggaattccttacaatcctcgagggcaaggccttactgagtgggtacatcaaacggtacaacgtatgttgaaaaaacaaaaagggggaataggagaccaactaccacctcaggcaaaattacattagccttgcttactttaaactttttgactcctggtacagacggtaagactagcagaaygacattggcaagtgttagaggaaaagaggcaagtttacccaaaggtgttatgga

SEQ ID NO: 149976 - DNA, 540 bp, Homo sapiens
ggaattcgcatttctttctctacttttaaaaagtttcttgacactgatcttggcaaagattttcttagatatgacctcaaaagcacaagcaacaaaagcgaaaatagacaaatggaatagcaccaaactaaaaatcttctgcatagcaaagaaaacaatcarcagagcgaatacatagcttatagaatagaagaaaatatttgcaatttatatgtctgataaggggctaatatccaaaatatataaggagttcaaataactcaatagcaagaaaacaataatccaacttaaaaatgggcaaaggacctaaatagacattgctcaaaaaaagagataacaatggccaataggtatatgaaaaaaatgcccaataccactaatcaacagggaaatgcaagttaaaccataataagatgtggttttgtcacctcatatctgttagaaaagctttcatcaaaaaggcaaaagataacaagtgttggcaaggatgtggagaaagagaaaacctcacacattgttggtgggattgcaaattagcac

SEQ ID NO: 149977 - DNA, 538 bp, Homo sapiens
tatccacttggagttcactgtgcttcttacatgtaagattaatattttgtattttattttcaaggttttggccatttttaaaagatatttattcttcccctcttctctctcttctcttcttttggggaatctattatgcatatgttggtacrttagatgttgttgtataggcccctgaggctctgctcatttctcgttttagtattattttttgttcctcagactggataatcaataccaaaaaacctacctccaaactcatggatttttttgtcttctgcgagctcaagtttgctgtcaagctctcatagtgaaatttgcatttcacatattatactttttaacactagaatttatatttggcttttttataaaaataaaatttatgtttctttattgatattctctttttgatgagatatttttgacatatgtttttttactttcttagacatgatttcctttagttgtttaaagaaatgaaaaaccgctgatttaaaattggtgctttatgaatccaaagtaggggcttttttgt

SEQ ID NO: 149978 - DNA, 538 bp, Homo sapiens
tatccacttggagttcactgtgcttcttacatgtaagattaatattttgtattttattttcaaggttttggccatttttaaaagatatttattcttcccctcttctctctcttctcttcttttggggaatctattatgcatatgttggtacattrgatgttgttgtataggcccctgaggctctgctcatttctcgttttagtattattttttgttcctcagactggataatcaataccaaaaaacctacctccaaactcatggatttttttgtcttctgcgagctcaagtttgctgtcaagctctcatagtgaaatttgcatttcacatattatactttttaacactagaatttatatttggcttttttataaaaataaaatttatgtttctttattgatattctctttttgatgagatatttttgacatatgtttttttactttcttagacatgatttcctttagttgtttaaagaaatgaaaaaccgctgatttaaaattggtgctttatgaatccaaagtaggggcttttttgt

SEQ ID NO: 149979 - DNA, 531 bp, Homo sapiens
acttacatctgcagagaccctacttccaaatcaggtcatattctgaggttctgggtggacataattttggggatggggaaacactattcaatccagtacatatgcttataaagtagatgaatcccccctggggatattcagatgcccattgaccctattaagccttaattcctgaaagtagagcttcagctcccaggagcatgtggcctacctcctcctcaatctctgctctggatgaggagtggggccagtrcagaagcaaggggtatagaccaacaacatgacccacaaggaccacatctggtcctggtaaagccatgggccccagagccctggtggggccctgggtgatgctgagaagcctgaggatcacacacctccctcacatagtattacgcctttgcaagtgcgtgggcatgttcttaggattaaccaattacaaactcagtttgaagtgtgacagtcattcattttctccctgagtggtactgaaagtaaaactcctgtcatgtgcgagtctgagaaacatgt

SEQ ID NO: 149980 - DNA, 538 bp, Homo sapiens
tatccacttggagttcactgtgcttcttacatgtaagattaatattttgtattttattttcaaggttttggccatttttaaaagatatttattcttcccctcttctctctcttctcttcttttggggaatctattatgcatatgttggtacattagatgttgttgtataggcccctgaggctctgctcatttctcgttttagtattattttttgttcctcagactggataatcaataccaaaaaacctacctccaaactcatggatttttttgtcttctgcgagctcaagtttgctgtcaagctctcatagtgaaatttgcatttcacatattatactttttaacactagaatttatatttggcttttttataaaaataaaatttatgtttctttattgatattctctttttgatgagatatttttgacatatgtttttttactttcttagacatgatttcctttagttgtttaaagaaatgaaaaacmgctgatttaaaattggtgctttatgaatccaaagtaggggcttttttgt

SEQ ID NO: 149981 - DNA, 534 bp, Homo sapiens
gggcccttggctcaaggaggcccaagtacagatcaggccactgsttcggaggttgcaagccataagtcctggtggcttctctgtggtgttaagcctgtaggtgcacaaaatgcaagagttgaggctgggagcctccatctaaatttcagacgatgtatggaaaagccagcatatccaggcagaagcctgctacaggggcagaaccctcatggagaacctctactagggcagtgcagaggggaaatgtggggttggataccccacagagtccccactagggcattgcatagtggagctgtgagaaggccaccaccttccagacctcagaataatatatccaccaacggattgtaccctgtgcctggaaaaactgcaggcactcaacaacagtccatgagagcagctgggagggtggctgaatgctgcaaagccacaaggacagagcttcccaaggtcttgggagatcacccctcataccagtgtgccttggatgtgagacatggagttaaagaagattattttggagctttaaga

SEQ ID NO: 149982 - DNA, 527 bp, Homo sapiens
ccactttcaccactgttgctcaatatggagaagtcctagctagagcaatgagtcaagagaaagaaataaagggcatccaaattgtaaaggaagaagtcaagttatccttgtctgaagatgatatgaacttatatttggaaaaacctaaagatttcaccaaaaaaactattagaactaataaacaaattgagtttattaactgaataaactgaatataaacatttcaggatacaaagtcaacacacaaatatctgcagcatttctatatgccaacagtgaacaatctgaaagagaaatttaaaaagtaattccacytacaatagctataaataaaattaaatacctatgaattaaccaaagaactgaaagatctctacaatgaaaactataaaactttggcaaaagaaattgaagacacaaaaatatgaaaagatatttcatattcatgggttggaacaattaatactgttaaaatgttcatactacccaaagcaatctacatattcaacacaatccatatcaaaatg

SEQ ID NO: 149983 - DNA, 421 bp, Homo sapiens
atatttaaaaccctactacgtgttagatgttgtgctaagtatttaacatagtttaggttatgagataggtttggttaggtgtgctatacatatttggagaaataaaaaaaaattctggcagacagtataggttagtgattaagagcatagtcagaaggagagtttctagcacatcgttcatcaaataaatatttactgagcacatatattcyatgcacggttctagttgctggggataaagcagtaagagacaaagagcctatattagggggagaataaaagcaaataggcaaataaaatctatctatctatctatctatctatctatctatctatctatctatctatctatttatctatctatctatcagctatcatctatctatctatctgtctatctatctatcatctatctatctat

SEQ ID NO: 149984 - DNA, 463 bp, Homo sapiens
aatctaaagaccccatcaaaaaacaattagaactgatgaacaaatttagtaaattttcaggatacaaaatcaacatacaaaaatcagtagcatttttatatgcaaactgtgaacaatctgaaaaagaaatcaagaaacttatcttatttacaatagctacaaataaaatacaacacttaggaattaaccaaataaatgaaatatctctataatgaaaactgtaaaactgatgcaatacattgaaaaggacacaaaataatagaaagatattccmtgttcatgaattgtaagaaacaatattgttaaaatgtccatactatccaaagcaatctagagatttaatgcaatccctatcaaaataacaatgatattcttcacagaaatagaaaaaacaattcttaagtttatatcagatcacaaaagagctagaatagccaaaactatcctaagcaaaaagaacaaa

SEQ ID NO: 149985 - DNA, 337 bp, Homo sapiens
acattttaagacaaaagaagctgcttaaggcatcctccaggaagtgttcctgatttccccaatcttgactaagtacccactttgtgcattaccatagcatcaaatatatttcccgctgcagtgcatatcacacttctttgcattgtctgtctgtcttcaatattagactataaatgccaggaagactgtaaccatgtggtcttattctctgatgaawctccggtatgtagtactatgcctggcctgcatgagatgtccaataaatgtttgataatgctgttatcaccttgcatttacactgaggctatagcatccttcacaataaggatttccatag

SEQ ID NO: 149986 - DNA, 613 bp, Homo sapiens
tattgaagttcgagcatatagtgaaggaggagatggaacagctagttctcaaattagggtaccatcatattcaggtaagttttgacacagtagatttaatttgctgacaaacccaccattacgagatggtatgaaagtcaccaaaattgatgtgatagatttcatggttcagagatttgagggatttctcctctctgatttttatatattcttctgattaatatgaaccatagtaatctgctcacaattgcagaatttctacaaatctagaaaggagttgacattttcattagaatrtactgatttgtgaaatgtccttgcctctcctggtctcaagcagtaccttgctagccatttggtttttggagtatagcttttaaactgatattacactggttttgacatacctacatttctgtagttttgattgcctttattgttagacaataaggaatttaaagagaagcttttaaaattgaaatgtgaccatatttattgatttctaaacaaattataaattttattgtacattattattaacaatattaataattgctagctttcactgacccttattatatgtcaggcatggtcaaaagtgctttacatacat

SEQ ID NO: 149987 - DNA, 585 bp, Homo sapiens
tttttataaaagtgtcaggtaagttgatttaacaaagatgcagccattcccaatagctagaaaggatgtgttcttgttttttatttattaagcatgcacatacgactccagtgagtctttgtcatctcgcctttcttatagctcacaagtggctatgtgcttcacaataaccccattttgtacaagttgaaatatatgcatcattctccaatatgttgattgataagttctagtagtgtattagctgtaaaatttttcaaaggaaagatttacgctttttgcatttgtgtgtgtgtgtgtgcacscccatgtgtgtgtttaccaaacaaattattctctagctcttaagcatcaggaaaataaattcagactctatctttgcaactaaaactacccccccaaatcccattacactcagtctagccagagaggattaccttgacagaagattccagcaattgggtagtagattatagtattattattagggttttaactaaggccaatcattgttttaagagagataatacacgagtatctaaatccactaattcctacctcaattactctaagcaagtttacagc

SEQ ID NO: 149988 - DNA, 549 bp, Homo sapiens
gcatgaattttaaattaaacattaattgcctggttagattttcatgcatccataaaaccagccatgctttcattgtgtacaggtgttcattaattaagagcataacaggttagttgttcttcattttatgtactcactgtgcagmtactgaaatgactgccaatagtagtacttatgctcacatattttctaaaaagcgctgccttactttgcatattgttaattgtgtttaaacaaaggcaaagattactgactaattcagaggctctctataaatattcatttcaaaaataaataatccatttgggatgaataatccttttcaactttttatggtatgaatctccttgtgctattaaaaagcattttagcaagatcacttttacatttcaagctaaagtgtattcagattgtgcattttaaaagaatttctatttttgcagctacctcaatcatgtaatgcctgtctctattttatcatgagttctatatacatgacatactttagtccattaaaattttatggaagagaagtagcattaaaaatgc

SEQ ID NO: 149989 - DNA, 636 bp, Homo sapiens
agacatctattaaggtactggggattaggacttcaatataggaatttgcagggaggggcagacacagttcagctcataacatatggccacgccaagtgagaaggcatggacgtagggagatgcaaagaattggggccattacttccatctattttctatgatgctggcaaaaacatctcagtgacatttttaytttcataattttacagatgaggaaaaatgaggctcagctagaatttctcccttgtgtatttttttcttatatgaaacagtgacaaactaaaataagaggtcaggaaaaatcttacttttagttttcacatatttcatttagaggcaacctcatatagtgattaagagtgtgaggtctggcaatagcctgccttaatccaaatctcagctttagcgttaacttggccatgttaccttgggtgagtgatttaacctttaagtatcttaacttcctttcacatgggaataagagaattacctacctcatagagttattaaagaattaaatctcttaatatatgcaaagcttagaacactatgtctagtaaacattataaactgtctgctgtagtaacaacaaaaaatatagccctttatcatttgatgagtgatatctattaagca

SEQ ID NO: 149990 - DNA, 521 bp, Homo sapiens
ggaagaagttatttattataaaaataaaattatatattaagttatagcaatgatgaaaggccatctcatggtataagaacaaggtagaagtaaatttaggcttaggacaaatctgacaagtttagaagatgtaagacaaaagagccagcatcattcatatatgccaggcattattccaagtgccttacatgtattaattcatttaaacttttaacaacttgaaggagaatgatcactttttacagatggaaaaattmaggtgtgaaaactaacataactttgtaaaaactgttgtcattatttccttgaaataccagctgttatgctgctaatatttcctatgcctgtatgattttcattcatcgaattggagatgttaatctcaaatttaatgttttgaaagctggattaatatttaagccaatcagaagagactgtacaattttattgtctgggccatgggagtaaatgaaatcaataaattttccctgaattaaccttggggacaatgaaccactcct

SEQ ID NO: 149991 - DNA, 502 bp, Homo sapiens
gatctatccaaaagttacaagggtgatgcatcctggcatgtaaaaacatcagtgtaatataccatattaatacaacaaataagaaaaaaaaccacatggtcatctcaacaaactcagaaaaaacatctgacaaaatccaacaccattttatgatttaaaaaataaacaacactcaacaaaccaagaataaaaagagcttccttaacctaatgaagaacatctatctctcwcacacacacacacacacacacacacacacacacaccccatcatacttaatggtaaaagactggatactttcttcctaagatagtatcagaacaagaatgtccactcatcatttccactcaaccctgtactggagtttcttgccagggaaattgggcaagaaaataaaatacaaagaatccagattagaaaggaaaaagtaaaattatctctagtcacagatgacaagattatatgtaaagactcctgaggaatacactagaaaactaataaa

SEQ ID NO: 149992 - DNA, 528 bp, Homo sapiens
ttacaagggtgatgcatcctggcatgtaaaaacatcagtgtaatataccatattaatacaacaaataagaaaaaaaaccacatggtcatctcaacaaactcagaaaaaacatctgacaaaatccaacaccattttatgatttaaaaaataaacaacactcaacaaaccaagaataaaaagagcttccttaacctaatgaagaacatctatctctcacacacacacacacacacacacacacacacacacacmccatcatacttaatggtaaaagactggatactttcttcctaagatagtatcagaacaagaatgtccactcatcatttccactcaaccctgtactggagtttcttgccagggaaattgggcaagaaaataaaatacaaagaatccagattagaaaggaaaaagtaaaattatctctagtcacagatgacaagattatatgtaaagactcctgaggaatacactagaaaactaataaacaagtttttagaagtttttttaaaaaactaataaacaagt

SEQ ID NO: 149993 - DNA, 487 bp, Homo sapiens
tacaagggtgatgcatcctggcatgtaaaaacatcagtgtaatataccatattaatacaacaaataagaaaaaaaaccacatggtcatctcaacaaactcagaaaaaacatctgacaaaatccaacaccattttatgatttaaaaaataaacaacactcaacaaaccaagaataaaaagagcttccttaacctaatgaagaacatctatctctcacacacacacacacacacacacacacacacacacaccccatcatacttaatggtaaaagactggatactttcttyctaagatagtatcagaacaagaatgtccactcatcatttccactcaaccctgtactggagtttcttgccagggaaattgggcaagaaaataaaatacaaagaatccagattagaaaggaaaaagtaaaattatctctagtcacagatgacaagattatatgtaaagactcctgaggaatacactagaaaactaataaa

SEQ ID NO: 149994 - DNA, 479 bp, Homo sapiens
gctatgctagagaccaaggtatccaccagttccttttgtcctacttttatctccagcatagtgacccatcaacctcttccctgtgaaatggagaacttcaccaagggcaagagggttgggggcwgaagctggcgccagagatgaaagaggagaggaaagccactccttacaaagtacacaaggccttcaccaagtgcactgccaactctccaaagagttccccaggcagagcaaggcaggagagagatgcctaataaacagaaagcccggggtggagctggagagagacagaaactctgcagcatcctgaaacgctggcagctgacctgcaaagctggtagagcgcctgtatgattgagaaggccagtgctgggctgtaaaacacaacatgatttctggaatctcactggtgctcagatgctcaaccttgctgaaagcaaagtccttgatcctcttctcagaatatttgaagatagtga

SEQ ID NO: 149995 - DNA, 504 bp, Homo sapiens
actaattctagaaaaagacaagaggtggataggtcgctatgctagagaccaaggtatccaccagttccttttgtcctacttttatctccagcatagtgacccatcaacctcttccctgtgaaatggagaacttcaccaagggcaagagggttgggggctgaagctggsgccagagatgaaagaggagaggaaagccactccttacaaagtacacaaggccttcaccaagtgcactgccaactctccaaagagttccccaggcagagcaaggcaggagagagatgcctaataaacagaaagcccggggtggagctggagagagacagaaactctgcagcatcctgaaacgctggcagctgacctgcaaagctggtagagcgcctgtatgattgagaaggccagtgctgggctgtaaaacacaacatgatttctggaatctcactggtgctcagatgctcaaccttgctgaaagcaaagtccttgatcctcttctcagaatatttg

SEQ ID NO: 149996 - DNA, 479 bp, Homo sapiens
gctatgctagagaccaaggtatccaccagttccttttgtcctacttttatctccagcatagtgacccatcaacctcttccctgtgaaatggagaacttcaccaagggcaagagggttgggggctgaagctggcgccagagatgaaagaggagaggaaagccactccttacaaagtacacaaggccttcaccaagtgcactgccractctccaaagagttccccaggcagagcaaggcaggagagagatgcctaataaacagaaagcccggggtggagctggagagagacagaaactctgcagcatcctgaaacgctggcagctgacctgcaaagctggtagagcgcctgtatgattgagaaggccagtgctgggctgtaaaacacaacatgatttctggaatctcactggtgctcagatgctcaaccttgctgaaagcaaagtccttgatcctcttctcagaatatttgaagatagtga

SEQ ID NO: 149997 - DNA, 504 bp, Homo sapiens
actaattctagaaaaagacaagaggtggataggtcgctatgctagagaccaaggtatccaccagttccttttgtcctacttttatctccagcatagtgacccatcaacctcttccctgtgaaatggagaacttcaccaagggcaagagggttgggggctgaagctggcgccagagatgaaagaggagaggaaagccactccttacaaagtacacaaggccttcaccaagtgcactgccaactctccaaagagttccccaggcagagcaaggcaggagagagatgcctaataaacagaaagcccggggtggagctggagagagacagaaactctgcagcatcctgaaacgctggcagctgacctgcaaagctggtagagcgcctgtatgattgagaaggccagtgctgggctgtaaaacacaacatsatttctggaatctcactggtgctcagatgctcaaccttgctgaaagcaaagtccttgatcctcttctcagaatatttg

SEQ ID NO: 149998 - DNA, 465 bp, Homo sapiens
acagctcagatggatgtttattttctgaaagtcaaacatactatgctgttttttaggcaaaaacaaatgagcttctttcttgcccagargataaacttcatttttaacttcctttgttattgcttttttaaatcagataaaatcatgtcttttccttcaatcaccttttaaaaacctccaagttatgaagacctccactttttgttgttgttgttgttgttaagctgatgttgcttctcctataaagacttaatatgtgatgatgaacaaaggcaaacttttaaaggttaaacttaggctttaaaatgaaattaaagattccttctgggatattctttagtggaaactaattcagagaggaaaacattcttatattatatttaaattaaacttaatatgataatgccccacattaattaaaacttcagcctttgccacagtgactttaattaaagaacaacaaat

SEQ ID NO: 149999 - DNA, 493 bp, Homo sapiens
tgtgggaagtgatatatgagtaatttgttactaatagttgtcctttcaaacagtaaaattccatacactagatagattttaaaagatattcttctatgacatgtatttgagtatttcaaatggccccttttaaggaataataattctgtctctgttgaaacacatcaagacaactttaacatgtaattcttatagaagtcaaagaggaataatttcttttgatcataattttttccccagacaataatatattttcaagaaaaaacaagtatgtaaataaaaaagagataaaatttagcaaaatctcactatccagagacaattatagttgatattttggcgaaagttttagtaattatttgttcttaacagataccattcttattctagtagactactaaataatatatacagcatgatcctgatgtttgtaacaggatcatgctgtatrtactatttagtagtcttcacttctttttactcaataatatac

SEQ ID NO: 150000 - DNA, 639 bp, Homo sapiens
tataatttttaaaaaatttttatcattgtcatcaattttttttttaactaccactcctgccaaagcatrgggaatgcaattatgaaaaaggccttaaaaagctcctgacttagtcaaggagacaaatctgatagattatgtggcccatggcaaaaaataataataataataataataataataataataataataatatgcattgagcattaaatgaatggcctgaaaaacaaatgcctcaaatatcacagatggcagctattcctgtgggtggagctattgtagacatttcctgggaggacatagcaatgctttttttcagttagactccaaaactcagtggcttaagaaagataatttattattttttgtgatcctgtagattggctgtgacgcccttctgctgatcttctccgggctcacttctgaagttgcactcaactggagggtctgctggtctagaagttgccgatggctactgactagggggccttgattctcttctaggtgaccttatatcctccattaagtcaccctgatgtccttacatggagatctcagtatagcattacaagagggtgaaagtggaagcttcaaggtctcctgaggctcgggctgcaaaactcacatgataccatt

SEQ ID NO: 150001 - DNA, 550 bp, Homo sapiens
aaacaaacagatcaaatagagagtcaagaatatatagaaatgtcagtcattacccaatatataaaaattaaccccaaattgtcaaagacttataggtaaaacttcaagctataaaaatcctaaaagaaaacaartgagactacctcagtgatcttggatttggtaaacagtttttaaatagggcacgaaagacaccatttataatcataggtatctattctttttaatttatgatatctataatgttggacttaataaaaattaaaaactattgttcttcaaaagacactgttaatggctaggtacgatgattcatgcctgtaatccaacaattttagaggccaaggtaggaggatcacttgaagccaggagtttgaaaccagccttggcaacaaagctagaccctgtatctacaaaaaataataataattttttaaaaggacactattaatgaaatataaagcaagccataggctaaagataagatttgcagatctatgtccaataaagggctggtgtctagatgtaaagaactcttacaacttaaaaa

SEQ ID NO: 150002 - DNA, 550 bp, Homo sapiens
aaacaaacagatcaaatagagagtcaagaatatatagaaatgtcagtcattacccaatatataaaaattaaccccaaattgtcaaagacttataggtaaaacttcaagctataaaaatcctaaaagaaaacaagtgagactacctcagtgatcttggatttggtaaacagtttttaaatagggcacgaaagacaccatttataatcataggtatctattctttttaatttatgatatctataatgttrgacttaataaaaattaaaaactattgttcttcaaaagacactgttaatggctaggtacgatgattcatgcctgtaatccaacaattttagaggccaaggtaggaggatcacttgaagccaggagtttgaaaccagccttggcaacaaagctagaccctgtatctacaaaaaataataataattttttaaaaggacactattaatgaaatataaagcaagccataggctaaagataagatttgcagatctatgtccaataaagggctggtgtctagatgtaaagaactcttacaacttaaaaa

SEQ ID NO: 150003 - DNA, 577 bp, Homo sapiens
tatttctaggtatgaaataaaatgatatctactgctgatgatatgatcttatatagagaaaatcataatgaattcaataaaattattagaactaataaatgagttctgcaggttgaaaaatactagatcaatatacaaaaataaattgtatttctatacacttgcaatgaataattcataaccatacaaacagcagcaaaatgatacaatatttaggaataaatttagcaaaaaaaaactgtaaaacatatactctgaaaactacaaagcattgtggaagaaattaagaaagctctaaatatrtgtgaaaacatcccatgctcatgaatcagaagacctaacatggttaagatggcaatactcaccaaaataatctatagattcagtgcaatactgtagggagaccccctgaaactattgctatggaataaaagatgaaatgctcctgattatcataaatacaaagttgcatgcaggactgtgtaaagacaatgccaggttggactgccagaatgagccaatagcacatgatgtgcttccccctgcagagagcctatgaatggacgtggagccaggg

SEQ ID NO: 150004 - DNA, 577 bp, Homo sapiens
tatttctaggtatgaaataaaatgatatctactgctgatgatatgatcttatatagagaaaatcataatgaattcaataaaattattagaactaataaatgagttctgcaggttgaaaaatactagatcaatatacaaaaataaattgtatttctatacacttgcaatgaataattcataaccatacaaacagcagcaaaatgatacaatatttaggaataaatttagcaaaaaaaaactgtaaaacatatactctgaaaactacaaagcattgtggaagaaattaagaaagctctaaatatgtgtgaaaacatcccatgctcatgaatcagaagacctaacatggttaagatggcaatactcaccaaaataatctatagattcagtgcaatactgtagggagaccccctgaaactattgctatkgaataaaagatgaaatgctcctgattatcataaatacaaagttgcatgcaggactgtgtaaagacaatgccaggttggactgccagaatgagccaatagcacatgatgtgcttccccctgcagagagcctatgaatggacgtggagccaggg

SEQ ID NO: 150005 - DNA, 636 bp, Homo sapiens
ctgactgactgatttagtactatcatcacttcagagatattcacatgagagcactagtaattccaagtggccttcatttttattttgagggtgagaaggtgtagatgtgttcatttttatcctttcatccacccaccgcttacttctttctgaaaggaaaatttccctgcatggacagccacttcccaggggtggatataaaatcaaaatccccagtctctttcaaatactcctcctctttctgcttcaacactttactcctcatccccaagtacataaccttaatgttcatattgaacattgaacaaatagaaactgaactttagatatttatcttgagtgacttcccaaagagtatctgacagactccaccctgtactgtgctttctccttgagacactgtccctcatctcccgagctttgtcacaagcttactgcttgctttcttcaaaaatattactaatgacwaacgagaggtaaatatcaagttctatttattcttcccctctcagagcacttttctgtttctgcactttctgtctaaaataaccctttttggaaatcatcataaaagcttgtcactcctattttgatgtttcttagcccataacccatgatgggactgccctataactg

SEQ ID NO: 150006 - DNA, 572 bp, Homo sapiens
aggaagtgatggatcaaaacaactctgaaacccaacaaggcaaattccattagctctctaggcttgagaataaccctctttgattcagtgttctgccttttaagcccaakgaggtgacctcagcacccccatgtgtctgcaggttggccctacccacaaagctctctgtgaggtcctcttggtcttccaaaatagaggagggggtagccttgcttctgggctctggtgtgagtggcagccctgatgatctctgatcaatcccttcttgagtcactcttccctttctagaaagataaagcatttttacagatgaatacctctttcatccttccctgttacctatagtccaaactaggtattgctgctgccttggtctaaaatgacagtctttctgctgatatactaattccattcctatcttctgatgaggctgctatttaaatttatggcttaaaataaaataatctttttatcaaatggttgtttagccacatcctttgtattcccttaaaaacaaactttcactttttacaatatgaacgggctgaacattttttaaatctttaagcgtg

SEQ ID NO: 150007 - DNA, 572 bp, Homo sapiens
aggaagtgatggatcaaaacaactctgaaacccaacaaggcaaattccattagctctctaggcttgagaataaccctctttgattcagtgttctgccttttaagcccaatgaggtgacctcagcacccccatgtgtctgcaggttggccctacccacaaagctctctgtgaggtcctcttggtcttccaaaatagaggagggggtagccttgcttctgggctstggtgtgagtggcagccctgatgatctctgatcaatcccttcttgagtcactcttccctttctagaaagataaagcatttttacagatgaatacctctttcatccttccctgttacctatagtccaaactaggtattgctgctgccttggtctaaaatgacagtctttctgctgatatactaattccattcctatcttctgatgaggctgctatttaaatttatggcttaaaataaaataatctttttatcaaatggttgtttagccacatcctttgtattcccttaaaaacaaactttcactttttacaatatgaacgggctgaacattttttaaatctttaagcgtg

SEQ ID NO: 150008 - DNA, 647 bp, Homo sapiens
ttttcttattgcctacttgtccctgaacataaggaacccacagcatcttccagaaagctataaagttcaatgggtctcttttgttttctggtggaagtttttccccttttatggcccacaacctcgaaacctatagaacgaatgttgaaggacagaaagtacacattctccaagtgaaccatggagagtgatcttaaacagggatccttctttcatcctgtggttcatggaaccatacattttcttcctatggaaaacatcatactttaaaagggttttttattcactatgtatgctgaatcctggaggatggcttcccattattgcagaatatcacttctgagctagtgtctcaaatgtgctttcagtaaattgtgtcaaccatctattagactgcaagcttcttggcagttgatatgggatacagttaatgagtctcatagtctggggcctacttcaacccttacttttgtgaaaaatggtccctttatgctgtgtaatgcgggatcttakgccaataaatgagaattttgcaaacctcagataatcatgctgactaggatcatgtaggcagaaaaaaaacaaatccatacctggtaaagctgtcaacccctgtttgaataagccattgaagcacaataaagtca

SEQ ID NO: 150009 - DNA, 606 bp, Homo sapiens
gctgtgttaacttgaaatacttgtttaattttatactgggatttaaatttcccacaattataggatgtcagattatttagtttatcttctttagtttatacctagataattttttaaaatgaggtscaaagaatataagtggtttttgatgaccaaataggaaatcagtggcagagaccaggtagttaccatgggtccaaatcttattcatttttttaatacttcccttctctttatagatgatgatagagtaaagaactgaatatatatcttctctttgtttcacattaatgaaacattggtgttttgagttccaattacctttaatttttcataaaacaaaactttacttactctacaactgtgctaataaaaatcactaatgtatgaaaaaaatcacattctacaccttaaacccatctagatcatagatgtgttaaggctgttttcaattctttcaaaattgtgtccctgtgtcttggctcagttcctggaatataataaactctccataactgaatggttttgaatggggtttttcaatgcaaagtcagttatatttattttggaatacattataacacatatttagtttccatgggatag

SEQ ID NO: 150010 - DNA, 390 bp, Homo sapiens
tctaatttcattgtgcatatttatgattctatggtagggaagaacttttgtatttatttagttatttgtttctttattcaattaatcaagtatgaatttatatcagcattctgaagaaggaaatatatatggaaaagacaacaattgaatttaactacagattggctataataatatattgatgacaaaagcttttcttttcaataatggtagaatggttttatgtgagaaatataactaaaacattagaaatacaggcataaaatatctcaaatatcctcttaaatagttcagtataaaatgcattgggtattgaataagtgcaaaaacctgaggtraaatcaaaacacttaaagaatctgtataaagagtatattattttttgtatgt

SEQ ID NO: 150011 - DNA, 588 bp, Homo sapiens
gtatttataggaatttcctgacgcaaacagtaaattattagtttatactcttatcttcccagaaaagaatgttctgaaacaaatgattaagtcaatttgacccaacgatcttagttctcagtcccaatcctttagctatgtggattcaattggtctgatcacagttttcaaggttataaatgactgtcttccaaaaaaagctgatgacawaactttctgccccattcaagaaataagaatcattaacacaaaatgaattacttgcctgtgttattttaataaataatgctattctagcaaataaaatacaataaaactcaaatcacaatattttaatacttttttaagaatgactgagaattaaatctaacaactaacaaatgtgtaagataaaattagattttttattttgtaacaccaagggacagatctatgggtaagagattactcctataattattattacttcttctccatgggactcatgcatttaaaaattattgattttctttatgtatatatattggaataatttaggtcaaatatacacatagatgcatgtgagtttgtacatatacacattacata

SEQ ID NO: 150012 - DNA, 555 bp, Homo sapiens
accaaaattggtatcaaaatagtagagtgagaagtgtgaattatctgaggaagtcagaactagattgtacattataaagtgagactgaggaccacctgtggaatttatttgaggaaatggataaggataacatataagtgttaagttagagccttctgtgcttagctagcttcatttaatataatgtcctctaggtttgtccatgttctaaaaaatacatgagtttgttttttatggctacacactattccattgtgtatatgaaccayattttttaaatctattcacttattgatggacaaaggttgattccacatcttggctattgtgaaaggtgttgcaataatatacaagtgctgatatctctttcgaataccgatctcattttctttggatatacaccccattatgagattgctggaccatatggtagttctatttttaattttttgaggaacttccactctcgtgtccataatggctttactaatttacattcccacccacagtgcatgaattgtgtttcttcatgtccttgacaacatttatcttgtc

SEQ ID NO: 150013 - DNA, 507 bp, Homo sapiens
aacaattgtgaagatttgtttcacagcttttttactgccagacccaaccagactgatgggacatttcctgttcctcaaaggggagggaaagaagatataaaaacaaggraattttcattcagacaactaaaacagtaacttttgctctgaagtgactaaccccacttttgtgtatatatccttgactaaagaaaatcacagacacattgctaagccagaggtcaatatgacagagatatataacctttctagagagccacacagaggccagtgatgataattttgaagagtaatacaatctacgacattctcttctgaccccaaaacaacaaagagatgaagttgcctaccaggtggtctgcatgtgtagggaaaagaacacattttctttatatgtgttttgccatttcatatgttgtgcacattcaactgaaatgatttcaaagagaaaaaaatacacacaagcaagaaattgcatcagaatcactgacatgtatttaattacag

SEQ ID NO: 150014 - DNA, 507 bp, Homo sapiens
aacaattgtgaagatttgtttcacagcttttttactgccagacccaaccagactgatgggacatttcctgttcctcaaaggggagggaaagaagatataaaaacaaggaaattttcattcagacaactaaaacagtaacttttgctctgaagtgactaaccccacttytgtgtatatatccttgactaaagaaaatcacagacacattgctaagccagaggtcaatatgacagagatatataacctttctagagagccacacagaggccagtgatgataattttgaagagtaatacaatctacgacattctcttctgaccccaaaacaacaaagagatgaagttgcctaccaggtggtctgcatgtgtagggaaaagaacacattttctttatatgtgttttgccatttcatatgttgtgcacattcaactgaaatgatttcaaagagaaaaaaatacacacaagcaagaaattgcatcagaatcactgacatgtatttaattacag

SEQ ID NO: 150015 - DNA, 543 bp, Homo sapiens
tgtagggaaaagaacacattttctttatatgtgttttgccatttcatatgttgtgcacattcaactgaaatgatttcaaagagaaaaaaatamacacaagcaagaaattgcatcagaatcactgacatgtatttaattacagatatatattgtagggaaaagaaatattcagtgttcagtgtttttagatcctgaacattgttgatcttgcttgtattcccattgaagcagaggatgaatgaaagacccacgtgcatatagtttatgtgtcagattatcttcagagcaagtgtaaaggggcttcattgaggtggccaccgtgggtaacacagcttaattacactcggatttctggagaggtatatagaatatccctcagaatttcccaagcaaaaaaaacagaaaactccttcccttgtcagcctaaggctcccctcagggacgtaactgtgccctcttttgaaatatatatacatatgtaggcacactgactcctatcatctccccctttcgtgtagaaagagtctgagggcagaaggcaaa

SEQ ID NO: 150016 - DNA, 543 bp, Homo sapiens
tgtagggaaaagaacacattttctttatatgtgttttgccatttcatatgttgtgcacattcaactgaaatgatttcaaagagaaaaaaatacacamaagcaagaaattgcatcagaatcactgacatgtatttaattacagatatatattgtagggaaaagaaatattcagtgttcagtgtttttagatcctgaacattgttgatcttgcttgtattcccattgaagcagaggatgaatgaaagacccacgtgcatatagtttatgtgtcagattatcttcagagcaagtgtaaaggggcttcattgaggtggccaccgtgggtaacacagcttaattacactcggatttctggagaggtatatagaatatccctcagaatttcccaagcaaaaaaaacagaaaactccttcccttgtcagcctaaggctcccctcagggacgtaactgtgccctcttttgaaatatatatacatatgtaggcacactgactcctatcatctccccctttcgtgtagaaagagtctgagggcagaaggcaaa

SEQ ID NO: 150017 - DNA, 543 bp, Homo sapiens
tgtagggaaaagaacacattttctttatatgtgttttgccatttcatatgttgtgcacattcaactgaaatgatttcaaagagaaaaaaatacacacaagcaagaaattgcatcagaatcactgacatgtatttaattacagatatatattgtagggaaaagaaatattcagtgttcagtgtttttagatcctgaacattgttgatcttgcttgtattcccattgaagcagaggatgaatgaaagacccacgtgcatatagtttatgtgtcagattatcttcagagcaagtgtaaaggggcttcattgaggtggccaccgtgggtaacacagcttaattacactcggatttctggagaggtatatagaatatccctcagaatttcccaagcaaaaaaaacagaaaactccttcccttgtcagcytaaggctcccctcagggacgtaactgtgccctcttttgaaatatatatacatatgtaggcacactgactcctatcatctccccctttcgtgtagaaagagtctgagggcagaaggcaaa

SEQ ID NO: 150018 - DNA, 543 bp, Homo sapiens
tgtagggaaaagaacacattttctttatatgtgttttgccatttcatatgttgtgcacattcaactgaaatgatttcaaagagaaaaaaatacacacaagcaagaaattgcatcagaatcactgacatgtatttaattacagatatatattgtagggaaaagaaatattcagtgttcagtgtttttagatcctgaacattgttgatcttgcttgtattcccattgaagcagaggatgaatgaaagacccacgtgcatatagtttatgtgtcagattatcttcagagcaagtgtaaaggggcttcattgaggtggccaccgtgggtaacacagcttaattacactcggatttctggagaggtatatagaatatccctcagaatttcccaagcaaaaaaaacagaaaactccttcccttgtcagcctaaggctcccctcagggacgtaactgtgccctcttttgaaatatatatacatatgtaggcacactgactcctrtcatctccccctttcgtgtagaaagagtctgagggcagaaggcaaa

SEQ ID NO: 150019 - DNA, 503 bp, Homo sapiens
tatgtaaggcagactggcatgctagcaactctagagcaggagccaatgctatgatctgcaggtagaattactttttcactggggaaacttcagttttactcttaargcctttcaacagggtagatgagtcccacctactttgttgaagatcatctcctttacttaaagtcaactgatggcagatgtaaaccacatctacaaaatactttcacagcaacaccttgtgtcttagtccattttctgctgctataacagaataccaccaactaggtaatttatgaacaataaaagtttacttggctcacagttctggaggctgggaagtccaaaagcatggtgccaacatctaaagagggtcatccaaaggtagaaggcagaagcaagcacagaacagagaaaaggggggctgaatttatcaggagaccacccacatagtaactaacctacatccacaataatggcattaatccattcatgaaggcagagccctcatggtctaatca

SEQ ID NO: 150020 - DNA, 516 bp, Homo sapiens
tatgtaaggcagactggcatgctagcaactctagagcaggagccaatgctatgatctgcaggtagaattactttttcactggggaaacttcagttttactcttaaagcctttcaacagggtagatgagtcccacctactttgttgaagatcatctcctttacttaaagtcaactgatggcagatgtaaaccacatctacaaaatactttcacagcaacaccttgtgtcttagtccattttctgctgctataacagaataccaccaactaggtaatttatgaacaataaaagtttacttggctcacagttctggaggctgggaagtccaaaagcatggtgccaacatctaawgagggtcatccaaaggtagaaggcagaagcaagcacagaacagagaaaaggggggctgaatttatcaggagaccacccacatagtaactaacctacatccacaataatggcattaatccattcatgaaggcagagccctcatggtctaatcacctcttaaagatc

SEQ ID NO: 150021 - DNA, 521 bp, Homo sapiens
tctgcttttgagctgaagtagagggcgtctggaaaattttaccttttgagccagaataagaagctttaccattactagacccaccagtaaaaacattctcagcaccttcaattggtttgaatttagttattttagggagaatccaattagttaatttcaaaaattgaaacagtttcrttttaggaaaatgattattgagaatacccacaaagtcagctaaatgggtttgccaagtaagactatttataaaggcttgctgtatttgtgccttcatgagagggacaatattttttccaggatcatatccatgtaatttaacaatctgagttcacccatttcctatcatagtagcaatttgatccaaataaggagtcaaagtccctgaattagtatgtggaagagaaagacactgtacaagatcttgctcttgaacaataacaccagtaggtgaatgctgagttgaaaaaatttgcaaatctagagtcttctctggatctattctattgatttgagctttatgg

SEQ ID NO: 150022 - DNA, 543 bp, Homo sapiens
atcacgaacatgtcacagtgctgcaaagattttgtttatggccagtttggggaccagtttatggccagatttgggggcttgttcccaacacattacaactgatacaacagaaattcaaatgatcattattaggtaccatatgttgatatactggaaaatatagaagaaatggataaatttctaggaacataaaacatgccaaaattgaaccaagaggaaatccaaaacctgaacaggtcaataaaaagtaatgagattgaagacataataaaagatctcccagtaaagaagagcctgggacccaayggcttcactgctaaactctaccaaacatttaaagaactaatactaatcctactcaaactgttccaaaaaacagaggaggaggaaatacttccaaactgattcaatgaggctagtattactctaataccaaaacaagacaaaggcatgttaaaataaataaataaaaactacaagctaacatctgtgatgaatattgatgcaaaaattgtcaacaaaatactagcaagtgaaattcaa

SEQ ID NO: 150023 - DNA, 384 bp, Homo sapiens
ggcttcactgctaaactctaccaaacatttaaagaactaatactaatcctactcaaactgttccaaaaaacagaggaggaggaaatacttccaaactgattcaatgaggctartattactctaataccaaaacaagacaaaggcatgttaaaataaataaataaaaactacaagctaacatctgtgatgaatattgatgcaaaaattgtcaacaaaatactagcaagtgaaattcaacaatatattataaagatcattcatcatgaccaagtgggatttactccaggaatgcaagaatggttcaacatatgcaaatcagtcaatgtgatacttcatatcaacagaatgaaggacaaaaaccatatatttcaatggatgctgaaa

SEQ ID NO: 150024 - DNA, 384 bp, Homo sapiens
ggcttcactgctaaactctaccaaacatttaaagaactaatactaatcctactcaaactgttccaaaaaacagaggaggaggaaatacttccaaactgattcaatgaggctagtattactctaataccaaaacaagacaaaggcatgttaaaataaataaataaaaactacaagctaacatctstgatgaatattgatgcaaaaattgtcaacaaaatactagcaagtgaaattcaacaatatattataaagatcattcatcatgaccaagtgggatttactccaggaatgcaagaatggttcaacatatgcaaatcagtcaatgtgatacttcatatcaacagaatgaaggacaaaaaccatatatttcaatggatgctgaaa

SEQ ID NO: 150025 - DNA, 584 bp, Homo sapiens
ccaaaagactcccccaaaaaactactcaaactgataaacaaattcagtaaacttttaggacacaaaatcaatgtacaaaaatcagtagcatttctaaatatcaacartgagcaatctgaaaaggaaatcaaaaaagtaattccatttatagccaccacaaataaaattaaatacctaggtatcaaccagagaagtgaaaaatcttcacaatgaaaactataaaatattgattaaaaaaattgaagaggacacaaaaaatggaaagatattccatgttcacggattggaagaatcaacattattaaaatgtccatgctacacaaagcaatctacagagtcaatgcaatccctgtcaaaataccaatgactttcttcacagaaatagaaaaagaatcctaaaatttatatggaatcacaaaatattcagaatagccaaaactgtcctgagaaaaaggaataaagctgtaggaatcacatgatctgatttcaaaatatactacaaagctatagtaacaaaaacagcatgatactaccataaaaacagacacatagaccaataaaacagcatggaaaacccagaaaaa

SEQ ID NO: 150026 - DNA, 584 bp, Homo sapiens
ccaaaagactcccccaaaaaactactcaaactgataaacaaattcagtaaacttttaggacacaaaatcaatgtacaaaaatcagtagcatttctaaatatcaacaatgarcaatctgaaaaggaaatcaaaaaagtaattccatttatagccaccacaaataaaattaaatacctaggtatcaaccagagaagtgaaaaatcttcacaatgaaaactataaaatattgattaaaaaaattgaagaggacacaaaaaatggaaagatattccatgttcacggattggaagaatcaacattattaaaatgtccatgctacacaaagcaatctacagagtcaatgcaatccctgtcaaaataccaatgactttcttcacagaaatagaaaaagaatcctaaaatttatatggaatcacaaaatattcagaatagccaaaactgtcctgagaaaaaggaataaagctgtaggaatcacatgatctgatttcaaaatatactacaaagctatagtaacaaaaacagcatgatactaccataaaaacagacacatagaccaataaaacagcatggaaaacccagaaaaa

SEQ ID NO: 150027 - DNA, 606 bp, Homo sapiens
tttttttctgagatggagtcttgctccatcaccaggccagaatgcagtggcacgatctctgctcactgaaacttccgcctcttgggttcaagtgattcctctacctcagcctctgaagtagctgggactacaggcatgcaccaccatgcccagctaactttttatattttagtagagayggggtttcaccatgttggccaggatggtctcaatctcctgacctcatggtccacctgccttggcttcccaaaattctagggttagaggcgtgagccactgcacccagcctaaaatgtcttttatgcaaaagtcaggcaataacaaatgctggcgaggatgtagagaaaagggaaacctcatacactgttggtaggaatggaagccagtacgaccactatggagaacattttggaggttcctcaaaaaaattaaaaatatagctaccatgttatcctgcactcccactgctgggtatataacccaaggaaggaaatcagtatattaaggagatatctgcactcccatgtttattgcagcactgttcacaagagcgaaaatttggaagcaacccaagtatctatcaacagatgaatggatgaagaaaat

SEQ ID NO: 150028 - DNA, 606 bp, Homo sapiens
tttttttctgagatggagtcttgctccatcaccaggccagaatgcagtggcacgatctctgctcactgaaacttccgcctcttgggttcaagtgattcctctacctcagcctctgaagtagctgggactacaggcatgcaccaccatgcccagctaactttttatattttagtagagacggggtttcascatgttggccaggatggtctcaatctcctgacctcatggtccacctgccttggcttcccaaaattctagggttagaggcgtgagccactgcacccagcctaaaatgtcttttatgcaaaagtcaggcaataacaaatgctggcgaggatgtagagaaaagggaaacctcatacactgttggtaggaatggaagccagtacgaccactatggagaacattttggaggttcctcaaaaaaattaaaaatatagctaccatgttatcctgcactcccactgctgggtatataacccaaggaaggaaatcagtatattaaggagatatctgcactcccatgtttattgcagcactgttcacaagagcgaaaatttggaagcaacccaagtatctatcaacagatgaatggatgaagaaaat

SEQ ID NO: 150029 - DNA, 557 bp, Homo sapiens
tctgcagccaatgcaatgaaataggtcctctcagatccttctttttctgataataaaatagatgtacagtggccaagtgctcaagtcaaaggtcacatgtaactggcagagtcaaagctccaatgtctcactctgatggccctgctctgtactgtataggattcttagcatgaggagaaagctgttagtaacaaaaaaccctgcgctactctcagggggtactttcagagctacattcagacagcattatcaattcttcccgccagagcagaatmtggacgcgtgggtctggcagcagttcagtgtgcacttgttactggtaagagcactggatttggaatctggtaaacttcagtttaatgcatttgctatcagggcaaatcacttcacctctttgagtgccagtttcctaatctctacaatgtagataatagctgcttcataaatattttaaaaattagatgttatgatggaggtaaaaggtttcacacagattaagcaccatgagtaacaactatttgctgtgggttccatttctatcggctctggggcaacag

SEQ ID NO: 150030 - DNA, 502 bp, Homo sapiens
tttttggttttctcttgtgttttcttcaatcttaagctcactcaaaacctcttgagtatgcctgtcatttagacttcagatctacattagcatcttcaaaaaatcattttggcgtgcccacgttcctggtataataaggaatataaaataacaatagataataacatgcaataagtttttgctatttgtcacatgcttcatgcatttttttcacttaaatctcaacctaaacmatgacgataggaagttggtttccatattatttccatttagagattataaaaactgagacttagaaagatttgtaatttgctctggtcgcacatctagtatagggtgttgggattcaaacccaaatacaaatttgcacaaattatataatgatagataccttgcctgaaagaactgataatttaataaagttaggaccatgctggaggtttaatagacctttgatacagagatgtttaaggattcttagaagtagagaataaagctgatt

SEQ ID NO: 150031 - DNA, 502 bp, Homo sapiens
tttttggttttctcttgtgttttcttcaatcttaagctcactcaaaacctcttgagtatgcctgtcatttagacttcagatctacattagcatcttcaaaaaatcattttggcgtgcccacgttcctggtataataaggaatataaaataacaatagataataacatgcaataagtttttgctatttgtcacatgcttcatgcatttttttcacttaaatctcaacctaaacaatgacgataggaagttggtttccatattatttccatttagagatkataaaaactgagacttagaaagatttgtaatttgctctggtcgcacatctagtatagggtgttgggattcaaacccaaatacaaatttgcacaaattatataatgatagataccttgcctgaaagaactgataatttaataaagttaggaccatgctggaggtttaatagacctttgatacagagatgtttaaggattcttagaagtagagaataaagctgatt

SEQ ID NO: 150032 - DNA, 499 bp, Homo sapiens
tgatgttaagcaccttttcatatagctgattgccatctgtatgtcttcttttgagatatgtctactcagaccttttgcccatgttttaattggattattaaattttttcctatagaattgtttgagctcctcatttattctggttattaatctcttgtcagatgggtagattgcaaatattttctctcactctgtggattgactcttcattttgttgattgtttcttttgctgtgcagaagctttttaccttttgtgttcccatttgtctgtttttgctttggttgcctgtgcttgtggggtattactcaagaaatctttgcccactccaatgtcttggagactttcctgaaagttttcatttagtaattccatawtttgaggccttagatttacgtatttaatacattttgattttatttttgtatatagtcagagataggggtcaagctttattcttttgcatatggatatccatttttcccagaactatttattga

SEQ ID NO: 150033 - DNA, 578 bp, Homo sapiens
cttctttagcttaggatagctttggctattctggggcttctgtggttcaatataaatttcaggattgttttttccatttctgtgaagaatgtctggtattttgatagggattgcactgaatctgtagactgctttgggtagtatgaacattttaacaatattgattcttccaatccatgaacatgaaatgtcttttcatttttttgtagcatcttcaatttcttgcatcagtgttttatacttttcattgtagagatctttcacttctttggttaattccttggkattttattttattttatttgttgcttttgtaaataagattactttcttgatttctgtttcagattgtttgctgttggtgtatagaaatgctactgattttgtatgtttattttgtatcctgaaactttactgaatttgtttatcagttctaatagtttctttgttggagcctttaggcttttccaaatataagatcatattatgggcaaacaaggataaatttgaattcttcctttcaatttgatgccctttctttctttcttttgtctgattactctagctaggatttcagt

SEQ ID NO: 150034 - DNA, 566 bp, Homo sapiens
ccacaaagcactttcactaatgtggtttcaatcttcataaaaagaaagagagttggtagagtaatgattagtttttcattatttcacaaatgaagaaacattatcaaagaggtcaaggtcacacagtaagtggtaggtcttttttctttaatttctgtgtctcttccatatacaaaatagttgctatggaaactagatttggttgtttttgaaatatctttcaatataacactgttcatcatttagcattaataaactcaccctgagatttataattaatatctgagtcttccctgagagcaaagtatttgtaatggctaaaaacaacaataacaacaacaaaaccagggtaaatcaggtagcttagtagaatgttgaatcatgaaagaattaacaacaaattgcatgcmcttcacaattttttctcatactcttctttactgggactaacacttgggaaggaaccttaatcttagtgctaaagcaacagcttaggttttagtatttctcttgctggagaactctactgttgaaggagataagtcattttaagcatcttgcttatt

SEQ ID NO: 150035 - DNA, 526 bp, Homo sapiens
ccatctcaagctgaagatcttgatacatttcaccaattcagaccctgtgaatgggaatgttatttggctctcaagtcacctgattgctcagtcattcccctttgccctgcttgctctaccctgcaaaaaggaaatgagatatttaatttctgccttggccttgtagtgatggaaagctgccttgaaaagctaaactccatgcctaacttctgtctaaccacactttgttgccacrttaaactctggtatgggtctgccctagattgggcagaagggcctgtggttgggctatttacatagacccaaataagactccatagcttcctcttctagagcatcccctctttcctaacactcattcctggctaaagtcaagcagaagacatgaagacatttagatatgagtattttctacttctccttctccctttttccctcccattccacaaccccctactaccagagggatggactttttccccttcctctgtgtcacattctcttcttatcatcatacagcaagccc

SEQ ID NO: 150036 - DNA, 526 bp, Homo sapiens
ccatctcaagctgaagatcttgatacatttcaccaattcagaccctgtgaatgggaatgttatttggctctcaagtcacctgattgctcagtcattcccctttgccctgcttgctctaccctgcaaaaaggaaatgagatatttaatttctgccttggccttgtagtgatggaaagctgccttgaaaagctaaactccatgcctaacttctgtctaaccacactttgttgccacattaaactctggtatgggtctgccctagattgggcagaagggcctgtggttgggctatttacatagacccaaataagactccatagcttcctcttctagagcatcccytctttcctaacactcattcctggctaaagtcaagcagaagacatgaagacatttagatatgagtattttctacttctccttctccctttttccctcccattccacaaccccctactaccagagggatggactttttccccttcctctgtgtcacattctcttcttatcatcatacagcaagccc

SEQ ID NO: 150037 - DNA, 526 bp, Homo sapiens
ccatctcaagctgaagatcttgatacatttcaccaattcagaccctgtgaatgggaatgttatttggctctcaagtcacctgattgctcagtcattcccctttgccctgcttgctctaccctgcaaaaaggaaatgagatatttaatttctgccttggccttgtagtgatggaaagctgccttgaaaagctaaactccatgcctaacttctgtctaaccacactttgttgccacattaaactctggtatgggtctgccctagattgggcagaagggcctgtggttgggctatttacatagacccaaataagactccatagcttcctcttctagagcatcccctctttcctaacactmattcctggctaaagtcaagcagaagacatgaagacatttagatatgagtattttctacttctccttctccctttttccctcccattccacaaccccctactaccagagggatggactttttccccttcctctgtgtcacattctcttcttatcatcatacagcaagccc

SEQ ID NO: 150038 - DNA, 416 bp, Homo sapiens
aggtgtttcagggcatctcctattacccccattaccctcttctccctaaagtcatggagtgagggggttcwgaattacctgaagcacagaaatttatactaggagaccatataacacccttttgttggctgtcaggcccatgaggtaacctagtgcccagagccccctcacttgagatcttggaggttccctgtcaaaggcctagaaaaactagagttgaaggctgccactgcagctcaatgcaattcccatttcaccttccagtaagagctttcaacacctccctgatcctcctaaaatcctttcatcggtgatggcccagaggatagtctctgcctgaagtctcaccagctcagagtagagtttccattatgagaaactctgatgcttccatgcacatggagtgggtagatggg

SEQ ID NO: 150039 - DNA, 612 bp, Homo sapiens
tttgtgagccaaggactttgggtttgctcacaaggcagcccctcacctagtaggcattagttcattatgtatagtatacgtatatgtgtatgtatatgtatatgtatatgtatatgtatatgtatatgtatatgtatatgtatatgtgtatgtgtatgtgtatgtgtatgtgtatgtatgtgtatgtgtatgtgtatatgtatatgtagtcctcaggttgtattccttaaatatatataatatatgtaattccttaaatatataattttaatacaaaatttttaaaagattcctttcataaacatttacaataacaccaagaaatataaactacatagcaaagatgtgaaagccagccaggckcagcttcaaatcctagcgcttaggaaggctgtggcaggagggtcgcttgagctcagaagcttgaaactagcttaggcaacatagtgagacctcatctctactgaaaatcagaaaaattatccggctgtggtggtgtgagcctgtagtcccaggtactcagtggatgaggccctaggatgtcatcggcctgagaattccatgctgcagtgagctgtgtgatcttgccactgtactccagcctgagtgaaa

SEQ ID NO: 150040 - DNA, 612 bp, Homo sapiens
tttgtgagccaaggactttgggtttgctcacaaggcagcccctcacctagtaggcattagttcattatgtatagtatacgtatatgtgtatgtatatgtatatgtatatgtatatgtatatgtatatgtatatgtatatgtatatgtgtatgtgtatgtgtatgtgtatgtgtatgtatgtgtatgtgtatgtgtatatgtatatgtagtcctcaggttgtattccttaaatatatataatatatgtaattccttaaatatataattttaatacaaaatttttaaaagattcctttcataaacatttacaataacaccaagaaatataaactacatagcaaagatgtgaaagccagccaggctcagcttcaaatcctagcgcttaggaaggcygtggcaggagggtcgcttgagctcagaagcttgaaactagcttaggcaacatagtgagacctcatctctactgaaaatcagaaaaattatccggctgtggtggtgtgagcctgtagtcccaggtactcagtggatgaggccctaggatgtcatcggcctgagaattccatgctgcagtgagctgtgtgatcttgccactgtactccagcctgagtgaaa

SEQ ID NO: 150041 - DNA, 278 bp, Homo sapiens
ctcagagtgtcctgttactccctcatcagtgtgtcacctggacaattcactgagctcattctctctctctgtgtgtgtgtgtgtgtgtgtgtgtgtgtgtgtgtgtgtctatctgtctttctctttcattcttttccatttggccctgttctgtcccaacatgaaggcaataatttgttacctcattaatggatctatccttttacttttttaaccacttccytatgctacccatgaaacctagttggggctctgttgtgtctgatttcccctggctt

SEQ ID NO: 150042 - DNA, 332 bp, Homo sapiens
gtccatgtctgaatttattgcagaaattgaaaagaaggggaaggggaagaaaagaaggggaagaagatcaatgaagaaaagaaggagaaggggaagaaaagaargggaagaagatcaaaacccaccatgccccaggtaactttcagcaattgtggatgcttaattctgtgttaacacctggaggcaacagattcagggaaaccagagtgtgtttgatttcatgttttcaacgaaggctgaattactcctactgtcattgctgttggttttcattgcagtagatgtttaggtttccatttcttcctccccttatcatttactaacgtaccata

SEQ ID NO: 150043 - DNA, 609 bp, Homo sapiens
tggggctgtgtggtttctgattccccctggcttattctttactttttcctacttttccaggctcagcagggagctgctggatgagaaagagcctgaagtcttgcaggactcactggatagatgttattcgactccttcaggttatcttgaactgcctgacttaggccagccctacagaagtgctgtttactcattggaggaacagtaccttggcttggctcttgacgtggacagtgagtaccttactatgaaggtgataagcctccacctggtcttccagataggggtgatattcctgttcccagtggcccttactgacccgagagatgtcattgccgcaggcaggacctatgggcgcatataggttgtaatgaaactgtagtctccgctggaagcctagacatgaaatgggtcagtgagcaaggctctattcctagtctccagccatgcctgtggcaacctgagcccgctctcagcacattggacccaggcagatgtaaaaaattcacagaactatgatttgkactcaagggtttgtagatttcctccctcattctaatttcagtgtctaaaattcttgcatccatgaacgagctgggcatttgatga

SEQ ID NO: 150044 - DNA, 552 bp, Homo sapiens
gatgggccaaaagcccgcattcgcttggccacagtatgtgaaattcaacccagcttagacacagggtgcggcagctgtcgtgtttctctatgtgtgccaagtgtcatgtctgtaccatacagggatagctgagtcttcatcctcctcagctcctatctgtccagtgcactgaacaccagctgctctcttcctctctggctcccatggcagccatgytctgttgcagagagaagaggattgcctgttcccccttaaagggaacctccattttgctttctgggaccactgtcttaatgccgcctgtcaaaaccagctaggactccctggggtccaatccctctgtgtttaatcttctgtcatctctgtcccacctggctcatcagggaggtgcagaaggctgaagaaagcaaagtccctgaggactcactggaggaatgtgccatcacttgttcaaatagccacggcccttgtgactccaaccagcctcacaagaacatcaacatcacctttgaggaagacaaagtcaactcagctctggttgtagacagagaa

SEQ ID NO: 150045 - DNA, 552 bp, Homo sapiens
gatgggccaaaagcccgcattcgcttggccacagtatgtgaaattcaacccagcttagacacagggtgcggcagctgtcgtgtttctctatgtgtgccaagtgtcatgtctgtaccatacagggatagctgagtcttcatcctcctcagctcctatctgtccagtgcactgaacaccagctgctctcttcctctctggctcccatggcagccatgctctgttgcagagagaagaggattgcctgttcccccttaaagggaacctccattttgctttctgggaccactstcttaatgccgcctgtcaaaaccagctaggactccctggggtccaatccctctgtgtttaatcttctgtcatctctgtcccacctggctcatcagggaggtgcagaaggctgaagaaagcaaagtccctgaggactcactggaggaatgtgccatcacttgttcaaatagccacggcccttgtgactccaaccagcctcacaagaacatcaacatcacctttgaggaagacaaagtcaactcagctctggttgtagacagagaa

SEQ ID NO: 150046 - DNA, 416 bp, Homo sapiens
tattattgtagtaccctctgaacaggtgaggaaactgagggacaracaagacaagcaacttggatggagcccaggagacaggcccacggtctctgctctgtacactgcactgctacctccacagattctcaggtgcgatctttcttcctctttaggaacaagactctgtgccccaggaagcaggacttcactctcaccaagctacactctgcttcttattcttatttttatttatcattattattattattattattattattattattattatttttaccagtcttgccctgtcacccagagtggagtgcaatggcaaaatcttggctcactgcaacctcagcctcctgggttcaaaggattctcctgcctcagcctcctgagcaggggtgattacagtcacctgccaccatgcc

SEQ ID NO: 150047 - DNA, 388 bp, Homo sapiens
tcattctgtgcctgtgtcagaaatcaataaatggcagtttaactctagtcccacccccacctgattgcaaacatggaaagttgctaaataytttggtacctctctcttccaactttaacaaaatgttaaaatacccatttctgttttcctagaagtatggggaggatgacattattttagatggagagagcacttagtttctcagagagaagacaggacttcgttcatcactttcgtgatggtgagcctatagatcttactgtatttgttctgctggttggccaggaagcaggccagttgagttacaaaacatttctctttgaggtttctgaactgctgtttcttctctgccagctggggatgcaatttctcgttgatttctagaatg

SEQ ID NO: 150048 - DNA, 388 bp, Homo sapiens
tcattctgtgcctgtgtcagaaatcaataaatggcagtttaactctagtcccacccccacctgattgcaaacatggaaagttgctaaatactttggkacctctctcttccaactttaacaaaatgttaaaatacccatttctgttttcctagaagtatggggaggatgacattattttagatggagagagcacttagtttctcagagagaagacaggacttcgttcatcactttcgtgatggtgagcctatagatcttactgtatttgttctgctggttggccaggaagcaggccagttgagttacaaaacatttctctttgaggtttctgaactgctgtttcttctctgccagctggggatgcaatttctcgttgatttctagaatg

SEQ ID NO: 150049 - DNA, 388 bp, Homo sapiens
tcattctgtgcctgtgtcagaaatcaataaatggcagtttaactctagtcccacccccacctgattgcaaacatggaaagttgctaaatactttggtacctctstcttccaactttaacaaaatgttaaaatacccatttctgttttcctagaagtatggggaggatgacattattttagatggagagagcacttagtttctcagagagaagacaggacttcgttcatcactttcgtgatggtgagcctatagatcttactgtatttgttctgctggttggccaggaagcaggccagttgagttacaaaacatttctctttgaggtttctgaactgctgtttcttctctgccagctggggatgcaatttctcgttgatttctagaatg

SEQ ID NO: 150050 - DNA, 624 bp, Homo sapiens
gcaaaatgaaaccttttgtgctacacagaaacattggccactcatggggtaaaaatctcagggccaagccttgctttatagaaacttataagcaagaaaagtgtagaagtgtttatgtcctggtttcaaggtgactgcatagctaagataagttgacttaaaggagatcaagactggagatgacaagagtgaaaccagggaaacatcatcttcaaataagtagacaaggctgccrctgacatccctcagtgtgattaaacctatttgatttcaccagtttttaacccatcatgtgtttgcctttcttctccccagtccctggccccacctcttctgccacaaacgtcagcatggtggtatcagccggccccttgtccagcgagaaggcagagatgaacattctagaaatcaacgagaaattgcatccccagctggcagagaagaaacagcagttcagaaacctcaaagagaaatgttttgtaactcaactggcctgcttcctggccaaccagcagaacaaatacagtaagatctataggctcaccatcacgaaagtgatgaacgaagtcctgtcttctctctgagaaactaagtgctctctccatctaaaataatgtcatcctc

SEQ ID NO: 150051 - DNA, 624 bp, Homo sapiens
gcaaaatgaaaccttttgtgctacacagaaacattggccactcatggggtaaaaatctcagggccaagccttgctttatagaaacttataagcaagaaaagtgtagaagtgtttatgtcctggtttcaaggtgactgcatagctaagataagttgacttaaaggagatcaagactggagatgacaagagtgaaaccagggaaacatcatcttcaaataagtagacaaggctgccactgacatccctcagtgtgattaaacctatttgatttcaccagtttttaacccatcatgtgtttgcctttcttctccccagtccctggccccacctcttctgccacaaacgtcagcatggtggtatcagccggcccyttgtccagcgagaaggcagagatgaacattctagaaatcaacgagaaattgcatccccagctggcagagaagaaacagcagttcagaaacctcaaagagaaatgttttgtaactcaactggcctgcttcctggccaaccagcagaacaaatacagtaagatctataggctcaccatcacgaaagtgatgaacgaagtcctgtcttctctctgagaaactaagtgctctctccatctaaaataatgtcatcctc

SEQ ID NO: 150052 - DNA, 566 bp, Homo sapiens
tagatctcagcttttgtattgttaacatcttctcagactgcctggttttctccctggtgaatttcctgatgccactgcccaatggcatgtcacttgttgatgctgctttcttgggagttcaccccttgaaactgagggtaacaagtgctgttctaaaggtcatttattttcctgatgatttgataatgataggttcaaatcggggatggaggccagctgagatctagtcttcttaattttgatagtgagcattmaagaactatatactagtcattgttttagaagctggatgtaaaacaatgaataaaacaaagtccttgtcctccagaaggtcagagtttaatgttctatatgtggatacctgaataaagcttcagaattctttgtgaaaaagtgacccatcaatttttctgatatgattccatgagtgtaaactggagctgatacctctaaatgaggacaggaaggtctcagcattggtgttctcataggaaggcgagttggggaataggcagaggggctatgggaaggaggaaactgggggagttgttttgattttgcatatg

SEQ ID NO: 150053 - DNA, 566 bp, Homo sapiens
tagatctcagcttttgtattgttaacatcttctcagactgcctggttttctccctggtgaatttcctgatgccactgcccaatggcatgtcacttgttgatgctgctttcttgggagttcaccccttgaaactgagggtaacaagtgctgttctaaaggtcatttattttcctgatgatttgataatgataggttcaaatcggggatggaggccagctgagatctagtcttcttaattttgatagtgagcattaaagaactatatactagycattgttttagaagctggatgtaaaacaatgaataaaacaaagtccttgtcctccagaaggtcagagtttaatgttctatatgtggatacctgaataaagcttcagaattctttgtgaaaaagtgacccatcaatttttctgatatgattccatgagtgtaaactggagctgatacctctaaatgaggacaggaaggtctcagcattggtgttctcataggaaggcgagttggggaataggcagaggggctatgggaaggaggaaactgggggagttgttttgattttgcatatg

SEQ ID NO: 150054 - DNA, 566 bp, Homo sapiens
tagatctcagcttttgtattgttaacatcttctcagactgcctggttttctccctggtgaatttcctgatgccactgcccaatggcatgtcacttgttgatgctgctttcttgggagttcaccccttgaaactgagggtaacaagtgctgttctaaaggtcatttattttcctgatgatttgataatgataggttcaaatcggggatggaggccagctgagatctagtcttcttaattttgatagtgagcattaaagaactatatactagtcattgttttagaagctggatgtaaaacaatgaataaaacaaagtccttgtcctccagaaggtcagagtttaatgttctatatgtggatacctgaataaagcttcagaattctttgtgaaaaagtgacccatcaatttttctgatatgattccatgagtgtaaactggagctgatacctctaaatgaggacaggaaggtctcagcattggtgttctcataggraggcgagttggggaataggcagaggggctatgggaaggaggaaactgggggagttgttttgattttgcatatg

SEQ ID NO: 150055 - DNA, 509 bp, Homo sapiens
cagggtttcaccatgggtaaatttctacaagaagaattcagcttaatgaaaacaatttaagtatactctgtgttgcagcatcatttttaaggcttaaacaggatttttttwaaataagattttcttgtgcattcataacattatgaatatatataattatacccattttaaaaataataaatctacttgtaaagtctatctaaacatttccttatggcagttatagtagtactaaataatattggacatatgctattgactttaaaagatataacgatcaggatgagtagaaactattccatgcttttccccctcagtgttctttcatttatttccatttaccgtaaggagtatatcgaaagtatgccaagccagcagccagaaatgccaggctcactggggccatctttatccaagagagctgttaggatgggtggctgtcctcactagtaatgcgagtcctcaggggcttgatgatcctctctctctgggtcaggttagctctccgg

SEQ ID NO: 150056 - DNA, 509 bp, Homo sapiens
cagggtttcaccatgggtaaatttctacaagaagaattcagcttaatgaaaacaatttaagtatactctgtgttgcagcatcatttttaaggcttaaacaggatttttttaaaataagattttcttgtgcattcataacattatgaatatatataattatacccattttaaaaataataaatctacttgtaaagtctatctaaacatttccttatggcagttatagtagtactaaataatattggacatatgctattgactttaaaagatataacgatcaggatgagtagaaactattccatgcttttccccctcagtgttctttcatttatttccatttaccgtaaggagtatatcgaaagtatgccaagccagcagccagaaatgccaggctcactggggccatctttatccaagagagctgttaggatgggtggctgtcctcactagtaatgcgagtsctcaggggcttgatgatcctctctctctgggtcaggttagctctccgg

SEQ ID NO: 150057 - DNA, 579 bp, Homo sapiens
agaactgcccaagtggtggaacacagagtacaccaaatttgcagaaagtggaatcagggccaactcagaagcactcctcactcccagtggtgtctcagaattaccacagtgtagtcacaagtgaatgatatgtttcaagtacccccttttaaattggagaatttattaatagcatgagttagtctctcttcatctcaacttgtgttaagatagtttgagattttaactccaggtttctattagtatttttaaatcccatcattattatataacttattcttcagaagatgacattggcctttgtgttttrtattgtacttggaaatgaaataattgttagacatttctatgtttacatggtttcagagaacaattccattcttacaatttctttattctcaagctcttaattttcttcatttctcttggtaatttttcaagaaaattgaagggactgtgactgggcaactgtgttgtttcaggcacaagatataacccttaagagttcctggattttaatctccatgcctagtgattcagtgtgcagctgtaggctagacagcttaacatatctgtttc

SEQ ID NO: 150058 - DNA, 579 bp, Homo sapiens
agaactgcccaagtggtggaacacagagtacaccaaatttgcagaaagtggaatcagggccaactcagaagcactcctcactcccagtggtgtctcagaattaccacagtgtagtcacaagtgaatgatatgtttcaagtacccccttttaaattggagaatttattaatagcatgagttagtctctcttcatctcaacttgtgttaagatagtttgagattttaactccaggtttctattagtatttttaaatcccatcattattatataacttattcttcagaagatgacattggcctttgtgttttatattgtacttggaaatgaaataattgttagacatttctatgtttacatggtttcagagaacaattccattcttacaatttctytattctcaagctcttaattttcttcatttctcttggtaatttttcaagaaaattgaagggactgtgactgggcaactgtgttgtttcaggcacaagatataacccttaagagttcctggattttaatctccatgcctagtgattcagtgtgcagctgtaggctagacagcttaacatatctgtttc

SEQ ID NO: 150059 - DNA, 479 bp, Homo sapiens
atttgagcaaacatctgaaggatgtgagggagtgtgcattgtggaccctctgggggaagcattttcctggaaaggggcatggcaagtgcaatggtcatgaagtgggagtgggtttggcttgttcaaggagtgaacatggaaaagagtagtggtagatgaggtcagaagagcagtggggaagcagatcaggaaggacttgtaggtcattattagggtttggcttctactctgagtgatgtggaagccactggcagtttgaagcaaagtatttcataatctcgcttacattttaaaaatatcaattggcygctataaggagaagagaccacagagattaagggggaattgagaagtccagtgaggagactactgcagtaataccgacagaagatggtggcaagggctcaggtggtagcagtggaggtggtgacaagtgatgagatactggatttattttgaaggtgacaggatttgttgat

SEQ ID NO: 150060 - DNA, 603 bp, Homo sapiens
cagagtttggcttagttaagtttgaatatgctgaatagacacgtggttaatgtaagtgtaagctttagacttcagccttttaaagttaggtcgaaggctaaaggtctgtgattgggcatcatcagtacacagacggcactaaatccacaagatcagatgctatccagtgagcctgtttattcccagcactcagcacaatgtctgatgtagtggatgctcaataaatatttttttgagtaaattaaagaaagagtaatatatttcagataaaaaacaagcttatacagaatatcaggactaggttcactagtagtgattgaatcagagactaaaatacttcatctctttgattaattattaaagtgtttgtaaatgttgcaaataccttctactcttttcacccacatctgcttcttattcttctgagtgtgtttatagaattttgtatgtctactatgtgacttattcaatggattttcaatagttttaaaataacacaaaattatgtrtagttcctgacttctgttatttcctctttttctctccacgccaccctccgtaccttaaaaaaacctcaaacatacctgaaatagcctgttactt

SEQ ID NO: 150061 - DNA, 525 bp, Homo sapiens
cacacccatgacacagcctcaggtggtcctgatgatatatgcccagtgtggttggggcacaacttggttttatacatgttagagagacatgagacttcaatcaacatatgtaaaatgtgcattggttctgtctagaaaagcaggacaactcaagcattgatggggcttccaagtcacaggtaggtgagagataaatggttgcattgttttgagtttctgattagcctctccaaaggaggcaatcagttatgcatttagctggatgagcagagcaattactttgaatagaatgggaggcagatttgccctaagcagttcccagcttgmctcttcccttcagctttgtaattttgggaccccaacatttattttcctttcacatttcccctgttttctttttaaaatcttttggagaaaacattatagaagaaaatgagcctctggtctcaggtttcttctgatctctcatggctagaatagtttactcctagatgggtaggtcccaaatcattaggaaagctcatt

SEQ ID NO: 150062 - DNA, 543 bp, Homo sapiens
cttccaagtcacaggtaggtgagagataaatggttgcattgttttgagtttctgattagcctctccaaaggaggcaatcagttatgcatttagctggatgagcagagcaattactttgaatagaatgggaggcagatttgccctaagcagttcccagcttgcctcttcccttcagctttgtaattttgggaccccaacatttattttcctttcacatttcccctgttttctttttaaaatcttttggagaaaacattatagaagaaaatgagcctctggtctcaggtttcwtctgatctctcatggctagaatagtttactcctagatgggtaggtcccaaatcattaggaaagctcatttttagcaggttgagaagtcttatgtcctatgaagacaaaaaacggggagaaagggagaaaaacaacaacaaacaaaaggaataatcctggaaaattgatataggccacattaccctgatcccatacatcaatagacagatatgaaagtggcttatgtatgtaaatagattgctgttattttcc

SEQ ID NO: 150063 - DNA, 553 bp, Homo sapiens
actcaagcattgatggggcttccaagtcacaggtaggtgagagataaatggttgcattgttttgagtttctgattagcctctccaaaggaggcaatcagttatgcatttagctggatgagcagagcaattactttgaatagaatgggaggcagatttgccctaagcagttcccagcttgcctcttcccttcagctttgtaattttgggaccccaacatttattttcctttcacatttcccctgttttctttttaaaatcttttggagaaaacattatagaagaaaatgagcctctggtctcaggtttcttctgatctctcatggctagaatagtttactcctagatgggtaggtcccaaatcattaggaaagctcatttttagcaggttgagaagtcttatgtcctatgaagacaaaaaacggggagaaagggagaaaaacaacaacaaayaaaaggaataatcctggaaaattgatataggccacattaccctgatcccatacatcaatagacagatatgaaagtggcttatgtatgtaaatagattgctgt

SEQ ID NO: 150064 - DNA, 567 bp, Homo sapiens
catgacatgtgtggactttctggtttgtcctgaacatgcctctttcttaaataaccagtcattttattccaggacttaatttatcatacaagattctttctcatgtaaaattatttctctttaagctttcttaccaagaaatacctctctatttctataacttactttatgtctctcttatttcctgatttgctttgttttatacaaacctttaaataagctttgaattagacaaaaattattcacccattttataaaggacacattttgttttttaaaaaggaagttttcctacaatacattgtattggaaaatactcaaatagtattttattgaaaaatacccaaatagtaaaatgaaatatstattatttaatttaatttaatttaatttaatatgacttaattatgacatttgtctacaagtatttaacccgttacctttacctaattattttattttaattgtttccttgtttatttataaaactgcaatagtcatcatttaaagttgtgaaactcaccattgcaaaattattaactgagacagtgaaaaatatatgaccta

SEQ ID NO: 150065 - DNA, 572 bp, Homo sapiens
aaatctattataaaattgtatgagaacaattttatttagactgtgactacctattttttaactggatctctgagctctgggcaatgcccacactgaatcctgggtgtccaaaaagggagaattattatgagtttagactacatgatgcttttacagaatacttaaaaacaatgtatttttttttaaaggcatttgtaagcatctaaactacactcttccaaacccaagagtagcctcygttgcagttactattttaaacaataaatcaagtaacacaatacaaaagcaagcagtttaagagctgagatgaacttgtctgtttacacttttggggttccatgcagaaaatcaggtttctcccccaaagagagtctgatgccctctccattttctttaaggaaccccaggctattataagctactttaggtttctcatgctgtagaaggtgcaagagaaaggagagaaagcagacataaatgaagaaaacagaattcagtcaactgacaagaaaaaaccttttgctcaaaaaaaaaaaaaagacaaggtcttaggagaaaaaaacaaaaacaaa

SEQ ID NO: 150066 - DNA, 426 bp, Homo sapiens
ccataatataagtattgacaaatgtaaaataattaaaatcatacaaaggatgttctcaaactacaacagaattaaattasaaatcaacaacaaacagaaatgtggaaaattttcaaacacatggacattaaactacatactcctttgttctttcatttaaaaaatatttaatgtagatttctataactttttgggggaacaggtgatgtttggttacatgagtaagttttttagtggtgatgtgtgagatttcggtgcacacatcaccccagcagtatacactgtatccaatttgtagtcttttacctgtcacccactttccaccctttcccccgagtccccaaagtccattgtatcatttttatgcctttgcatccttatagcttagctaccacttatatgtgagaataggtgatgtttggtttt

SEQ ID NO: 150067 - DNA, 331 bp, Homo sapiens
aaacattaacaaggccaaagattggtatgtatgtataagaaacatataaattacatatatatttattagtaattttttaaatatttaatttaggtttattttagacacagagagaatttcaaaagaataaagagcccataaatccctgayccacttactttaatgctaaaatcttacataaccacgaaaaattacagaaatcagaaaattaagattattaacatactactaaataaacccaacttcttagttaagtttcctcactcttttcactgatgtctttattttgttttaatattttttcacttactttcttgcattaccatattga

SEQ ID NO: 150068 - DNA, 331 bp, Homo sapiens
aaacattaacaaggccaaagattggtatgtatgtataagaaacatataaattacatatatatttattagtaattttttaaatatttaatttaggtttattttagacacagagagaatttcaaaagaataaagagcccataaatccctgacccacttactttmatgctaaaatcttacataaccacgaaaaattacagaaatcagaaaattaagattattaacatactactaaataaacccaacttcttagttaagtttcctcactcttttcactgatgtctttattttgttttaatattttttcacttactttcttgcattaccatattga

SEQ ID NO: 150069 - DNA, 548 bp, Homo sapiens
gaatatttttcatcaaaatctgtggttgaagaattactttgatgctttggagatgtcattttttttttttttttgcttttttatgtttcttgtgtccttacattaatatttgtatatctggtgtaacagtttattcctttccttggattttcttttgaaggagaggactttttcctgaagatttattcatcattcaagttggggagggaactttggctttagttctgggtgcatgcagtagtgttgtctttatataatttctttagctgtgaacagcattagttgtgtctgtggtttctttgacggtttaragtgtagttgttagtgaagactgtggtaaagttttgctgagaacaggtacaccaggtaggccactctttgtctccagtggtgaagcaatggaacacacctgcctattcttgggtcccaggttggcatatgctggcttctgtgttagtgggtctatgaaggccaattcttggacctccaggtgccttactcaaatgctagcattgacagttgtgtacatggcgatgggcaatattcta

SEQ ID NO: 150070 - DNA, 272 bp, Homo sapiens
cactagtgacactataaagcaactatataagcaagtctgcataataaccagctaacatcatgatgatagaatcaaatccacacaaatcaatactaaccttgaatgtaaatagggtaaattctccaattaatgggcacaaagtggcaagtgggataaaaaaacaacactcatttgcatgctgttggcaagagacttatatcatatgcaatgacacacakaggctcacagtaaaaggatggaggaaaatcttccaagcaaatgaaaaacagaaa

SEQ ID NO: 150071 - DNA, 582 bp, Homo sapiens
tattgtttttgtagatcagcttatttttcagctcagtatggaaagcacacataaatactgcaattgaaaatattttctatactttatgagttcaagaataaaagaacttgtgagtgaacaacaagcattatgttaagaaagtgttgttgtcctggagaataaaagaaagattagaaaaaccgggagaaacactgagtaaagttattggtaagttaaaatgtactttttaaaaattagtagccttggccaggagcggtggctcacgcctgtaatcctagcactttgggaggccaaggcgggtggattgcctgagctcaggagttcgagaccagcctgggcaacaacagtgaaaccctgtctctcctaaaatacaaaaatttagctgggtgtggtggcaggggcctgtastcccagctactcgggaggctgaggcaggagaattgcttgaacccgggaggcggaggttgcagtgagctgagattgcgccactgcactccaggctgggcatcaaagcgagactccatctccaaaaaaataaaaataaataaaaataaaaatcagtagccttttttttctaattta

SEQ ID NO: 150072 - DNA, 465 bp, Homo sapiens
cacaatgggatataattagaaatcaactctaaaaggaatcttcaaaatacaaatatatggaaatcaaataacctgctcccaaatgatcactgggtcaacaatgaaataagtatggaaattaaaaaaaaattcaaactgaatgacaagagtgatacaacctatcgaaacctctgggatacagcaaaggcagtgctaagagggaagttcatagccctaaatgcctgcctctataagtctgaaaaagcacaaatagacaatctaaggtcatacctcaaggaactagagaaacaagaacaaaccaaacccaaacacagcagaagaaaggaaataacccaaatcagagaagacytaaataaaactgagacaacaacaacaacaaaaaatacaatagataaatgaaacaaaaagctggttctttgaaaagataaatacaattgatggcttaatcaagaaaaaaagagagag

SEQ ID NO: 150073 - DNA, 511 bp, Homo sapiens
aagtcattgctccctgcatttcagtgcagtgctccttggttgtctcagttgtggctcaagaggatccaggtacaactcaggttaccactctggaaggtacaggcyataaacattgacagcatccacatgatgttaactgggcaggtgcacagaatgaaggaactatgaaaggatggctacctccatccgtatttcaaaagatgcctcagagggccttggtgctcaagcaagaatgccacagagctcaggccaccatggagaggaactagggaaatgcacagtggagttgtgggttggggtcatcctgaggcctcagaattgtacagccaccagcctgggagaggtgcagtaatgagagttcaacctgtgaaagttgcgacataagcggcagctagcaaagctatgagggtggagtcccctggtgctttggggaaccaaactcttccaagagtgtaaagaagatgggacaaggagttaaaatttttcccaagccttaagatttaatgtggtt

SEQ ID NO: 150074 - DNA, 511 bp, Homo sapiens
aagtcattgctccctgcatttcagtgcagtgctccttggttgtctcagttgtggctcaagaggatccaggtacaactcaggttaccactctggaaggtacaggccataaacattgacagcatccacatgrtgttaactgggcaggtgcacagaatgaaggaactatgaaaggatggctacctccatccgtatttcaaaagatgcctcagagggccttggtgctcaagcaagaatgccacagagctcaggccaccatggagaggaactagggaaatgcacagtggagttgtgggttggggtcatcctgaggcctcagaattgtacagccaccagcctgggagaggtgcagtaatgagagttcaacctgtgaaagttgcgacataagcggcagctagcaaagctatgagggtggagtcccctggtgctttggggaaccaaactcttccaagagtgtaaagaagatgggacaaggagttaaaatttttcccaagccttaagatttaatgtggtt

SEQ ID NO: 150075 - DNA, 403 bp, Homo sapiens
cctccagggtgtgcagcaacagcacacaatcttggaagaagagagcagcctgcactagataccaatcctgctggtactttgatcttggatttcccagccttcagaaccatgagaaataaaggtctattgtttatatgaattactgtatgtgatattttgttacagcagcacaaacagactgagacattgagacagagcttgacatatttgaaaagtacttaccaatttgttttgtagaatatccctcagtttagttttgtctgacattttctcataawtagatgatggaacacacatttaacaagcattaggtataagtgtattatccctgtattatataagggagtaaatgatgtctatatggttcattactggaaatattaaccttaatgacaagtggttg

SEQ ID NO: 150076 - DNA, 522 bp, Homo sapiens
aatgtatacaaatcagtagctctcttttacaccacaggaaccaaactgaaaatcaaatcaataactcacctccttttacaaaagctgcaaataagaaaatacttaggaatataccttaccaaggagatgaaaggcctctacaaggaaaactacaatacactgctgaaagaaatcatagatgatgcaaacgaatagaaacacatcccatgctcatgggtgggtagaatcaatattgtgaaaatgaccagactgccgaaagcaatctacaaattcaatgccatrcccatcaaattccactatcattcttcatggaactataaaaaaaatcataaaattcatataaaccaaaaaaaaaaaaaaaaaaaaagaaagtaaaaagagcccacatagccaaagcaagactaagcaaaaagaacaaatctggagacatcacattacctgatttcaaacaatattagaaggacatcataaccaaaacagcatgttacatgtataaaaataggcacatagaccaatgaaaca

SEQ ID NO: 150077 - DNA, 584 bp, Homo sapiens
agacaaataactagattaaaaataaaaagccttacttctgtcattcaaaacaataaatactccctaccttatgggagtattttgaatgcatttctactatttttcttaaaaccagcacatatttaaagagaaaaagaaaaactttacactgttttagtctctcaaagcatttttatatccattatcttacttgatccatcaatcccacaaagtgggaaatatcttattgcctttgaatgtttaattttttacaaaccctgagatacaggcaagtttaaatgacttacccaagatcacatagtaaactgctcttaccaaggatttccatgtttttaatgctcagtaagttcatcagttgtttttcataataatactagatgcaaacacttgcaccacatcaaaaaacatgacacattatttttaaacataaaccatagattaagtacagaatgacaatctgttttcttagaatattaactgactcatgaaaagtggtttttaaacaaagataatcaagagtatgtcagctgtgttataactgtattatttttccatatttycataaatacaaagatattttaaaa

SEQ ID NO: 150078 - DNA, 552 bp, Homo sapiens
gcaagcgataagctaactaacaaacatacacatacttcccttcttctccaagcatagccctccttcaggaagcctttgccaaaaatggacagaggaatgtgggctgatgtatttattaaaaggagagggttctagccatacaagcctgggggtgcttgagtgaagaataatgggtggtttctatgtgtaagaggcagtcttgaaaatatgactkggattcccatttgtttgaccctgccaggtaattcctgtctccctttctgagggtcagataaaagtctcatatctgaataacatcccccactggatggcatgaactataggaggatggaggtgttattctgttctaagcaaggaggaggagaatggtgaatacattctatatccaaaggtgatggggaggaggacagaatattctggcaggagaatcctgacttctcagaggcaatctgtaaaatgtccaccccagaggggttcctggagctggtgactaccatgtgatgtatatgattgaaattctgagtcagttctgcagccagtcgaatctgagag

SEQ ID NO: 150079 - DNA, 574 bp, Homo sapiens
tttgcccttgctctttgcagggctgcaccaggcattggtgcttcagcaaggagccctatagaattcctgggcttgttttgaaaaggagcaggcagaacatttcactgatgatactggctggctcatgcacaagttcttcccactgggacccctgcccacggaaaagtatgaatagtggccttatctaaatgacagcctcaagagatttgacttcagcctggatgtggtagccrgctgccccagattcccactttctgatattcacacattatacaggcccctcctacattataccagggtcggtttgtatagctaataaaataggtgatagcatgtcacttcctgggttaagttataaaaagtcgttgcagctttcatcctggcagctttctctctcagatcacttgctctcgggggaggtagctgccatgtcatgagcatcactatggagaggcccacgtggtaaggagctgaggccaacagccaacagtcatgtgagtgagcctggaggcctaggctccagtcccagtttagcctgataactgcagccctggctgacatcttgacttcaact

SEQ ID NO: 150080 - DNA, 569 bp, Homo sapiens
cttttctgtccctcgtcccagtcaatcctcctttatctccatctccaaatgatcatgaaatttgccaccaaaggttatggtggcacatctctgtcaatgtgcattcgctgggcaccaaatatatggatgtctcccaatatatgtatgcatttgttatataatatatattatatatgtcctgctatcagtctgtatcatacccactaggaaagcttacttcatgtttttttttagataaaaataaacacaagaaaattattaagcaaatggttaagatgagaaccattggtggattggtgtaaagggaatacaagagttcttttgtacagttcttgaaagttttctgtaagattaacattgtaccaaaatgaaaacttacagcaaattgacctaagcagcagcmggtagagctattgttgggcactttgcacactgtccgttctcagaatcccctggaaagtttctgaaccctgccaaagcccaggcctcgccccagctcacaggaatcagaagctccaggggtggagctttgggcatccacttggctcacagtgagggagccagggttc

SEQ ID NO: 150081 - DNA, 538 bp, Homo sapiens
tactggggaaggatgttgtgccaaacccctattaacctcaatagggaaggcacctggttcaagaagctgaagaagagatctagagccagcaaatgagacatggggttttattaggggcttacatacagaggagagagtccagtggcagtgggctggacaacatatccgccttacctatggcccagtggcggtgagttggacagcataaccacatggccgagtggcagggggccaggcagtaaaaccacacaccttgcaaacagcatgcagtttatatagcatttttacttaataccctccccttaacagcctccacctggccaccttcatccaacccaaaactcagggcctcaaggccctgtacagcccatgttccatggaatgagccaggagctcagatattccttatagacaaggaatgaattttccagctgggcactcccagattccctagctcaggacacacattcaggtgcatgtgccacayggtcattctaagttgtgcttaagttgttgctgtcaggtgtgtttaccctgc

SEQ ID NO: 150082 - DNA, 556 bp, Homo sapiens
atgtgccacacggtcattctaagttgtgcttaagttgttgctgtcaggtgtgtttaccctgcagcagactcttggaagcttgtgcctggtgacyccacatgccttttccctttgcttatttttcttgctattttttaatttaataatcttggccaggagtatgattctatgcagatttgtgtgtcctcccaatgaatcattgagtctaggggtggtcatggggaccccgatccacctgaatatgtgatactcatcataccatttacttattactggtaactcacagacctgttacttgaacccaggtctaactgcaaaggctggcttgtcccacagagtctcataatggccggcagctctttcacagtcgctgctgctgcaggcctgacacctgaacgggtagcgctcagatttccagagtgcccatgtcttgtctgtctcattgtcttctgggatgagaataaaccaccgagcagatggctttaaagaagcagggaaggggtagagagtggaccttattttttaggacccgtgaaatttatccccattagtttca

SEQ ID NO: 150083 - DNA, 486 bp, Homo sapiens
caaagatataaagtcactgaccagttaggtggaacaagaattgtgctcatggtgccaatggatgagamattgaagcaaggaaagaggaccaccagtcttgttgctgtgagctcaacagtttctcttaggaccttttaggtttatggcttgtctttcaaactagactacaagcaacctacggtcagggactttgtcttaagtacatttttaacacagcacttggcacatagttagagcttaagaaatatttactgtccaattaattggagggaagtgatgaaaaggatgagagaaaagccagaaaactgatttagaaagtgtgtggatctcttgggaagaagtcatccattgaagaaatagcaccattataataacaggcagaagagaagagtctttcatcagcagtgttttggactagagaagagaatgactcttgcacggaggagctggtgcccagggctgctcctggatgcaaagggaaaagca

SEQ ID NO: 150084 - DNA, 486 bp, Homo sapiens
caaagatataaagtcactgaccagttaggtggaacaagaattgtgctcatggtgccaatggatgagacattgaagcaaggaaagaggaccaccagtcttgttgctgtgagctcaacagtttctcttaggaccttttaggtttatggcttgtctttcaaactagactayaagcaacctacggtcagggactttgtcttaagtacatttttaacacagcacttggcacatagttagagcttaagaaatatttactgtccaattaattggagggaagtgatgaaaaggatgagagaaaagccagaaaactgatttagaaagtgtgtggatctcttgggaagaagtcatccattgaagaaatagcaccattataataacaggcagaagagaagagtctttcatcagcagtgttttggactagagaagagaatgactcttgcacggaggagctggtgcccagggctgctcctggatgcaaagggaaaagca

SEQ ID NO: 150085 - DNA, 654 bp, Homo sapiens
actgggtctctcacattgatacaagatcaccataaggatgaaaataactttaccttaaaactaatgatttaatatggaaaacaaaaaggcagcaattctactatttacacacaatgtagaggaatacttttgcagaagagttatcagtatccctaagcatgcagagaagtgctttaataagatgcttcctagtttatgaaatatatttgtttgatcctttatctttttaaagataaggaattaatcacttagaaaatgtgttgcttccttctggtgttatacctagtaagtgatgtagctgggacagatcttaatcttctacacattaaacaatgttcctaggactgttaattaatggctcactgaagtctcaggaatggctaaataaatcaaaatggattacagtctttaatacgaaacccacaactgtgaaactactaggaagaaacactgggaaaaaacacttcagggcactggtttgggccaatattttttgagtaagatctcaaaagcacaggtaacaaaagcaaaaatagacaaatgggattatgtcaagctaaaatgcttctgcacagcaatggaaacaatcaacaaagagacaacstaaataatgagaaaaaatatttgcaaagtatccatctgaaaagggattaa

SEQ ID NO: 150086 - DNA, 512 bp, Homo sapiens
taatataattttgaaaaaattctactatacttaaaaggggtaaaatgtaaaatatgtcggtatttttattttcttaaaaatctgtgcaggatgattagagagagatgactctatagtcagaacacaaggttcaagrttttgacttcccatttactaaccatgacccatggataagtcatttacccacgcggtctctttttttcctgcataaaaacaggataataattcttatccaattaactcatggatattctgtatttctcaaattgtgaaagtatgtgaaaattctttgcaaatttaaagcatcataaaaatgttatatttctaagtgccttaaatttaatttgatatgaaatataaatacatactcaaatactttatttatatattccagtgtatgatatcccttgttctgaagatgattaattgaagaatgttcccatgggtactttaagcaacaattacagctgtagcgaatatagtcatacaactgttgccacagtctacaatag

SEQ ID NO: 150087 - DNA, 512 bp, Homo sapiens
taatataattttgaaaaaattctactatacttaaaaggggtaaaatgtaaaatatgtcggtatttttattttcttaaaaatctgtgcaggatgattagagagagatgactctatagtcagaacacaaggttcaagattttgacttcccatttactaaccatgacccatggataagtcatttacccacgcrgtctctttttttcctgcataaaaacaggataataattcttatccaattaactcatggatattctgtatttctcaaattgtgaaagtatgtgaaaattctttgcaaatttaaagcatcataaaaatgttatatttctaagtgccttaaatttaatttgatatgaaatataaatacatactcaaatactttatttatatattccagtgtatgatatcccttgttctgaagatgattaattgaagaatgttcccatgggtactttaagcaacaattacagctgtagcgaatatagtcatacaactgttgccacagtctacaatag

SEQ ID NO: 150088 - DNA, 427 bp, Homo sapiens
acctgctgcactgcaaagaagaacccagttctggcacgattcattacctgctgactaaagagcccttggacctcaaataaacatcagtggcagccaggcactagttgccaaaggccttgggcaataaccactatgttgctagcttcaggagtgacctagcacagcctcagcagtggtggacatcgaagtgactcagtcacccctctcccaactccaggcaacccagcatggaaggagagactccttttgtttggggcaaagtgagggaagagaatgacagtctctgtctggcaatccagggaattctcctggatcttacctaagcccaccaaggtggtacaagtctgcaagaatcacagtgttaccgggattagggtatcccctagcggakttgtggcttcagtgacccaagacttaggtcataaca

SEQ ID NO: 150089 - DNA, 427 bp, Homo sapiens
acctgctgcactgcaaagaagaacccagttctggcacgattcattacctgctgactaaagagcccttggacctcaaataaacatcagtggcagccaggcactagttgccaaaggccttgggcaataaccactatgttgctagcttcaggagtgacctagcacagcctcagcagtggtggacatcgaagtgactcagtcacccctctcccaactccaggcaacccagcatggaaggagagactccttttgtttggggcaaagtgagggaagagaatgacagtctctgtctggcaatccagggaattctcctggatcttacctaagcccaccaaggtggtacaagtctgcaagaatcacagtgttaccgggattagggtatcccctagcggatwtgtggcttcagtgacccaagacttaggtcataaca

SEQ ID NO: 150090 - DNA, 398 bp, Homo sapiens
catatagttagtctcttgacacagtatcttaggataaagtagtagagttcctttcatgttgttaagtttttgatggatgaccagactatatatacatagcagactgtgaagaataagtgaacaaatacatttcttgaatcattaaataatattcattgtctgactacctaatatagtacggtacattaaagcaaaatccatatagagattttttttttttaatgacgtggagtcaagctctgtttcccaggctggagtgctgtggcacaatcatggctcactgcatcctcgacttcctgagctcgagctaccttctacctcagtctccttaggagctgagactacagcacgtgctaccrtgcctggctaatttttcaaattttttgtagagatgagat

SEQ ID NO: 150091 - DNA, 597 bp, Homo sapiens
  misc_feature (1)...(597): n = A,T,C or G
tagtctaatctttaagatattgagctgagcaagttaaatctgaattttaacataaaggattatattttaaaacgagggcttgtaaatgtaaaccttgtgtgaatccttaatttaaattcataattcaaaatcattggcttgccaaaatggggtaaaaaaaatcaatgttagtgaaataaatgtgtaaacacttgtgcttccattgaygtagattaacattattttcaaaaggtgaaatggagagaatgagaaaaatagaaattcaganaatgtagactatatgtgcttgttagttataacttagtttaaagtatattttaataagactgctgtacttccacaaatatagagatttataatatttgatctaaaatactgagcatagttatagttttgccacagtaaaatggtaatatgtttatagttttaatgttaaacatgaaaatatacgtgactcttctcattttagataaaaatttataccagtatgatttagtacagcattttatgttttaataagatcatccatgtaaaccttagtcatattataacatgtctatcattaatagtaaaatactgttttaaaatattaatatt

SEQ ID NO: 150092 - DNA, 596 bp, Homo sapiens
agttgttgtaattattgttataattattcaaacaataaaaagttatttgaagtaaaaattaggtagcctctccttcccctcactcagtatacttcctggaaaaaaaataatgtttacactttgatatgtatactctcattttttgttcatatattataaacatcaattcacacacataaggattttaaaaactgggatcccatgatatatactggcagcttcccaggtccattacagattgataggaggaacacatacacatgcacacacatacactcaaccacacaatgattaagcttggattaggttcctgatttgtttatttaagaacgtggaacatactgaagcaagatggccccacaaagaaaaagcaggtgtaacttacctcaacttagttttccttggctctcagatcactaacccaacagaaggtagkgctgcagttgttggaaaagttatttcttgcttcttaaaacatactttatacttacagcttgtttcttttggaaagaacacacacagtccctacttttaataaatatttacagacatcagggaccaccttgttcttgagtcaaactaagcaccaacaaacc

SEQ ID NO: 150093 - DNA, 451 bp, Homo sapiens
cagctggtaagcagtagacccagagaattcgaatccrgaaattatgactcttccatgtgtgttttgttttcacttgttcttaacgtgacttaaatgcttataaatatttgcttgaagatggaaaggtaatagtagagaaataggaatcatgctgctaataaacaagaaaaaatcacaattttaagagtaatcttaatttgttggtagattttatagcacagtctctttctaacaaggtcacccacaaaagttgtctcacagcctagagcacttgtaagcaaaagaaagttatttatacatttttttctcatctatagctttctcaagtaagaagtagaattttttaaaccgacagaagttagtaatagagctccagttatttgtccacaatgctaaggagaaccaaaggtttccaaactgatggaatgtgtgatttgcatatttcctctat

SEQ ID NO: 150094 - DNA, 414 bp, Homo sapiens
tgcccacagaaagagcatttagaccagacctgtccagaggacaatcacccatcccagtggttggaacctgagttctggcaagcctcatyaccacaggactttggggctctatataaacttaaaagactgtctaggccacaatgacttcaactcctaggcaagccctagtgcagagttgggctcagaccagtggacttgggtggcatgtgacctactgagacaccagccagggcagctcatggggtatttgtgccactgctctcccaacccttggcagcacagctcatggctctgaaaggaaccccttccatctgcttgaggaggagagaagaaagatcaaataggtctttgtcttgcatcttggacagcagctcagccacaataggatagggcgctagttagatttatgagacc

SEQ ID NO: 150095 - DNA, 414 bp, Homo sapiens
tgcccacagaaagagcatttagaccagacctgtccagaggacaatcacccatcccagtggttggaacctgagttctggcaagcctcattaccacaggactttggggctctatataaacttaaaagactgtctaggccacaatgacttcaactcctaggcaagccctagtgcagagttgggctcagaccagtggacttgggtggcatgtgacctactgagacaccagccagggcagctcatggggtatttgtgccactgctctcccaacccttggcagcacagctcatggctctgaaaggaaccccttccatctgcttgaggaggagagaagaaagakcaaataggtctttgtcttgcatcttggacagcagctcagccacaataggatagggcgctagttagatttatgagacc

SEQ ID NO: 150096 - DNA, 414 bp, Homo sapiens
tgcccacagaaagagcatttagaccagacctgtccagaggacaatcacccatcccagtggttggaacctgagttctggcaagcctcattaccacaggactttggggctctatataaacttaaaagactgtctaggccacaatgacttcaactcctaggcaagccctagtgcagagttgggctcagaccagtggacttgggtggcatgtgacctactgagacaccagccagggcagctcatggggtatttgtgccactgctctcccaacccttggcagcacagctcatggctctgaaaggaaccccttccatctgcttgaggaggagagaagaaagatyaaataggtctttgtcttgcatcttggacagcagctcagccacaataggatagggcgctagttagatttatgagacc

SEQ ID NO: 150097 - DNA, 514 bp, Homo sapiens
aaaataatgtatatctttaatgactttttatcagcattacttaaaagtactgatattatcaatacatgaattatttattttgagcctaagttattagatgtttayattttagaggctctctgctcccttttccagcaaatctcctcaaaataactctaaaatgtatgcatatttaattatatcctccaattcctctctttctgttcccattcctcaattcctcccatgaactgattctaataagcagcagttggcatagagaatgataaagtatatcattcccttcttgatatactttaaccatttggcttctaagattctcttttctcttgcttttccctttcactggctctcctttctggtcctttctcatctgtccaacttctgaatattggagggcctagagctcagatcttggaccttatctcttttgtacctatctccacgcccttggtgatttcattcagcttcatttttaaatgccatctacatactcatggctgcaaaatttata

SEQ ID NO: 150098 - DNA, 600 bp, Homo sapiens
attctcaacaaactgctatgtcagctagatgtcttttcaagctatcctttcttctaatgactttgttcaatgcacacaacttccaaaatcatacaaaaccttaaggttaagcccaaataccactccttcaaaagccttaatcaagaatgacaggaacgaataactctctctctccacatgcatttaaacatccatgttatatatacacacacacacatatacatatatatctctatatctcacagtttccttttattattatacatatgttcaactgtgttattatcggggacaaggwtcatatttaattcattgttgaatattccattattatagcgctttacatgtgttaggtacattaaactaaattgaattgtaacaaacatacttatccatgtgcatacaaatattctagtcatttaaaaccaaactctaaaatatatgcacagttaaatagtatatcaattcaatagtgataaatatgctacaatttttcacttcctgaaacattgatattgatgagacacacctatctgaaagtatgttgatgtaaaaaatcaggacactaccagaaatataaaattgtgcaatatattataa

SEQ ID NO: 150099 - DNA, 318 bp, Homo sapiens
ctaaagccatcactatattatagtatagtgataatataatacatattagtatatcatatataatttatagtgataatatttatgatatgatatcactatattaacatatcactattagcttagcataatcatgggtgtccgtatttctaactgaatgaacaatcatcagagaaagaattgaaaattaatgattraagcaaacgcttcaattatttgataaattgactagtgtgactagtgtggaacatgttattcaggcagtgctggaaataagacacaatacatcactgtaaacgtgcaaaatatggtagaaatttt

SEQ ID NO: 150100 - DNA, 556 bp, Homo sapiens
tgaactaacacacaaaggaaaaaccaacaccacatgttctcacttataagtggaacctaaacattgagtacacatggacacaaagaaggcaacaatagacatcggggcctacttgagggtgagggtgggaggaggatgagaactgaaaaactacctattgggtactatgtttattacctgggtgatgaaatagtatgtacatgaaacccctgcaacacaaaatttatctacagaaccaacctgcacatgtatccctgaaactaaaattaaagttatatatatatatagtcattattttactcatgatgtagaaccatttttattatgagtattaccttcataaatcttggtttttgttttatattcaacttagcattttgtttgtggagcttttggctaagatataaaatatgaaatatataattatgagatttattcaaaatgctaatcattgtttttccttgaaacattctttgratgtggcactttaaaaaagaaggatgaatgagaatcagaagttttcaaaatagaaaaattaatttcatgactgtatatc

SEQ ID NO: 150101 - DNA, 536 bp, Homo sapiens
agaaaacagaactaccactgctttccttgcctacaaagaggaaagaaatactgggtrtcattctaccttcatgatgtttttccaagttgaaaaaaatactgagatggggtgtggtggctcactcctgtaatcccagcactttgggaggccgagatggatgactgcttgagcccaggagttcaagaccagcctgagcaacacagcaagaccgcatctctacaaaaaatacaaaaattagctgggtatggtggtgtgcacctgcagtcccagctactccagaggctgaagtgggaggatcacctgtagctgggaggtcaaggctgcagtgaaccatgattgtgccactgcactccagcctgagcgacagagtgagaccttgtctttaaaaataaaaaaaaataaaataaaaaacagaacaaaaaaaaaacaggctgggtgcggtggctcacgcctgtaatccctggactttgggaggccgaggtgggtggatcacctgaggttaggaatttgagaccatcctggcaacatggtgaaac

SEQ ID NO: 150102 - DNA, 536 bp, Homo sapiens
agaaaacagaactaccactgctttccttgcctacaaagaggaaagaaatactgggtgtcattctaccttcatgatgtttttccaagttgaaaaaaatactgagatggggtgtggtggctcactcctgtaatcccagcactttgggaggccgagatggatgactgcttgagcccaggagttcaagaccagcctgagcaacacagcaagaccgcatctctacaaaaaatacaaaaattagctgggtatggtggtgtgcacctgcagtcccagctactccagaggctgaagtgggaggatcacctgtagctgggaggtcaaggctgcagtgaaccatgattgtgccactgcactccagcctgagcgacagagtgagaccttgtctttaaaaataaaaaaaaataaaataaaaaacagaacaaaaaaaaaacaggctgggtgcggtggctcaygcctgtaatccctggactttgggaggccgaggtgggtggatcacctgaggttaggaatttgagaccatcctggcaacatggtgaaac

SEQ ID NO: 150103 - DNA, 497 bp, Homo sapiens
gagttgccactatattatcagctgagtaattggatcagacctgctcctggatccatagtggtagtatttgtctttgttctttacagagcctcattatattgctcgaatatcatcttgaaaaaaacatagatgatgttagaaatattttttaactagataaaaattgctaacaataaatgtgytacttggaatttgctagtagttaattctaactgtattagttggtctgagttcaacaagtggatgatgacttttctcaacaaattggttgatattatgctcctcaaacctgccatgaattacacgaccccaggagagtctggaatgttgatgtgatagtgacaaattgtttcactgctctctaatgcaaaaatattgtaaatgagaatcatctcagttcatttattcaagtgtgtttaaaatgatatatttggagatctgtactttctgagctctgtagtagacatttctttaaggaaattaaaaataaaatgtca

SEQ ID NO: 150104 - DNA, 565 bp, Homo sapiens
catgatgccacactcacattttaggaaaatgtgattcaaaacattcaggatgagctgtctttaccatttgtgccctcctagagcaagtgaggttctagttagggccctgtcactgctgggggtttgcatatgctatgtcagtgcactaatggctgttggaaaaaggcctgatacctygtcttagtttccaaactccttttgagttattcatagaaaagtggagaatgaaccattttaaatcaaaccataaaacatgaattgggaatgctgatttctttcacttcttcaagacacaagcatttgctgagtagggcccttcatttgtttcaagacgagtggagcagatacattctgcatcatgtactaaactctcattctgaccccctttttttagatccctttagcagcctgatgaacctataagaaggaaaaatttaaatgtgtgaaatgaaatataagaaattatattgaaatcattattgaaaaatttaaaaattgtaataaagtaatagctatatattagtgttgcattaggtaatgagatctaggagagggtctaacacca

SEQ ID NO: 150105 - DNA, 388 bp, Homo sapiens
tcaatgagcagtaatattttaaaaagaaatttyttttctggccagcaggtctcaacagtaggcttaaaatattcagcaaaccatgctgtagacagatgtactgtcatccaggctttgttgttccatgtatatatcacaagcagagtagatttagcataattcttaaggactctaggatttttagagtggtaagtgagcattggcttcaacttaatgtcactagctacattagcacctaacaagaaagtcagcctgtcctttgaagctaggcattgacttctctgtagttgtgacagtcctaggtaggatcttctcccactacagtatagggctgtcttgcctacactgaaaaatctgtggtttagtgtaaccaccttcatcagttttc

SEQ ID NO: 150106 - DNA, 356 bp, Homo sapiens
agtaatattttaaaaagaaattttttttctggccagcaggtctcaacagtaggcttaaaatattcagcaaaccatgctgtagacagatgtactgtcatccaggctttgttgttccatgtatatatcacaagcagagtagatttagcataattcttaaggactctaggatttttagartggtaagtgagcattggcttcaacttaatgtcactagctacattagcacctaacaagaaagtcagcctgtcctttgaagctaggcattgacttctctgtagttgtgacagtcctaggtaggatcttctcccactacagtatagggctgtcttgcctacactgaaaaatctgtggtttag

SEQ ID NO: 150107 - DNA, 650 bp, Homo sapiens
aatttttttctcttagtcttacatagctataaattttttaaaaaatgttttctgctgggctgttaattttatttttataaatgctatccattttatagtcagtaggcattcaaaatgattcaatgtcttgtgcatacacatccatgaaactgaaattttgactcctccagtacttaatttgaaatgattttttttgaacttagcattggaatttgcttattttagtacaaaaatttttatgttgtctttgcacaaggtgattgtgcacttagaactttctttttgtaaggagagattggatgaacctgggatattacttcttgatatcagaatttcataaaatgttagacctgtagtataatatcaccttttaaaaatcaaacttagtgagatagrtttactggagattttcttcaagctttttattataaaaaggatggaaaaaacatgatataaatttattttatatatagtagccttggggcatagactctgagcatggcttcagactgaggtactgaaaatctcttctccataatttcaaaatccaaaatgaaaaactgaaattttttccttaacttctttggcggcaaaatctgacctgacctgagcacatttggtagcaaaacctgatctgacctacgtgaagc

SEQ ID NO: 150108 - DNA, 292 bp, Homo sapiens
cactgaaggggattgatcagttgggagaagtccctgttttgctgttttacattttccttcwtcttctgacctacagcaaggatgtaacaactgaaggtgtagcagccatatgaggacacaatgtaactttcagggtgaaaagtcattgaagccaaaaatagttgaataaataagtaaatcaataggaacctgggtcggaaattaccctggatttcctaccacatgactcctttcataagagaaataaactcttatcttatataaactactctttggtttcagtcacatgcag

SEQ ID NO: 150109 - DNA, 516 bp, Homo sapiens
ttctaaagcaaaaataatactcatcaattataaaacactaacacaaatacatttcaatctcagagtaaaatatagtcataggactcattaaggatcattaatcatcatgattccttcaatgtcgtgttgaaaagcattaactagagggggtacaaaatattaggaactaaagatgcttaactatgatgaaaggacggaagcaaagtgattccttattcattcaaaagcatggggtaaggagaatgaagagaggttggttaatagtttcaaatatacggttagaaggataagtgctagtgttctttagcacagtagagtgactacagttaacaataatttattgtatatttcaaaacagctaaaagagaagacttggaatgttcccaatacaaagaaatrataaatgcttgtgttgatgaataccctaaacagccagacttgatcaccacatattctatgtatgtatcaaaataccacatgtatcacatatgtacaattattatgtaccaattttaa

SEQ ID NO: 150110 - DNA, 516 bp, Homo sapiens
ttctaaagcaaaaataatactcatcaattataaaacactaacacaaatacatttcaatctcagagtaaaatatagtcataggactcattaaggatcattaatcatcatgattccttcaatgtcgtgttgaaaagcattaactagagggggtacaaaatattaggaactaaagatgcttaactatgatgaaaggacggaagcaaagtgattccttattcattcaaaagcatggggtaaggagaatgaagagaggttggttaatagtttcaaatatacggttagaaggataagtgctagtgttctttagcacagtagagtgactacagttaacaataatttattgtatatttcaaaacagctaaaagagaagacttggaatgttcccaatacaaagaaatgataaatgcttgtgttgatgaataccctaaacagccagacttgatcaccacatattctaygtatgtatcaaaataccacatgtatcacatatgtacaattattatgtaccaattttaa

SEQ ID NO: 150111 - DNA, 507 bp, Homo sapiens
attgaaataacactaaatatattaaaagttgttcaatctcattttaaattaggaaaatgtagcaaattaaagccacagtgagattcatttcacaaccaaaaattgacaaaaatttagaaacctcattatttcaagtggtaaaagaatatgaagaaatgtcatcccttacccatgcttgtggcatttggagtgggatgaagctataaaattcattagtactaatattttgcagaacaatctggcaatatcttgtatagttaatgatgttcatatattttacataacaaatacttgtatagtactttctatgtgccaggcactattaaaagttttttataaatattaactcatttaatcttcctaacaactgtaggtattattayatttttactttttattttggtgtaatcttagacctcatgtacacaatatgaaatcaatcattatcctttgttcatgacacagtctcttcataggtccatttttgaaccacgtgaactcattatt

SEQ ID NO: 150112 - DNA, 526 bp, Homo sapiens
gtatgtaatacaggtaatttttatagagttaggatttaatactgcatctttacagttgtttacctttctctcaagcgtaaatggcaccatgaatggtctgtgtttataagttttgataaattttaactttttataatagagtttcctatattttatgatagtaaatgataaaacagaccagcatccacatatattttatgcattcataaaatacctttttcttaattttttcaatatttctacactacatggttcatctgtgagtgttttcaaattggtgtaaatctcaaaaatcttttccaatatattttttaaaacaagccatatataagaggacccacacaattcaagcccatgttgttcagggtcacctatataatggtttattacaaagaattagctcatgcaattatggaagctgaaaagttccacaatgtgccatcagcaagctggagacccagaaaaartggtggtgtagttcaaaggccagagagccactggtgcagattccagtccaagtttaagg

SEQ ID NO: 150113 - DNA, 486 bp, Homo sapiens
tgggcaggcatataagacctatttgtcaactttgaattctagtccaggagaatcattaaaatacaaacacctgggaggaaaaaaactttcagtcttcactaacacctaaggaggacctgtcaccccagcatatgacatgagagtctcatttgattactctttctccctgttgatctatacaatcaaccagaatatctgtcattcaacttctaaaataaccctcaaagttattcctatgccctttccaccacaaytactagcttttctcgctcttgtccacttgaattgctgcagcagccttctatgcatgagcttctcctgagaccgctcccactccagccgatgctgctggaaaacctgcctggatgatgggagctactgcttgagacagacagtcacaccccactgtctgtagacaaaaggccagtctcttatcctggtcaggtttaagaaaatattttaagggtctttggtgcgtcttaggga

SEQ ID NO: 150114 - DNA, 389 bp, Homo sapiens
gaagtactctgaggtcaactgttgagatgatacagttttttgtttgtttctatatcttgctctaaaccaggctgaactcccactgaaggcagagacctcaactttggatttctgtatccctggttcctggtaaggggatttgtaggcactcaagaagtccagctgtcgcaagagtgaatgcctgtgaccagaggggagtgaaatgggcatcaggcagcgcacccgtggtggctcccgcagcaggggggtcgcaccccaccgcctgttgctaggagatgatggacttcggaaggatgtgcagtgttgcwtagcaacacctccccactgttccatcactcagaatggacagcaccaagcaattcttacagcaagaatcttttgatctattt

SEQ ID NO: 150115 - DNA, 418 bp, Homo sapiens
aggaagtactctgaggtcaactgttgagatgatacagttttttgtttgtttctatatcttgctctaaaccaggctgaactcccactgaaggcagagacctcaactttggatttctgtatccctggttcctggtaaggggatttgtaggcactcaagaagtccagctgtcgcaagagtgaatgcctgtgaccagaggggagtgaaatgggcatcaggcagcgcacccgtggtggctcccgcagcaggggggtcgcaccccaccgcctgttgctaggagatgatggacttcggaaggatgtgcagtgttgcatagcaacacctccccactgttccatcactcagaatggacagcaccaagcaattcttacagcaagartcttttgatctatttcagccaaaagcaggaaagatctttctg

SEQ ID NO: 150116 - DNA, 585 bp, Homo sapiens
gcagggcttcatgttacctttgctctgtgcagcaaagccctgcatggtcactggtgtctggctctctcctcctcctgagggtgcccagtctccctctgtggctccatcatgcatcaggcacaggtgaggcaccctctccaaatcaaggccaatcccaaggctccctgctcatgttcctggacaggatgcccaaaggatcctttgtgatgaagcctccatggtctcccccaccccaccctgaacccccgctcttgctctgacttcaaaccctggctcttcccctgaccctctccacaaaggccctgccctgcacttctcctgctctccgctctctggctctgtcatctttcccaaccctgtgcggcctcaccccctctcagatgcccgcccagaccctttctttgtatcaccatggagtcttccgcctgctcctgtctccaccttcacgatgaggacaaggtccctgtytgattcattctctactttactctgcaagttcaacattacagaggaaatggaagattacaatgagaactttaatatgactgaccttcaaatcccaagacaggcttgaaggtaaagctt

SEQ ID NO: 150117 - DNA, 544 bp, Homo sapiens
cgcacctttatctaaatccatcctttaggatctaaacccaggatatttatcttcacattctcttctgaagcttggaataccttacgctcccttattcccctttctcctctttacatggttatgtccttctcctctggcatatcttcttccytcactggcctcattttgggttttggcactttttcacactgtgtattcctgtgttatagctcttatcccaaagttgttgttgtgtttttgttttaaattacttccctgtttccattattagagaataggcttctgtattagttcattcttgcactgatataaagaaacatttgaggctgggtaatttatataaaaaataggtttaattggctcactgttccacaggctgtacagaaagcatgatggcttctgcttcttgggaggcatcaaaaagcttcaaatcatggtggaaggcaaagggagagccagcatgtcttacatggcccgagcaagagcaagagattgagggaagaggtgccacagcttttaaacaaccagatctaattagaactca

SEQ ID NO: 150118 - DNA, 468 bp, Homo sapiens
tctgcctttctttatcttcatgtctaaaaagagaaaatgattttaaaagcaaaaacaaacacaaacattaacctttaaaaagataaattattttactaatgtagcaacacacatatgttattctggtctgaaaaygaatctgctctcatcccaaaggaatacactatttctaggtttcaagactatttgccatgcaagcatccttcaaaagacaacccagggcaaaagtctttataggaggaatagataaccccatggagaattgcctacaatggtctgatgttgcaaaggggctactgtagctccaaaatgaagtcttcacacaactctgttcagacaaaaagaacagagcaatgtaaaagaaacattttttcctacagcatttttgttttttttctgttagtgatggaagtctttcagagaggtgccaggagactttctgttgagactctggccagaattggatca

SEQ ID NO: 150119 - DNA, 622 bp, Homo sapiens
aagaatttctaatttatgttcaggccaaagtcttccctagattcaaaagtgattctgatcatataattagtgacaaaaatgggctgkttgtcaaatatgtgccacaagtactaaatatccatagttagaaactgtcagtgtcatgtccctttgtcctggaagtatgtacactgttcctcattattctgcttcagtccttttcctgcctccttgcaccaagcaatttattattattttttcacatattgcctaattgttgtctcggcagagttaccctccttggccatgtaatgtaaaatatggccacacttcatatagtcatatttctcatcaaagtggtctgtatgtgtatctctcagtacatatcagaatttaaaactttaaaaaatttaattttctgtctttattttatttattcctaaacatttctccaaaaggagaaggctacttgcagatggacagtgtgggtctcatcagtagatgaatctcttatcatgcactgatcctggcacatagcaagcattttttggagaaaaatagaaataaagattgcacatgtgtataaagtgtttaattaacattttatttgattattttataaatatgaattaacacactttga

SEQ ID NO: 150120 - DNA, 691 bp, Homo sapiens
ttccatagacaaactaattttgtaaggaatcaatattgcctactgaataagtacaccagctctggagtcagatgcctgaggtgatccatcaacttcatcttttgagcttggatgggtaattggagtctcttcactaacttccctaagcttgcacttactcttctgtaaaataaaaatgtgaataatatatagttcatggaattacattaagaattaaatgactatacaaataaagggcttacaactcatattgctagctatttcttagctatgccatagggtaaaaatttgtttattatattttcttttgttsactaattttactatcataaacattattttaaagtgagaaaaaatcaggacttatctttttgatttttaaaattatttgccaacgtttgcaccaccacaccaccaaaaaatgtcacctcttagtgttaatcagtgttattctgggtagaggtttctaatcttcatctcttctgatcattgttattgatgaattggaaagggcaattaatgcatgcttttctggtttgcatttggcagacatctagtcagaaccatcactattatatcttattgctgaatcaaaattcacaataaattttaaaggctaaatcagctgaagccaaattatgacatttaataaggataaatgaaaatttttggatataattgctagaaatta

SEQ ID NO: 150121 - DNA, 691 bp, Homo sapiens
ttccatagacaaactaattttgtaaggaatcaatattgcctactgaataagtacaccagctctggagtcagatgcctgaggtgatccatcaacttcatcttttgagcttggatgggtaattggagtctcttcactaacttccctaagcttgcacttactcttctgtaaaataaaaatgtgaataatatatagttcatggaattacattaagaattaaatgactatacaaataaagggcttacaactcatattgctagctatttcttagctatgccatagggtaaaaatttgtttattatattttcttttgttgwctaattttactatcataaacattattttaaagtgagaaaaaatcaggacttatctttttgatttttaaaattatttgccaacgtttgcaccaccacaccaccaaaaaatgtcacctcttagtgttaatcagtgttattctgggtagaggtttctaatcttcatctcttctgatcattgttattgatgaattggaaagggcaattaatgcatgcttttctggtttgcatttggcagacatctagtcagaaccatcactattatatcttattgctgaatcaaaattcacaataaattttaaaggctaaatcagctgaagccaaattatgacatttaataaggataaatgaaaatttttggatataattgctagaaatta

SEQ ID NO: 150122 - DNA, 581 bp, Homo sapiens
ttgagaaatttttaaaggatggtctggtttatggctagttatgcacacttcagatttttaaaatatgttatattttagggctttgaaattactgaaaataatttaatgttacatagttttaaatcactttcatagcttaatagggttttatgcaaactaagagaaatacaacacaratgcaggtatatatgataatacagaaattgattaagcttgtttaaattaaatcacattttgaacacttgttagcaaaagctttctgtaaaaacatacaaacatgctgttaatgatcttctcatttgaataaaggaaaatatgtaagaattttgcttaaattttgctttctaaagtttgaaagtatagtttaatttctatcacaaatattatatcaacttatcaaaattactccttaattacattcatataataatacagattaggtaactattgataagtgtagacaagtcaagaggcatagacatatctgagctaaaataaaataaaataaaatatttagtctgtttctgataaaaagagatacatggaatgtttttattttagcatttatacttacagaagta

SEQ ID NO: 150123 - DNA, 517 bp, Homo sapiens
aactatattagacagagaaatgtacccatccagttacaatgtgcatgtgatttgcaattgcatattctactgaggaacagatcagataagcatattatatataacttatgggctgtgtagatgttctttgaaatgtttacaaccatgcatcccargtattctggctttagtgcaagtaggttaattacacgatttcaagaaacaatgaaagaagaggtactgaaagagaaaatgaaagtctattcaaagatgccttacgaaaggatgaagagaaagtggaaccctcctacacagttggtgggaatgtaagttagtacactattagtataaaggttcccccaaaagctacacgtagagctatcacacaatcccgcaattccactgctgggtatacctacaaaagaaatgaagccaatattggagagatgactgcattctcatgtatatcacactatccataatagtcaagatatagaaccacctaagtgtctgtcaatggatgaatagataaagaaaa

SEQ ID NO: 150124 - DNA, 517 bp, Homo sapiens
aactatattagacagagaaatgtacccatccagttacaatgtgcatgtgatttgcaattgcatattctactgaggaacagatcagataagcatattatatataacttatgggctgtgtagatgttctttgaaatgtttacaaccatgcatcccaggtattctggctttagtgcaagtaggttaattacacgatttcaagaaacaatgaaagaagaggtactgaaagagaaaatgaaagtctattcaaagatgccttacgaaaggatgaagagaaagtggaaccctcctacacagttggtgggaatgtaagttagtacactattagtataaaggttcccccaaaagctacacgtagagctatcacacaatcccgcaattccactgctgggtatacctacaaaagaaatgaagccaatattggaragatgactgcattctcatgtatatcacactatccataatagtcaagatatagaaccacctaagtgtctgtcaatggatgaatagataaagaaaa

SEQ ID NO: 150125 - DNA, 548 bp, Homo sapiens
agagcaaatcatctttggttctgatatttgttgggtcatttaagacaagggccaggactggaaagcactggagagggtaacctgtaagttagtgaaaggctggctgtatttatcttcactcacacaaaattttaatgcagagggctctcaaaagacagctttctccatacggatttgttgactcaggggattmttctgcctcttaaatgggtgttcctactatttgatcagctggatgagttctcttcaccatattattaaaatgtggcaatggtcttcaagtcagttatgctctgtcgaattctccacactaacactgaaatgaacattgacaaaatgcagaaggggtactctcaaggcaaacttctcaggatagagcattgtcaatctctgtctctcttttctctctctctctctatatatatatgtgtgtgtgtgtgtgtgtgtgtgcacgcgcgcgcacgtgtgtgtatgcaaacatatttgtaagtataaatagatgactatttctctgtctctctctgtctctgtgtgtataaacacatttg

SEQ ID NO: 150126 - DNA, 548 bp, Homo sapiens
agagcaaatcatctttggttctgatatttgttgggtcatttaagacaagggccaggactggaaagcactggagagggtaacctgtaagttagtgaaaggctggctgtatttatcttcactcacacaaaattttaatgcagagggctctcaaaagacagctttctccatacggatttgttgactcaggggattcttctgcctcttaaatgggtgttcctactatttgatcagctggatgagttctcttcaccatattattaaaatgtggcaatggtcttcaagtcagttatgctctgtcgaattctccacactaacactgaaatgaacattgacaaaaygcagaaggggtactctcaaggcaaacttctcaggatagagcattgtcaatctctgtctctcttttctctctctctctctatatatatatgtgtgtgtgtgtgtgtgtgtgtgcacgcgcgcgcacgtgtgtgtatgcaaacatatttgtaagtataaatagatgactatttctctgtctctctctgtctctgtgtgtataaacacatttg

SEQ ID NO: 150127 - DNA, 548 bp, Homo sapiens
agagcaaatcatctttggttctgatatttgttgggtcatttaagacaagggccaggactggaaagcactggagagggtaacctgtaagttagtgaaaggctggctgtatttatcttcactcacacaaaattttaatgcagagggctctcaaaagacagctttctccatacggatttgttgactcaggggattcttctgcctcttaaatgggtgttcctactatttgatcagctggatgagttctcttcaccatattattaaaatgtggcaatggtcttcaagtcagttatgctctgtcgaattctccacactaacactgaaatgaacattgacaaaatgcagaaggggtactctcaaggcaaacttctcaggatagagcattgtcaatctctgtctctcttttctctctctctctctatatatatatgtgtgtgtgtgtgtgtgtgtgtgcrcgcgcgcgcacgtgtgtgtatgcaaacatatttgtaagtataaatagatgactatttctctgtctctctctgtctctgtgtgtataaacacatttg

SEQ ID NO: 150128 - DNA, 473 bp, Homo sapiens
aaacatacagatcgcttgaaatgttagaggaaaaaacccagcagtacaacgtacacccttttggaattaaagagacaaagctagttgttttagtgaccatttaacctcgaaaaaaacatggccctgagtttcttgcttcttaaagaagaatgagaagtaaagggtctcaatatttaataggtttactgtgacaatcaaatgagcgtaagagacaaagtaataaaaattttaaagtgttgtataaatgtaagttagtattaaaaaatttcagcatgggatatgaaatttcataaaatgtataatgatctagaatgtttaaatacactataaaatgaagaggaactgcctcattgatttcaaagtaattagtatgggtaagataattacaaatrtattaccaacatcccttctgagaggattgtgaccctttctttggaaattttttttaatgagaaaagtcattaataaaaaaa

SEQ ID NO: 150129 - DNA, 501 bp, Homo sapiens
gaattcaatcagaaatccagcctgascccccctaaacctggtcattccttcttaaccttaatggcagtgacagaagaaagggagagaggaatggagtcttggttgtttttctatttaactttgtgtagggagtgcccagtggtcaattaaggtgtcctgggcacccggcctggctggagtaagggatggcaagtgcgggggtctatttagggaggtgatcagagcccggatcaggccccacagagttggcaccaatctccatcatgttctttttaagagggttggcagccctggagtctatttttaaacccatgagaaaggtgctgtgtggattccaaaaagggccaacattaaacccgagatccctggaggagggagggaaggggggaggcacagctgaacctaggattttctcttcacacacacaggggttccccttattcctgggatcagatattgactgtccttccaaagggatctcttgggttacaggcccactct

SEQ ID NO: 150130 - DNA, 501 bp, Homo sapiens
gaattcaatcagaaatccagcctgaccccccctaaacctggtcattccttcttaaccttaatggcagtgacagaagaaagggagagaggaatggagtcttggttgtttttctatttaactttgtgtagggagtgcccagtggtcaattaaggtrtcctgggcacccggcctggctggagtaagggatggcaagtgcgggggtctatttagggaggtgatcagagcccggatcaggccccacagagttggcaccaatctccatcatgttctttttaagagggttggcagccctggagtctatttttaaacccatgagaaaggtgctgtgtggattccaaaaagggccaacattaaacccgagatccctggaggagggagggaaggggggaggcacagctgaacctaggattttctcttcacacacacaggggttccccttattcctgggatcagatattgactgtccttccaaagggatctcttgggttacaggcccactct

SEQ ID NO: 150131 - DNA, 373 bp, Homo sapiens
gagatgaccacaatgttggatgttggaagtattagatggactttaaaataactatgattaatatgttaaagtatctagtgggaaaagtagataacattcatgagtagatggaaattttcagcagagagatgaaaactataagaaaaagttcaatgaaatgctgaaaacaaaagacactttctcagaaatgaagaatttattcaacaggttcatcagtagactggacataactgaggagagaattaaagaacttgaggataagtmaatagaaataattcaaattgaaagaaaagagagaaaagagggggaaaaaacaaaccaaaacagagtagccaagagctatggaacaacatcaactggtctaaaacacatg

SEQ ID NO: 150132 - DNA, 516 bp, Homo sapiens
tgaccacgggcatctggtgtatgggcagactcctgagcctatggtgagaccaaggtgtgaaccttagtcctactccttagtagctgtgttgaggcaggtaacttactctctcatcatgatctataaattgggaatgaaactgggttgttgtgaagacagaatgggtataaaaagtttattaaaattataaaggaaagtagactacgaataatagaagacacagaggagaaaataaaattgagaattaattttgttcrtaagatactgaaaatgctgtgtttattggagataattttcttggtgacaggaaaagctgtatatgccaaaaacaattaaagaaacttctctgagtacttaccatgtaccaggaattacactgaatgaccgcagtataataaacaaaatagatcctggtgtagaagagagtcccttggatcttcatgtttgtcatggaaataactatgtggatgaaagtaaaggatagtttaataaagtgatatggtttggctgtgtccc

SEQ ID NO: 150133 - DNA, 563 bp, Homo sapiens
ctcctgtcactgaactcttactagttgggcccacactgcttcagctttatcatcccaagtcttactggctgcttctgagtcttgcaggcagagctagggaccaggacaccaccagggtgatcccaaatcatcacatatgagaggcacatttacagacacggatttcctgcaaagcctrccagatgagcccccagccccttccagtcccatttcattatgcccactccagagcagccttctttaccacacagcttagcaattgaaagtaaatatgttgggaaggaaagaaaaaatattcctgaaagtcctatgtcttgttctcctgcgcttaatcgggtttagtaaatctgttaccctgatcatccccttgaatttctaaactagattcttcaaatctgcccaatctctatgtctttgtcttgagataggaacaatgtttcttgcttgctcagactgcattgagctgttgggtatcaaccatggaataccaagtggcttttgcatttccctgctaataatagtttgcattcgatgcatctttctggaaggttcaaaccttgcca

SEQ ID NO: 150134 - DNA, 563 bp, Homo sapiens
ctcctgtcactgaactcttactagttgggcccacactgcttcagctttatcatcccaagtcttactggctgcttctgagtcttgcaggcagagctagggaccaggacaccaccagggtgatcccaaatcatcacatatgagaggcacatttacagacacggatttcctgcaaagcctaccagatgagcccccagccccttccagtcccatttcattatgcycactccagagcagccttctttaccacacagcttagcaattgaaagtaaatatgttgggaaggaaagaaaaaatattcctgaaagtcctatgtcttgttctcctgcgcttaatcgggtttagtaaatctgttaccctgatcatccccttgaatttctaaactagattcttcaaatctgcccaatctctatgtctttgtcttgagataggaacaatgtttcttgcttgctcagactgcattgagctgttgggtatcaaccatggaataccaagtggcttttgcatttccctgctaataatagtttgcattcgatgcatctttctggaaggttcaaaccttgcca

SEQ ID NO: 150135 - DNA, 460 bp, Homo sapiens
tgctagctatgccaacattagcaagttgcttaacctctctgtgtctcacttacctcatctgcaaaatggaaattgaaatagtcttcgtaggtaatgatagccttgaaggccttacaggattattttgaggattaaaggacacaatggttgtaaagtacttaagtatcatgccacgcaattaatgttagatataattttgagtgttttctcttttttcacccctttaaaaaatcttcttttgaattcaggattccttttccccatatrtttttatggtgaatgagaatatcggcttagggtctactctgttcatctcttgaaaacgacattatactttttcttctaaaaaatgatacaaagagaatccccagccttttccccctctccctgtggctacagttttcccatcattttaaaaggttatttcttttcttcatagcacaatgtggtgggatgaagg

SEQ ID NO: 150136 - DNA, 416 bp, Homo sapiens
ctgagtcaggttgtcccagggagacactgatttagaatgttgtaaccaagggaccatgcgttctgagtcacaaacatcccatttacaaactgtaagttcaggattcacacataggtgagactctgcatacacagtagtggagataaccaagaatggggtggttttgctgagaggcagggaggaaaagagaaaagtgctgaggtagatgaccaactcactgtgggagtggaggacccaggaaataggaggcttgttgcaactctgggaaggagtaaaaygtggggctgcctgtcccccaggaccccaaaacacaagcaacacctccatgtgcaagatgctaataggcacatttattgagcctctcctgtgttgagaaactccaggtgatatctcatttcagtttattctcaagcaat

SEQ ID NO: 150137 - DNA, 578 bp, Homo sapiens
tataacattattatacaatatttaaaattctataataatgggaaagaattaggcattagcctgcctttccaactagtaccagatgatgatagaacattcttctttacagtaaagccccagctaataatatatagatttacagaatttaaaaatcactattttgtatcccctaataagagaaatgattcatgcatgtgtcatcaatacatgttaaaaccataatgggatagtttggtgccaaaacgtcacccccaagattatttcccagtcacaggggggaaagtctgacttaataaaggagggacctggctgttgccacctaaactcaaggctctatctcagtgttcagtgggacaaccagacagtaggygccttccataatgaagcaatgtgaagtacaacatcagctatgacatgctcttgccaaaaccacttaggccgaaactaagcaagtctttagttttgactttcagtttacaagaaatacaaagattagggaaatgagtgaaatgatatcacaaatgaccaaatgtccagaaagtggtacactgtaaaggaccagtggcctggtttttgac

SEQ ID NO: 150138 - DNA, 528 bp, Homo sapiens
aagggaggcaagattatttcctttagtaactgtccttttgtttcagcgtatttccttctcctctcctctcctctctcacaggtgtcttgagggtcttttcccctcccccagcgactctcatagttgtcagagtcattcagttggtgagtaactgcaaagaccaagtgcyttaaagcaaaagacagaggtttggggtgcttgtttgcccagagaggtttttcctctacccaaaataagattagacccagtagaataaaaggaagaggatgagcagggcaactgtgatgcttgggaaggaagtgaaaatttagttctactggagggtggattggtgaagtcttagcatctcaatgaccagggagctggaagcaagctgaatcatgctcagtgacaccaacctgaggaccctgccaggtattctgcacccccactggcccaccatttacacaaaacccactacctaacagtcctaataccttagggtggcagatggccagaaaggaaaggctctcccctaaccaaaggggg

SEQ ID NO: 150139 - DNA, 528 bp, Homo sapiens
aagggaggcaagattatttcctttagtaactgtccttttgtttcagcgtatttccttctcctctcctctcctctctcacaggtgtcttgagggtcttttcccctcccccagcgactctcatagttgtcagagtcattcagttggtgagtaactgcaaagaccaagtgccttaaagcaaaagacagaggtttggggtgcttgtttgcccagagaggtttttcctctacccaaaataagattagacccagtagaataaaaggaagaggatgagcagggcaactgtgatgcttgggaaggaagtgaaaatttagttctactggagggtggattggtgaagtcttwgcatctcaatgaccagggagctggaagcaagctgaatcatgctcagtgacaccaacctgaggaccctgccaggtattctgcacccccactggcccaccatttacacaaaacccactacctaacagtcctaataccttagggtggcagatggccagaaaggaaaggctctcccctaaccaaaggggg

SEQ ID NO: 150140 - DNA, 433 bp, Homo sapiens
gaattcactttatatctctgtactagggaatgtccatgccagttgtccatcagggggatttagaaaagcattcgggggatgcttttttggaaaacaggttattctaagagtgacttagaatgtgtcctctgtcacaccataaagcgagtatagtgtcctggctccacgaaatcaggagttggtgctccatatccacaggaaagggagcatgcagggcccacaggaaactcagagtgatagggcccctacccctgcaaacacagtgcccatggtacttcgacaaagcatagaagttgaaagccagcatgtgtctcccccttgatagtagggtctatgaaaattcgcacccattacacactataaaataggattattatgtcacatatcacmccagtataatagtagagaaaatgtgtgtaatagaaatgactgg

SEQ ID NO: 150141 - DNA, 422 bp, Homo sapiens
atcccaccaaactgactttgaatccttgctctgccattttctgactttatgagctaggaagtagtcacttctgctctgtgcctcagtttggttatccataaagtaggartaacagtatcaccctatcttacagggttccataaggtgaaaattaaatgaacaaatatatgtgaaataattagtgagccctctggctcggctcttttttcttcccttcaagtgtgtcctgtgttcaggtacctgaatttgagtctctgtcatctcagtcaacacttctctcttggatctctcctgtggtttttgcttgccccctctgggtaaatgagaatgactttctaatcattatcccttattctgatctctaactcaagcgtcagtcccacctcactatatagagtgctcattataaaagataaggacac

SEQ ID NO: 150142 - DNA, 422 bp, Homo sapiens
atcccaccaaactgactttgaatccttgctctgccattttctgactttatgagctaggaagtagtcacttctgctctgtgcctcagtttggttatccataaagtaggagtaacagtatcaccctatcttacagggttccataaggtgaaaattaaatgaacaaatatatgtgaaataattagtgagccctctggctcgrctcttttttcttcccttcaagtgtgtcctgtgttcaggtacctgaatttgagtctctgtcatctcagtcaacacttctctcttggatctctcctgtggtttttgcttgccccctctgggtaaatgagaatgactttctaatcattatcccttattctgatctctaactcaagcgtcagtcccacctcactatatagagtgctcattataaaagataaggacac

SEQ ID NO: 150143 - DNA, 553 bp, Homo sapiens
cggtgaaaccgtgtctctactaaaaatacaaaaaaaattacccgggcgtggtgacaggcgcctttagtcccagctacttgggagtctgaggtaggagaatggcgtgaacccgggaggcggagcttgcagtgagccaagatcgtgccactgcactccagcgtgggcgacagagcaagactccatctcaaaaaaaaaaaaaaaattagattatgtgtctttttgttgatgagttgtatatattgtggayaccacacctttatcaagtatataacttcagctatttttgcccactctataggttggttgtctttttaactttcttaatgatgttttttggtgcacaataggtttacattttattaagtctgatttctctttcttcctttctttcctttccttccttttcttttcctttcttttctgttgccacttttaagaacttctatctccggagtttagtaatttaactataacgtgtctacacacgaacttcatacggcttggtatatgtcaggcttcctatagctgtagattcacattctacaacagatct

SEQ ID NO: 150144 - DNA, 469 bp, Homo sapiens
acttgctgtagtctgccttctctctgaaaaaaatagttttatgaaaattcagtcaatgaaattgggctgttgaactctaatttagcatcatagagaaattgtgtgtgtttcgtgagcaactatctcattcaagaggttgcccacacagtttgcagctagagaggaccttcagagaatcagggcaacccttcattttacatctgagtaagccaaagtctaaggcgtaaaagatattcacccaatgcctcacaacacaaagatgcctccagacttctgtcagtatacatttaaaatatctactttcatgtstatacacacgtgggaagcatgaataaagaggtgtaagtttcattggaaacaaatatctcttacataatttatttattgtcacataacaaattacctcaaagcttattaggttgaaaacaataatcatttttcactcacaatttctgttggtcaagaattc

SEQ ID NO: 150145 - DNA, 553 bp, Homo sapiens
cggtgaaaccgtgtctctactaaaaatacaaaaaaaattacccgggcgtggtgacaggcgcctttagtcccagctacttgggagtctgaggtaggagaatggcgtgaacccgggaggcggagcttgcagtgagccaagatcgtgccactgcactccagcgtgggcgacagagcaagactccatctcaaaaaaaaaaaaaaaattagattatgtgtctttttgttgatgagttgtatatattgtggacaccacacctttatcaagtatataacttcagctatttttgcccactctmtaggttggttgtctttttaactttcttaatgatgttttttggtgcacaataggtttacattttattaagtctgatttctctttcttcctttctttcctttccttccttttcttttcctttcttttctgttgccacttttaagaacttctatctccggagtttagtaatttaactataacgtgtctacacacgaacttcatacggcttggtatatgtcaggcttcctatagctgtagattcacattctacaacagatct

SEQ ID NO: 150146 - DNA, 601 bp, Homo sapiens
cctgtaccacatagccctgttgtactcttttgttttattaatccattattgctaattttggcccaaacttatgctcttagagttcagcaactagatcttgtacatatgctgtatctgagctgatattcttcttagtgtgattcactcatagaaatggcttcaaacaatgggtaaaagaagcacatggctgatgctgcactctcaccccaaagcccagcctccaaaacattccactgtacctaatcctctggctccacctgtacccagtgggaaatgtaggcttctagtcacactgagaaattcaagctaataaaatttctcctacatccctgctcctgcagttttcaggttgctttaagataacgtgtctttggacagaattcatatattttgtctcttaaatagtgcttgtacacaatttgcacaaagtggcttgcatttstgtatttggctaaacctgggaaattccctctcatcaaattcgagcacagagagagagagattccaaagacaacagacaacaggcaggaaaatgaaaagaaaaaagaaaataccattttaaaatcactatgggttttttgcttttgcaaaagatttttaa

SEQ ID NO: 150147 - DNA, 601 bp, Homo sapiens
cctgtaccacatagccctgttgtactcttttgttttattaatccattattgctaattttggcccaaacttatgctcttagagttcagcaactagatcttgtacatatgctgtatctgagctgatattcttcttagtgtgattcactcatagaaatggcttcaaacaatgggtaaaagaagcacatggctgatgctgcactctcaccccaaagcccagcctccaaaacattccactgtacctaatcctctggctccacctgtacccagtgggaaatgtaggcttctagtcacactgagaaattcaagctaataaaatttctcctacatccctgctcctgcagttttcaggttgctttaagataacgtgtctttggacagaattcatatattttgtctcttaaatagtgcttgtacacaatttgcacaaagtggcttgcatttgtgtatttggctaaacctgggaaattccctctcatcaaattcgagcasagagagagagagattccaaagacaacagacaacaggcaggaaaatgaaaagaaaaaagaaaataccattttaaaatcactatgggttttttgcttttgcaaaagatttttaa

SEQ ID NO: 150148 - DNA, 601 bp, Homo sapiens
cctgtaccacatagccctgttgtactcttttgttttattaatccattattgctaattttggcccaaacttatgctcttagagttcagcaactagatcttgtacatatgctgtatctgagctgatattcttcttagtgtgattcactcatagaaatggcttcaaacaatgggtaaaagaagcacatggctgatgctgcactctcaccccaaagcccagcctccaaaacattccactgtacctaatcctctggctccacctgtacccagtgggaaatgtaggcttctagtcacactgagaaattcaagctaataaaatttctcctacatccctgctcctgcagttttcaggttgctttaagataacgtgtctttggacagaattcatatattttgtctcttaaatagtgcttgtacacaatttgcacaaagtggcttgcatttgtgtatttggctaaacctgggaaattccctctcatcaaattcgagcacagagagagagagattccaaagacaacagacaacaggcaggaaaatgaaaagaaaaaagaaaataccattttaaaatcrctatgggttttttgcttttgcaaaagatttttaa

SEQ ID NO: 150149 - DNA, 437 bp, Homo sapiens
attctaaatcaggaggaacctcagcaagaatgggaaaattcatcaggttcaatgggagcccacgtgagtggcccctatagcagagacttctctggccaaaccaagagatgggcaggcaggtggtgagttccagatggagcttctggggcaagtgtctgcttctgcttgttccaaacttattgctaggtcctccaggcagtctggaatgcccaccasttgagaggacaactgaatcaggaaactcgtcactaaaaatcatgttattcattgatgataaggactaaatgcaacagatctcctaaaatgaaagagactcttcctccctccatccaacctcccacctgaaataagcggttcagctggaagatatgtgtattaatcaggattaggttcagttgcaaagtacaggtacccaactacggtcacttcaataaaac

SEQ ID NO: 150150 - DNA, 584 bp, Homo sapiens
ttcccactcactaacggtcactatacataggtctttaatgaccacagactttttcttggattaattaacwcttattgtttcagttaggctgataaaataaatcctcctcctccctcaacagtgcacctaacaccagtcccatttcttccactagccataggacagctccttaaatgttctctcacagctcaaactgatacaccaaagtgttgttttgcacaacagtacacacatacacacacacacacacacacacaataaagtctccattcctcatcactgtgccctgttgtcattaagtattgttggtactacctttgaaaaatacctgtcacacatccccttcacgctattcccagactagctcaggccatcagcatgttgtgattttgtaacatcttcttaactatattcctctctgatttactatccagctcaacctttccattacagaacactttattttactaacaaagtcattcatattattttagaagtttataaaataaagatataaaaaagaaaacaataaatccgacttataaacccatcattagatataacctctagtaacatttcaatgt

SEQ ID NO: 150151 - DNA, 569 bp, Homo sapiens
ttaaaaaaattaaaaaaaattaaaacaaaacaaaggatgtgtagtgctcagtgttttaaacccagtctagtagtgtctcctatgaggaaaatttattatgttggtgcaaaactaatcgcggkttttgccatcgcttttacttacctttaatggtaaaaactgcaattatacttttgcaccaacctaatagtttatttacatttggaataaaagccgatatacttaattttatttcaagcaattttatatatactctttatttcatttgtcactttttccttttacttttcattattagttctaatgtgatgctattactattttttcatatattaatttgcatgttctattacactttaattacacttttatgacacatataaaatacacattttgtgctactgttctatagataccaactctttctaccaccaatgtgctcacttctatcactgtcctcctccatcccaatataatgagacagttagaataagttttacttttttacttcccccttccagatgaggtcaaattagaatgcttttattcccatacctcaaccccatttc

SEQ ID NO: 150152 - DNA, 516 bp, Homo sapiens
tgtctcaaaaagaaaaaaaaaattaattgaataattataagcaaacttgttttattaaactttgcagatactgtgctttttacaaagtgaaggtttgtggcaatcctacatcaagcaaggcaccatttttctatcagcatgtgcttatttcatgtctccttaccacattttggtaattcttaaagtatttcaagcttttcattattactgtatttttttatggtgatctatgatcagtgatcattgatgtcattattgtaattattttggggcaccatgarccatgctcttaagagacagtgaacttaatggataaatgtggtaggtgttcttactgctccactgaccagctggtctcctatctctctctctcatcgagcctacgtactccctgagacacaaaaacattgaaattaggccagttaataacactaccatgacctctaagtgttcaagtaagaggaagagtcacacttatttcaccttaaatcaaaagctagaaatgactaagtttag

SEQ ID NO: 150153 - DNA, 463 bp, Homo sapiens
cctgtctggctgtagatttttttaaatgcgacaaacacaacccattttcccccttaatattcaattctgagctttctgacgatgaactgcactgtggtagaagagagaggaggaaggcgttgggtatagacasatctttttataaagatcagcaattctccatgcttttatcccaggcaaagattacatttaacacccaggggtctctgctgcctcagatccttttcagaatgagtggctgtggcactgcagatagtttggggtgtgctttcatattttgacagtattaaatatatccccagtgagccataaatctgtgatttatctaagaataaatcattaataagggaccacttcttttacattgggcactgcgttatattaaacagacacagtttctaaaaaatacaaaatgtgtcagacaaccatttttaatgaatataactcaaaattcctctttctt

SEQ ID NO: 150154 - DNA, 623 bp, Homo sapiens
acccagcacagtcccagtggtggtagccacagatgtgcttgtgtcacccctcctctaaatccacgtggctcatcacasaaagaaagagagactccatttgtttgggagaaagggagggaagagaacaagagcatctgcctgttaatccagacaactcttctagatcttatccaagaccaccaaggcggtacctctacaagtctacaaaaacacagtgttagtgggcttggagtatcgcttaatgcaggtacagctgcagcgaccacaaacttaggttacaacacccaatttccttcaaatatctggaaaatcttataaaaaaggatgagtataaatgagcccagactgtgacgactacaataaatacctaattctttaatgcccagacaccaatgaacatgcacaaacattaatatcattcaggaaaacatgacatcaccacatgaaccaaataaggcaccatggaccaatctcagagaaacagagatatgtgacccttcagacagagaattcaaaatagctgtttcgagtaaacttaaagaacttcaagataacacagagaatgaattcagaatcctaccagataaatttaacaaggaaattgaaataatttaaaagagtca

SEQ ID NO: 150155 - DNA, 463 bp, Homo sapiens
cctgtctggctgtagatttttttaaatgcgacaaacacaacccattttcccccttaatattcaattctgagctttctgacgatgaactgcactgtggtagaagagagaggaggaaggcgttgggtatagacacatctttttataaagatcagcaattctccatgcttttatcccaggcaaagattacatttaacacccaggggtctctgctgcctcagatccttttcagaatgagtggctgtggcactgcagatagtttggggtgtsctttcatattttgacagtattaaatatatccccagtgagccataaatctgtgatttatctaagaataaatcattaataagggaccacttcttttacattgggcactgcgttatattaaacagacacagtttctaaaaaatacaaaatgtgtcagacaaccatttttaatgaatataactcaaaattcctctttctt

SEQ ID NO: 150156 - DNA, 623 bp, Homo sapiens
acccagcacagtcccagtggtggtagccacagatgtgcttgtgtcacccctcctctaaatccacgtggctcatcacacaaagaaagagagactccatttgtttgggagaaagggagggaagagaacaagagcatctgcctgttaatccagacaactcttctagatcttatccaagaccaccaaggcggtacctctacaagtctacaaaaacacagtgttagtgggcttggagtatcgcttaatgcaggtacagctgcagcgaccacaaacttaggttacaacacccaatttccttcaaatatctggaaaatcttataaaaaaggatgrgtataaatgagcccagactgtgacgactacaataaatacctaattctttaatgcccagacaccaatgaacatgcacaaacattaatatcattcaggaaaacatgacatcaccacatgaaccaaataaggcaccatggaccaatctcagagaaacagagatatgtgacccttcagacagagaattcaaaatagctgtttcgagtaaacttaaagaacttcaagataacacagagaatgaattcagaatcctaccagataaatttaacaaggaaattgaaataatttaaaagagtca

SEQ ID NO: 150157 - DNA, 463 bp, Homo sapiens
cctgtctggctgtagatttttttaaatgcgacaaacacaacccattttcccccttaatattcaattctgagctttctgacgatgaactgcactgtggtagaagagagaggaggaaggcgttgggtatagacacatctttttataaagatcagcaattctccatgcttttatcccaggcaaagattacatttaacacccaggggtctctgctgcctcagatccttttcagaatgagtggctgtggcactgcagatagtttggggtgtgctttcatattttgacagtattaaatatatccccagtgagccataaatctgtgatttatctaagaataaatcattaataagggaccacttcttttacattggrcactgcgttatattaaacagacacagtttctaaaaaatacaaaatgtgtcagacaaccatttttaatgaatataactcaaaattcctctttctt

SEQ ID NO: 150158 - DNA, 570 bp, Homo sapiens
cttttttaaaaattcatttatttctgctctttattatttcttttttctgttttctttgagttggcatttcctcctctctaatttcttaaggttgaagcttagattagtgatttgagacttttcttcttttctaatacagtcgtgctgcatgacaacattttggtcaatatgcatcagtagtcccataagattataatggaactgaaaaattcctcttgcatagtgatgtagccattttaagggcatagcactacatattattcatgtgtttgttgtgatgctgatgtacacacacctactgtgttgccagtagtgtaaaagtgtagcaatacaattatatatagtacataataatgaatggccgtgttagtgatttttgtgtttactatactatactctttttcattatgwtagggtgtactcctatttaaaaaaaacttaactgtaaaataggctcaggcatgatcttcagaagataccccagaagaaggcattgttttcatagaagatagcagctctatatgcctgttactgtccctatacaccttccagtagcacaagatatgaaag

SEQ ID NO: 150159 - DNA, 391 bp, Homo sapiens
tggaaattcaggtaagagttgatgttgcagtcttgagttaaaagactggaaactgaggcagaatttctatgttatgatctggaggcttaattccttcttctttgggggacctcagtctttgctgttaaagccttcaactgattggatgaagcccacccacattatggtgggtaatctactcaaagtctactgatttaaattttaatcccatctgaaaaatactttcacagcaatatctaggctggtgtttgaccaaacaactgggcaccaaaacttattcaagttgacgtataaagttagttatcacaggtagcamtgaaaggagacaagattgtagttagaaagttgatgattaaactggtgaatctggaggcagagcagtacaacagag

SEQ ID NO: 150160 - DNA, 548 bp, Homo sapiens
aaatataacacctttctctctcttttttccaatgygtataaaacactgtagcaaacataggaagctattacaattgtcaaaactatatctttcataatttacagcagaccaaatcaaaattaacctctctgtgcacttcttgggtagttttctgcagaccttcagaacatgctgctgaaattctaggactacacagcagagactcttggaacaagaatctgtgccaagaggcttctccaaagcagaattcactttatatctctgtactagggaatgtccatgccagttgtccatcagggggatttagaaaagcattcgggggatgcttttttggaaaacaggttattctaagagtgacttagaatgtgtcctctgtcacaccataaagcgagtatagtgtcctggctccacgaaatcaggagttggtgctccatatccacaggaaagggagcatgcagggcccacaggaaactcagagtgatagggcccctacccctgcaaacacagtgcccatggtacttcgacaaagcatagaagttgaaagccag

SEQ ID NO: 150161 - DNA, 527 bp, Homo sapiens
atcaccattatattcaaatcacacatatcctcgaagaatatctacgttaaaaatatttgcacattcatcacattataatgaaatgtgcattactgagtgtatttgtcatataacttagctaaacgatgtgctctgatgttattggaaaccaatacttaagctaacttctttgccacatatttaytcaacttatatgagcacactctttgagccatgctgtgattaatgtcttaacagtcatacatatgtatttgtttcagtcttagtcttaacttaggataaccacaaaatattaagttctatatgtaaaatattgtacatttgcttctactagcttttaaatacggttacacttttttcaaagaaattcagagtgtttatgatttatgttgttatgctttttatcttaatgccacttatataagattgtcatgagagtttctatttgttttcactcaagttgtgcactcatggatttgtagcagtttatagaacactactcatttctgcgatagaattgctatagt

SEQ ID NO: 150162 - DNA, 598 bp, Homo sapiens
aagaaatggcactaaacatgtacactatttatcaatggaaacaaatgtgtcatttaaaaaatttaatattgaagaatttggcaagacatttaaaaacaatcttataaattcctaaaagacacctgccatgagctctgttgctactaatgcaagttgttatcatctcaaaggagaagtaatgttttagtcttccagcagtctggctttaactgcaattccattccacattcttcacactccaacatacactgtcatggtagtacacacaatgaagttgataaaccacaaactcctgaggttataccaagtaaagaaccaaaagatggatctcaaccaagtctcttatccttaatgaaaggtaagagattaacactggaggaagtggcagccayagaggtcttgactcagctctcagaagccccaccagagaattcttccccatcaaagtcagagaatgatgaagaatcagagcagagaacagctagttatctctttttaagccagaattaaattcatccaagagtgataccaatgaaagtattactcaaggtagaattactcttgacagttgttgcaagaatttccatcagttgcccct

SEQ ID NO: 150163 - DNA, 612 bp, Homo sapiens
aaactgtcttaacgtctcattctaatgtggcctcattatacaaaatctgttccaagagacaaatttttaatggttttttagacctttaatgtaaccccaggatcaggatctgaaaatatctatgtttttattatcagtgcattccctaatgtgttttgtgtagcactagattaagaatcaaagtgcttgtaaaaacgggaatatcatctcataccagttgaatcgcagttgagctgtaagtgtaaaatttggttttaaaatcaaaggggcagggcccagtggctcacacctgtaatcctcaggctttgagagtccaaggtgggaggatcacttgaggtcaggagctcaacaccaggctgggcagtatagtgagaccccatctctaccataaaataaaataaaattagtcaggagtggtggtgtgcacttgtagtcctagctactcaagaggctgacacaggaggatygcttgagcacgggaacttgaggttgcagtgaggtaggattgcactctatactacaacaacagaacatgacactgtctctaaaaataaataaataaaatcaaagggactacaaatttgattttgaaagtccacccaagtgaatttt

SEQ ID NO: 150164 - DNA, 618 bp, Homo sapiens
attattagtagtaattatgattatgttaaatagttgcaagccwcagaaataaccaaattttcctgtcaattttttttatcatggttgttctaagacttatttcatccacaattgttattctttaaccttttgaaagggttatttataatcagctacagagctctgaagagttctctaaaatataggtttctgataaatttagagattgtgccgttggaatgaagaaaaaatcttccaggactctcatggagatgtgatatattcatgaggattgctgatcaaatatggagcaaaaaagttcattgcatggagtgaactaatagtcgactgaaaataaccttttatgacctttgtttaaaacattgccagttctttttttatcagagccaataaaactttttcctcttttttgccatttaagcttttaacaattgaataaaataaactcttatgagcaaaatttaaaatgtaattcttttttttcaacgtgtttccaacatttggaaactttttgattattcttaatttatagattatatagctatttgcatcagttcaataagaatctgttttcctttatagcaacatatgattagagacattggttattttatcaag

SEQ ID NO: 150165 - DNA, 618 bp, Homo sapiens
attattagtagtaattatgattatgttaaatagttgcaagcctcagaaataaccaaattttcctgtcaattttttttatcatggttgttctaagacttatttcatccacaattgttattctttaaccttttgaaagggttatttataatcagctacagagctctgaagagttctctaaaatataggtttctgataaatttagagattgtgccgttggaatgaagaaaaaatcttccaggactctcatggagatgtgatatattcatgaggattgctgatcaaatatggagcaaaaaagttcattgcatggagtgaactaatagtcgactgaaaataaccttttatgacctttgtttaaaacattgccagttctttttttatcagagccaataaaactttttcctcttttttgccatttaagcttttaacaattgaataaaataaactcttatgagcaaaatttaaaaygtaattcttttttttcaacgtgtttccaacatttggaaactttttgattattcttaatttatagattatatagctatttgcatcagttcaataagaatctgttttcctttatagcaacatatgattagagacattggttattttatcaag

SEQ ID NO: 150166 - DNA, 618 bp, Homo sapiens
attattagtagtaattatgattatgttaaatagttgcaagcctcagaaataaccaaattttcctgtcaattttttttatcatggttgttctaagacttatttcatccacaattgttattctttaaccttttgaaagggttatttataatcagctacagagctctgaagagttctctaaaatataggtttctgataaatttagagattgtgccgttggaatgaagaaaaaatcttccaggactctcatggagatgtgatatattcatgaggattgctgatcaaatatggagcaaaaaagttcattgcatggagtgaactaatagtcgactgaaaataaccttttatgacctttgtttaaaacattgccagttctttttttatcagagccaataaaactttttcctcttttttgccatttaagcttttaacaattgaataaaataaactcttatgagcaaaatttaaaatgtaattcttttttttcaacgtgtttccaacatttggaaactttttgattattcttaatttatagattatatagctatttgcatcagttcaataagaatctgttttcytttatagcaacatatgattagagacattggttattttatcaag

SEQ ID NO: 150167 - DNA, 520 bp, Homo sapiens
ttatacttgtcacaagttaatttctaatttcgtacacttgagataatggcatttatctatagtgaagtatataggagattttccagtactttctgcttataataaaggacactgtagttacttcttcttaaaatcatactgagtaatcaaacatgtttgtggttcagaagcatgtataatatacagaacaaacatcaataatatgagtgaattgttcccaatgaaaagaattctattgtacaacctgttaacattctttcaacagaacatgtaacactgttagaatgatagccgcaggaggcagccacattcctaggcaaatagcggagggtccccagtaaaaccccacttaygagtcaaagacagtttaaaagccaagctataagtctcaaaaaaaatccataagcaggattgagaacccttcttcctgtttgacatgctttcctctgattggtccccacacttcacctattttacatatacctacccttccctagttgttgttttttttttacactgc

SEQ ID NO: 150168 - DNA, 520 bp, Homo sapiens
ttatacttgtcacaagttaatttctaatttcgtacacttgagataatggcatttatctatagtgaagtatataggagattttccagtactttctgcttataataaaggacactgtagttacttcttcttaaaatcatactgagtaatcaaacatgtttgtggttcagaagcatgtataatatacagaacaaacatcaataatatgagtgaattgttcccaatgaaaagaattctattgtacaacctgttaacattctttcaacagaacatgtaacactgttagaatgatagccgcaggaggcagccacattcctaggcaaatagcggagggtccccagtaaaaccccacttacgagtcaaagacagtttaaaagccaagctayaagtctcaaaaaaaatccataagcaggattgagaacccttcttcctgtttgacatgctttcctctgattggtccccacacttcacctattttacatatacctacccttccctagttgttgttttttttttacactgc

SEQ ID NO: 150169 - DNA, 520 bp, Homo sapiens
ttatacttgtcacaagttaatttctaatttcgtacacttgagataatggcatttatctatagtgaagtatataggagattttccagtactttctgcttataataaaggacactgtagttacttcttcttaaaatcatactgagtaatcaaacatgtttgtggttcagaagcatgtataatatacagaacaaacatcaataatatgagtgaattgttcccaatgaaaagaattctattgtacaacctgttaacattctttcaacagaacatgtaacactgttagaatgatagccgcaggaggcagccacattcctaggcaaatagcggagggtccccagtaaaaccccacttacgagtcaaagacagtttaaaagccaagctataagtctcaaaaaaaatccataagcaggattgagaacccytcttcctgtttgacatgctttcctctgattggtccccacacttcacctattttacatatacctacccttccctagttgttgttttttttttacactgc

SEQ ID NO: 150170 - DNA, 567 bp, Homo sapiens
gaattcttcagtaagaaaaaccttaatattaaaaacttgggacacttttactcttttgaaactgaaatacccctttagaatgttaaatactactgtcttaaatgaaaagattctcatctgttataaattttatgaataaatgttcctaatatgctgtgccagccaccagtaacaaacaggtcagaaggaaaggaatagccagatggaaacctggcacagggaagggaaacttyagcccagggctctgggacaaaaacaactcttaagagtgtcacaagggctttaaccttttcgtttctctttttccactgaaacatacaggattatcgcctgtaacatgccaaagacacatcaaaacatttttgtttgcatttgggaagcaagaataggtcgtgccaactagtggttagagaacacctggaaccattttagaaaagcaagtttcttcccttccccttcctctcatctcctccattttatgctctgaaaaaaagacaagagctaagggggagaaaatggatgtaattctaatatgatacagagaccctctattttacaatcttcttc

SEQ ID NO: 150171 - DNA, 593 bp, Homo sapiens
ccatgacctatcccacatggttaaaatagtagtgttgctaggatgaggcagcctgtgtttaaacacgcaaagaaaaacacaatgacaaagaatcagacaacaggaaatcttaatagagaaactagagcacaaataaagataatcagagaaaaaagtaaatagagcttcagagagaagagaataataacatcaatcatttcaacatacgtgaaatgggcattttagaaggggaggagagaatcaagggactgaaaaagtatttggaaagataatggctgaaaacatcccaaacctaactaatctatgtgagctcaacaaagcccaagtaggacaaacatraagtgatccactatatacgtagtcaaactgttaaaagtcagagagacaggagaagtgaatgagtgacagaatcaatctaggataaatcttaataccaacaaaagaaaacttacgtacaggcagacattaatataattaatggctgatgtccaaaatgtaatggattaacatattcaaaacaatgaaagaaaaaacaagcaaacaaaactgtaaaccagacattctatttccagcaaaaccatcttttaaagcag

SEQ ID NO: 150172 - DNA, 588 bp, Homo sapiens
gtgtagatgtgtgtgtgacttgtctaatggaataggctataatttaatatataraaaacccacttctttaaagaagttgtacacagactaaaggaaccaaggcaattcaaaatgaagagagacctctggatccccaacttaccatgagacgccaactgaggaattactcagctgcaaaaatgaaccatttgtcatggaaaagggaaacggtctcaggatggagccaacagccaaataacagcgaattaagtaaccatttgcagggagcagaaacaggccttcatcgagaaacagtcctgcctctggagtcgtggggactggcaatgtgtgcctggctggatttcagaattgctaaggatctgtgcctgccatgtgccttcaatctcctccccttgggaatgggagtatctcttacagttatctcatcgctttcacactatgatatctggggttgggcgagggcagtgatggtggcagataacttgaattattagttcacaaacttccagattgagaaaaagctgcatccaagcagtctaattcacatctagacctgagacagatagtgagattctgaacactgaactg

SEQ ID NO: 150173 - DNA, 522 bp, Homo sapiens
taggaatataaggactgctttcatgggccaggatcactcttccgcaaatgcagcatgctctctctaaggtatcatgaagggtggtgcagattaaagtcatcacttcaaaaattatatgaatactctgtattccctcattagtctgttatggaattgtcacacatttatktgcccaatgtgccttttggaaaaccagcaagacatctttggataattagtcctttaacattccctacttgagacaacttttagaattttagagctaaaagaaacctcagtttgggcaatggtaaaactctttctctacaaaaaacaaaaacaaaagttagccaggcatggtgatgcatgcccatagtgttagctactcagagggctgaggcaggaggatcgcttgagccctgggggtgggggtgggagtgggagttaaagctgcagtgagctgtgatcgtgccattgcactccagcctaggtgacaagagttaaaccctgtctcaaaaaacaaacaaacaaacaaacaaaaaa

SEQ ID NO: 150174 - DNA, 479 bp, Homo sapiens
cccccgcattggacaggacaggatggaagagtgtgctggactggctggattccccagtgtcaagctggcagcgctcctgaggttcttgagtgtttatcaactcagcaggtcaaaagtctgcagacactgggtggagcagcagtaagccacaaaactaacagttgtcttcctggaaggggaaaaagggagagaagaacgctgtgagttcaagattaaagtctctgattctttctgctggaaacttttttctttgttaaaatggaggattagccatggtcaacaaactgcataatagaaatttaaatttccttttcaaactgagcactggaatcaggtgaagtatgtacatgtgaatgttcattttatttatttattttttgaatgttcattttaatagcagcgttcagaagatatattatccctaaagtagaaactaagaaaaaaaaaaaaaamaaatgccttttccacattacgtttcg

SEQ ID NO: 150175 - DNA, 420 bp, Homo sapiens
gatacgtgaattatctcaataaagctgttaagaaataagagagatgaaaggagaaatagataaatccaaaaatagaattggggacttcaataccttactctcagcaactgatatactagatagaaaattagtataagtatagaaaaactgaataacacaacaaattaaaaatctgacatatacagaacactatccaacagcagcagaatctacgttgtttttttcaaatgcccatggaccatataccaagtcacagctgagatttgcccacctggacagagctgctagagccataaacwggtaggaacacttaaatgagaatgtttacaaaatctgggcataaaaccacaccttaaaaaatttaaaagatatcagacaaattatgttctcaaactacaatggaattaaactagaaatcaa

SEQ ID NO: 150176 - DNA, 572 bp, Homo sapiens
ggaaatattcttcttttttcaattctgtctcccactaaaatcattaaggctctctgggtcttgagacatatgaattcttcaccttgattgtaggtacccgttaacagaagtttactaggcatgttttaatatctgaaagggttgtaattctgggttttgagttatgtccctttcctttgccttttagatttttgtgattgtgtcttagactaatgccagtagttattgtggagatttatgagctagcaagtacttatgagacatctgggtttccatacactgtaaagctgaacaatttaaagcacaaattttggattcaggatacatgtttttaaatctcatgtaatggaacaagctatcatttaatggtggttgtcttgagtagattacttaccttttccctcatctcagagagtccctttctttatctgtcaaatgaagacagtaataccaacatcacagatttattttgaggattyagagataatgttatatgctccacactgtgcttagtacatagtaggcactcaataaaggtaaagctaacaaaattttgataaatattattttaa

SEQ ID NO: 150177 - DNA, 572 bp, Homo sapiens
ggaaatattcttcttttttcaattctgtctcccactaaaatcattaaggctctctgggtcttgagacatatgaattcttcaccttgattgtaggtacccgttaacagaagtttactaggcatgttttaatatctgaaagggttgtaattctgggttttgagttatgtccctttcctttgccttttagatttttgtgattgtgtcttagactaatgccagtagttattgtggagatttatgagctagcaagtacttatgagacatctgggtttccatacactgtaaagctgaacaatttaaagcacaaattttggattcaggatacatgtttttaaatctcatgtaatggaacaagctatcatttaatggtggttgtcttgagtagattacttaccttttccctcatctcagagagtccctttctttatctgtcaaatgaagacagtaataccaacatcacagatttattttgaggatttagagataatgttatatgctycacactgtgcttagtacatagtaggcactcaataaaggtaaagctaacaaaattttgataaatattattttaa

SEQ ID NO: 150178 - DNA, 507 bp, Homo sapiens
aacattttatctcattttatcatataacttttattatcaattcactttttcaatgtgggttaaccagttgtctttcttatttagtatactttctgttcatctggttctttgttgaaggcttattatcctgttaaaggggaaaactctagaaattgagctgaagtataaaaatatcattctgacatgaaatggatcacttctagtcttggaaaaacctattaaataccaaaattcaaaatctccctatcaccaatccactcttcatgttcattgtcaataccacacctattcttgttaacccagtctatcaggtccttcttgcccatccttcataacattcactattcatttactctattcctactcctgrgcttaagcaatgatggaagaaacatggtaaccaagatgtctagcttcctatgggcccatcagttctaactactgctgggccctgcttagctgttttttatttatttgtctgtttatttatttatttatttatgatct

SEQ ID NO: 150179 - DNA, 507 bp, Homo sapiens
aacattttatctcattttatcatataacttttattatcaattcactttttcaatgtgggttaaccagttgtctttcttatttagtatactttctgttcatctggttctttgttgaaggcttattatcctgttaaaggggaaaactctagaaattgagctgaagtataaaaatatcattctgacatgaaatggatcacttctagtcttggaaaaacctattaaataccaaaattcaaaatctccctatcaccaatccactcttcatgttcattgtcaataccacacctattcttgttaacccagtctatcaggtccttcttgcccatccttcataacattcactattcatttactctattcctactcctgagcttaarcaatgatggaagaaacatggtaaccaagatgtctagcttcctatgggcccatcagttctaactactgctgggccctgcttagctgttttttatttatttgtctgtttatttatttatttatttatgatct

SEQ ID NO: 150180 - DNA, 540 bp, Homo sapiens
atgagttacaagaaacttaagaacctttggaatttgcaggagggaaagaaagttaaaaaactgcatgaataatattttaacatttgtacagactttgctgttggtttacaaagcacctccaaacacattttacatatatatatatatgtgcagagtatatatacatattatatatttttatatatgcagagtatatatttatcaatatatatgcatatataattttcacaatattcctttgaggtataagtaggaaaagtagtaacctgattttacagatgaggcagtgactcccaaaagctctgataataggcaatctataatgtgagcctgattaatctgacctcacmtctgatgttcttttttctcttctgcctcccctgataataatagagcggaaaaagaaaccttaaaaagctaactggtccaagctagtctaagtttaaatagagagcaggaaatctaaaataattattcagaactttatcattattttcttgattactttgtaaaattctcttagagaagccttctttctgg

SEQ ID NO: 150181 - DNA, 319 bp, Homo sapiens
taattaaaataattctgatagaaaatcctaacaatgtacattattgtctagatttataattccgtaaattaaatatacatccccctgcaagtggcaatrcttcaaaaattaattctagtttacaatttagtataaaataatgtattagaagtgtccctgaaagatggagtttaatggagaaaaatgaggaatattatgagtatcaggacatggagaagagtaaaaagtcaatattgtgggacaaattaaatgacattaaaaaatcaccttttttcatttgatataatgtaatggttataaaatatctcctcagagttct

SEQ ID NO: 150182 - DNA, 608 bp, Homo sapiens
aaaattcacataatttagaatccagcagagagcacgtgtgggctatttggaatggacagtgaagggccaccttttgcaaaacggagtgactggcaagtgacaagttggaaatacttttctttcaaaagactggttctaacaaatgttgacagtgtggccaaaatcactcccacagctcccattgttgctaaggtgaaaacccttggagaggctgtttcaggcttatctgtggtgcctgaaggcgtcctcttacctacttgtccttcacctaaacacttcactgcccctggcagcatccgctgggaccatcctgggacagagctggctcatgctccagccacatccccagggatgccctcctgtggaacaaatgccatgcatgtgtgcttgggctcatttccagtaaagatacwtcacagtctatgtaataatgatgagaacttaaaaaaaaacacacacacaaggccaacaacttagaatctgagcagtctctcataatgttaaaaatcattttaaataaagttaccacattttcaataaaacttattcatccttccttgaaacagaaacacttggaattaaaacataatttgtaaaaaatcatgagc

SEQ ID NO: 150183 - DNA, 412 bp, Homo sapiens
atctaactacacactgtgataaccaaatctaactcaagtcttgtggggtgtatacttaggaaaaataaggtgctatttgaatagggtggcaaccttttataaaaaaacaaawgcgtcaatgagtaatcttcaccagcttctgtccttagcatcctcaccattcccctcaacatctcgcaacctggtttgcctgctgttgaaccgttgttgctgtagtccacagtgacttttttttttttttttttttgagatagagtttcgctcttttttgagatggagttttgctcttgttgctcaggctggagtgcaatggtgcaatctcggctcactgcaacctctacctcctgggttcaagtgactctcctgcctcagcttcccaagtagctgagactacaggtgcgtgccactgtgc

SEQ ID NO: 150184 - DNA, 532 bp, Homo sapiens
tttaattgactcagagttctacatggctggggaggcctcaggaaagttataatcatggtggaaggtgcctcttcacagggcagcagaagagaggatgagtaccaacaggggaaatgcagaacacttayaaaaccatcagatctggtgagaactcattcactatcacaagaacagcatgggggaaactgcccccatgatttaattacctcccactgggtccttcccacaacatgtggggattatgggcattataattcaagatgagatttgggtgtggacacagccaaaccatattaattgctttggctattcaggttctcttttggtgccatatgaattttagaatagcgttttctaattgtgtgaaaaatgacattgctaatttgataggaattgcatgaatcttagattgctttgggcagtatagtcattttaatgacattgattctttctatctataagcataggatatttttttcttttgtttgtatcatttacaatttctgtcatcaatgttttgtagttcttctta

SEQ ID NO: 150185 - DNA, 532 bp, Homo sapiens
tttaattgactcagagttctacatggctggggaggcctcaggaaagttataatcatggtggaaggtgcctcttcacagggcagcagaagagaggatgagtaccaacaggggaaatgcagaacacttataaaaccatcagatctggtgagaactcattcactatcacaagaacagcatgggggaaactgcccccatgatttaattacctcccactgggtccttcccacaacatgtggggattatgggcattataattcaagatgagatttgggtgtggacacagccaaaccatattaattgctttggctattcaggttctcttttggtgccatatgaattttagaatagcgttttctaattgtgtgaaaaatgacattgctaatttgataggaattgcatgaatcttagattgctttgggcagtatagtcattttaatgacattgattctttctatctataagcataggatatttttttcwtttgtttgtatcatttacaatttctgtcatcaatgttttgtagttcttctta

SEQ ID NO: 150186 - DNA, 566 bp, Homo sapiens
agggacacagatccaaatcatatcagtactttaagtatatttattcaatgaagcttgcgtaacactgctgaatttggttagtatcaggttacttatttactctttttgattccttgaagatctttcctcctctgcttcaatactccagtgaatttgagttctgattatccaaacttactattaggaaagaaccacatatgtcatttacactagatgttgtggtaatgaacatcaggaaatagtatctcttggcatgctttctcactaatgagatttgaaacaatctctctttgtccctaattctaatttacaaaatggggactgtggttagacggatggtttttacagctcactgtagatcagaattgaaaaagcatttaaaaatatctctatttaaaaaaatctcttactaagtgattactargtgcttggtaagcttagtgcttactatgcttgttagattcttatgaagccagcccagtggtcctcaatcttgctgtacattacactcacctgagaagttttacagacactgatacttcagtcaaacccttagagattctaat

SEQ ID NO: 150187 - DNA, 585 bp, Homo sapiens
tctgcacagttacctggtaaaattagaataaatctctatccaacaacttcatcactatggtgatcatataccctgatttgccaaggcggttctgatggatgtctcttgtgctggtatggttattagcactgtaacagtaaaggggtatagtaacccctttactctccaagaggtcttcagtttaaatgataatttacatggtcatcctatagataacacctattgtccctagtcagactctttgtattcctcatgaatgttttctaaataagggcaagttttggattcactgctgwgtcctgtgtcctattaggttcccttttccttctggccctgacaggtgataaataaataaaacaaatggcctcttgggagctgttgtcaactttgctcctatccagccccaatttggggtgttttttgttcctgttcccatcactcaggccttgaaggctgatagatttctgatttcttccttgaaacatgacatgatgaataaggctgcatgctttactgcacagtccaagaaagagaactataaaaagtgattgtcctatacaatgggaaattatttaacagggttgg

SEQ ID NO: 150188 - DNA, 585 bp, Homo sapiens
tctgcacagttacctggtaaaattagaataaatctctatccaacaacttcatcactatggtgatcatataccctgatttgccaaggcggttctgatggatgtctcttgtgctggtatggttattagcactgtaacagtaaaggggtatagtaacccctttactctccaagaggtcttcagtttaaatgataatttacatggtcatcctatagataacacctattgtccctagtcagactctttgtattcctcatgaatgttttctaaataagggcaagttttggattcactgctgtgtcctgtgtcctattaggttcccttttccttctggccctgacaggtgataaataaataaaacaaatggcctcttgggagctgttgtcaactttgctcctatccagccccaatttgrggtgttttttgttcctgttcccatcactcaggccttgaaggctgatagatttctgatttcttccttgaaacatgacatgatgaataaggctgcatgctttactgcacagtccaagaaagagaactataaaaagtgattgtcctatacaatgggaaattatttaacagggttgg

SEQ ID NO: 150189 - DNA, 566 bp, Homo sapiens
agggacacagatccaaatcatatcagtactttaagtatatttattcaatgaagcttgcgtaacactgctgaatttggttagtatcaggttacttatttactctttttgattccttgaagatctttcctcctctgcttcaatactccagtgaatttgagttctgattatccaaacttactattaggaaagaaccacatatgtcatttacactagatgttgtggtaatgaacatcaggaaatagtatctcttggcatgctttctcactaatgagatttgaaacaatctctctttgtccctaattctaatttacaaaatggggactgtggttagacggatggtttttacagctcactgtagatcagaattgaaaaagcatttaaaaatatctctatttaaaaaaatctcttactaagtgattactaagtgcttggtaagcttagtgcttactatgcttgttagattcttatgaagccagcccagtggtcctcaatcttgctgyacattacactcacctgagaagttttacagacactgatacttcagtcaaacccttagagattctaat

SEQ ID NO: 150190 - DNA, 439 bp, Homo sapiens
ttctttctttttttttttttgagacagagtcttgcactgtcacctggactggagtgcagtggcacaatctyggctcactgcaacctctgcctcccaggttcaagtgattctcctgcctcagcctgcccagtagctgggacaatgggactacaggtgtccgccaccacacctgactgatttttttttttttttgtatttttagtagagacggggtttcaatatgttggccaggctggtctcgaatgcctgaccttgtgatccatctacctcagcctcccaaagtgctgggattatgtccgtgagccaccacgcctggctatctttaagagtcttgaagctgttctccctaattgagacttgggtcttcaaaggaagcccttaagcaaagatgggaggtgaacgtgaattctattcagttcccgtgtttagaattattgtt

SEQ ID NO: 150191 - DNA, 439 bp, Homo sapiens
ttctttctttttttttttttgagacagagtcttgcactgtcacctggactggagtgcagtggcacaatctcggctcactgcaacctctgcctcccaggttcaagtgattctcctgcctcagcctgcccagtagctgggacaatgggactacaggtgtccgccaccacacctgactgatttttttttttttttgkatttttagtagagacggggtttcaatatgttggccaggctggtctcgaatgcctgaccttgtgatccatctacctcagcctcccaaagtgctgggattatgtccgtgagccaccacgcctggctatctttaagagtcttgaagctgttctccctaattgagacttgggtcttcaaaggaagcccttaagcaaagatgggaggtgaacgtgaattctattcagttcccgtgtttagaattattgtt

SEQ ID NO: 150192 - DNA, 365 bp, Homo sapiens
gaagttcatcacagcgtgcaggccctgtatggatgccaaatagggaaaaacaactcatcatcctgccctgcttggctggtttgtgccctgacttccttcttaggggttgcagaatattttatttagtttcaatgtctcatttttgaaacttgtactctgtaattaaataagattgtaccattctaaaagagaagaggattgmctaagtatgtttggtccctggacagcagtagcagcatcacttgagagcttgctagaaattcagaatctcaggcccaccctggactcactgaattagaatctacattttaacaagatccctaggtgatttgtgagcacattaaagtttgagaagtgccgaattc

SEQ ID NO: 150193 - DNA, 521 bp, Homo sapiens
tctagattgcctatttctttttctctctacatttttcttatcttctaaaggtttttattaatcatgcattactttaaaaagaaaagtaaatgatactttatgaagcagagagaaaaaaataacttagtttatgtatttttaaatcttactatctctttcatctaaaagaagggagaattcagcaaaacagtgtatacagaggaaaaatcgaggttcccttagctgcccttctctcctcttcaggctggcataggaagggaatggatctgcaaaaacagcctccaacaacattttccagtgaaacatttgaaatcacgctcgggagctctgagttccacagctggtccggttgtgactgagttgtgtgatgttgggtgtcacttattctttcatatgccaaatgggggttttattatgattatcatgtgtttcataatagccttattaggwtgataagaccttaatatgggcttctaacatgtggagctaagtctgtgatatagtggcatcaaataactgtg

SEQ ID NO: 150194 - DNA, 632 bp, Homo sapiens
ccattctctcaagaaaaacaaaatactgggagacatcttcagagaaaggtaaattgtggtcattagatctgttttagcaattgtggttgaaaatctgtaacctgttattttaatcaatatggagtgtgtctgggccagttgcttaggggagaaacatgagtcctaaaagagtaaggggagagcatttttcacttcattctaaaatatatattatatatttacatattatatatatcttaatgtataaatatatattctataactatatcatagaaatatatatgcaattgaaaacaagcatatctagagtcaccagaaccaagaaatctgtttacctttaatggaagatttaagcagattaaattttcttcatataatctctccaatattttgcaaattttgtgtctgatggttggactgtcagatcttatgaccatttactataagagtcatcaccagactattgaaagaaatgtggaattaacattactatagcctttacaaaggcaaggtactaatgaaatgtaccttgcaatrattttggacattcaaattaattagaattaaaatgaatatgttattttcctagaaacaatagtcactctctgaagctctacaaatactgtagttat

SEQ ID NO: 150195 - DNA, 581 bp, Homo sapiens
ataaaaccactttaatgcattgtatcactctaaagctagagcgattagggcagttgcactgcaggccagaatgcaaaatgcagaacaataaaagggaagggaaaatagtctatgtccaggtcttcatgtttcaaaacgtgcaaatggatagttttgtatgcatyatgtgtgtcattttactggcacagatatggcaaagcaatcattatttgcaatgtgtagagctatgtctgcacacatataagtgagcataaacaagtatagtagtttgagaaaaaataataatggattttgaacaatgatgaatattttatgcagtatgtcacttctgaaagttacttaattcccacctaaatgagaatttctaatgttactcataccactgccacaggaaaaaagaagttattgccagaagaagaaagaagaggagaagaaagaggtatggggaaagagaaaggaaggaaacggggagaggaagaactgaggccatgtgactcgtatatcagatttgatataataggatggtcagtgtagggatcaccatgtgacatagaatgataagaccaaagaaaataatgatg

SEQ ID NO: 150196 - DNA, 557 bp, Homo sapiens
aagaacatggtgctaagactccccctgccttgctctgctacttcacctggcatctgaaggtagatcccagtatgctcttggggataaattcaacaaaccaaatccagatgtkgacttatacatttcaacattttacaccagcaaaagaccttggatatgtatgagggaatttgtcctaaggatgctagaccaaagaggggaaattatattttacatcaggttgaaaatgtctatattggcgcacttacaataaattctggatttaacgtactaggtcaaactagcccaaatagctggaagtagatttagtaattttcttggactttttttattattaaagctggaccaaatggtagtctatagcaaatgaagtgaagatatcagaaatgctttggtttaatataaatcaagaaatccaaagtcttaggaaaatattggagttgggggtggatttaatcacatgtgacttattcatcctttcaaaacatctagtccttcctgaaaaacagcctagatgttatttcttttcactcagcatagaaaaatacattggtgag

SEQ ID NO: 150197 - DNA, 557 bp, Homo sapiens
aagaacatggtgctaagactccccctgccttgctctgctacttcacctggcatctgaaggtagatcccagtatgctcttggggataaattcaacaaaccaaatccagatgtggacttatacatttcaacattttacaccagcaaaagaccttggatatgtatgagggaattkgtcctaaggatgctagaccaaagaggggaaattatattttacatcaggttgaaaatgtctatattggcgcacttacaataaattctggatttaacgtactaggtcaaactagcccaaatagctggaagtagatttagtaattttcttggactttttttattattaaagctggaccaaatggtagtctatagcaaatgaagtgaagatatcagaaatgctttggtttaatataaatcaagaaatccaaagtcttaggaaaatattggagttgggggtggatttaatcacatgtgacttattcatcctttcaaaacatctagtccttcctgaaaaacagcctagatgttatttcttttcactcagcatagaaaaatacattggtgag

SEQ ID NO: 150198 - DNA, 492 bp, Homo sapiens
gcttcacattgaaggcacaatatttgcaaatttgctttacgtctatagcttggaactgacatattcttattttggttttttgggaagacatttagttcttcttggtcctgtctgaacactatcaaagagaattccctccttcccctaccccatgactttcagaaagttattgtgacatttygacagctataatgttgatagtatgtttcctttatttcctcctctgacttaggtagaactctatagagcactggagactcgtgaatcaatggtgcagttattcatttttcgctaactttgacaactgtcttgtatgtttcccttccccatttggcccagacctaacctgtggctgtcttgctgaatatggggacctggacgtttcacaggctgacagggtgagacaacacaagcaaatgcagctggcctgatggggatgttgtcagatgcagtcaaccccactggaggtatactcactcagagaggctggtc

SEQ ID NO: 150199 - DNA, 492 bp, Homo sapiens
gcttcacattgaaggcacaatatttgcaaatttgctttacgtctatagcttggaactgacatattcttattttggttttttgggaagacatttagttcttcttggtcctgtctgaacactatcaaagagaattccctccttcccctaccccatgactttcagaaagttattgtgacatttcgacagctataatgttgatagtatgtttcctttatttcctcctctgacttaggtagaactctatagagcactggagactcgtgaatcaatggtgcagttattcatttttcgctaactttgacaactgtcttgtatgtttcccttccccatttggcccagacctaacctgtggctgtcttgctgaatatggggacctggacgtttcacaggctgacagggtgagacaacacaagcaaatgcakctggcctgatggggatgttgtcagatgcagtcaaccccactggaggtatactcactcagagaggctggtc

SEQ ID NO: 150200 - DNA, 492 bp, Homo sapiens
gcttcacattgaaggcacaatatttgcaaatttgctttacgtctatagcttggaactgacatattcttattttggttttttgggaagacatttagttcttcttggtcctgtctgaacactatcaaagagaattccctccttcccctaccccatgactttcagaaagttattgtgacatttcgacagctataatgttgatagtatgtttcctttatttcctcctctgacttaggtagaactctatagagcactggagactcgtgaatcaatggtgcagttattcatttttcgctaactttgacaactgtcttgtatgtttcccttccccatttggcccagacctaacctgtggctgtcttgctgaatatggggacctggacgtttcacaggctgacagggtgagacaacacaagcaaatgcagmtggcctgatggggatgttgtcagatgcagtcaaccccactggaggtatactcactcagagaggctggtc

SEQ ID NO: 150201 - DNA, 591 bp, Homo sapiens
tatgtttcccttccccatttggcccagacctaacctgtggctgtcttgctgaatatggggacctggacgtttcacaggctgacagggtgagacaacacaagcaaatgcagctggcctgatggggatgttgtcagatgcagtcmaccccactggaggtatactcactcagagaggctggtcctgagtgctcctcccatctgcctccctgtcccacggttgtgccctggctgccccacgctgacagtggggctagccaagcatggctgttgtgaagatctcaagacgattcagagaaaaagcccagacatcattttgcagaggatattatacatacagacttggaagcattttgaggaaaggtggataaggtccaaggcaattttttttagccctacttgagggtatgggaggggtgagtgggaatgggggtggggctgcaaatccagggaaaaaatacttgacgtgactgaccatcttgagtgcaaattgttaactataaaaatcatgagtggttggcagctactgtttttgtttgcttgttttttgagtcagtcttgctcttttgcccaggctggaatgcagtggtgtgat

SEQ ID NO: 150202 - DNA, 591 bp, Homo sapiens
tatgtttcccttccccatttggcccagacctaacctgtggctgtcttgctgaatatggggacctggacgtttcacaggctgacagggtgagacaacacaagcaaatgcagctggcctgatggggatgttgtcagatgcagtcaaccccactggaggtatactcactcagagaggctggtcctgagtgctcctcccatctgcctccctgtcccacggttgtgccctggctgccccacgctgacagtggggctagccaagcatggctgttgtgaagatctcaagacgattcagagaaaaagcccagacatcattttgcagaggatattatacatacagacttggaagcattttgaggaaaggtggataaggtccaaggcaattttttttagccctacttgagggtrtgggaggggtgagtgggaatgggggtggggctgcaaatccagggaaaaaatacttgacgtgactgaccatcttgagtgcaaattgttaactataaaaatcatgagtggttggcagctactgtttttgtttgcttgttttttgagtcagtcttgctcttttgcccaggctggaatgcagtggtgtgat

SEQ ID NO: 150203 - DNA, 569 bp, Homo sapiens
aataataataataatcaatgaaatttagcccatttacagaataaatgagaaaagtaacactattgtctctttagataaataaaaatgtttgatataatttaacactcattcataatttaaaaatatatatggatagaagaaacttccataatttgataaaggtatttatagtaaacctatggtgaagcttttcctttgcmatcagacagcatgcaaggatgacctttatcatttcttttaatcaatatggactaggggttttagccagtacagcaatgtaagagaaagaaagaaattctgtaagaattggacaatgtagtaggtgctattggtactgcatctataccaccttgactttagcacttcagtgtacaccagccaactactagcaccttcatttctttgctgaagtctttctttcattgttggagtcacttcatctgtcctaccagcaggctagaaattgctcaccccagagaattaactcactcctgggaacatccctcaaccgcaggtccacagaacatttacaataagtactttagattgcttacccctttaatgtgaaa

SEQ ID NO: 150204 - DNA, 599 bp, Homo sapiens
tgttgttttttcagtcatttttgagaattgccctgtttgttttatgtgtttatttgcatgtttcaaactaaataaactgtaagatttgaagagcaagggaaatagctgatttttaaaaaagctttcttaacactttgcagagaactctcaattttagacagccttgctcaatgaattatttatctgaacatatcttgaaaggtrgattttcctcagaaagttacatttttgactctcctttatggcacctacttactccctaaagctgtttaatagtaacactctgtaaaatattccactttcaaaggccctttttaggtaattgctgaactcaaactcacaatcaccacataaggcatctactgtaatacctattttgtagatgaaaaaactgaagcctaaggtctaaatggattgctcagggttaaacagagagttactgagaaagtcagaattggaaggaagtttcctgatacccacacaattcagcatgcttccaccatgatgcctttctacctcctgttgccctgcacccaactggagctctatccattggcacctttacatcatggcgtttgtgaggatgacaagagtatgca

SEQ ID NO: 150205 - DNA, 556 bp, Homo sapiens
gcttcttaactatctcaatatgaatttgtttttattaagttaggttcatttcgtaactctgccactgatatatacatgagcaatacctacctctcttatccctcaaaactccaaacagtctttacttatattaaccccaattaaaatctgagtagtgcaatttcaggaaaatatgaaggaaagttaaagatgggctaaccaggtcagcaaaaagggagacaaagattcatcaggcagggctcttcttgacccatgtggttccccaagtcactctctcactctgtcctgctcagctggagtcaggtactatttttttaaaaacttayttattccgtaagaattaatttccagtacaggtaaaattatactaggctgtgtaataagaaaaaaggaaattctctttccttttcaataagtttttctaagagtgttcagaggaaaaaaagtgaatttctgtctaaaaaattttccacttttataattccagaaaatttatttattaattatataattaatttagaaatacagctatatttataatttaaaattatattga

SEQ ID NO: 150206 - DNA, 458 bp, Homo sapiens
ggagcttgtagcatggacacaaccagaattaatgttgttcccagcaggactcttgtttttgaaagtgggtatgagaataaggctggggcccagttgcaaagaagcaagcgtgcattcaggtttcacagtaagtatataaatgttccaagtaatgagaaagacaccattgttagggataaattatgagaagaacattcatcaggtttgtaatttccacatactccctactttgtgtgccagcatagtatggtcctagacaatacattgtacagtggcatattcaattttacagaaaagacaaagatgactttttggctttggttaacccagtatttcccaaactcatctttaaccatggttctcgygtgtgtgtgtgtgtgtgtgtgtgtgcgtgcgtgcatgtatgatatgcctattaaccactcacagaattagcatgcaactaaatcactttggaa

SEQ ID NO: 150207 - DNA, 599 bp, Homo sapiens
tgttgttttttcagtcatttttgagaattgccctgtttgttttatgtgtttatttgcatgtttcaaactaaataaactgtaagatttgaagagcaagggaaatagctgatttttaaaaaagctttcttaacactttgcagagaactctcaattttagacagccttgctcaatgaattatttatctgaacatatcttgaaaggtggattttcctcagaaagttacatttttgactctcctttatgrcacctacttactccctaaagctgtttaatagtaacactctgtaaaatattccactttcaaaggccctttttaggtaattgctgaactcaaactcacaatcaccacataaggcatctactgtaatacctattttgtagatgaaaaaactgaagcctaaggtctaaatggattgctcagggttaaacagagagttactgagaaagtcagaattggaaggaagtttcctgatacccacacaattcagcatgcttccaccatgatgcctttctacctcctgttgccctgcacccaactggagctctatccattggcacctttacatcatggcgtttgtgaggatgacaagagtatgca

SEQ ID NO: 150208 - DNA, 529 bp, Homo sapiens
ctgggctacagagaccagtgtcctgaagttgcatagggcagcagggctataggcctggtcctggaaaccattcttccctcctaggcctccaggcctgtgatgggaggagctgccacaaagttctctgaaatgctttcaaggcattttccccattttcttggctattaacattcagctcccctttacttatgcaaatttctgaagtgatttgaattcctctcccaaaaatggggagaggaaatctacatggtcagrctaaaaatttcctaagcttttattccctgcttccctttgaaatataaattccagttttagataatctctttgctcatatatatgaccatacatgaaggaatcaggccaaatcttgaatgcttgctgtttagaaatttttttctacctgctaccctaaatcaccactctcaagttcaaagttccacagatctcttgagcaggaacagagtgccaccagtctctttgctaaagcttagcaaaagtttcttttactccagttcccaataagttcctt

SEQ ID NO: 150209 - DNA, 529 bp, Homo sapiens
ctgggctacagagaccagtgtcctgaagttgcatagggcagcagggctataggcctggtcctggaaaccattcttccctcctaggcctccaggcctgtgatgggaggagctgccacaaagttctctgaaatgctttcaaggcattttccccattttcttggctattaacattcagctcccctttacttatgcaaatttctgaagtgatttgaattcctctcccaaaaatggggagaggaaatctacatggtcagactaaaaatttcctaagcttttattccctgcttccctttgaaatataarttccagttttagataatctctttgctcatatatatgaccatacatgaaggaatcaggccaaatcttgaatgcttgctgtttagaaatttttttctacctgctaccctaaatcaccactctcaagttcaaagttccacagatctcttgagcaggaacagagtgccaccagtctctttgctaaagcttagcaaaagtttcttttactccagttcccaataagttcctt

SEQ ID NO: 150210 - DNA, 531 bp, Homo sapiens
  misc_feature (1)...(531): n = A,T,C or G
ctttgcctttggaggctggacaacaatgtgggccaaggcaagagggtagaattatgtgttatttttatttgatggaagagaaggtagtcnagagaatttgaagtacaaggatttatgttatgagtgctgtgagagaaaaaaggttaaatctacagggtggaactatcacatcaatcttgccaattgtgtttttttcaaatgttccaaatctttgcagactattttttatgtgagaaaaataaagtcctgtgtacttaataacagagacatgctctgggaaatgtgttgttagatgactttgttgttgtaggtatatcataggtgtacacctcttatacaaacctagataatatagcctactacacacctacacacaatacgctacaaagcatgttactgtactgaatactgtagacaattgtaacaattcactaggcaataagaatttttcagctccatcataatcctatgggaycaccgttgtatatgtggtctgtccttgactgaactgttatgtggcacatgactata

SEQ ID NO: 150211 - DNA, 465 bp, Homo sapiens
aaatacctacaatttgtattttaatgcaaatgtgcaagagtttggttaggttatatgcttagaggtggatttgctgggcataggttggccacatacttaccatctactgcaagtttgccagatggtgtatccaaatgcagccaagtaaattccagaaccttttgctctaccttctcagcaacccatgacagtgtgagactttttccccttggataaatgagtgggtaaaagttgcatttctctgcaytttgaacatgttttcatatgtttattgaccaatagattttcttagttttgaattatttcttcacggctattgattagttttctatgtgacatcttttcttaatggtgtacaagaatgccatctatattttaaatattagttatttacagttatacacaatacagttgtcttatgttatagcttgcctttaaacttgcttatagtcttctatgtcttac

SEQ ID NO: 150212 - DNA, 602 bp, Homo sapiens
agaatgaggaagttttgcctatggtatgaagacttataataaaagtattggaattaagaatatgttgttttgatgcaacgatagataaaggaacgagtggaaactattagggagctcatctgctggcatactcctttgtggagtgcttatacatgacagagctgggattttaaatggagtgagggaccactgagaatactggctattcatatggaaaaaaacaaagaacaagttttactccaaactcacaccatacaaagaatcagttcccatgcataaatattgtatatatgaataagaaaattaaaaaaaawttagaagcaaatatagaataataagtgtattacattgggcttgagaaggaattcttagatgggaaacaattatatatctaaaacacatacatgtatatacagaagacacccatgtagcaaatgcatagataattgcgaagttgtcagcttctaaaatattcaattatcactttcatgcatttgcaattgcataactctaaattcctgtataagatgaactatagtatttttgttaaattacagaaaattgttattttatagaatagaacccatatctatgagacacat

SEQ ID NO: 150213 - DNA, 656 bp, Homo sapiens
cttcagggaatctcctggataaatgccaaacacagaaatcaaagttctccctgcactaattcacccttattctaaagtgaaatacgcattaaaacctactggggagttaaatacttgcttatttcaaagttgttttcctccttttactaactttaagtacgttagaatattttaagtcctgaaggcaatatgattagagaatataaccgttatatttatgacaataattgcatctgatagaacatgggaaagaatggaggaaagaacattctttctagagatatggataatttactttatgcaacgctatgcatcttmgtttctgcatctgtaaggtgaagctttttttttttttttttggagacagagtctcgctctgtcacccaggccgaactgcagtggcactatctcggatcactgcaagctccacctcccgggttcaagccattctcctgcctcagcctcctgagtagctgggactacaggcacccaccatcatgcccggctaattttttgtatttttagtagagacggggtttcaccatgttagccaagatggtatcgatctcctgacctcatgatccgcccgccttggcctcccaacattgctgggattacaggtgtgagccaccgcacccggccaggtgaagcatttt

SEQ ID NO: 150214 - DNA, 656 bp, Homo sapiens
cttcagggaatctcctggataaatgccaaacacagaaatcaaagttctccctgcactaattcacccttattctaaagtgaaatacgcattaaaacctactggggagttaaatacttgcttatttcaaagttgttttcctccttttactaactttaagtacgttagaatattttaagtcctgaaggcaatatgattagagaatataaccgttatatttatgacaataattgcatctgatagaacatgggaaagaatggaggaaagaacattctttctagagatatggataatttactttatgcaacgctatgcatcttagtttctgcatctgtaaggtgaagctttttttttttttttttggagacagagtctcgctctgtcacccaggccgaactgcagtggcactatctcggatcactgcaagctccacctcccgggttcaagccattctcctgcctcagcctcctgagtagctgggactacaggcacccaccatcatgcccggctaattttttgtatttttagtagagacggggtttcaccatgttagccaagatggtatcgatctcctgacctcatgatccgcccgccttggcctcccarcattgctgggattacaggtgtgagccaccgcacccggccaggtgaagcatttt

SEQ ID NO: 150215 - DNA, 588 bp, Homo sapiens
tttcgatgtgcataaagaaacttttattggagcacattcacttatgtattgtctgtggctacttttatgctacagtggcagaggtgagtagctgtaaaagagactttatgatcyataaagtccaaaatattcactctctggccttttacagagaagaaattgccaaatttcccattcacagggagtatttgaaagcagggaaatggcaagtgtagtagtacatatctcaaccaaggcaagtgtactaaagatgaaaggagatgttggatttaagacaaagaggacaagagaataattactcattcatctttcctcagtcctcttatcattgaatcatttctctataacaattaccaccttcaatttctttagagatttctcaaaccttcaatgtaaaatagaaaccccccagaaatgtgcaaaattattcatgacacatttcaaaaatatttatgtagagttttagattaaaattttaaaatataaagaaaaaatacaagttaaattgaaataaagaaaatctaaatgtttagaatagaataatttgacatttgaggataatggtaacaatcaaggttgcattttatt

SEQ ID NO: 150216 - DNA, 583 bp, Homo sapiens
ttgggtgatgccatcccaaattgattctttttttatttttatttttacttttatttttgagacagagtttcactcttgttgcccaggctggagtccaatggcgcgttctcagctcactgcaacctctgcctctcgggttcaagtgattctcctgcctcatccttctaagtagctgagattacaggcatgcaccaccatgcccagctaatgtttttgtatttttagtagagacagggtttcaccmtgttggtcaggctggtctcaaactcctagcctcaggtgatccacccacctcagcctcccaaactgctgggattacaggtgtgagccaccgtgcccagcccaaattgattcttaatagttgattataccatccttggtccttaatgagagattattaatttttggaacattgaataatcagaagtattgttatatttgtaaataaatgttagttgcaataaaagtgacatatttactatttattctaccaatactgagtgccatgtatatatttgaaaaatatggcaattttctatttcagatgtggcaatatatttcaattgccacatttttcaaaagt

SEQ ID NO: 150217 - DNA, 540 bp, Homo sapiens
actcatagaaatgtaaactttaaaatgaaaccaatgctatttttaaagtaaatttccttaacattgttagttaaaaagaaaagtatgctgtggtaggtttaagatttaccaataaaaattccttcattgaataaaaaactagcccagagagacmtaaccaccacatttgttgagtgaaaaattagtatttccagacttctctgtgtaaagtttcacttgatagatttgaataaaataaaaccttcaacaaaatgtgggttcagccactggcattacaatttgatcaaaagcactaaatttcaagtttgagaaagtacacaatgtaagtttccagaatacattttagatctccattctggatggcagatttattgtctaggttgaaatagtgaacttctgtgaacatcacctcacacaggagaaataggaaaaactaaaaaatagaaaacaaaaacccacactactgtcttaattgtcccattatcattcttactaagacttttcatgaattttaaaactgtttctcctaacgttttctaa

SEQ ID NO: 150218 - DNA, 536 bp, Homo sapiens
catagaaatgtaaactttaaaatgaaaccaatgctatttttaaagtaaatttccttaacattgttagttaaaaagaaaagtatgctgtggtaggtttaagatttaccaataaaaattccttcattgaataaaaaactagcccagagagacataaccaccacatttgttgagtgaaaaattagtatttccagacttctcygtgtaaagtttcacttgatagatttgaataaaataaaaccttcaacaaaatgtgggttcagccactggcattacaatttgatcaaaagcactaaatttcaagtttgagaaagtacacaatgtaagtttccagaatacattttagatctccattctggatggcagatttattgtctaggttgaaatagtgaacttctgtgaacatcacctcacacaggagaaataggaaaaactaaaaaatagaaaacaaaaacccacactactgtcttaattgtcccattatcattcttactaagacttttcatgaattttaaaactgtttctcctaacgttttcta

SEQ ID NO: 150219 - DNA, 536 bp, Homo sapiens
catagaaatgtaaactttaaaatgaaaccaatgctatttttaaagtaaatttccttaacattgttagttaaaaagaaaagtatgctgtggtaggtttaagatttaccaataaaaattccttcattgaataaaaaactagcccagagagacataaccaccacatttgttgagtgaaaaattagtatttccagacttctctgtgtaaagtttcacttgatagatttgaataaaataaaaccttcaacaaaatgtgggttcagccactggcattacaatttgatcaaaagcactaaatttcaagtttgagaaagtacacaatgtaagtttccagaatacattttagatctccattctggatggcagatttattgtctaggttgaaatagtgaacttctgtgaacatcacctcacacaggagaaataggaaaaactaaaaaatagaaaacaaaaacccacactactgtyttaattgtcccattatcattcttactaagacttttcatgaattttaaaactgtttctcctaacgttttcta

SEQ ID NO: 150220 - DNA, 501 bp, Homo sapiens
tagtaatttgtgcacattgattttttgtatcctragactttgctgaagtttattagcttaagaagcttttgggctgagactatgggggttttctagatataggttcatgcagggatatgggtggatctggaggccattacccttggcaaactaacacaggaacaggaaacaaaacagtaaattttctcacttataagtgggagctaaatgatgagaaaacatgaacacatagagtacaatacacactggggcctgtcggagggtggagggcaggaggagggagagtatcagaaaatatacctaatggctactaggcttaatacctgggttatgaaataatctgtgtaccgcaaacccccatgacacaagtttacctgtgtagcaaacctgcatttgtacccttgaacttaaaagttaaaaaaataaaaagaataataaataatttttaaaagaacagcatttagtaaattactgcagaggttcttttaaattacagaactc

SEQ ID NO: 150221 - DNA, 501 bp, Homo sapiens
tagtaatttgtgcacattgattttttgtatcctgagactttgctgaagtttattagcttaagaagcttttgggctgagactatgggggttttctagatataggttcatgcagggatatgggtggatctggaggccattacccttggcaaactaacacaggaacaggaaacaaaacagtaaattttctcacttataagtgggagctaaatgatgagaaaacatgaacacatagagtacaatacacactggggcctgwcggagggtggagggcaggaggagggagagtatcagaaaatatacctaatggctactaggcttaatacctgggttatgaaataatctgtgtaccgcaaacccccatgacacaagtttacctgtgtagcaaacctgcatttgtacccttgaacttaaaagttaaaaaaataaaaagaataataaataatttttaaaagaacagcatttagtaaattactgcagaggttcttttaaattacagaactc

SEQ ID NO: 150222 - DNA, 429 bp, Homo sapiens
tagactaaaaccacataaaataacacatatcagactgttaggtaagcatgagaaatatgctgggttggtaagtatgaatgtgcaatgtaaaggagattggactgataatatcagttggattatgtttgggcagatgcttgggttgaccctgacgatcacaataatggtgtttctagtggatttcagttgttttttcctgttcatcatcgccccatccccccacacgcacccccccacacacaatctttaggtttaaaatatattttatttttgtggaaattatattccatatttgcagatgggtctccttgtctcggtactccccccaaccttctcttacaaaamaagggcaagaaaccatactcaagccttgtcaatcaatgcaatcgatgctatcttgagcgtcatactttattcaaatgttggcat

SEQ ID NO: 150223 - DNA, 516 bp, Homo sapiens
gtttctgggccacctgagagtgtcattgccataaagccagtggcgtactgaataaatgagggattcaggcgtgaactaacaaacataaaagctatttttaatattatttctttctgctacagctcagaagaaacaaaaatagaatagacttgaaaaagtaaacagctttctaaaaagaaacaacaggaaatgaattagagaaaactatgaagaagtaacttgaaagtgaaagatatatggttcctaatctttccactctcacttattttagttgagtaactattttatgccaatatatttgagggggaaaaataagttgtgtaacactaacttcatagaataacaatatacacatacatgtacwcacagtgtatgatcaaataagtttggtaaatgttacaattggaggatgtttcagcattttcaagcatgcaaacagatctgaatttctcagatttatgatcatgcatttttaaactcttgagaccacagattaatttccaccgatattcacac

SEQ ID NO: 150224 - DNA, 662 bp, Homo sapiens
tttaagaatcttaaatgaaaatataaacttattgtcacagcaaatgccctcaaaatattagctatcacatctatataaacatcatgatgatgtcattgtatgacagtcaccaacaatattaagatctttccagaacctcccaggtgaagtttataatctctctatatcaacatagaagcacaatattcatattcatctttgagtagcactttaaaagattataaaatattttaaaagacattaccttatttaatcccttttgtaaacttacacgtttggcatggctaattgtatatttttttctaagaagtaagggaggttcaaacaggcagtaaacacagcctgtccaacaatgcaccatgtttagtggccaagacatggrcatccatgcattacaacagtcattctcatagtgtggtccccagaaaaagagcactagcattgcctgaaaacttgttagaaattcagatattcagcctcaaccagatctgctaaatcacaaactctgggagtggaacaccataatctgattttttagccactctaggggatattaatacatgctaaaatttgagaatcattgcactagacaaggcaactaaggataatatctgaaatatgagcaacactcaataattatcatttttttcaaaatcatagag

SEQ ID NO: 150225 - DNA, 650 bp, Homo sapiens
agtattgaccatccatgccacaaagacagtaagtacaaaaaaatgcagattagggtaaatatgtaatccttctaaaatattgcctggaaagctacgcataagattattatcaaaccttctaaacagcatttgtctgaaatatacatttcttaaacttgagcaaagtcattmgaacagcagttttaagtagtccctattactctaatagagaagctaaagggtcacactacgagaaagaaccaaatgtcgtctgatgacacacatgctgtgtccagacccaatctatggaaacaccccgctctgacaccaccccaatgccacgtttcacaagcaggatccttgaaaagggagaatcgttcatgtggctggaaatggagtgtactggggtataggggctgaccttggtctgtggaacggtgatgtctcaagcactggttattctcctgctcacaggttgtcctctgaaaggacggttactaatttatgaactccaagttgatagtcatcatgtccatcttattcccctgcatgggcctaacacctattggaaatagaagatactaaatacgtatttgttgaattgcaaaatcaatgaatggatattcactttacttgcttgatctgcagattctagggaaatttaggtcgca

SEQ ID NO: 150226 - DNA, 588 bp, Homo sapiens
gcttaattatctttatgataataagccttcagtctggtttcaaatgcgtaattttttgatacactacatttgaaatgcaacattgcaattcttcttggacttacacagacaggtcatcttcactttcattttactaaaatagcaccccccccccccggtttaaaattgatcagattaaattagtctaatcaataggaacaaaagaggcatgtacttattttatttctatccctaatagagttgtaattttaaaaaggcattaaatacgaattttcaaaaaccactttccttgaatgacacattgtcacgcttcataagtacacatgtctgtctttcagggtgatttcagtgattattcagtagtgaaattggctaattttgtttyataaggcttattttgtaaatttagagattacatatataaggcctaacagctggttaattaagttaattcagtaaaaatcaattgatcactcaatcatcttgtaaacagattaaattttttccacattgacccattgattaaaaatcagaaggcacaatctagtcctaaaattgtacatcctattaaattatgcagaaaaaggg

SEQ ID NO: 150227 - DNA, 582 bp, Homo sapiens
catttccttttttcttacacctctaatttattttactagaaaatgaaatygctttacatttttatatttattttcacagaaggacatatgtgaattatttatagttctttcccattatccataatgtcctgtacaaatataacataactgattaaagtaacttaaaaacaatactctggcagtgtatcctcaggggaatatattctaaagacaaaaataaaattaagaggcaaagacattttaaacttagtattggatgtgttttttaaaaatggtgttggcaccttaatactaaaactcttgggtgtgaactgtgggttagcacacaggaatcaatatatccctgttttgggaagcagggttttcactgtggaagaagtggaatgagagaagctgtggaagaagcctgtgttactggatttgatactgtggcttcaaacaccaacaatactatgtgttcctgctgtgaagtagtgagaggttcagaaattcaccaaacagtgttcttgccagaaatgttgcacctaaatatagtcacaaggaaagggacgaatatagaatgtgggatgttttgcagggacc

SEQ ID NO: 150228 - DNA, 582 bp, Homo sapiens
catttccttttttcttacacctctaatttattttactagaaaatgaaatcgctttacatttttatatttattttcacagaaggacatatgtgaattatttatagttctttcccattatccataatgtcctgtacaaatataacataactgattaaagtaacttaaaaacaatactctggcagtgtatcctcaggggaatatattctaaagacaaaaataaaattaagaggcaaagacattttaaacttagtattggatgtgttttttaaaaatggtgttggcaccttaatactaaaactcttgggtgtgaactgtggrttagcacacaggaatcaatatatccctgttttgggaagcagggttttcactgtggaagaagtggaatgagagaagctgtggaagaagcctgtgttactggatttgatactgtggcttcaaacaccaacaatactatgtgttcctgctgtgaagtagtgagaggttcagaaattcaccaaacagtgttcttgccagaaatgttgcacctaaatatagtcacaaggaaagggacgaatatagaatgtgggatgttttgcagggacc

SEQ ID NO: 150229 - DNA, 582 bp, Homo sapiens
catttccttttttcttacacctctaatttattttactagaaaatgaaatcgctttacatttttatatttattttcacagaaggacatatgtgaattatttatagttctttcccattatccataatgtcctgtacaaatataacataactgattaaagtaacttaaaaacaatactctggcagtgtatcctcaggggaatatattctaaagacaaaaataaaattaagaggcaaagacattttaaacttagtattggatgtgttttttaaaaatggtgttggcaccttaatactaaaactcttgggtgtgaactgtgggttagcacacaggaatcaatatatccctgttttgggaagcagggttttcactgtggaagaagtggaatgagagaagctgtggaagaagcctgtgttactggatttgatactgtggcttcaaacaccaacaatactatgtgttcctgctgtgaagtagtgagaggttcagaaattcaccaaayagtgttcttgccagaaatgttgcacctaaatatagtcacaaggaaagggacgaatatagaatgtgggatgttttgcagggacc

SEQ ID NO: 150230 - DNA, 557 bp, Homo sapiens
ggctttacctctgctggtcacttaggggcacaggatagcaagggacgagctctctctctcagatgtgttttggccgcatcccagagggatgagaaaaaataaaagaaaaagaaacagtaagacctcctgatgcttgggctatccagctgctggagtggccatgaaatctgctcttctaaacttatttcagtcacaagtttttcttctacttacctctgagcctctcccttaagagggcatgcagacagcacagggtgaagccagtggctttccacaaggacctagaacacgtggtggcagctgacctagattgctttcatgtctagataggtcrtacatactacatatgtgccacagataggatggcagtgcacacacaggcagtaaacatatgcacgttaaaagaatgtacataaatgtcttggtttgttacaacagggaaacgctttgggaagtctgatgctccctccacatctctgatccccctgaaggtgtgcttgtatgcctgctcccttgtttttcagaagtggctgtgacggagctggtgtagacaagta

SEQ ID NO: 150231 - DNA, 399 bp, Homo sapiens
ggttctcggctaacaggcaaacggagagaaagctggcattggacatgtaaagaattaaatggagtagctagcattcatcacaaatgatgggcgcccacctgccttgtgggagggaactcggggtgcttttcctatttgggattctaggagcttgtgaattggggctcattttgatcatctaaagggagcatgatgatgccactttcagaaggaagtgggtgaagagctgtggctttaggtacagactgcccrggcaggcttgctgtctatccaacacactgaatgtttgtgtcgcctcaaaatccatgttaaaatccttaccacgaatgtgaggaaattaggaggtggggcctgtggggggtgactaggtcatgagggtgcagcccttaagaaggggat

SEQ ID NO: 150232 - DNA, 448 bp, Homo sapiens
ttgtcagggagcatcaggagatgagaacagaagagaaaggaggtaaactatgctaaaacttgcctcctagctgccctgaaaagaatgaaggacactgtttctaagacatggggcccctgctcacaagtcagaaccttggtatcacctcacagttcagctattttgccacagccatarcgccatcaccaagaacagctctgctgctgtaacaaacactttcagaaactaaagtgaaccatttttaagttgggatttgtcagagttagcatttcattcactgatttctgggaagcgacgagtaagtaataagatgaataaagataatgaccccggactgacatttaaattaaactttccttcatgattaaagtcctaatttaaaaacaaaatgaaatttctattccatttagacaaaaaaatactcctcagtgaaggaaggtcctataaa

SEQ ID NO: 150233 - DNA, 649 bp, Homo sapiens
ctacaaacaggtaaaaaagaagtaattcaatacctgtcaatatagtttaaaactacataattcccaaaaccactaacaaaacactgcacagattttaaactatttctatwacgcaataatctgaagttttactgaagtacaaagttattatgactacagtttgcaaataagagaaacattttttattgataagtttgcaaacacctcaagaaaatgtactgttttaaactacttataatttttatttcaaatacctaaggaaaactgtatttaaaaaaattgatacagtagttcacgtgttttcaatacctgtgctacttcttcattcttcagcacatgtctacagatttactttacttcatcccaagtaaaaccatcatcaagtaaaatcacaaacaatagaaagtaagtattgtagctctgcgaaccagtgtggaccttataatcaaacttcattataaacgctccttcacagtttaaaaatacagaatttttctaatcattttctaatttagaaacattttacttcacaggtagtaaagtaaatttacagcaagagaaaacagcttgtcaaaatcatctaattgtttaatttctttttaaaagttgaaaaagatacgccctattattttcatgggcaacagcttcc

SEQ ID NO: 150234 - DNA, 649 bp, Homo sapiens
ctacaaacaggtaaaaaagaagtaattcaatacctgtcaatatagtttaaaactacataattcccaaaaccactaacaaaacactgcacagattttaaactatttctataacgcaataatctgaagttttactgaagtacaaagttattatgactacagtttgcaaataagagaaacattttttattgataagtttgcaaacacctcaagaaaatgtactgttttaaactacttataatttttatttcaaatacctaaggaaaactgtatttaaaaaaattgatacagtagttcacgtgttttcaatacctgtgctacttcttcattcttcagcacatgtctacagatttactttacttcatcccaagtaaaaccatcatcaagtaaaatcacaaacaatagaaagtaagtattgtagctctgcgaaccagtgtggaccttataatcaaacttcattataaacgctccttcayagtttaaaaatacagaatttttctaatcattttctaatttagaaacattttacttcacaggtagtaaagtaaatttacagcaagagaaaacagcttgtcaaaatcatctaattgtttaatttctttttaaaagttgaaaaagatacgccctattattttcatgggcaacagcttcc

SEQ ID NO: 150235 - DNA, 649 bp, Homo sapiens
ctacaaacaggtaaaaaagaagtaattcaatacctgtcaatatagtttaaaactacataattcccaaaaccactaacaaaacactgcacagattttaaactatttctataacgcaataatctgaagttttactgaagtacaaagttattatgactacagtttgcaaataagagaaacattttttattgataagtttgcaaacacctcaagaaaatgtactgttttaaactacttataatttttatttcaaatacctaaggaaaactgtatttaaaaaaattgatacagtagttcacgtgttttcaatacctgtgctacttcttcattcttcagcacatgtctacagatttactttacttcatcccaagtaaaaccatcatcaagtaaaatcacaaacaatagaaagtaagtattgtagctctgcgaaccagtgtggaccttataatcaaacttcattataaacgctccttcacagtttaaaaatacagaatttttctaatcattttctaatttaraaacattttacttcacaggtagtaaagtaaatttacagcaagagaaaacagcttgtcaaaatcatctaattgtttaatttctttttaaaagttgaaaaagatacgccctattattttcatgggcaacagcttcc

SEQ ID NO: 150236 - DNA, 352 bp, Homo sapiens
tccaatgccttcttagcagctccacctagacatctaaaatgtcatacataatctgttcaaatctgagctcctgatgctcccatacctgctctcccttcaggctcagccatgytgggttcatggcagcttcaccctctccttgcccaaacacttggagtcatgctcctctgctctttctgtcgcacaacacatgcaatctgtaggaaattctgtcgactttgcctccaaaaagtgcccagaggcaaccacgtctcctcatctccctgtccacagccaccgcgtagtctgttagttgccatcgtctgtgactgcactcaccatctgtgttcagaacacagtgcagtgcgaattc

SEQ ID NO: 150237 - DNA, 571 bp, Homo sapiens
tggtctgagctccctccttacccctggagaggcagggggcaagatgtgtggggctggaccaggcaggtctggacctacaggtcccctgatggcagacacaagcaccagcactgaggggagaatccagtggccagccaccaagccctcagagatatgcctaggcatgaagctgggaagcctcctcaaccccaagttctctgcatggggatggcgatggcctaaacttctgatccaacagagtgcatgctgcaggtgcctggagatctgcctgggggtaaaacagagagggtcccactgcaccataatctacgtacaggaagcatgaggtggctgaggctgttgatccaggccagggggtactctgaatacctagggatctgcatgggcrtggagcagagaaggccccgctgcaccaccatctatgcccatgaagagtgcggctgctcaggctgctggtccaggcaaggggatggtactctgattgcctgaattttggcttgggggtggagtggaaaggggccctactgcatcacggtcttagggtagcagattggtgtacccagcaatgaca

SEQ ID NO: 150238 - DNA, 488 bp, Homo sapiens
tttcataataaaagacaacagactattgwtatacagagtgtggatctcaaaaacaatgctgagtgaaggaagccagacacaaaagaatacatgctgcataattccttttatgtgatattttagaaaaaggaaaactaacccatagtgacagaaaataggtcagtagttacttgtgtctggtggttgggggtggtattgacaataaagaggcctaaaagaacttttcaggataatggaaatgtcctatagcttgatcggggtggtaggtgcacaaatgtatacatgtgtcaaaactcaaactgtatatttaaaatgtacacattgtatgtatattaaacctcattaagattgatttatatatcattgtgataatcttacaaaatactaaaatataaagtttaagaaatggtttatattttcaaaatataaaatatgagaaaaattcaaagatgaatccagaatattaggtccacaatccaagaaaatgg

SEQ ID NO: 150239 - DNA, 585 bp, Homo sapiens
cttcctttgagctggagctgcaaggcaaattaaaaactagtacattctaacaaagcatactcatagttttacttctagttaaatgtgtagggataattatggtattagcctaatatttgaaaacaaggcaactcactttcgtttctaaaagtgtcactaagatggcattgattgcagcaaagtctattgggttagctagaataagcagtgagaaatagagataatgcttgttctcatatccttgtttggatactgctttaaagtataaatcatataaaggttatttagaaaatcactatttccgaagaactgccttgatatactgtgacactcataatgagctgcaaaaattaacctacatcttcaggtgggtcatatttcattgatsactattgaataaaaattctggggtagaaaatttaagtcttaactttcttcaaagagaccttttaacacgttacacgtatctaagacataaatggcatctgttttcccttctggctgttcacatacacatttaatgtattgatcatttttttaactaaaatttgacactacagttgaatgtatttgctgcatttgcag

SEQ ID NO: 150240 - DNA, 443 bp, Homo sapiens
ataccagtaaagagaaatgatgaaattcccagctccccacttgtgggaagacagatatgtggcatctcctctcccccagatgattttgtggctttgttgggatcctgcctggcatccctgaatctgtaaagccagttcatgaacagtctggacattgataagccccacggtcggcaatgctgctcctagattcaggaggtagggccamcttcggctttcttggacatttgtttcggttggataggtgaaagacacctagagaattttgtaagtgaggagccaacactgggtaggaaacaaggccagaggattaaataagtatctatggtgacaaagcactggaagaaattccagaagttggaataaaccatgtcctgtgctgtaaccaccagaaatgggcagaacacctcttcaggggactcgaggttaatgttttgctacct

SEQ ID NO: 150241 - DNA, 552 bp, Homo sapiens
tggttcttggagaaactgagcctgtcgaaccagccttacttggaccagtcaaactcaaccagctttgactttatttattccctaacctgtcatgctgccttatgtgattacaatcaagggatactgttaaaaaaaacaaarcctggtcatttagtgttggttcacctactcaaaaataagttctgctttctggtatatttgtgggcccacttatgtggatattactgtttgtgagccgattacttatttttacttaagctagtgtagttaggtgtttgtcacttgcagaccaaagaatcctaaaagttatagcccaatgcatcactaatgtatgtattagagtaaatgggtttcctctatttgcaaggttaatgaagttggagtgaactgaataattcaggtttctcagactacacactttaggaaactaccttctcccattttaaagggagccagaaagcttatgccaaggcaaatataatgaaattattccatacccatgtggccatcttgtttataataaatctagtatatatgccactttacaaaggc

SEQ ID NO: 150242 - DNA, 552 bp, Homo sapiens
tggttcttggagaaactgagcctgtcgaaccagccttacttggaccagtcaaactcaaccagctttgactttatttattccctaacctgtcatgctgccttatgtgattacaatcaagggatactgttaaaaaaaacaaagcctggtyatttagtgttggttcacctactcaaaaataagttctgctttctggtatatttgtgggcccacttatgtggatattactgtttgtgagccgattacttatttttacttaagctagtgtagttaggtgtttgtcacttgcagaccaaagaatcctaaaagttatagcccaatgcatcactaatgtatgtattagagtaaatgggtttcctctatttgcaaggttaatgaagttggagtgaactgaataattcaggtttctcagactacacactttaggaaactaccttctcccattttaaagggagccagaaagcttatgccaaggcaaatataatgaaattattccatacccatgtggccatcttgtttataataaatctagtatatatgccactttacaaaggc

SEQ ID NO: 150243 - DNA, 552 bp, Homo sapiens
tggttcttggagaaactgagcctgtcgaaccagccttacttggaccagtcaaactcaaccagctttgactttatttattccctaacctgtcatgctgccttatgtgattacaatcaagggatactgttaaaaaaaacaaagcctggtcatttagtgttggttcacctactcaaaaatragttctgctttctggtatatttgtgggcccacttatgtggatattactgtttgtgagccgattacttatttttacttaagctagtgtagttaggtgtttgtcacttgcagaccaaagaatcctaaaagttatagcccaatgcatcactaatgtatgtattagagtaaatgggtttcctctatttgcaaggttaatgaagttggagtgaactgaataattcaggtttctcagactacacactttaggaaactaccttctcccattttaaagggagccagaaagcttatgccaaggcaaatataatgaaattattccatacccatgtggccatcttgtttataataaatctagtatatatgccactttacaaaggc

SEQ ID NO: 150244 - DNA, 552 bp, Homo sapiens
tggttcttggagaaactgagcctgtcgaaccagccttacttggaccagtcaaactcaaccagctttgactttatttattccctaacctgtcatgctgccttatgtgattacaatcaagggatactgttaaaaaaaacaaagcctggtcatttagtgttggttcacctactcaaaaataagttctgctttctggtatatttgtgggcccacttatgtggatattactgtttgtgagccgattacttatttttacttaagctagtgtagttaggtgtttgtcacttgcagaccaaagaatcctaaaakttatagcccaatgcatcactaatgtatgtattagagtaaatgggtttcctctatttgcaaggttaatgaagttggagtgaactgaataattcaggtttctcagactacacactttaggaaactaccttctcccattttaaagggagccagaaagcttatgccaaggcaaatataatgaaattattccatacccatgtggccatcttgtttataataaatctagtatatatgccactttacaaaggc

SEQ ID NO: 150245 - DNA, 388 bp, Homo sapiens
tagcacatttacctggatttaatgcttctgctgtgctttctgaagcctcttccaacattgaggctacatgcttctgaatggtggtaatatgaccagttgacctcaagaacaggggcccactctgtaacttctatgacctcagtccattcataagatcctttgctgggtataattccacatctgtgaatgaygtagtgcaaatatctccagacagtggttgtggttaagaatctgcaagcaggaaagacaaacctataccaaaacatattcctgtgaatggaagcagctcaatgtagtcaatttgccaagtggcaagtcttcttaaatagtgctatattgggattcaacacttgtctcactacaggctgggcattcagctgtagcagta

SEQ ID NO: 150246 - DNA, 297 bp, Homo sapiens
actatgtttaccaacatctgtagaacccagatgtccttctactacttctttagtcactgctgttgtgtctccccagaaagccctcccagaagcttcccagtatggctccatccaagccaagctgccgcaaagctcagggttctactgtatgattacacgctgccatctcctggccaaagcactgaacttgggcccagtgggtctggccccacagcttgaccttggttttaattatgtgctgtccccatccactctgccagctrggattagagagatgttcatgactacccacagctc

SEQ ID NO: 150247 - DNA, 205 bp, Homo sapiens
agcccaaggattcgggcatamcagattaaatatattttgtgatgactaaagacgcaccataggattatgttctgtgggaaacacacaagacagccatctgccaaggccattaagaatgcactggcatgccaggaatcagcatcaagaagttcagccatcactccccccagcaggccagttacagatagtagtaagtgcagttaca

SEQ ID NO: 150248 - DNA, 450 bp, Homo sapiens
gaattcctgacccacatgatctcgggctgcaaaattaatattctggaaaagtcaactgacattatttgcaaaggctcagatcactttctgataggtttattttaaatccattgacctgttttatctgactagatagaccaaacaaacatgaaataattgaacttcctccagtgccactttctagcatcccttctctcaaaccctggagtaaatacacggatatacataattttatataaagatcaaactccaattaaacacaatgagatttcttgtctcagtgtcatagttgcacacttcatagagaggaagtaagacaaaggtcctcagaaaataaaaaatgtgaatgacataaaaaggagtaatttaatatcatgttaactcattctatatgataccaggtaatgctgcgtcayggcaacgacatggtgtaaagtattcccatatgat

SEQ ID NO: 150249 - DNA, 450 bp, Homo sapiens
gaattcctgacccacatgatctcgggctgcaaaattaatattctggaaaagtcaactgacattatttgcaaaggctcagatcactttctgataggtttattttaaatccattgacctgttttatctgactagatagaccaaacaaacatgaaataattgaacttcctccagtgccactttctagcatcccttctctcaaaccctggagtaaatacacggatatacataattttatataaagatcaaactccaattaaacacaatgagatttcttgtctcagtgtcatagttgcacacttcatagagaggaagtaagacaaaggtcctcagaaaataaaaaatgtgaatgacataaaaaggagtaatttaatatcatgttaactcattctatatgataccaggtaatgctgcgtcacggcaacgacayggtgtaaagtattcccatatgat

SEQ ID NO: 150250 - DNA, 567 bp, Homo sapiens
ggcctgtgcaaggaatattattctgtttgcttcaaagtaccctggtgtaaaccaggatagcatcatcagcyggttgttttcacagtgagaatattcttagctggtgttcttcacaaaattctgaaagaattaatatctataaaccagcattgcagtgttcagcaaccatcctattggcaaataaataccacttgtaatgtttggttctacagctgtaataacaggggcatttttatatcaatgtatttataagggagtctttgcatatttccatgcaactctgcaagcaagaaaattgcacaaaccctttcagtaggtgctaaataccatcaacatgtgaatcatctttaaatcatttccttaacagtagtacgttttgaatgctacaaattacttggctaaaagacacaaggagcaaggcagccagcatactggtaaacttacaaactcaaaagaagtcagtgtgactgtcacttcatatatgctcagcagggggatgcttacacttatttctggggtaaaattacaggtcgaagttgacaggactgcttattgagaaggctcctc

SEQ ID NO: 150251 - DNA, 567 bp, Homo sapiens
ggcctgtgcaaggaatattattctgtttgcttcaaagtaccctggtgtaaaccaggatagcatcatcagctggttgttttcacagtgagaatattcttagctggtgttcttcacaaaattctgaaagaattaatatctataaaccagcattgcagtgttcagcaaccatcctattggcaaataaataccacttgtaatgtttggytctacagctgtaataacaggggcatttttatatcaatgtatttataagggagtctttgcatatttccatgcaactctgcaagcaagaaaattgcacaaaccctttcagtaggtgctaaataccatcaacatgtgaatcatctttaaatcatttccttaacagtagtacgttttgaatgctacaaattacttggctaaaagacacaaggagcaaggcagccagcatactggtaaacttacaaactcaaaagaagtcagtgtgactgtcacttcatatatgctcagcagggggatgcttacacttatttctggggtaaaattacaggtcgaagttgacaggactgcttattgagaaggctcctc

SEQ ID NO: 150252 - DNA, 525 bp, Homo sapiens
acttgccagccaccatcaaataaatctattccttaaaatatacatatgcacacacacacayatatatatatatatatatatatatatatatacacacacacacacacatatatacatatatacatatatatacacacatatatacatatatacatatatgtacatatatatatacccacacattttgtcttaattctctaagaaccctgaataatacaggctttatattgtataatttcatttacatgaaattctaaaaaaaaaggagattagcagtgacagaaagcatatcagtggttccctgaggcaagggcaggagaaactttctaggataatggaaatgttccatgtgtttgttgtggtgaggattaactgactgtatcagtcaccaaaatttatcaaactgtacatgtatatgcatgcttaaaatgaatcaattttattgtattttaaattagcacaataaaagttgggaggaggaagtcacactacaaaccatatagcaatctctaatatgattctctt

SEQ ID NO: 150253 - DNA, 596 bp, Homo sapiens
aaacccagtttctggcgtccagtgccttcctgcgctctgctgttgctttttgagcaccagcggcgtttcattggttctccctgaatcatggatctttttttcttsctccttttttaaagcctcctcatgtgctgttgtctctctccttaaaagcaggtgtcccacaagattcagttcttaggtttttgatcttccctttgtacatactatccattttaagtcttgtccagtctgagaactgtgttgatatcaacagattgatgatggtttccaaatttgctctgtagctctgtggcttttatctcttccttaagcttcactgctttatcactacctgtaagatgaatatcttctcactgttgtgctgagaccgctgcaaatgtttcgtgtattggcaggattcttttctttctcttccccccaaacctgtagatgacactatttgcattatctgccgctgacactatttgaatcgtcaaaagctcaaagtcttggaggatgaggagaagtattctccattttgtgctggtaaatgtttaacaaccattttttttttcaacaaaaaagacaatccttgatatgtaccagttgcggat

SEQ ID NO: 150254 - DNA, 184 bp, Homo sapiens
agcatggaggaaaccaccccccatgaaccaattacctcccaccaggcccctcctttgaaaagtggggattacaattcaagatgaaacttgggtgaggacactgagccaaatcatrtcatattctattggagtgaatgtgcacaacaaaatagggagaaaaaactaaaattctgaattttttttt

SEQ ID NO: 150255 - DNA, 384 bp, Homo sapiens
ttcttaggctccctggctgccctcagcctctccattctgggtctaggttgtatctctcattggaggaggctgaagaatgcttctacttgcatctctgtagtcatatatcatctgggaatcaccaactctacaatgggaaagctaaataaatgcagctgaaactgttgacatctctggagagaatttcaatcttttagtttaggaatcacacatgtgatatacataggcatgcacacgtgaactgggttcttaactctagccatcacgggaaagatgggggaatcaagctcactttcttcccaatccctgcccasgggtctctaggcagggccccactgcctctggagatgcaaccacagtcctaaacaggaatccagggcagga

SEQ ID NO: 150256 - DNA, 637 bp, Homo sapiens
gaatataatggaaataattcaccagcaattgcttggataagaggtaaaaaatgtaaaaaggagaaatgtagacctggattgatgctgtctgttctactcacctgctttacagtttctcctatagttaccctctggacctcctctttttctccctctcccaattcacatttcaagtagttccctcaggccaggcacggtggctcaggcctgtaatcccagcaatttgggaggccgaggcgggtgaattgctagagctcagtagctcaagaccagcctgggcaacatggtgaaactccgtctctaccaaaaatacaaaaaattagccaggcayagtggcatgtgcctgtgtggtcccagctatttgggaggcttaggtgggaggattgcttgagccagggaggcaaaggttgcagtgagctaagatcgcatcaccacactgcagcctgggtgacagaatgagaccccatctccaaaacaaaaacaaaaacaaattaacaacaaaaaacaattatagttccctcattctccaccctaaactctctacctctgaagaattttactcaccaagttacaaggtatttctggccacaagctccactgtgaattttcaacagtataaaatggtgtctgaccaaaa

SEQ ID NO: 150257 - DNA, 637 bp, Homo sapiens
gaatataatggaaataattcaccagcaattgcttggataagaggtaaaaaatgtaaaaaggagaaatgtagacctggattgatgctgtctgttctactcacctgctttacagtttctcctatagttaccctctggacctcctctttttctccctctcccaattcacatttcaagtagttccctcaggccaggcacggtggctcaggcctgtaatcccagcaatttgggaggccgaggcgggtgaattgctagagctcagtagctcaagaccagcctgggcaacatggtgaaactccgtctctaccaaaaatacaaaaaattagccaggcatagtggcatgtgcctgtgtggtcccagctatttgggaggcttaggtgggaggattgcttgagccagggaggcaaaggttgcagtgagctaagatcgcatcaccrcactgcagcctgggtgacagaatgagaccccatctccaaaacaaaaacaaaaacaaattaacaacaaaaaacaattatagttccctcattctccaccctaaactctctacctctgaagaattttactcaccaagttacaaggtatttctggccacaagctccactgtgaattttcaacagtataaaatggtgtctgaccaaaa

SEQ ID NO: 150258 - DNA, 381 bp, Homo sapiens
atctccccactccatccctttttcagctccgcrtccattctgctgagagccacctccatcatccagtaaaatctctgcattcaccatccttcaaatctgtttgtgacctgattcttgctggacaccagacaagaacccaggtacaaagagtgcactgagctggttaacacttatgctgtctgtggatggtagagctaaaacagcactgtggcacacacactggggctttgagaatcacaggcacccacctgtagaagctaccgtggggccggagcccaaaagcacttgccctggctcctgaacctgcctgtctgcgtgcccctcctcccataaggggtttgagcatgcagcagccgaacagatgagccacacccctgttgc

SEQ ID NO: 150259 - DNA, 541 bp, Homo sapiens
tgggtggaatggctctactcccacaccgagttatgacctgtagtctaaagtgggaggcactggggtaacttccacgtgtactaaatggcattcatctaccacccacgaagtgaactcaccttggattagcagtcagcagaagctatatgccaacaagatagctgataagtagctcagcctaacactcargttcctctctgtcatctttccaataaaccttccctgacctctccttcttcccttatatgttcttgttacactatgaattctgcactgctctcccaagcttgccctagacagtactttcctgcctcagagtctctgcccatgcagttctcttcgtttaggctgcatctaaatactgtctatcaaaacagatctgctcaaatgacatcttctctatgggacctttcctcatttcgcagactgccacctgggagggcttcctcctccctctgagcccacgtaactcttggcttgctattccagccctcttctctcttagcagctccctaatgctctaagctgtccctatatcagc

SEQ ID NO: 150260 - DNA, 534 bp, Homo sapiens
cttaaatgtacgctattaaagttgactttaagatygcataatgcatctgatagaaagtaatttacctgaaacacctttgaaaggctgcatctggccatgcctgtacctaatctacatatttataattcctaaaactccttcaaagtggaaagagctaattaaattgcacaaaaacctcacacaaatacttgtgctacttcttcctaaatttctattctgctttatggcgtataatacacctaactgattattacaaggaggttctgtttggtccaaacatgaaatgtcaattttcttccaactgctcctgcaatactgggagttaataaattcaaaaaaaggaatttcaacgaaaggaattaaaaacctaattacacaaactctattttatttttgaatgtaataaccttagaagaaataaaatcaatctgatgccatattttccaaaagatgataatgttatgtattcacagtgtattgacagcggtccctatccattcccctaaagtttgacttttacctctgtgcttcagt

SEQ ID NO: 150261 - DNA, 548 bp, Homo sapiens
ttacaaaagtctagacactgcttgtgggcaagcactttttatcaatgtcattttgacatcccagatattccacagttgtgctgtctgccagcttgattccagatggaataaataaaagctatctgatgaygatactgtaatggtcctggacctttatgaggcgaagtgtgcttgtttggacaagtttcagtactggacgtggttcactcaggaagacacatggcagagaagaggaatacagtgcgggacaaactccatatgcaaatccttcccggggaggttgggaaatgctctgtggcgatgcttggccagtacactgactagaaagaagttcaagacaaactgccacttccttcaccttaggatcacaatatattctctactatcactgttctgagcagttatagcattaatttctagctcttaaatctcacaaatgcccctcagtgactcaggcttctcccctccttaatccttggtcccagcagcttcccatatatggatttacagacttgtgcctgttcactgaatgtcatggtatgcaaatg

SEQ ID NO: 150262 - DNA, 475 bp, Homo sapiens
ggaagaagattggtaaatgctcagaagagccgtcactgggcgtatctgtaacatgttgcttcatgacagtgtcacgtcaaagcccccaccttgacaggactgaagcaacaaaatgagctgctgttagagctttgagggagttttaattagacaactcatggcatctgccattctacaacacaaataaatgaccatgaatcacagcatatgaaaaagcagacatacaaagcaaggtttgaggacactgatgcttatagtagttgctgtaatagagcacaaacaaatcttcataaaagcaaccccaaattgttgagttttataggagagggtcttcagaagttatgtggtccaccacctcatttattctgaaatgtatatggtgatgatttattgaacatctrcaatgtgctaggtgccttcatgtgcattatcttaccaaagcctcagacctactcagcaatgcagatgccattat

SEQ ID NO: 150263 - DNA, 556 bp, Homo sapiens
acatcccactcatccttggatcccaagagcccgttgcatagtaggtgctcagtaaattctaaacaatcaccagcattttctatgagccattacatatgaaaacatggtccatatactttgttgaaatacaactgactcatagcattgaataaaattccttaaccaactcaactattatgttccttcatctaccaagaagamaattttacctgctcactcttctccacccagaggagctaccagaggccatgtgatcagactgggtggcataatgcctggcatctgatattactgcatgcagtaaatacgtgatgaactgcatgataaggcgttggttaaataacggggggaggggggaaacatcaagcacaggcactcacttgcatgtgataaaagcatgatagtcattagtgcagttcactacatattttctgttctccttgcaggcatatggtataactgtacttcccttcacctttgaatttaagtgtagccatgtacttcctttggccaataatgaggaaaagttacgtgggtcatttccagacagaagctt

SEQ ID NO: 150264 - DNA, 536 bp, Homo sapiens
acatgacatcattctgacctcctcctcttggcctccctctttcacttttgaggaccttgtgattatgttggacccacctgaataagccagagtaatctccctgtcagctgactggcaaccttaattcccctcgccatgaaacttaacatatccacaggttctggagattagaatgtggccatctttggggatgattattacacctaccacaggcttagaatgaagcgtgaggggagcagtctcttcccgtttttgctgcttctcttatgtggctctcagtagggactatgcttcagaaataactggcttgttggggacctaccacctggtaagggygccaattgcatctgcaggctggggacctctggcctggattaaactctttcctccagatcagacctgaatccatgaatgcactgcttggtgccaggaggcctgctttgttccatatgaatcacaaagccaagcagtgtcctgggctcttggagttcttatgacactcccagcaaggaaggagggctcagcttggcaggctg

SEQ ID NO: 150265 - DNA, 596 bp, Homo sapiens
atttttctaaaataagagaatcagtttccttaaaaatgacttcaacaatttaattattgcttgaaatcatataaaatgcttttaaaatagttttcaaaatatgactttttactgacaaaagcatgaatatgcatagtaggtttttattgcataatgacacattcttgcatatttgctaattaataatgattttttaatagtccagatatttaggactacgtttcccttcctacttagaagccagttttaagttagctgtatatacattactctgaatgtttacattatctccacaaggttgacattctgtgaaaaggtaggaattaagtagacttaagtcatattggggctgcaatttcccaagtcataataaaaagagagaatatttattctcaactccattgtaagaagaatatggagacttcaaaaggaatatctataattgtcccctatgccgtcattggttcatatgtggaaaagttctgaatgtattaaaatgtttgttccagtccaaatcaaactgtgtwgtatataagcaccctttctttctctgctcactacaaccaagccctaaccataaattgggtgatacagga

SEQ ID NO: 150266 - DNA, 596 bp, Homo sapiens
atttttctaaaataagagaatcagtttccttaaaaatgacttcaacaatttaattattgcttgaaatcatataaaatgcttttaaaatagttttcaaaatatgactttttactgacaaaagcatgaatatgcatagtaggtttttattgcataatgacacattcttgcatatttgctaattaataatgattttttaatagtccagatatttaggactacgtttcccttcctacttagaagccagttttaagttagctgtatatacattactctgaatgtttacattatctccacaaggttgacattctgtgaaaaggtaggaattaagtagacttaagtcatattggggctgcaatttcccaagtcataataaaaagagagaatatttattctcaactccattgtaagaagaatatggagacttcaaaaggaatatctataattgtcccctatgccgtcattggttcatatgtggaaaagttctgaatgtattaaaatgtttgttccagtccaaatcaaactgtgtagtatataagcaccctttctytctctgctcactacaaccaagccctaaccataaattgggtgatacagga

SEQ ID NO: 150267 - DNA, 568 bp, Homo sapiens
ttagtattagatggaattttattaaacttgtggaaagtcacattgcattttgcaaaagacacacaaaccttggtagcctgtttcaccaccacacagaaattctccacrtgatcaatctctctgctaggagtttggtgaaagcaagacccaagcagtggtgagattgagcctgtgtgctaaaactcagggtaacgtgaattgtagcaatgccatgagccactgcggaattggtttatagcaaacagacaagtcttgcaatgtagaaatcattgtagagtgtgttgaagcatctgctcagccaggatctacttctgccctgttttagcaaagtcactgctaaggtggggcctcgaggtctgtgagccaactcatgctggatgtgaattttgcacatatgtgagatgaggtccctagctttcactcgtttctccaaagaggttaataagaaagtttaggaatttctgatttcgataatggtctgtaaactggatttggttgtagttgtttttaaaatatatatgtgccatgctattgaaatattgcatatactctatagcgtgcaaaaaca

SEQ ID NO: 150268 - DNA, 554 bp, Homo sapiens
ggaaattagtattagatggaattttattaaacttgtggaaagtcacattgcattttgcaaaagacacacaaaccttggtagcctgtttcaccaccacacagaaattctccacgtgatcaatctctctgctaggagtttggtgaaagcaagacccaagcagtggtgagattgagcctgtgtgctaaaactcagggtaacgtgaattgtagcaatgccatgagcsactgcggaattggtttatagcaaacagacaagtcttgcaatgtagaaatcattgtagagtgtgttgaagcatctgctcagccaggatctacttctgccctgttttagcaaagtcactgctaaggtggggcctcgaggtctgtgagccaactcatgctggatgtgaattttgcacatatgtgagatgaggtccctagctttcactcgtttctccaaagaggttaataagaaagtttaggaatttctgatttcgataatggtctgtaaactggatttggttgtagttgtttttaaaatatatatgtgccatgctattgaaatattgcatatac

SEQ ID NO: 150269 - DNA, 591 bp, Homo sapiens
ggaaattagtattagatggaattttattaaacttgtggaaagtcacattgcattttgcaaaagacacacaaaccttggtagcctgtttcaccaccacacagaaattctccacgtgatcaatctctctgctaggagtttggtgaaagcaagacccaagcagtggtgagattgagcctgtgtgctaaaactcagggtaacgtgaattgtagcaatgccatgagccactgcggaattggtttatagcaaacagacaagtcttgcaatgtaraaatcattgtagagtgtgttgaagcatctgctcagccaggatctacttctgccctgttttagcaaagtcactgctaaggtggggcctcgaggtctgtgagccaactcatgctggatgtgaattttgcacatatgtgagatgaggtccctagctttcactcgtttctccaaagaggttaataagaaagtttaggaatttctgatttcgataatggtctgtaaactggatttggttgtagttgtttttaaaatatatatgtgccatgctattgaaatattgcatatactctatagcgtgcaaaaacataggaatcagaaagatct

SEQ ID NO: 150270 - DNA, 591 bp, Homo sapiens
ggaaattagtattagatggaattttattaaacttgtggaaagtcacattgcattttgcaaaagacacacaaaccttggtagcctgtttcaccaccacacagaaattctccacgtgatcaatctctctgctaggagtttggtgaaagcaagacccaagcagtggtgagattgagcctgtgtgctaaaactcagggtaacgtgaattgtagcaatgccatgagccactgcggaattggtttatagcaaacagacaagtcttgcaatgtagaaatcattgtagagtgtgttgaagcatctgctcagccaggatctacttctgccctgttttagcaaagtcactgctaaggtggggcctcgaggtctgtgagccaactcawgctggatgtgaattttgcacatatgtgagatgaggtccctagctttcactcgtttctccaaagaggttaataagaaagtttaggaatttctgatttcgataatggtctgtaaactggatttggttgtagttgtttttaaaatatatatgtgccatgctattgaaatattgcatatactctatagcgtgcaaaaacataggaatcagaaagatct

SEQ ID NO: 150271 - DNA, 525 bp, Homo sapiens
tttgatgttttgttttgcattaatttcaatttttaagaaatgttgcattaaaatgttatttatcttgaatagtaaatttcttagtgtccccttaatttcttagtgtgtctgagttgagagcctcccctgcctgattctagtccagaccctggggtgacagaagactggtgggagatgggaggtgaggaggggagtgttggktggagaggatgatctacagagtgctggagagactctgtatggagcttttcatgctgcctgtttgccagccctgaagctatgccttgaggttgggcaaggtggcatatcctagatcagagatcctcaactggggccatttttctccccagaggacatttggaaacatgtggagacatttttgatcatctgcgggggtggggagaggggctactgacatctggtgagtagagaccagagggaccattaaactttctacaacgcccaggacagcccctccacaataaagagttatttgacctcacatattaatagcacaaagttgag

SEQ ID NO: 150272 - DNA, 507 bp, Homo sapiens
ggacacgaaacatccttttccaaatgcaatctgttgggagcattagtagtaacttagcagtaattttcacagccgctctgtggaggagaaatggcttttatgttaaggagaatgggtggagtagaattacatttttggggggttacagtttctgcctttgttatactgatawcatgcatagacacacacacacacacacacacacacacacacacacgcagagtgtttgtgtatgttatggtaattatcttcaaggaactcaaatccctccaaagacattatctcatttgtttttattatgtgtgcccaagagatatatgtgattatttcagctccacatttagggaaggaacctaaagaacagagaggttaagggagtgaccccaatcacacagctggcccgtggactggccaggcaagagcaacgtctccagcctgcagtcggccagttcccacttcctcatctgccctggctctagattaataaagtcatgcacagcattgctg

SEQ ID NO: 150273 - DNA, 411 bp, Homo sapiens
gaattcgaataggctaagtgacccatttgtaacccatagaatgtggcagaagtgaaactgtgtggcttccaaggctaggtcagaaaggatgatgcaacatccgccttgtccccttgtccrttggagcattcactttttgagccccaagctgtgatgcgagaagtctaaccacctgaaggccaccatgctgtgaggaagcccaagccacatggagagagaccacatgtagacagtcttgcctacagtcctagcttagcctagccttgaatcatcccagctcaggtgacagatgaagatctgtcaatgaagatgccctcacccctgagatgactgtggccccagatgtttgtgtcagtgttccagtcttcccacctgggctccaggtgtcaaaaaacagaaagaatccatccc

SEQ ID NO: 150274 - DNA, 391 bp, Homo sapiens
ccatagaatgtggcagaagtgaaactgtgtggcttccaaggctaggtcagaaaggatgatgcaacatccgccttgtccccttgtccaytggagcattcactttttgagccccaagctgtgatgcgagaagtctaaccacctgaaggccaccatgctgtgaggaagcccaagccacatggagagagaccacatgtagacagtcttgcctacagtcctagcttagcctagccttgaatcatcccagctcaggtgacagatgaagatctgtcaatgaagatgccctcacccctgagatgactgtggccccagatgtttgtgtcagtgttccagtcttcccacctgggctccaggtgtcaaaaaacagaaagaatccatcccagctttaccattg

SEQ ID NO: 150275 - DNA, 579 bp, Homo sapiens
atttcactttcaagccctaagctagttgatataccccatggcaacagcagttgttgggaggtgggtggtgataggttaaaataatttttaagagttattccatgaaggaaaatttgggtcaactctgggttaatgagttttttttttaatttttaaaaattgtggtaataatacacataacataaaatgtaccatgttaaccatccttaagtgtacagttcaatggcgttagctacattcacattgctgtgcaatcgtcaccatcatccatctgcagcacttttgcatcattccaaacagaaactttttccccattaaaagaataactccctgttctctcttcccccagtccctggcaagctcccttctactttctgtctatgaatttggctattctatggatctcatacaatggtgctatagtcatccttttgggactggctkattttactgagcctaatgtcctccaggttcttccacattgtagtatgtgtcaaaacgtccttcctttttaaggggttaatgagtttttaatttagattatttctttttaaggaaagaaggaagatctggccaggt

SEQ ID NO: 150276 - DNA, 364 bp, Homo sapiens
tatgaaaaacccaaagctgtatttatagcctgagcttaaaatgtaaaacaatatgtgtaacaacagcctggragagaagacacccaacagtggagcaggtgtcctctcagggtggtgcaattacaggtatacttttcccccttacactcctatgcatatgttcttttttgctttattaagcatatattacatttaagaacagaaaaaacataaaatttcaatttggaaccacaagctggtcatttacaccagttctactcaaactgtaatatgcgcatgctcacctgggaacttatttaaaattcagactctgattaagtttgaggcaaattctgagattctagatttatgttgatgctgtggg

SEQ ID NO: 150277 - DNA, 364 bp, Homo sapiens
tatgaaaaacccaaagctgtatttatagcctgagcttaaaatgtaaaacaatatgtgtaacaacagcctggaagagaagacacccaacagtggagcaggtgtcctctcagggtggtgcaattacaggtatacttttcccccttacactcctatgcatatgttcttttttgctttattaagcatatattacatttaagaacagaaaaaacataaaatttcaatttggaaccacaagctggtcatttacaccagttctactcaaaytgtaatatgcgcatgctcacctgggaacttatttaaaattcagactctgattaagtttgaggcaaattctgagattctagatttatgttgatgctgtggg

SEQ ID NO: 150278 - DNA, 364 bp, Homo sapiens
tatgaaaaacccaaagctgtatttatagcctgagcttaaaatgtaaaacaatatgtgtaacaacagcctggaagagaagacacccaacagtggagcaggtgtcctctcagggtggtgcaattacaggtatacttttcccccttacactcctatgcatatgttcttttttgctttattaagcatatattacatttaagaacagaaaaaacataaaatttcaatttggaaccacaagctggtcatttacaccagttctactcaaactgtaatatgcgcatgctcacctgggaacttatttaaaattcagactctgattaagtttgmggcaaattctgagattctagatttatgttgatgctgtggg

SEQ ID NO: 150279 - DNA, 438 bp, Homo sapiens
ggatttcttctttgtttcctgaggccaggacccaactgtctcttctaaactcgtgaactttttttttttttttgagatggagtctcactctgttgcccaggctggagtgcactggcgcaatctcggctcactgctagctccacctcccgggttcacgccattctcctgcctcagcctcctgagtagctgggactacaggagcctgccaccatgcctggctaattttttttttttttggggggggggtattttttagccaggatggtctcgatctcctgaccttgtgatctgcctgcctcagcctcccaaaatgctgggattacaggcatgagccaccgcacctggccaaaactcatgaactcttaaagcaaccatgtgttaatgaggccagtatgagatgggagtaggcacttmatcttcatctcatcaaataagcaa

SEQ ID NO: 150280 - DNA, 665 bp, Homo sapiens
attttttaactccaggaggtatgagaacttgaaatcgacatttagtcacagaaaaatagaagttctttttttgtacccttcaatttcatgatctgtgaaaacatcacatattcggtaagtttctttagatggtaaatttctgatctaataacaaacattttactaagactctttatatatacatttaatgatttttcataaaagctctactaattattctcccaagccacaagctcactagtactgagtattatcataatttaaatatttcccagtttgatttttaaaagcayagttatctggtatccaattttaccataatttgaagccatttgtattcttctgtgaaatatgtattcaagaccattgctcattttactttatgggtattagttcttttattgatttggttgatcttgcctacattccttcccacctccacctgccttttttttttcttcttcttctggtgaatagttattttgttctgttcaggtttgcaaactatatcttcaaccagcttaagaaacaaagaacctccagtttccttggacaacttcttaggagaggaggagagattgtaaagcaacaataacaacaaatttctcagctaagaaagtctcaaagttcccgctttctacaagattgttcttgttttagaaagg

SEQ ID NO: 150281 - DNA, 665 bp, Homo sapiens
attttttaactccaggaggtatgagaacttgaaatcgacatttagtcacagaaaaatagaagttctttttttgtacccttcaatttcatgatctgtgaaaacatcacatattcggtaagtttctttagatggtaaatttctgatctaataacaaacattttactaagactctttatatatacatttaatgatttttcataaaagctctactaattattctcccaagccacaagctcactagtactgagtattatcataatttaaatatttcccagtttgatttttaaaagcacagttatctggtatccaattttaccataatttgaagccatttgtattcttctgtgaaatatgtattcaagaccattgctcattttactttatgggtattagttcttttattgatttggttgatcttgcctacattccttcccacctccacctgccttttttttttcttcttcttctggtgaatagttattttgttctgttcaggtttgcaaactatatcttcaaccagcttaagaaacaaasaacctccagtttccttggacaacttcttaggagaggaggagagattgtaaagcaacaataacaacaaatttctcagctaagaaagtctcaaagttcccgctttctacaagattgttcttgttttagaaagg

SEQ ID NO: 150282 - DNA, 483 bp, Homo sapiens
aataaaaaaaaggaaactgaattgtgcctaggtgttgatgctttgggtctgaatatttatgagcatgatgacaarttaacacctaaaactggttttccgtggagtgaaatcagaaatgtttcatttaatgacaaaaaatttgttataaagccaatcaataaaaagccacctgattttggtttttatgcccctcacctgagagtcaataagcagattttggccttatgtatgggaaaccacgaactatacatgcgaagaaggaagcctgatactattgaagtatgacagatgagggctcaggctagggaggagaaacatcagaagcagttggagagggcacaattagagaataaaaagaagaaaagagaaatagcagaaaaggaaagaatagaatgtgaaaaggaagagctaatggaacgtctaaaacaaatagaagaacagacgattaaagcccagaaataactagaagaacagacgcaaaaa

SEQ ID NO: 150283 - DNA, 521 bp, Homo sapiens
ctgcctcttttatcacccgggagcctcagggctcttttagcctcccctgggttatccatatacagcttatttataataaaaatggtacagaggagaggctgattgccattggccccagcctcatctctgggatggctccaacagctgttgkttcataactctttgcctactttacacgctgaatatgctagggcttgggctgggagtgggaaggggatggagtactgcttggacttcttgtcatgtcaaactagtgccatatgccattcagtcattaatccatttacttattcatccaacaaatatttactgggtacctgctctgtgccaagcacttgtgctgggtgctagggataaagatgacaacaagctgtccttgccctcaaagggcttactatctggtaagtgctgattatgtataatctgtcatcttattatgtaggtgcatctggttttgagcttcagcaaaggggaaaggggaaggtgaagctgttggaatgcccacactttgcagtctccag

SEQ ID NO: 150284 - DNA, 624 bp, Homo sapiens
agtgctctttgggcctcctctctgtgagtcttgtgttgagaagggctactgctgtgccatggaaaccaaagctgttgtagtggataggctaaggctaaggctctgggtctcctaggcacacctgcaagatagcacctatactatttccactggtattaaggtatgaaagagtcttacattttagtccagacacgtagcaacatgcattcattaaatactttaaggaaatatctgcattgtgccaatgctgtgctggaccctgtaggaagacctggaatgaatcatgttctgccctgaagggacaacatgagtgttctgtagaggtacacagtacttctgaggcccagatgagggctagtgaaggtatcctatagacaaggtgacatgttacctctgcctttaagggtggatagagctttattctatggaggtggcagaataggacattctaggcagagtaaacaacctgagcaagagtacaaaagctaaaatatgaaaagtatgctcagrgatagaagtaaccccctatgggctgaaagctttttacctgttacctacttctatatttcatttcaatagcatatcagcaggtttatatatatataatgacagtgggttattgta

SEQ ID NO: 150285 - DNA, 624 bp, Homo sapiens
agtgctctttgggcctcctctctgtgagtcttgtgttgagaagggctactgctgtgccatggaaaccaaagctgttgtagtggataggctaaggctaaggctctgggtctcctaggcacacctgcaagatagcacctatactatttccactggtattaaggtatgaaagagtcttacattttagtccagacacgtagcaacatgcattcattaaatactttaaggaaatatctgcattgtgccaatgctgtgctggaccctgtaggaagacctggaatgaatcatgttctgccctgaagggacaacatgagtgttctgtagaggtacacagtacttctgaggcccagatgagggctagtgaaggtatcctatagacaaggtgacatgttacctctgcctttaagggtggatagagctttattctatggaggtggcagaataggacattctaggcagagtaaacaacctgagcaagagtacaaaagctaaaatatgaaaagtatgctcagggatagaagtaaccccctatgggctgaaagctttttacctgttacctacttctatatttcatttcaatagcatatcagcaggtttatatatawataatgacagtgggttattgta

SEQ ID NO: 150286 - DNA, 582 bp, Homo sapiens
ttatctgtatcaaaatcagatttatcatgtctgaaaggatacagtagaaactgcaggttaaagcagtcaaggattttatctgaaaaaatcagctagcatgggaaccagaatgctggggacatggtactgggtccaggatatcagaaccaacaagaggggccctggtggagcaggttggactgataccaggacagggrtattcttctcttaggcttattgcatgtagcccatgtgctgcatgtgatctaacttaaggaaggccagagatcagcaggaaaactatcttcctgagataggcagaacacaggtactgaagctaagaatatacttcacactgactgggatacttataataataatagtttttaaaaatggaaaacttgtgttggcgagggtatagagaaattgaaaccctgtatattgctggtgagaaggtaaaacggttcagctactgtgtaaaatagtctggtggtttctcagaaattagacacagagttaccctagaacctagcaattccacacttaggtatatatgcaaagaattgaagacaagtactcaaacaagtacatgtacatgcattt

SEQ ID NO: 150287 - DNA, 640 bp, Homo sapiens
gcaaatattgtttttatatttttctactgatgcttgtcaaaggaaatatttgaaaatcgccggctggaatctgaggaaaatactaaggagctctttgccaggagacttctgaaaggggtagggacatgcctgctgggtgtttacmaaaagtcccttgatctgtgcccctctagactttatttcccctctgagcatggactaaaaatccctatttcagttctattctttaatacccatttaggaggcctgtactggctctgacctgtattctgaacttaggatgagttcttaaggctgagtgagcagacacttagacctcatcatcagtcatttagcacacaaacaccccagagaacctagacttgttacagctgtgagctatggccaccttactgagctataataaaaattctgttattggtctgaggcttgacatatcttcaattaaaggtttgtcatgcagtagccaagagggtctgctgagggaacaggtgccatctgtccacagcagcctcagaacttgggaagagggaagagggaagagggatcagactggctcagcagagggccacctcaaggtccattttctgacagtagatggcatgcttaatcctccccatgtgaccacagagtagcacac

SEQ ID NO: 150288 - DNA, 479 bp, Homo sapiens
gccacccaaaaaggattcttgggaaatggggtccgtgccagtgatggaagcaggcctgcccagcagagayacccacgtgcaaccactgccaggaacaggccgcagggagattagctttggcaggaactggcagagggaagcagggacctcggcctgccaagtgcccacagaggggagagggggactggatcccagccttggcaggaacgagctcccagtaggactcggctcccaggagtgaggcaggcagctgtgccaggtctcgcgaaggaaggagggtaagaaactgttggtctgcagggccgcactcatgggcctgccctctggcagagggggtgccagagtctcctctgggatctccctatgggatggatttggcactcacaaccctcttcacgatagccgaggaagactgcaggcctgccaggtcttgccctctgtccccgctgcaaagcggccaggcacccaaaacagaattc

SEQ ID NO: 150289 - DNA, 479 bp, Homo sapiens
gccacccaaaaaggattcttgggaaatggggtccgtgccagtgatggaagcaggcctgcccagcagagatacccacgtgcaaccactgccaggaacaggccgcagggagattagctttggcaggaactggcagagggaagcagggacctcggcctgccaagtgcccacagaggggagagggggactggatcccagccttggcaggaacgagctcccagtaggactcggctcccaggagtraggcaggcagctgtgccaggtctcgcgaaggaaggagggtaagaaactgttggtctgcagggccgcactcatgggcctgccctctggcagagggggtgccagagtctcctctgggatctccctatgggatggatttggcactcacaaccctcttcacgatagccgaggaagactgcaggcctgccaggtcttgccctctgtccccgctgcaaagcggccaggcacccaaaacagaattc

SEQ ID NO: 150290 - DNA, 479 bp, Homo sapiens
gccacccaaaaaggattcttgggaaatggggtccgtgccagtgatggaagcaggcctgcccagcagagatacccacgtgcaaccactgccaggaacaggccgcagggagattagctttggcaggaactggcagagggaagcagggacctcggcctgccaagtgcccacagaggggagagggggactggatcccagccttggcaggaacgagctcccagtaggactcggctcccaggagtgaggcaggcagctgtgccaggtctcgcgaaggaaggagggtaagaaactgttggtctgcagggccgcactcatgggcctgccctctggcagagggggtgccagagtctcctctgggatctccctrtgggatggatttggcactcacaaccctcttcacgatagccgaggaagactgcaggcctgccaggtcttgccctctgtccccgctgcaaagcggccaggcacccaaaacagaattc

SEQ ID NO: 150291 - DNA, 576 bp, Homo sapiens
ttgggggatgggggaagtcagaagaaccaccagtgaatatraaaggagaagagaatcagagccatctgctaataaaatgggtagtcagctctttttgttttttttgtcttgttttgttttgagacagtctcgctctgtcgcccatgctggagtgcaattgcgtgatctcagctaactgcactttccgcctcctgggttcaagtgagtctcctacctcagtctccccagtagctaggattgcaggcacatgctaccacacctggttaatttttgtatttttagtagagacggggtttcacgatgttggccaggctggctggtctcgaactcctgacctcgtggaacgcccacctcggcctcccagagtgctgggattacaggcatgagccaccacgcctagctccggtagtcagctcttactgagaatattcaaagacagggcattcattttgtaagagacattccttccttcataggaagattggacctggtcttttagttcctcccaattttgagattctgtgagattgaatcggggcagagaaacatacttaatcttgaaagattaagtagaat

SEQ ID NO: 150292 - DNA, 198 bp, Homo sapiens
gtgtcattttttgttgctttgatagtggccatcctcatgggtgtcaggtgatatctcactgtgcttttgatttgcaattctctaatgattagtgatgttaagcatcgtttcacatgtatgccttttttggataaatgtctgtttaagttatttgttcattgttcaatcargttttttgttgttgagttataggaattc

SEQ ID NO: 150293 - DNA, 374 bp, Homo sapiens
attacaggcatgagccactgcgcctgacctggacagtttaataatatagattcttccaacccatgagcatagagtgcttttccatttatttgtgtcatctatgatctcctagacttgataaacaacttaagcatagtctcaggaaacaaaatccatgtacaaaaatcagtascatttctatattccagtaagcttcaagctgagaatcaaatcaagaactcaatcccatctacgataaccacacacacaaaatacttaggaatacttctaaccaaggaggtgaaagatctctatgaggagaactgcaaaacactgttgaaagaagttttctactgtttttaaggaaatagaggatcacttagcaatctgaattc

SEQ ID NO: 150294 - DNA, 514 bp, Homo sapiens
gaattcagccaccatattgtgaggacactcaagcagccctgtggataagccacatggtgaggaagtgaggcctcctgctaacagccagtcccaattccccgtctatgtcagtgactcatcctggaatcagagccttttggcagtggagcctataaatggctgcagctctgatcaataacttggctacaatctcatgagaaacctcaaatctgagccatcctgctaagyaaaccattccagaattactgccccacagacactatgtgagataataaatgtttattgttgctttaagccactaagttttttaataaacttttttaatagagatgaggtcttgctccattgcccaggctcatctcaaactcctgagctcaagccatcctcccacctcagtctcccaaagtgctgggattacaggtgagagccaccacacccagactgttttttaataatttgttatgcagcaatagataggtaatacaaatggtcatccattctttatttaaatcct

SEQ ID NO: 150295 - DNA, 513 bp, Homo sapiens
tgaggacactcaagcagccctgtggataagccacatggtgaggaagtgaggcctcctgctaacagccagtcccaattccccgtctatgtcagtgactcatcctggaatcagagccttttggcagtggagcctataaatggctgcagctctgatcaataacttggctacaatctcatgagaaacctcaaatctgagccatcctgctaagtaaaccattccagaattactgccccacagacactatgtgagataataaatgtttattgttgctttaagccactaagttttttaataaayttttttaatagagatgaggtcttgctccattgcccaggctcatctcaaactcctgagctcaagccatcctcccacctcagtctcccaaagtgctgggattacaggtgagagccaccacacccagactgttttttaataatttgttatgcagcaatagataggtaatacaaatggtcatccattctttatttaaatccttccaggatcagagaattc

SEQ ID NO: 150296 - DNA, 514 bp, Homo sapiens
gaattcagccaccatattgtgaggacactcaagcagccctgtggataagccacatggtgaggaagtgaggcctcctgctaacagccagtcccaattccccgtctatgtcagtgactcatcctggaatcagagccttttggcagtggagcctataaatggctgcagctctgatcaataacttggctacaatctcatgagaaacctcaaatctgagccatcctgctaagtaaaccattccagaattactgccccacagacactatgtgagataataaatgtttattgttgctttaagccactaagttttttaataaacttttttaatagagatgaggtcttgctccattgcccaggctcatctcraactcctgagctcaagccatcctcccacctcagtctcccaaagtgctgggattacaggtgagagccaccacacccagactgttttttaataatttgttatgcagcaatagataggtaatacaaatggtcatccattctttatttaaatcct

SEQ ID NO: 150297 - DNA, 570 bp, Homo sapiens
aaatttggaaaaagtaatagttttgaaaccaagaatagacaaatgccatgggtaacttacataacaatgtctctagctataaataggagctcaaaatgacgtagattaagacttgaatgggcctgaaggctaggcagggtttttcctgctagtaagagggtgacacaggaagtgaggaycaaggcagagttgtaagcaagatggagacttacttaaagagactgatctgactaaagcagagagctcatggagaattgtggaggaaaaaaaaaagacaattaaaattgtataaactaatgaagccaggtaatagagggccttgcaagttgtgtaggagtttatatttgaattaggaagcagtgggaaaccattatagattcttgaacagggaaataatatgacaaaagcaatgttttagaaaaataatatatcaattatttttgaaaaatttagaagagagtatcttgagttttttctgatgcataaatcctctcctggcattgtaattcagcaaccagttcttaaagatttcatgttttccactgtatttaattaaatgccttacctggt

SEQ ID NO: 150298 - DNA, 567 bp, Homo sapiens
acaattagatccaggtgtattactaattttatgaaattttgttgtgatcattaatttgccrttgtagatccatgttttctttgtgcatagaagtttattttagatcttgaagtcatgacattttagttaaaactgaaggaatactttttctctttaatttgcaaataatgtgaaagcaaaaattgttttaaaattttctattttaattagtatggctactgaataccgagaaaaatggaggattataaaaatgatgttaagttgattgtgatttactagtaactttaatgtgcattgataatatgaaaactactcgatatgtagtttggttaatttagtaataattcaacaaatgattccttcagaatagtggaagactcaagattcaagatttgtaggatttccttttttgctatttttatctagtgtatttttaagtggcctcaaataaaggcagtgaagaaatgttttatttttcctcatacatgtgaaatacatctggacgaataaatccacatctggttcatggatttcctccatggagatgatccaaattcagtgtcaaga

SEQ ID NO: 150299 - DNA, 626 bp, Homo sapiens
aattgcttgatatgtagtgtagattgaagtctgcagctttagttgccaaccatttcagacagagattcatttataaacagatgacataaactttcagtattgataaatacagtacaatactataaatgyattttctctcccttatgattttaaaacgttttcttttctgtagcttactttattgtaagaatactatatatatatatatatatatatatatatatatatatatatatatatataatgtgcaaaatatgtgttgtttattggtaaggcttctggtcagcagtaggctctcagtagctaagttgttgaagagttaaaagttatgtgcagatttttgacggctctaggggttggggttcctaactcccaagttgttcaagcgtcatctgtatatttagaagataaaaatgacaggactcattaaggaattgaatatcggacaggagggaaacataattgatgttggtacttctagcttgttagattttatgtaatcagtgagtgcattaaagtatttacttaacaaataatttgtttctactgagttactttttatttgtattcttggttttataaaatgaatacaacttgtaaatacagtttgagaggtaaacagactg

SEQ ID NO: 150300 - DNA, 626 bp, Homo sapiens
aattgcttgatatgtagtgtagattgaagtctgcagctttagttgccaaccatttcagacagagattcatttataaacagatgacataaactttcagtattgataaatacagtacaatactataaatgtattttctctcccttatgattttaaaacgttttcttttctgtagcttactttattgtaagaatactatatatatatatatatatatatatatatatatatatatatatatatataatgtgcaaaatatgtgttgtttattggtaaggcttctggtcagcagtaggctctcagtagctaagttgttgaagagttaaaagttatgtgcagatttttgacggctctaggggttggggttcctaactcccaagttgttcaagsgtcatctgtatatttagaagataaaaatgacaggactcattaaggaattgaatatcggacaggagggaaacataattgatgttggtacttctagcttgttagattttatgtaatcagtgagtgcattaaagtatttacttaacaaataatttgtttctactgagttactttttatttgtattcttggttttataaaatgaatacaacttgtaaatacagtttgagaggtaaacagactg

SEQ ID NO: 150301 - DNA, 626 bp, Homo sapiens
aattgcttgatatgtagtgtagattgaagtctgcagctttagttgccaaccatttcagacagagattcatttataaacagatgacataaactttcagtattgataaatacagtacaatactataaatgtattttctctcccttatgattttaaaacgttttcttttctgtagcttactttattgtaagaatactatatatatatatatatatatatatatatatatatatatatatatatataatgtgcaaaatatgtgttgtttattggtaaggcttctggtcagcagtaggctctcagtagctaagttgttgaagagttaaaagttatgtgcagatttttgacggctctaggggttggggttcctaactcccaagttgttcaagcgtcatctgtatatttagaagataaaaatgacaggactcattaaggaattgaatatcggacaggagggaaacataattgatgttggtacttctagcttgttagattttatgtaatcagtgagtgcrttaaagtatttacttaacaaataatttgtttctactgagttactttttatttgtattcttggttttataaaatgaatacaacttgtaaatacagtttgagaggtaaacagactg

SEQ ID NO: 150302 - DNA, 573 bp, Homo sapiens
gtaattaatccatttatgcctagtgttccattattggaatgctaagcttgtggaagttatttatatcctgctgctcagggtcatcgccaaggtctgattttttcacaaaagaaatttgcaacctccaatataaatgggttaataaatatttgttgaattaatgagtgtattttaagacatatccgatgctctctttccttctgaagacttgagtttccatctagcaaccttcagaaatcttttagcattgtatgtgcagaccagtcatgaggctctgttcctttttccccccaatttgctttttctcagttcttcaaattcggtaatttattsatctgttttcaagtgtacctttttctctgtcgtcttcattctgctgttaagccatcagtgaatgtttttattttagatactgtatttttcagatctagaatttctactttgttattttttaggtttctattgctttgttaatttttcaaacttgttgtgttgtatttttctctgcatcattaagcagaatcataatagttgcagcaaaatctatgctgattccaacatctggatcatcct

SEQ ID NO: 150303 - DNA, 569 bp, Homo sapiens
tttttgttagtcaaggaattttagattgtgttttggatattgtgaatatgaagttgtggagcctctgaattccattatattcctccaaagagtgttgatgcttgttagcaggcagttaacatgatgggacaaaaactgcaagctctgtctcttgagcagtagttcttagttcagttcttttatctctacctggactgcttgcagtctgtcctttgcgtgtttggttcaggggtcagccagaaatttgtacagagtttgtaactagattttgtgtctctacctttctgggtctcttcttcctaggatgtgtttctcacttttcagcaactgtggtcttcctgaactctgtcctttgattcttcaagatagtaaaacagtggsgtttatcttagagttttaggtacttgctatggtgctgactggatctgccctcaggccaaaagttgtagatgggaaattcacctaataccatactcttccaagtactgactgccctctaatatttgtctgcttttggtcactcttcagtgcctgatttttatattttggtatatacctatttatatata

SEQ ID NO: 150304 - DNA, 510 bp, Homo sapiens
gttttatctatgagaaataggatgtgccaagtgaggaattaaataaagggctttctaggaagaagagagaagaacacaaatatgtatgtgggggcctaacaatgaatgacaggttggaagaattgcaagtagttttggtggrgccacagtatagggtatatatggggaaagggggaagtgtcaaaatatgaggccagagaagttaaactggagccagatgattcaaggccttgaatctcatgtcaagaactttgaactttaaatcatagatagtgggaagccattggtgcattttaaatgtgagtatgatttcaaatttgcatgttagaatgattattttggtagcaatgtatagggtaagaaacaggaggtagggataccaagtcaggcaagaaattatgaaggcctaagggagtggtggtagaaaggagggatgaactcacatgagaatttagcaatagaagctataggtcttggtaacagatttgttgtatgtgctgtaaatgttaa

SEQ ID NO: 150305 - DNA, 482 bp, Homo sapiens
caagtgaggaattaaataaagggctttctaggaagaagagagaagaacacaaatatgtatgtgggggcctaacaatgaatgacaggttggaagaattgcaagtagttttggtggggccacagtatagggtatatatggggaaagggggaagtgtcaaaatatgaggccagagaagttaaactggagccagatgattcaaggccttgaatctcatgtcaagaactttgaactttaaatcatagatagtgggaagccattgstgcattttaaatgtgagtatgatttcaaatttgcatgttagaatgattattttggtagcaatgtatagggtaagaaacaggaggtagggataccaagtcaggcaagaaattatgaaggcctaagggagtggtggtagaaaggagggatgaactcacatgagaatttagcaatagaagctataggtcttggtaacagatttgttgtatgtgctgtaaatgtta

SEQ ID NO: 150306 - DNA, 489 bp, Homo sapiens
atgcttttataaaggggagttcccctgcacacactcacttgcctgctgtcatgtaagatgtgactttgcggctgggcactgtggctcacacckgtaatctcagcactttgggaggccgaggcaggtggatcatttgaggtcagtagttcgagactagcctggccaatatggtgaatccctgtctctactaaaaatacaaaaatcaactgggtgcagtggtacacagctgtaatcccagctagagatttgcttgaggcagaagaattgcttgaacctgggaggcggggggttgcagtgagctgagatcgcgccactgcactccagcctgggcgacagagcgagactccatctcaaagaagaaaaaaagatgtgactttgctcctcatttgccttccaccatgattgtgaggcctccccagccatgtggaattgttagtctattaaacttcttttttttaaataaattaaccagtctcggtcatgttttta

SEQ ID NO: 150307 - DNA, 489 bp, Homo sapiens
atgcttttataaaggggagttcccctgcacacactcacttgcctgctgtcatgtaagatgtgactttgcggctgggcactgtggctcacacctgtaatctcagcactttgggaggccgaggcaggtggatcatttgaggtcagtagttcgagactagcctggccaatatggtgaatccctgtctctactaaaaatacaaaaatcaactgggtgcagtggtacacagctgtaatcccagctagagatttgcttgaggcagaagaattgcttgaacctgggaggcggggggttgcagtgagctgagatcgcgccactgcactccagcctgggygacagagcgagactccatctcaaagaagaaaaaaagatgtgactttgctcctcatttgccttccaccatgattgtgaggcctccccagccatgtggaattgttagtctattaaacttcttttttttaaataaattaaccagtctcggtcatgttttta

SEQ ID NO: 150308 - DNA, 489 bp, Homo sapiens
atgcttttataaaggggagttcccctgcacacactcacttgcctgctgtcatgtaagatgtgactttgcggctgggcactgtggctcacacctgtaatctcagcactttgggaggccgaggcaggtggatcatttgaggtcagtagttcgagactagcctggccaatatggtgaatccctgtctctactaaaaatacaaaaatcaactgggtgcagtggtacacagctgtaatcccagctagagatttgcttgaggcagaagaattgcttgaacctgggaggcggggggttgcagtgagctgagatcgcgccactgcactccagcctgggcgacagagcgagactccatctcaaagaaraaaaaaagatgtgactttgctcctcatttgccttccaccatgattgtgaggcctccccagccatgtggaattgttagtctattaaacttcttttttttaaataaattaaccagtctcggtcatgttttta

SEQ ID NO: 150309 - DNA, 497 bp, Homo sapiens
atatagcattagtaactgttttattaagctacttgagtgtgygtgttttgtttttgttttttgtaaacaaaatagtcattaaacagaagaatataaagtaaaaagtctcctttccaagaaaaaagaaataatcttgcacactcagtcctacttcctcaaaataagacctcttttctgtcagtttttgttctgttggtggatgctttatgagcaatgaatatattggacaactttagacagcatctattagttctccaatatgaaggatggggaattttgtatttttaataattatcttctccttctacctcctgatatctgtttgctatgttaatatttaatattgtcagtctagaggatactttattacattaaacctctatttcttgaattatcaaatgtatagtgtccattgattacctactatgaaaggcaaggaaagtggtatacttatactttctatttttagctcctgtattatttatgattttttaaaa

SEQ ID NO: 150310 - DNA, 604 bp, Homo sapiens
tccatgggttaatggactttatggtaggaagagccaagtgtaacctcccaaagttctttttaccaaagcagtctcacatcctgaatctcagagattagtgccatattaaagacttgaaaggttcagcctgctractctggttttacctatgcagaagatagatacattttggagaatgatggtgtattatcataagctgcttctaccactccagttgtatatttggttccacatgtggtctctttgctagaaacagaacttggtagaaacaggcacttgctagaaacagaactttgctagaaacaggcacttggtagttaactatttgatctatcaaatgccttactgaatctaattaaccgagaacatcagaaatacccagcagtatagtacaccgtcatcatattgcctccatggttaggtcagtattttggctctgtgccatcatttagtctgtagggattttgttcatctcactatcccacagtacgttatcctggtcccctacagtgatgacatcatgctaattgataggacattgtgatagagaactagcagacaccttagatcctttgtaaagacactaaagacacagctgatgatg

SEQ ID NO: 150311 - DNA, 604 bp, Homo sapiens
tccatgggttaatggactttatggtaggaagagccaagtgtaacctcccaaagttctttttaccaaagcagtctcacatcctgaatctcagagattagtgccatattaaagacttgaaaggttcagcctgctaactctggttttacctatgcagaagatagatacattttggagaatgatggtgtattatcataagctgcttctaccactccagttgtatatttggttccacatgtggtctctttgctagaaacagaacttggtagaaacaggcacttgctagaaacagaactttgctagaaacaggcacttggtagttaactatttgatctatcaaatgccttactgaatctaattaaccgagaacatcagaaatacccagcagtatagtacaccgtcatcatattgcctccatggttaggtcagtattttggctctgtgccatcatttagtctgtagggattttgttcatctcactatcccacagtacgttatcctggtcccctacagtgatgacatcatgctaattgataggrcattgtgatagagaactagcagacaccttagatcctttgtaaagacactaaagacacagctgatgatg

SEQ ID NO: 150312 - DNA, 426 bp, Homo sapiens
tgaatcactactgggctacaccttccttggaagagaaatattttcagccaaagaagctaattagccacatacgaagacctatttttagatttttagtactaattttcatatcttttcatttactctatcatgtcttccctttgaaagtttcatatttatatacaaattgaactctttaatttttccttacaaagtagttaycttgtcatttctatcaattctttccatttttatcatattttgacaagatttcttcacatgtatcataagtattatgttctaatcatcatcaaaactgaataggaagaattctattcctgtcttaaagtacaagaactgtgtagtcaatcctctcccctaccctccccaccaaaatctttgtactgccgggtgctcctattatgaataatccatatttcataatct

SEQ ID NO: 150313 - DNA, 426 bp, Homo sapiens
tgaatcactactgggctacaccttccttggaagagaaatattttcagccaaagaagctaattagccacatacgaagacctatttttagatttttagtactaattttcatatcttttcatttactctatcatgtcttccctttgaaagtttcatatttatatacaaattgaactctttaatttttccttacaaagtagttatcttgtcatttctatcaattctttccatttttatcatattttgacaagatttcttcacatgtatcataagtattatgttstaatcatcatcaaaactgaataggaagaattctattcctgtcttaaagtacaagaactgtgtagtcaatcctctcccctaccctccccaccaaaatctttgtactgccgggtgctcctattatgaataatccatatttcataatct

SEQ ID NO: 150314 - DNA, 541 bp, Homo sapiens
aagttacttgtgattgttaaaagcacttggtgattaatgatttatacatcatctatttccaaaaagtttggggcagcttaaataaaagcactttcacacaaggcagtaaaaacaaaataaagatgagaaaccatcaagagaaataaatgggggaaatagtgaatgtaccacaaaacctgggtaagatcatttttgtaataggagcactacgttttagctatgtggttcctggcagccaaaataaaaggataacaggaaagattacctataattcattggttaacgaaggaaaacagatcttcagaagaatttttgtttcctggcactaaattctatgaggagtatatcccatacattcttagataagagacagtgacatgttagacaatgtgatgaacagtggttctgctgaagatgcaggtttgctttaagttgctgtttctttaargccttgaaggtcaagtgtgcaatattaagatgaggttggtaaaagccaataaggcagtaatatttcttgtgggcatagaccagatgggcatct

SEQ ID NO: 150315 - DNA, 541 bp, Homo sapiens
aagttacttgtgattgttaaaagcacttggtgattaatgatttatacatcatctatttccaaaaagtttggggcagcttaaataaaagcactttcacacaaggcagtaaaaacaaaataaagatgagaaaccatcaagagaaataaatgggggaaatagtgaatgtaccacaaaacctgggtaagatcatttttgtaataggagcactacgttttagctatgtggttcctggcagccaaaataaaaggataacaggaaagattacctataattcattggttaacgaaggaaaacagatcttcagaagaatttttgtttcctggcactaaattctatgaggagtatatcccatacattcttagataagagacagtgacatgttagacaatgtgatgaacagtggttctgctgaagatgcaggtttgctttaagttgctgtttctttaaggccttgaargtcaagtgtgcaatattaagatgaggttggtaaaagccaataaggcagtaatatttcttgtgggcatagaccagatgggcatct

SEQ ID NO: 150316 - DNA, 495 bp, Homo sapiens
gctccatggacagctaacaaataaatatttattaaggacctattatctgtgctgggcatttagaaaagcgcctaccgcatcctgctgccaccccgggctcagcctcctaccaaaaataaaataaaataaaaaataaaaagatgatttagttgccactcacaatgagcttataacttagctgtgaaatcatgaaggtctataccaagtgttcgctgctggaraggcaagctcagaattatgatcatgccaggagtagccagagacagtttaatttaaaaaaatgcttgaggtgaggtctggcagcagtatgtaaggtgaagtcttccaagtggatgaaggcaggtaaaacatctcatccagaggtgacagcatggacaaaaacaaggaggcctaaatagcatggcttactttttaaagattcattcattcatcagtgtggctgaggcataaggtgtctgagaggtggtggcagccaaggacagacaggcagaagga

SEQ ID NO: 150317 - DNA, 582 bp, Homo sapiens
ccccttcactctctctctctctctcctgccaccaaaagaagacatgccttgtttccccgtcaccttctgccatgattataagttttcctgagacccccaagtcatgcttcctgttaagtctgcagaactgtgagtcaactaaacatttccttgataaattacctaatctcaggtagttctttatagcagtgtgaaaatggactaatacaggtggttatgaattggtacctaccaacaaggtatcaaatccattgtttggcatttctgccatcaatgcaacgatctgcctttgtacttgaaggcattttgcttctgcacagtcttctattaaggraaatgataagccttatcacttaactcagtgctaacagttggaccccagctgatgctctgagagagtctgatgggacaccagcaaggaggacaggaaatggaacatgacagagacacactttgtctctagtttttctctaggggtaaaacaggcaaaattaacacatcttacctgtcaagtaaaattacaagaataacatgtatgtatgtaagtgaacctgtgtgaaaattcagacagactagttctag

SEQ ID NO: 150318 - DNA, 423 bp, Homo sapiens
ctaatgtgttctagtcaatgctttagtaataatttttaaattcaccttctcacctgcatcttcatgatgatgtttcttaccctggttctgcactgtttcttcacgggattttattacytttctctttttccaataaagcagaacatacagagatgaagcgttcgtcaacagatctgttatgtgatttgcccatgacactgctaatcttatgtgagtgacagatcaattgtgttctcaggtttatagctagagagcaggttactgtgcagaatcccaaggtcaatatctagtctccaatgatagtttatctggtgcagttttgcttcactggggttgattcttttcttctattcattatttcatttctctgagttaaaaaaaaaataaatctcatacacagaacccacttttgccatgcttgtt

SEQ ID NO: 150319 - DNA, 441 bp, Homo sapiens
attttgagtgtatgcctatgatgggagttgctgaatcgtattctattcagtgtttaactttttcagaaactaccaaacattttcgcaatggctgcaccattttatattcytattcacaatgtaaaggaggtttcagtctctctacatccttaacaacacttgttattttgctttttctaaattatacccatcctagtagctgtgaagtgatagctcattgtgattttgatttgcatttccctaattactaatgccaatttatttgtaaaaaccacctttaatacaataattaatattatatggttctaaatgtttatttccaatattttattttcttaagttgcctttaaaactttatattcttagttcaatattttaaaatgtattttataagagggaataaactcactggcattttaaatttgcaatatattctagagc

SEQ ID NO: 150320 - DNA, 441 bp, Homo sapiens
attttgagtgtatgcctatgatgggagttgctgaatcgtattctattcagtgtttaactttttcagaaactaccaaacattttcgcaatggctgcaccattttatattcctattcacaatgtaaaggaggtttcagtctctctacatccttaacaacacttgttattttgctttttctaaattatacccatcctagtagcwgtgaagtgatagctcattgtgattttgatttgcatttccctaattactaatgccaatttatttgtaaaaaccacctttaatacaataattaatattatatggttctaaatgtttatttccaatattttattttcttaagttgcctttaaaactttatattcttagttcaatattttaaaatgtattttataagagggaataaactcactggcattttaaatttgcaatatattctagagc

SEQ ID NO: 150321 - DNA, 528 bp, Homo sapiens
tatatgaaatttttatttaccaaacatgtgttgcacatcaaattcaccaaatacctgtcaagcatctatctgtgtacgtccagagtggtgcttggaaccaggctaggaacactcagcacatggcaggtcaggacttcactttaccacaatctcctttcagactcagtctcatggaaagcatcataacttgaaagcaagaatcgtcacttttcttgctcagttgggttactcttgagggtagaaattcacagaaacaaaccaaacttacataatcaaactagattatttaagcctttcctgggaaagaggagcagtcttttttctaatgcttcattcagatatacaccagaaaaacamtagactggcagtctggaattctaagtcctatcttgcacctattgttaataatcatgtaattttcagcaagtccctttttctctctaaacctcagatttctcatctgcaaaatgggaatttagaatgggatctggatagctctgggtcttatactgggttgaatagtgtacc

SEQ ID NO: 150322 - DNA, 626 bp, Homo sapiens
gggactttatttctttagctaatcccttgttggggagggggagggagatctgagatctgacttcagcatgatctggaggtaggcgagcccagactayttaaaatatttgctgatcacagagatgggccttttgagtgacaagagaatggcagagtgtacctttactcccctttctttgagtcatgccataaacagcatttactctgctttggaaaaatgcaggggtaagaaaaagcatagagtttggagtcagagagagccaagtttgtgtctgtatgtctgccatttaccagttgcatgaccatgttaattatttacattctctgaacctcaattttcttatctgtgaaatgagtcccactgatgtcccctgctttcagcatcagtagtgccactgccctgagttgtctggattgggctgtagccagaaacctcaagtccaccatgccacggttccttgagtcaagtcctgttggctatagaccttcaggtgagctctgaatgttgatgtttcctcctcacccaggatttactgcatctgcaaagcactctgactgcctgccagggcctgagcctgtcttggaactctctatgcatgactggatacccagctaattcttaccagg

SEQ ID NO: 150323 - DNA, 559 bp, Homo sapiens
aattctaccagacattcaaagaagagtttttaccaatccttttgacactatttcccaagacagagaaagagggaacccccccccattcattctatgaagccagcatcaccctaataacaaaaccaggaaaggacataaccaaaaaagaaaactacagaccaatatccctgattaacatagatgctaaaatccttaacaaaatacctgctaaacaaatccaacaacatatcaaaaagataattcaccatgatcaagtgggttttataccagggatgcagggatggtttaacatatgtgagtcaataaaagtgatacaccacataaacaggattaaaaacaaaaattacaygatcataccaatagatgcagaaaaagcattcaacaaaatccagtatcgctttactattaaaactctcagcaaaatcagcatacaagggacatacctcaatataataaaagccatctgtgataaacccacagccattataatactgaatggcgaaaagttaaaagtatcccttctgagaactgaaacaagaaaatgatgcccatttttcac

SEQ ID NO: 150324 - DNA, 514 bp, Homo sapiens
tgcatggctcctcccctgattccttctgcctgtctgtccttsgctgccaccacctctcagacaccttatgcctcagccacactgatgaatgaatgaatctttaaaaagtaagccatgctatttaggcctccttgtttttgtccatgctgtcacctctggatgagatgttttacctgccttcatccacttggaagacttcaccttacatactgctgccagacctcacctcaagcatttttttaaattaaactgtctctggctactcctggcatgatcataattctgagcttgcctctccagcagcgaacacttggtatagaccttcatgatttcacagctaagttataagctcattgtgagtggcaactaaatcatctttttattttttattttattttatttttggtaggaggctgagcccggggtggcagcaggatgcggtaggcgcttttctaaatgcccagcacagataataggtccttaataaatatttatttgttagctgtccatggag

SEQ ID NO: 150325 - DNA, 496 bp, Homo sapiens
ggctcctcccctgattccttctgcctgtctgtccttggctgccaccacctctcagacaccttatgcctcagccacactgatgaatgaatgaatctttaaaaagtaagccatgctatttaggcctccttgtttttgtccatgctgtcacctctggatgagatgttttacctgccttcatccacttggaagacttcaccttacatactgctgccagacctcacctcaagcatttttttaaattaaactgtctctggctactcctggcatgatcataattctgagcttgcctytccagcagcgaacacttggtatagaccttcatgatttcacagctaagttataagctcattgtgagtggcaactaaatcatctttttattttttattttattttatttttggtaggaggctgagcccggggtggcagcaggatgcggtaggcgcttttctaaatgcccagcacagataataggtccttaataaatatttatttgtta

SEQ ID NO: 150326 - DNA, 558 bp, Homo sapiens
aacatttcagatctattgttttttatcatcttcatcatcatcattagaatctatggtagtaattttttctccacgtctcggtaccaggaaaagctgtttcctttgaccagctggttcacttgtattacgtrgtcatcatgacttgtaactgattgttatttctctcttaggaagggaactcaaagtcaaatgtgtgttccttctcttataactgtataggaccttgtagcatatggtttgtgtggtaaacttacctctgactttatcttattttccttttcattttctctatgcccaatttcttctttctttttaattctaatacaccctgtgaacggtctcaaatcctttttgaagtaatatggaaacaaacaagtaatttcattatagcatgtgctcatattgaaatttcagattaattttcatttaatttaccttaagctagctacttcctcatgacaaggaggagctataatttttattaagatatctcaaatcatatcatagttgggttacttctgggaaggttccatttgacagctaatcctattgatggtg

SEQ ID NO: 150327 - DNA, 604 bp, Homo sapiens
aattaaagagagttggtgattggatcaaaacccacagtgttttataattaaatgagagcattatatccaccggtgcagtaggagaaatgcttgtattcctaaagcaattcagttcagtttttaaaagctctaatggctagaaagtttattctttttttcagttggaatgttgcccttggtaatgactacccattttatcaaggtcctcttaaaactcagagtctaaaattaaacttcacttatgtgcagagtggtgcagcgtggtacagagtgtaattgwctgatagtttttttgtttttccttttcatataacccagaattaagctgttaatggaagccatgctatctttggggctcatcttgagtttgttatcagtgaaacccctctctaacaagagtttctaagtgcatctcctgttcctttgaaacactacagttgtgaaatgtgctttgcacctatagatctggactcatctctgactgcttggctgcgtaaccttagccaaaacaccgtttctttgatctcaactcgcttttctgttgaatggagttaattcctccatttttgcagtattggatgattaaatgaaatgatttgtgtgt

SEQ ID NO: 150328 - DNA, 411 bp, Homo sapiens
cttgcccaagagttagccagttgatccaacataatttattaacrtattcattttaataattccctactattttgaagtctacattttgatgtttctatactcccttttttctgattctgcatttctttattccaaaaatagatacatctatttaatatgtggcagttccttactgttttatatattgttactgataaggaaaatcctgccatcaaccttaaaaaaaaattttaacctcccagtgattcttagatgttgatttgagtttattaaatatatagatgaattttggaccaaccaggattgcaatattccaacattcctccagcattgttctatggccctttgtttatcagatctaatttcatgccctctaaatgtgctttatattgttcttagtgtacttctttt

SEQ ID NO: 150329 - DNA, 431 bp, Homo sapiens
gaaagggtccatgacctcccccaatggtttaggatctctgtttttgtggactgggacctcagtaactctactcatccagttgtaccctcttgccaagkttgatggatatatctgatgtcattactcaagcccaccgtatgactagatgtgcagtctgtttttccactttgcaacagatgtgattgcagtgcctttggcttttacaggtgtttgagttctgtctgtttattgcacaactacctggccctccatcccttggctgcttttatatatgttattttccatctatatccccctaacccccaattaaaaagagtggacctattgtatgggtgtagagacaggaatatatataaagagcccagtttcaattcacttcgcttcaagtatccctgctgggtaggctgggattcacagttgtgcttttgacc

SEQ ID NO: 150330 - DNA, 432 bp, Homo sapiens
tgaaagggtccatgacctcccccaatggtttaggatctctgtttttgtggactgggacctcagtaactctactcatccagttgtaccctcttgccaagtttgatggatatatctgatgtcattactcaagcccaccgtatgactagatgtgcagtctgtttttccactttgcaacagatgtgattgcagtgcctttggcttttacaggtgtttgagttctgtctgtttattgcacaactacctggccctccatcccttggctgcttttatatrtgttattttccatctatatccccctaacccccaattaaaaagagtggacctattgtatgggtgtagagacaggaatatatataaagagcccagtttcaattcacttcgcttcaagtatccctgctgggtaggctgggattcacagttgtgcttttgacc

SEQ ID NO: 150331 - DNA, 380 bp, Homo sapiens
caataggcagaaaagcaagtaataaagcttccaratactcctggggcatatatgaatcctagtaacctagggttggaaaggattgaaaaaaaagtttaggcctctgaaagtcaggtaagacactatcagacaaagacagggcccaagaaggacaataacaccaggaaaagggtaaattcaaacattaaaaacaccttcaaaggcaaacatcaaagaaaaccttttggccttagcaaagacatcatgaggatttggggcctgaatcatctatgctatgtgaatactcctaaaactcaaaagtcggggtgcagcaggaccttctctgcttcacacccaggcagatctccaggtaactggagcacccattcaccgggatcagc

SEQ ID NO: 150332 - DNA, 380 bp, Homo sapiens
caataggcagaaaagcaagtaataaagcttccaaatactcctggggcatatatgaatcctagtaacctagggttggaaaggattgaraaaaaagtttaggcctctgaaagtcaggtaagacactatcagacaaagacagggcccaagaaggacaataacaccaggaaaagggtaaattcaaacattaaaaacaccttcaaaggcaaacatcaaagaaaaccttttggccttagcaaagacatcatgaggatttggggcctgaatcatctatgctatgtgaatactcctaaaactcaaaagtcggggtgcagcaggaccttctctgcttcacacccaggcagatctccaggtaactggagcacccattcaccgggatcagc

SEQ ID NO: 150333 - DNA, 380 bp, Homo sapiens
caataggcagaaaagcaagtaataaagcttccaaatactcctggggcatatatgaatcctagtaacctagggttggaaaggattgaaaaaaaagtttaggcctctgaaagtcaggtaagacactatcagacaaagacagggcccaagaaggacaataacaccaggaaaagggtaaattcaaacattaaaaacaccttcaaaggcaaacatcaaagaaaaccttttggccttagcaaagacatcatgaggatttggkgcctgaatcatctatgctatgtgaatactcctaaaactcaaaagtcggggtgcagcaggaccttctctgcttcacacccaggcagatctccaggtaactggagcacccattcaccgggatcagc

SEQ ID NO: 150334 - DNA, 602 bp, Homo sapiens
atatggtttggttctgtgtccccacccaaatctcatctcaaattgtaatacccacgtgttgaaggaaggacctataaccttcacgtgtcaagggagggaagtgattggatgatgggggcggtttcccccatgctgttcttgtgatrgtgcatgaattctcaccagagatgatggttttaaaagtgtttggcagttcttccttcattcacacacactcactgtctctcccctgtgccacataagatgagcttgcttcccttctaccataactgtaagtttctgaagtcctccccagccatgcagaactataagtaaattaaacctcttttctttataaattacctagtctcaggtatgtctttatagcagtgtgaaaataggctaatacatctggtgaatcaataattaaaatgtagcatagctataaatggaatactactcagtaataaaagaataactcgatacatacaataatattgatgaatctcaaatgcattatgggaagtaaaagaagccaggctccacttatgtgacattctggaaaaaggaagactatacggtcagaaaacagatcagtgtttgccaggacttgggggtggggg

SEQ ID NO: 150335 - DNA, 401 bp, Homo sapiens
tttgtctgaaaatgtccttatgattaaattcagcctaaacattttgctgggaacactgcagagtcaatgcggtgagtttcctacctcagcccatctgcaggcagagaaggtccagtttgtccatcaccagtatcatgataycaggactggtcagttggttaaggaggggcctaggagatctttcacttgtaaagactccttatttataattcatttggaaagtggtttgaaaaagtataaatatcttgtattctaacgatcttcctctgaacattttatcatcaattaatcactcctgcctgtgtcagttattatatttcgtgggcggcaagccatccaggtgccgaggcaagagactgagggcatgagctgttccagtataataaaatatataaaacaac

SEQ ID NO: 150336 - DNA, 388 bp, Homo sapiens
tccttatgattaaattcagcctaaacattttgctgggaacactgcagagtcaatgcggtgagtttcctacctcagcccatctgcaggcagagaaggtccagtttgtccatcaccagtatcatgataccaggactggtcagttggttaaggaggggcctaggagatctttcacttgtaaagactccttatttataattcatttggaaagtggtttgaaaaagtataaatatcttgtattctaacgatcttcctctgaacattttatcatcaattaatcacycctgcctgtgtcagttattatatttcgtgggcggcaagccatccaggtgccgaggcaagagactgagggcatgagctgttccagtataataaaatatataaaacaaca

SEQ ID NO: 150337 - DNA, 411 bp, Homo sapiens
tacattctgaatttgtctgaaaatgtccttatgattaaattcagcctaaacattttgctgggaacactgcagagtcaatgcggtgagtttcctacctcagcccatctgcaggcagagaaggtccagtttgtccatcaccagtatcatgataccaggactggtcagttggttaaggaggggcctaggagatctttcacttgtaaagactccttatttataattcatttggaaagtggtttgaaaaagtataaatatcttgtattctaacgatcttcctctgaacattttatcatcaattaatcactcctgcctgtgtcagttattatatttcgtgggcggcaagccatccaggtgcygaggcaagagactgagggcatgagctgttccagtataataaaatatataaaacaa

SEQ ID NO: 150338 - DNA, 415 bp, Homo sapiens
tctacattctgaatttgtctgaaaatgtccttatgattaaattcagcctaaacattttgctgggaacactgcagagtcaatgcggtgagtttcctacctcagcccatctgcaggcagagaaggtccagtttgtccatcaccagtatcatgataccaggactggtcagttggttaaggaggggcctaggagatctttcacttgtaaagactccttatttataattcatttggaaagtggtttgaaaaagtataaatatcttgtattctaacgatcttcctctgaacattttatcatcaattaatcactcctgcctgtgtcagttattatatttcgtgggcggcaagccatccaggtgccgaggmaagagactgagggcatgagctgttccagtataataaaatatataaaacaaca

SEQ ID NO: 150339 - DNA, 449 bp, Homo sapiens
ccttcatgtcctaggacatctctgccaactttggggaagtaagaacacagctgtccactctacagtatgggttgcttttgcaactaaaatgtgtccgacatcctgagacctgtacccatttcagggagccttgggaggagcccaaatcactgagtgaattggacagtgcatggagatggttcagcactgcacggctaagtgcaggagcaaggccaggtcattctgagagacaatgggtggcgcctgatggggataaacaaagataaaatcagaagtttgtgtttcattttcaaaaactcaaaccaataactaatttgttctttataagtaataacagttatttttctttttacatgagaatttaatctcaaaayggaaatctgaaaaatactaagtccagtgcataaaacctgaacaataacttatatttattctttctaaatagatct

SEQ ID NO: 150340 - DNA, 403 bp, Homo sapiens
ctttaacagcctctgcttctaaccgctgccccacaggagtttataggatttctgtgctggcggggaatgtgttctcacctcatagagccaggtagaaactgtaygccgacgggctcagttctttgcgatgaaagcagggcctttggggctctgtgacccccttcggttgtagacataacatgcttattttgtggatgggaacggctctgcccgcgcccaggtgcccttgcgcatattcaccgaggcccgcaggtcggaaccgcagtctgacctgtcagcagaatgcgctgcgatctactccaactacccgaactacccagcaataaaatgggacacattacaaaacatgagatagcatggataatctcaaaaacattatgctgagtgatgaaaagagtgcatc

SEQ ID NO: 150341 - DNA, 674 bp, Homo sapiens
gttattcatcctttccatgcccctcatctataacatgggtgtaataatactttcctcaagaggttgttgtaatatagatgaaggacctagcacaatgacttaaaggtcacaaatcccaataaatggaagtgatgataatctgctgtggatgtgtaggctttatctcctatccttgagaaaacacatttgaagaracagaaattaggagtgtagaaagtttaatatcaataaaaatgataaatagcaggggtttttgtaataatgccaacaatgtcaatggcaaaagaatgagggttttagattaaatggtctccagctgctttcaactttaccagtacatgatttttaatgagttctacaggtgataagtgctagagaaattcagaggatggagagaaaattgtcagcctgaatagtcagcggtttcttcatggaggaggcagtcttgatctgggtcttaaaaatgaacaggcttcgcagagttaagaggaaagaaggcatttcaggcaggcataatagcactaaacagaaatacaacggtgtattagagcaaaacatattcttggacagtagatacaccaatttaattctaagtttagtgtttgggaaggaaaatggcaggaactaatcatagaaccccacatagattgtgcaggggctaaaaagccagacta

SEQ ID NO: 150342 - DNA, 517 bp, Homo sapiens
tatgagagtaaccaccccatgattaaatcacctcccaccaggcccctcccatgacacatggggattgtgggacccaaaattcaagataagatttgggtggggacacagccaaaccatatcaaagacagacaagtaaacagaygcttaatgatttgttcattcagcagatatttaactatatcctaaacaagtgctccagtagcaatgcagaagagctgccatgagagcagtgggcaataagtacccaattctccctacaactacataggaatttactaaaaggacaaggaaatattgaccatagaggggaaataatcactactgtttatgcaaagttagatgaaagtgacagaacaaatagagttctgggaactgcaagtagttcagaatgctggtaaagtgttataggaatgaaggaaaatgaaactagaaatattcacaggcaatatcaagagtttgcatttaaggtacaagttggagaaccactgaaggattttaactggaagaggagtcaaat

SEQ ID NO: 150343 - DNA, 528 bp, Homo sapiens
tttgtgtttgaagttgtttgccaagtaaatgaataacgtggtttcagttaccwatgtttacttctaaagattggcttgatttgcacatgtatttatcctacccaggcaaaaactccattctttgtcctcctttgctcctcaaaaatattcaagggacagtctctctttcatatattttggctgcagatacaggaagccacctggcagagtgttttcattaccttcatttcacattatttgattgcaataaacagatgaagggaaatgttttccccattacagaagggaactgataggtatgggaactttaaaactctctggttccacaacttgtccattactgcttagcccttttgtactttctgaagtactttccaatatatttgtttacatgaacatcataaaaacccagtaaagtatagctcttgggtagttaactctggtgtagaggggagaacatggaattgcagaataaaaacctgaattctggtgcttgccctaccactaactaacttagatgttagacaa

SEQ ID NO: 150344 - DNA, 528 bp, Homo sapiens
tttgtgtttgaagttgtttgccaagtaaatgaataacgtggtttcagttacctatgtttacttctaaagattggcttgatttgcacatgtatttatcctacccaggcaaaaactccattctttgtcctcctttgctcctcaaaaatattcaagggacagtctctctttcatatattttggctgcagatacaggaagccasctggcagagtgttttcattaccttcatttcacattatttgattgcaataaacagatgaagggaaatgttttccccattacagaagggaactgataggtatgggaactttaaaactctctggttccacaacttgtccattactgcttagcccttttgtactttctgaagtactttccaatatatttgtttacatgaacatcataaaaacccagtaaagtatagctcttgggtagttaactctggtgtagaggggagaacatggaattgcagaataaaaacctgaattctggtgcttgccctaccactaactaacttagatgttagacaa

SEQ ID NO: 150345 - DNA, 418 bp, Homo sapiens
ttgtactacaggtgctatcctcctgaccccattggtagtgacatagccactcggaaatgttggcagagwtaattttccaaggtaattcattccctgcagctggcaacttggcacatagccagcactgactgtggttggcttgtgttgcagtggtggctacccaggggatgaactcattcccagcctcagacatgatgactcaagtactgattactagcagataggttattctctgtaataacaaaagcggaggggaacatgatatcatttttcatctttaggaaattgtactctgccttcattttctgctcccatagctacaaggtcaccagccttagggatgggatctgatggacactggacccatattttggcaccaggatttaagttgcccactctggtggacctgaattctcca

SEQ ID NO: 150346 - DNA, 501 bp, Homo sapiens
taacacagacgtgaagggcatataggtgacagttattaatatcagggagattgatttcatatccttgaaatgtaccaacctttaactccaggttcagcaacttcataatttacataagtacagtctgtgtcagttcattagcaggtcattagtacgtctggagaatatgttctaaaatgtcctcaggaaaatctcgggggaatgcaccagaaaataaaattttgctgaatgcctgttttagagaaagttaggattgtgtgtgtatgtgtgtgtgtctctctgtgtgtgtgctttcttttgcatttaatccaccttcattttaggtagtggttttggtgaggactgtgtgggtcaacaccctggggcaacatgaagattaacttctgagaaataagtagggattcaaaacaggtttttaccatattgtgtttgacctrcatgttcttaagtgcctgttttatgcatatatccagttgtgtattttttataggatatgatgtt

SEQ ID NO: 150347 - DNA, 399 bp, Homo sapiens
ccctgtctgcaggccctggcaagcaatcaactattttgtttctgttgttttactgtttccagaatgtcatataaaggaaatcctgcaacacrtaaataataataaactctagtagcctctgcttttctttggagggtcacagtctggcacgtaggctcaggtaggtaagccacacttcaaaataatcctaactttgtgtggaagactgaggactttatttaggctgagaagaattgtgggtagtatgttctgaagatggactaacccatagagtcaatgcttcacttctaccccaaaacttactatcctctattacttcagtagtatgactgtaaaatgtcagtagcagcatcacaagacgaagactctcaggaaagacataattaagtacacttgtct

SEQ ID NO: 150348 - DNA, 635 bp, Homo sapiens
catgtcacttggtgtgcacatggatgaatttctgttggatatatacataaaagtaaaatagctggaacaaagtatatgcatatattcactttattagttactaccaggtgttagtgccaatttaccttactctcaatagcatgtgagagttctaattctctttccctaatgtgaaattctgaatcttattttatcttagtcatatgagcaggtcgttagcagtatctctttatggtttaattttcatttatctgattattaatcaggttgaacgctttattgaccatttagaaatgcctgttcatgattcttgccttttttctattgagttgtgtgaacaaatgttcttactgatttgtaggagtagttaatagaatayacaaataactatttttttctcatgtattacaaatttcttcaaccctctgccttacttttcactcttaatgatgtttgtgaatggacaggatttttttattataatgcagtccaatttatcaatcttttcatctataattagtgccttttttcttgtcttgtttaagaaatcttttcctaactcaaggttatacagatatttttctaaattttttctagatattttcttcttccatgtttcacatttaaattaacac

SEQ ID NO: 150349 - DNA, 635 bp, Homo sapiens
catgtcacttggtgtgcacatggatgaatttctgttggatatatacataaaagtaaaatagctggaacaaagtatatgcatatattcactttattagttactaccaggtgttagtgccaatttaccttactctcaatagcatgtgagagttctaattctctttccctaatgtgaaattctgaatcttattttatcttagtcatatgagcaggtcgttagcagtatctctttatggtttaattttcatttatctgattattaatcaggttgaacgctttattgaccatttagaaatgcctgttcatgattcttgccttttttctattgagttgtgtgaacaaatgttcttactgatttgtaggagtagttaatagaatacacaaataactatttttttctcatgtattacaaatwtcttcaaccctctgccttacttttcactcttaatgatgtttgtgaatggacaggatttttttattataatgcagtccaatttatcaatcttttcatctataattagtgccttttttcttgtcttgtttaagaaatcttttcctaactcaaggttatacagatatttttctaaattttttctagatattttcttcttccatgtttcacatttaaattaacac

SEQ ID NO: 150350 - DNA, 533 bp, Homo sapiens
aaagctaatccccaaaacaatgggaaaaatgtctccagggtatatcaaaggtcttcattgtagtccctcccatcacaggcctggaggtataggaagaaaatgtggttttgtgtgctgagcccgtggttcccatgctatgtgcagcctagggacttggtgctttgtgtactagccattccagccatggctgaaagrgaccaacatagagctcaggctgtggcttcagagggtgcaggccccaagccttgtcagcttccacatggtgttgagcctgcaggtgcacagaaattaagaattgaggtttgggaacctccacctagatttcagaggatgcatggaaatgcctagatatccaggcagaagtttgctgcaagggcagggctctcatggagaacctctgctaggacagtgtggaagggaaatgtggggtcagagcccccacacagagtccctacaggggcaccacttaatggagctgtgagaagagggacaccatctccagaccctagaatggtagatctactgacagcttg

SEQ ID NO: 150351 - DNA, 572 bp, Homo sapiens
aagacttctagtcaacagtagactgttagtagttaagtttttgagaagtcaaagttataggtagatttgcaactacactgggatcagcacccctaaccctcacattgttcaagggtctcttcctccgtgtctctgtttctatatctatctatctatctattatctatctatagagagagttgacattgtatatgcgtgtgtgtttgtatacgtagacaaatagatatgctttggttttaactatatatatatatatagttaaacatatatatatatagttaaayatatatatatatatatatatatatatatatatatatatatatggctttgactttagcaacaaatacttgaattactaaaataagggaactgtctgttccccttgtgcattggtttccttattagagtcctgtcaggaaaactgaagccacactagagaaaactggttgtatgtattggaaatgctgagagaggaaaggatggagtcacttaactaagctgtcagtatgtgtagtaagcagcagccaccggctcctactgcacaggtgggtgaattaaagtgaggagga

SEQ ID NO: 150352 - DNA, 578 bp, Homo sapiens
aacttcttattactcttgtttttagagcctttaaactattagttatattagtttcaattccatgtcaaatagtctcaacatctatgaaatttcttggtcttgtttagttgattattttgtctcttgtagtatttttttcttgttttttgatatgctttataatctttattattattatttgagatgtagtctcactctgtcacccaggctggagtgcagtgcagagatctctgctcactgcaagctccgcctcccaggttcacaccattctcctgcctcagcctcccgagtagctgggactacaggcgcccaccaccatgcccagctaatttttttcrtatttttagtagagatggggtttcaccgtgttggccaggatggtctcgatctcctgaccttgtgatctgcccacctctgcctcccaaagtgctgggataacaggcgtgagccacagcgccaggccataatttttattttaaaaatctagacctgttaagtgactgtggtaaattaattttatgcctgagaataggcatgactttctttctgttttacctttagtatgggggcttgatata

SEQ ID NO: 150353 - DNA, 578 bp, Homo sapiens
aacttcttattactcttgtttttagagcctttaaactattagttatattagtttcaattccatgtcaaatagtctcaacatctatgaaatttcttggtcttgtttagttgattattttgtctcttgtagtatttttttcttgttttttgatatgctttataatctttattattattatttgagatgtagtctcactctgtcacccaggctggagtgcagtgcagagatctctgctcactgcaagctccgcctcccaggttcacaccattctcctgcctcagcctcccgagtagctgggactacaggcgcccaccaccatgcccagctaatttttttcatatttttagtagagatggggtttcaccgtgttggccaggatggtctcgatctcctgaccttgtgatcygcccacctctgcctcccaaagtgctgggataacaggcgtgagccacagcgccaggccataatttttattttaaaaatctagacctgttaagtgactgtggtaaattaattttatgcctgagaataggcatgactttctttctgttttacctttagtatgggggcttgatata

SEQ ID NO: 150354 - DNA, 381 bp, Homo sapiens
aataactccatttgtggagtttgatgagccctaaaatgtgggtaatttccctttatctatgaagactactgtaaaagttccaacattagtttccatttggtcctcttttcaatatgattaactgaagtatttaggtggttattatgaggtctaataaggagtttgtgggtgaaatttatagtcttttagaggaacgcttatgcttgctgagctgcgaagctaacgttgcaaggcagtagacacaaatgactcgtgacaggcagtacagttttctaagagattacaatccacttcygggacctggagggtgttactgagaaggcaatgccatttataggcaagagttttataccagatcaagagatatgcatgggcagttga

SEQ ID NO: 150355 - DNA, 549 bp, Homo sapiens
ctacatttttgtaacccagtgaattaaattcattaagcaaaaatgattctcaccatttttttatagtcatagcgcccaattgattgactttcttttgctattttaactgattatattgtgtccttttaaaccctgcagctttacttcaataytctaacattctgcaagctgacttctattgaaacatataaaaagaaagtggtctacaatttacactctacatttcaatattggtgtcagggaattactggctttaaccttaactctattgtttcatgatcaaatatgattcttcaagtattgtttcttagctgcccagagggagattcttttttctgagaagagaatcttacaccaagctattaggatgtgaaacaaagaaagtggcttaaactgttgagcctgtctttgtattttgaattgatgccaagaattatggagcccaagaaaagtatgtttcaaattaagtaccatcatcttaagtgctatttctctattgcagtagtctccccttacctgtggtttctttttctcaagtttctgttatcc

SEQ ID NO: 150356 - DNA, 544 bp, Homo sapiens
caagagaaaagtgtctagcacttacaaaggaacccccatcagactaatggcagatttctcagcagaaaccttacaagcaaggagagaacaggacgatacagtcaaagtgctgaaagaaaaaaactgccagcaggccaagtgcggtggcttgcacctgtaatccaagcactttgggaggccaaggtgggtgaactacttgagttcacaagtttgagaccagcctgggcaacatggggagaccccatctctacaaaaacatgcaaaaattagccaggcctggtggcacatgcctgtagtcccagctactcaagaggctgagatggggggatggcttgggcccagcaaggccacggttgcagtgggccgagatggcaccactgcactccagcctgggtgagagagtcagaccttgtcttgaayaaaaacaaaaacaaaaacaaaacaaaacaaaatgtcaaccagagataccatacctggcaaagatattcttcataaatgaaggaggaataaagtctttcctggacaagcaaaagctgagggaatt

SEQ ID NO: 150357 - DNA, 366 bp, Homo sapiens
tgatctcctggtttgagatctcctggtttgagatcaaagtgagactcagagaaaactgggacaaagagcaacactgaggtactgccccaaaagagagtacagaaagaaaggcaygatggtaggcggcgaacactgttcccagtgctgaatcctcaaggctagtaacagccaagtgagtaatcagttacccacccctgccaagctggttgcctgaaaaggcttctaagtttatcattcttttaaactatcatttactgactatttaccacagacctgtgctaagcatatcatatctgatatggcttggctctgtgttctcatccaaattataatccccacatgtcaggggagggacctgttgggagg

SEQ ID NO: 150358 - DNA, 524 bp, Homo sapiens
ctactctttaggttattttgtttttatttattaatttaatttaattttagagacagggtcttgctctgttgcccagggtggagtgcagtggtgccatcacagatcactgcagccttgaattcagctcaagtgatccacctgcctcagtctccctagcaggtaggactacaggcccacatcaccatgcccagcttctacygtctgtttttgtgcattcgattagaaacgtttttctaaataccacatataagtgagattatgcagtatttttctttctgtgtctgccttattccactgagcacaatgtcctccagatttgcccatgttgttgcaaatggcaggctctgccctcatttttttctaacgaagaagttggagctcagagaagacaagtgacttgctcagagtcactgcggagacacaatgattattttcttcctgacaagtcacctggaagaccatgaacttgttctagtgatactgccattgctggaaatatttttggatttccagtttgagaaggt

SEQ ID NO: 150359 - DNA, 582 bp, Homo sapiens
tcgtcttgcgtatttgcaactttgtaccctttgaccaaaatcttctaatttttcctctccaaccaccattctactctttaggttattttgtttttatttattaatttaatttaattttagagacagggtcttgctctgttgcccagggtggagtgcagtggtgccatcacagatcactgcagccttgaattcagctcaagtgatccacctgcctcagtctccctagcaggtaggactacaggcccacatcaccatgcccagcttctactgtctgtttttgtgcattcgattagaaacrtttttctaaataccacatataagtgagattatgcagtatttttctttctgtgtctgccttattccactgagcacaatgtcctccagatttgcccatgttgttgcaaatggcaggctctgccctcatttttttctaacgaagaagttggagctcagagaagacaagtgacttgctcagagtcactgcggagacacaatgattattttcttcctgacaagtcacctggaagaccatgaacttgttctagtgatactgccattgctggaaatatttttggatttcca

SEQ ID NO: 150360 - DNA, 582 bp, Homo sapiens
tcgtcttgcgtatttgcaactttgtaccctttgaccaaaatcttctaatttttcctctccaaccaccattctactctttaggttattttgtttttatttattaatttaatttaattttagagacagggtcttgctctgttgcccagggtggagtgcagtggtgccatcacagatcactgcagccttgaattcagctcaagtgatccacctgcctcagtctccctagcaggtaggactacaggcccacatcaccatgcccagcttctactgtctgtttttgtgcattcgattagaaacgtttttctaaataccacatataagtgagattatgcagtatttttctttctgtgtctgccttattccactgagcacaatgtcctccagatttgcccatgttgttgcaaatggcaggctctgccctcatttttttctaacgaagaagttggagctcagagaagacaagtgacttgctcagagtcactgcggagacacaatgattattttcttcctgacaagtcayctggaagaccatgaacttgttctagtgatactgccattgctggaaatatttttggatttcca

SEQ ID NO: 150361 - DNA, 574 bp, Homo sapiens
aagctctgaaccccaggccaggctggcaggaagaagcggaggctcatcaagaatggcggctggagggacgagcactcagctcagcttatcaaatccttcctgagcatctgctggctgctgggtgttctcctggatgggagagaagacatggccccaggcccagagaaatgaagygctcaggaggacatgacccgaccgagtacgcgatgagagacggcgaggacttggtgaatcccagcaggcagggactcagagagtgggagggtgaagagtcattaagatggcaggtttgggtgtgtgagcaaatggaactgacaccctcaacagatgaagagaaactggaagagtctgctctagggggaatgcgagcaaacacggcgcttgccatttccaagctctgcggggcctgcctcccagctccagaggcatgcactgctgccacaggatctaccatgctgtgtgagacagtcgtgccagtgactgtgccctgaagagctgcgccctcacgccctggagcagcttccatctgatctacctctggaagcccagggcactgcacatggcggtgaatagt

SEQ ID NO: 150362 - DNA, 609 bp, Homo sapiens
aagctctgaaccccaggccaggctggcaggaagaagcggaggctcatcaagaatggcggctggagggacgagcactcagctcagcttatcaaatccttcctgagcatctgctggctgctgggtgttctcctggatgggagagaagacatggccccaggcccagagaaatgaagtgctcaggaggacatgacccgaccgagtacgcgatgagagacggcgaggacttggtgaatcccagcaggcagggactcagagagtgggagggtgaagagtcattaagatggcaggtttgggtgtgtgagcaaatggaactgacaccctcaacagatgaagagaaactggaagagtctgctctagggggaatgcgagcaaacacggcgcttgccatttccaagctctgcggggcctgcctcccagctccagaggcatrcactgctgccacaggatctaccatgctgtgtgagacagtcgtgccagtgactgtgccctgaagagctgcgccctcacgccctggagcagcttccatctgatctacctctggaagcccagggcactgcacatggcggtgaatagttaccttctgtttcagaaagaataggttcccacaag

SEQ ID NO: 150363 - DNA, 409 bp, Homo sapiens
aacagacacagggtcactggttcacaccacacaaggtatgagcacagagagccccaaacacagtgggtcgtcctgaagcatgagtgtgaaaaggaaagagcccctcaccacagtcttcctgccttggttctcacgagagaaagtaagatttcattttgggagatgtgctcctctgcggacttctttatcacctctaatttcaataactaagtaactgcgcttggggacagaacagattctaagaayggtactctactacaaaaaaaccacagctgttctgaaatgtggcctacagaacatgatctgaatttaaaagcacactccatggtactgcctttaatctatataacgctaatgaatagactttgaacactaagaacctctcattttctccatttccctgaaatca

SEQ ID NO: 150364 - DNA, 603 bp, Homo sapiens
tggatgtctgtggaatattgacaaaaaatatgctctaaaagacagtagaacatagagtggcagaggccagctgcccatttcctaccacttattagttgatgaccttgggcaattacttaacttacctttgcctcagtttccccatctctaagatgtaatgacagtaataacacctatctcataggggtgctgaggagattgagtgagtcattacatggaagtcacctagaacagtgttccttacctagaaagttctataagagggatgttattatcatcactcaatcgccaagaaaaagttgatgcattagaaccaattagaaagtttaccagctacaatacttgagaataatccaaagactacctagggtacccatccagtgatggcagagggaaccccctcctctttgttaggcacccaaatccctcctaggagtctagaatcttgaacccccctcttagaggtggaaagtcccacagaattagtctacattctatcccatgcaagaatgctttccaatgcatcatgaccggcagccatctgacctctacttggacaagctcagggctaggaggctcaayatctctcaaagcgtaccctac

SEQ ID NO: 150365 - DNA, 427 bp, Homo sapiens
gaaaaagacaatcagttgatgccagcactgagttgacagagatgtgggaatatctcacaaagactttgaagcggccatcataaaaatgcctcaaggagcaattatgaccatgcctgaggcaaataaagaaaatataaatgagaagtctcagcaaagaaatagaagaatcaaatggaaattttattttcaaaaaattgtaaaacattttattgtagattgacaatttataactgcattatattatggggcacraagtgatgctatgatttatgaatacaatgtggaataatgaaatcaacctaacatattcctcacctcaaatacttatcattttttgtagtgagaatatctgaaatttactcttaggaagtttgaaatgtacaaaatactgctattaactattttcactgcactatgcaatagatct

SEQ ID NO: 150366 - DNA, 516 bp, Homo sapiens
tataactaatttgtgctgtgcaccaacaagaacctgctttaaatttccatgccaatttacaacccccatactgtaccargcaaggttagtggctattgaaaataccaccaggacagggctatctaaagacacattcggtagtgtgttaactatacaaaaaaagacactgtacagtttaaaaacaaatcttacacagccttacatttcagtttttttctttaaaaggagtgagttgtgtacaggggggttaaatgctttatagacaagaaaaaaaaactgcgctagaaccaacttattcatcatcatcatcttcttcttcatcttcatcttcttcatcttcctcctcctcctcatcctcttcatcttcctcatcttcctcctcttccttctttttcttgcttttttcagccttgacaactcccttttttgctgcatcaggctttcctttagctcgatatgcagcaatatccttttcgtatttttccttcagcttcgcagccttcttttcataaggct

SEQ ID NO: 150367 - DNA, 516 bp, Homo sapiens
tataactaatttgtgctgtgcaccaacaagaacctgctttaaatttccatgccaatttacaacccccatactgtaccaagcaaggttagtggctattgaaaataccaccaggacagggctatctaaagacacattcggtagtgtgttaactatacaaaaaaagacactgtacagtttaaaaacaaatcttacacagccttacatttcartttttttctttaaaaggagtgagttgtgtacaggggggttaaatgctttatagacaagaaaaaaaaactgcgctagaaccaacttattcatcatcatcatcttcttcttcatcttcatcttcttcatcttcctcctcctcctcatcctcttcatcttcctcatcttcctcctcttccttctttttcttgcttttttcagccttgacaactcccttttttgctgcatcaggctttcctttagctcgatatgcagcaatatccttttcgtatttttccttcagcttcgcagccttcttttcataaggct

SEQ ID NO: 150368 - DNA, 420 bp, Homo sapiens
cgcacaggcttgtgctctcttgcttgccttctgcgtgaccttgaaggagatatttactccctgacccttgagtttggcatccataaatgagaacaccacgcatctgtcacacaggttgtaatgaagacacgataaaatgctgcaggtcaaaacaactgccagtgtgtctggcaggtggaagrcattgagacgcctttactgagcactcaggagatactgtgctaagcatgtggtgtgagttatccaactcacagcaactcagtgaggtaggtgtattattattcccaccagggaaaagttaagtaacatcggcaggatacacagccagcaagtggcagggtcagatggagcatccaaacctgtcaatcccagaagctgcactcataactatcctgtagtttacagcctttcagggtgtgt

SEQ ID NO: 150369 - DNA, 412 bp, Homo sapiens
aggcttgtgctctcttgcttgccttctgcgtgaccttgaaggagatatttactccctgacccttgagtttggcatccataaatgagaacaccacgcatctgtcacacaggttgtaatgaagacacgataaaatgctgcaggtcaaaacaactgccagtgtgtctggcaggtggaaggcattgagacgcctttactgagcactcakgagatactgtgctaagcatgtggtgtgagttatccaactcacagcaactcagtgaggtaggtgtattattattcccaccagggaaaagttaagtaacatcggcaggatacacagccagcaagtggcagggtcagatggagcatccaaacctgtcaatcccagaagctgcactcataactatcctgtagtttacagcctttcagggtg

SEQ ID NO: 150370 - DNA, 281 bp, Homo sapiens
ccaactaactctctcatacaacttcttcagctgccttttcargtttagtaattttacttctcaactttatcataaaattaccaaactgtccccaaatttccagtaactcaattatgctgataccctgggcaggaagtaatggagatgttcagaacagtcagtcaacaaatgttcaaatggaaagcattccaacattaaatataaaagggtaatatgtggcggcagctggctagcaggggcttcccccctatttatctggaagatagatgtgtacaataatt

SEQ ID NO: 150371 - DNA, 281 bp, Homo sapiens
ccaactaactctctcatacaacttcttcagctgccttttcaggtttagtaattttayttctcaactttatcataaaattaccaaactgtccccaaatttccagtaactcaattatgctgataccctgggcaggaagtaatggagatgttcagaacagtcagtcaacaaatgttcaaatggaaagcattccaacattaaatataaaagggtaatatgtggcggcagctggctagcaggggcttcccccctatttatctggaagatagatgtgtacaataatt

SEQ ID NO: 150372 - DNA, 281 bp, Homo sapiens
ccaactaactctctcatacaacttcttcagctgccttttcaggtttagtaattttacttctcaactttatcataaaattaccaaactgtccccaaatttccagtaactcaattatgctgataccctggrcaggaagtaatggagatgttcagaacagtcagtcaacaaatgttcaaatggaaagcattccaacattaaatataaaagggtaatatgtggcggcagctggctagcaggggcttcccccctatttatctggaagatagatgtgtacaataatt

SEQ ID NO: 150373 - DNA, 281 bp, Homo sapiens
ccaactaactctctcatacaacttcttcagctgccttttcaggtttagtaattttacttctcaactttatcataaaattaccaaactgtccccaaatttccagtaactcaattatgctgataccctgggcaggaagtaatggagatgttcagaacagtcagtcaacaaatgttcaaatggaaagcattccaacrttaaatataaaagggtaatatgtggcggcagctggctagcaggggcttcccccctatttatctggaagatagatgtgtacaataatt

SEQ ID NO: 150374 - DNA, 488 bp, Homo sapiens
tccattggtctaagtgcctgtgtgtgttatcgcctgtgtatacatgtctctgtgtgtctgtctgtgtgaatgttcatatgtgtttttcctagagggtagaactcacagctctccagccatccattcccttgcctgggtagacaggctggggtggtgagagggcagtgacctaagagtccaagatactagtcctgtgctcagcttagactcactgtgatctggcctctcatctgtagaatgaaagggttagatcacctcatcattaattgtataggccttgtgtggtttacagaaggagggtgattgattcctgggttaattaattactttttagaggtcaaattggaagatgcctaattttaraagctctgggttcagacagaactcagtttgaatcccagctctgccatatggattttgtgtcctttggagttatttaacctcatcaggattgttgtgaggattaaataaaataatgtgtgtaaagt

SEQ ID NO: 150375 - DNA, 315 bp, Homo sapiens
gaaaaaagaaagaaaaagaaaatrtggttctaaagggaaaagttgggtacagtgagtagaagtgtatgggattcaggtatgtgtctggagtaagcaaaaacatgataatcatcccagctgcctgaggaggggctggacatccaaaaggctgcgtgtccctggtctttggcagggatagatacaaggagggaatgggcctcggtggccttcagaagagtctgtggttcacagctgcccctcttgaatggctgtatgaggtggggacagccggcacctcagagccccagggcccctcgcttttgcaaaggttatgtt

SEQ ID NO: 150376 - DNA, 583 bp, Homo sapiens
ggaattcaaggggaattaaagtcttcttttcaatggagagtcaaagaatgtatggactgttttaaaatgaccacaggggccgggtgcagtggctcacccrccggggagaattacttgagcccaggaggtgaaagtagcagtgagccgagatcatgccactgcactccagcttggactatagagtgagactccatctcaaataaatagataaataaataaataaaatgaccacagggccactccggagggacaggtggggaacaaatatgagccaggaggcagggaggggaggaaagctttaccccatggccctgggactgtgcatgaggctggtggggacacagctggggacggcaggagacagagggtgccccgaactcctatggggacactggggctggacacagggaatgagtgagtgggggcagctaaggctgggggcctgccttaaattctgggttaaggcttgagtcagggaggggaacagctaaacccatggtcctctctcaaagaggtattagagggctgggcacagtggctcactgtgtaatcccagcactttgggaggccaaggcaggaagac

SEQ ID NO: 150377 - DNA, 298 bp, Homo sapiens
gtcatcccttaggttaaaaagacttctaactcaaactccacytcttaagtttgtggttcaccacttccagcctggtgacttcatgctgattaagacttggaaataagacaagctccacccaagctgggaaggtccctatcaagtgctcctgaccactgagatggccctgcaaacagctgaatggaggtggactcactatattcgagtcaagggactggtaaaagagatcccggaagggagggaaaaagatcagtggaaagtgcccgagtctaactttaactcttaactttaaggaacc

SEQ ID NO: 150378 - DNA, 611 bp, Homo sapiens
cagaaatggttggatagggctttttggagctaattaaatggggatgcagactcggctggcatgcccattgtccctttgcccttccttcttccagcttcttgcaatgcagccatgatggctggagttgagaagccctctcaaaactcttgagggcagctgggcacagtggctcacacctgtaatcccagtgctttgggaggccgtggcgagctgattgcttgagctcaggagtctgagaccatcctgggcaaaatggtgaaacccggtctctacaaaaaatacaaaaattagccgagcttgrtggcatgagcatgtagtcccagctacttggggtgttgaggtggaagaatcgcttgatgcctgggaggtggaggttgcagtgagccgagatcacgccactgcactccagcctggatgacagagtgagactctgtctccccgcgcccccaccgcccccccaaaaaaaacttctcaggaaaaggccaagagaatttcagagacctctaccctgtatcttaaagtcactgagccaagtcacttatttggatttctcattatgtgagaacaagcagaggtatcttgtttaaggcattgctatttaatatttgcat

SEQ ID NO: 150379 - DNA, 540 bp, Homo sapiens
ttcaaagtctgcttttagccatagcaccagatgacttgtgygtggttagtagacatggaatttcctacaagtagacgaagcaaactttaaattcccagactgatgagagtttcccacatttctttatcacaagcaggagagacttgttaagataacctaagaagttaagagatagcttttttttttccctcctgaagcccagggatgatggggagctgatgtttaaggagaatatctgtttgaaaatgagacacacaatgattctgtgcagtaaaacgagcaaattgcacagagtgcatttgtttgcatggaagcaaactagacatgcaattgtgactagttaaccctgtggttagagcatgtggctatcagagctgaggttgagagctctgtatggctcaccctcctcatgctgcccatgctgaaattctgggaggttatgcaggaaggcctgtcccagtgctgacattaaccagctggtggccccaccgatgcttcttgccttctcttatctgcaaaatgaagggattgagttgaatt

SEQ ID NO: 150380 - DNA, 509 bp, Homo sapiens
tgaattcatatgaacatggcttcaggcttcaaagtctgcttttagccatagcaccagatgacttgtgcgtggttagtagacatggaatttcctacaagtagacgaagcaaactttaaattcccagactgatgagagtttcccacatttctttatcacaagcaggagagacttgttaagataacctaagaagttaagagatagcttttttttttccctcctgaagcccagggaygatggggagctgatgtttaaggagaatatctgtttgaaaatgagacacacaatgattctgtgcagtaaaacgagcaaattgcacagagtgcatttgtttgcatggaagcaaactagacatgcaattgtgactagttaaccctgtggttagagcatgtggctatcagagctgaggttgagagctctgtatggctcaccctcctcatgctgcccatgctgaaattctgggaggttatgcaggaaggcctgtcccagtgctgacattaaccagctggtg

SEQ ID NO: 150381 - DNA, 487 bp, Homo sapiens
gtcttttaacaacagtaaacaatagccaggaccctgatgctagatcacactctggtagataattcattgtgcacagctctgcrttcagcactttgtttgtggacatttaaagctcacaatgaccctacggcactactatgctcatttataggtgtgggcatggctccaggccctagagctaggagatggcagagcaagagtgcatattggactctttatcctgatactaaatgccctttgaagactcaaacgtcactgcctttataaagcccaggctttctccttttgacagccaagggaggaatcatttattcctgcagtattctcacctcctccttgctacatctcaaatggcattataatataatttatttaaacatatgtatttgccacaagattatgaaccacatggatagacactcacttttattcatctttgcttatcccaaagccaacacgaggtacagcgcataatagggtctcaata

SEQ ID NO: 150382 - DNA, 487 bp, Homo sapiens
gtcttttaacaacagtaaacaatagccaggaccctgatgctagatcacactctggtagataattcattgtgcacagctctgcgttcagcactttgtttgtggacatttaaagctcacaatgaccctacggcactactatgctcatttataggtgtgggcatggctccaggccctagagctaggagatggcagagcaagagtgcatattggactctttatcctgatrctaaatgccctttgaagactcaaacgtcactgcctttataaagcccaggctttctccttttgacagccaagggaggaatcatttattcctgcagtattctcacctcctccttgctacatctcaaatggcattataatataatttatttaaacatatgtatttgccacaagattatgaaccacatggatagacactcacttttattcatctttgcttatcccaaagccaacacgaggtacagcgcataatagggtctcaata

SEQ ID NO: 150383 - DNA, 487 bp, Homo sapiens
gtcttttaacaacagtaaacaatagccaggaccctgatgctagatcacactctggtagataattcattgtgcacagctctgcgttcagcactttgtttgtggacatttaaagctcacaatgaccctacggcactactatgctcatttataggtgtgggcatggctccaggccctagagctaggagatggcagagcaagagtgcatattggactctttatcctgatactaaatgccctttgaagactcaaacgtcactgcctttataaagcccaggctttctccttttgacagccaagggaggaatcatttattcctgcagtattctcacctcctcyttgctacatctcaaatggcattataatataatttatttaaacatatgtatttgccacaagattatgaaccacatggatagacactcacttttattcatctttgcttatcccaaagccaacacgaggtacagcgcataatagggtctcaata

SEQ ID NO: 150384 - DNA, 487 bp, Homo sapiens
gtcttttaacaacagtaaacaatagccaggaccctgatgctagatcacactctggtagataattcattgtgcacagctctgcgttcagcactttgtttgtggacatttaaagctcacaatgaccctacggcactactatgctcatttataggtgtgggcatggctccaggccctagagctaggagatggcagagcaagagtgcatattggactctttatcctgatactaaatgccctttgaagactcaaacgtcactgcctttataaagcccaggctttctccttttgacagccaagggaggaatcatttattcctgcagtattctcacctcctcctkgctacatctcaaatggcattataatataatttatttaaacatatgtatttgccacaagattatgaaccacatggatagacactcacttttattcatctttgcttatcccaaagccaacacgaggtacagcgcataatagggtctcaata

SEQ ID NO: 150385 - DNA, 486 bp, Homo sapiens
cacatgcctgtaatcccagctactcaggctgctgaggcaggagaaccgcttgaacctaggaggcrgaggttgcagtgagccaagatcgcaccactgcactccagcctgggtgacagagcgagactccatctcaaaaaaaaaaagtttttaatctaaaaataaaaacagaacataccaactgacactataagaatgtaatccacaaatctacattaggaaattatatggcaatgctactcatagtgtgatccattgaccaatgcagtccacaaactgcttactactggcccacaatgaggtaagtatagaaactgagattaataagcacacaaattacaaacatttgcaaacatggatagcaatgtaacattgtaatctgatattcaagcctctggtcagtgcactcatctcactgaacagagtatgagcctgtttaggccaacccaactcatgtctaactcctgagatgagtcaggtgtgctgtga

SEQ ID NO: 150386 - DNA, 486 bp, Homo sapiens
cacatgcctgtaatcccagctactcaggctgctgaggcaggagaaccgcttgaacctaggaggcggaggttgcagtgagccaagatcgcaccactgcactccagcctgggtgacagagcgagactccatctcaaaaaaaaaaagtttttaatctaaaaataaaaacagaacataccaactgacactataagaatgtaatccacaaatctacattaggaaattatatggcaatgctactcatagtgtgatccattgaccaatgcagtccacaaactgcttactactggcccacaatgaggtaagtatagaaaytgagattaataagcacacaaattacaaacatttgcaaacatggatagcaatgtaacattgtaatctgatattcaagcctctggtcagtgcactcatctcactgaacagagtatgagcctgtttaggccaacccaactcatgtctaactcctgagatgagtcaggtgtgctgtga

SEQ ID NO: 150387 - DNA, 486 bp, Homo sapiens
cacatgcctgtaatcccagctactcaggctgctgaggcaggagaaccgcttgaacctaggaggcggaggttgcagtgagccaagatcgcaccactgcactccagcctgggtgacagagcgagactccatctcaaaaaaaaaaagtttttaatctaaaaataaaaacagaacataccaactgacactataagaatgtaatccacaaatctacattaggaaattatatggcaatgctactcatagtgtgatccattgaccaatgcagtccacaaactgcttactactggcccacaatgaggtaagtatagaaactgagattaataagcacacaaattacaaacatttgcaaacatggatagcaatgtaacattgtaatctgatattcaagcctctggtcagtgcactcatctcactgaacagagtatgagcctgtttaggccamcccaactcatgtctaactcctgagatgagtcaggtgtgctgtga

SEQ ID NO: 150388 - DNA, 576 bp, Homo sapiens
ggaagcaaaaagtcatacacagaacttcgctttcattcccgtcccctttcctcctatgaatcaaaaaccttaagccacaggaaggacattatgtcttttcatccacaagggcatggacaaagatccatagtttcttagagagaagtgaaagaaaaaggtgacttcctttgaggaaggggccaaaaacacttttccagggcacaggcaaagatctcttgctgctgtgaaagagacagaatcaaaactctctacctctgaaagggaaaataagcagtcttggggaagggatcttacactaatacaaagcataggtttgtgaagttctctgttsgtagttttattttgtttttagcactggaagagcattattatcatttccatttcaaaaccaattacaaatacaagaggtggtatgctggtaaatatttaactagcagttctccaggagaaaaagcccagatttgcagtgttggccaatttccatggtgtaaatattccaatattcctactatggcctgtttgaagctaccacatggcttcaccaaatatgaagttggaaagagaggcttataactg

SEQ ID NO: 150389 - DNA, 451 bp, Homo sapiens
gaattctcctgcttctccccagaagtctgttctctgtttcacagcttcaggtgattcccacctgtgggctgttggcctccctccttcctgaggcagaccttccacctaggctgcagatactgttgcatctaattcagactcagactcacacacacatatacccagctrtgtctgtgtctgtgtctctgtgagtgtgtgcacgtgcacacatgcatgtgtgttttgtggaaaggatttcagaaggagccttctgttcaaaaccagtttctcccagttgtctctgccatggaacctcctcgtttaaaaacattcccactatggggagtaagattcttcaggcacactttcccatccagcaggagctggggtcgggacaagcttccagcatcctcttccctggatggctggagagaaatgcgggcccacagatgggtggtaaccacactggttt

SEQ ID NO: 150390 - DNA, 451 bp, Homo sapiens
gaattctcctgcttctccccagaagtctgttctctgtttcacagcttcaggtgattcccacctgtgggctgttggcctccctccttcctgaggcagaccttccacctaggctgcagatactgttgcatctaattcagactcagactcacacacacatatacccagctgygtctgtgtctgtgtctctgtgagtgtgtgcacgtgcacacatgcatgtgtgttttgtggaaaggatttcagaaggagccttctgttcaaaaccagtttctcccagttgtctctgccatggaacctcctcgtttaaaaacattcccactatggggagtaagattcttcaggcacactttcccatccagcaggagctggggtcgggacaagcttccagcatcctcttccctggatggctggagagaaatgcgggcccacagatgggtggtaaccacactggttt

SEQ ID NO: 150391 - DNA, 540 bp, Homo sapiens
tgagcacatctgctgagcaccagcctgtgtctctgtggctctcaagaaatcagtgggcagtcagtaatatactgctttgcattgccctacattcgaccctacttcttttttaacccaccccactttcaaaacaaaatgttggcatcttcatccttgcctctgggctccagacgggatacagggacactaaggagaaaagctgacttttcacccttgcagcttctgcagaagagaccctgaaaggggttgccatgtttggggaagaattaaatcacaccaaagaccaacttttagtttgaataaggcttcaagttcattaatattcagcatttaccttccttcttgattcttaaatatgatgtgttttayagttatcaaaaacatatgctgcttttcagcagaattttatatacaactttttcaacagaaggtgccagcatcccaatatgttttgcttagttttggctttaactattgtgatgaaagcattcaagtgcaaggatgtcatctttttaaacgtggatggagatgttgctgaaa

SEQ ID NO: 150392 - DNA, 396 bp, Homo sapiens
agcaaattctaaagcaaaggcaaaggacatgaacaaactagacacaaagaagagaaatacctgagtaataaagaagaggacctgaactggatgggacaaagagagtttccttagtcacacatgaccaagaattccagtaatgtcttcatgaagaaggattacccataatatatgcatgtgaatgcatatgtctttgttagatttaactctgtagtaaactttgcatttgttttcactttttamcccttttgttgactcttttagatccatgctaaatattcctttcagatttttctgtaattagatctctgggcctggtgaatttcaaggagacactgcagtcaggattctggtgaccagatgggtaggacagataagctgcatgaatttccatct

SEQ ID NO: 150393 - DNA, 396 bp, Homo sapiens
agcaaattctaaagcaaaggcaaaggacatgaacaaactagacacaaagaagagaaatacctgagtaataaagaagaggacctgaactggatgggacaaagagagtttccttagtcacacatgaccaagaattccagtaatgtcttcatgaagaaggattacccataatatatgcatgtgaatgcatatgtctttgttagatttaactctgtagtaaactttgcatttgttttcactttttaacccttttgttgactcttttagatccatgctaaatattcctttcagatttttctgtaattagatctctggkcctggtgaatttcaaggagacactgcagtcaggattctggtgaccagatgggtaggacagataagctgcatgaatttccatct

SEQ ID NO: 150394 - DNA, 567 bp, Homo sapiens
tatccatttcttctaggttttctagtttgtgtgcatagaggtgtttgtaatgctctcagagcttctttgtatttctgtggggtcagtggtaatrttacctttgtcatttctgattgtgtttattgggatcttttctcttgttttctttattaatctagctagtggtctagcaatgttatttattctttccaagaaccaatttttggtccatcaatcttttgaatgaatttttgcatctcaatttctttcagttcagctctgagtttggtcatttttcttctgctgctagctttgcagttggtttgctcttgtttttctagttcctctaggtgtgatgttaggttgttaatttgacatctttctgactttttgagataggcatttagcactataaactttcttcttaacacctcattagctatgtcccagagattctggtgtgttgtatctttattttcattagtttcaatattttcttttatttccgccttaatttcattcatgagcaagttgtttaatttctatgtaattatatggttttgagtgatattcttggcattgatttct

SEQ ID NO: 150395 - DNA, 594 bp, Homo sapiens
  misc_feature (1)...(594): n = A,T,C or G
nnnnnnnnnnnnnnnnnnnnnnnnnnnnnnnngctgtgcatgtgtgtttcatcaaagaagcacagatttggaaccagggctattatttccagtgacttgctgcctcgggggcagcaaatggaaaagagcagggtagcctgctctctcagcgatgttcactgcatctcaaaggttatgtcatgtttcccggcaattgactcaataggtttggattctgcaacataaggtcaggctgtttccactctgcttatgtttcctggggaacgtgccttccagttgttttcacattgacctcattacccagtcctggtgatgagcttgacatggacatgctgcggctgcggccggcttggggctgccctgcccttgcagaccccatgcctctgacctgaccagtgtggctggggatgcctctgccttggctcagaaaggtctgatccctctgctccccctgcaaagtccctctgcatacaactgaacaaarattacaggaggaccaggatgagatggaggggctggggaccctttctcccatttatgcaagggcaggcaatgaagaggagagacaggagacacccaggcccctagtctaag

SEQ ID NO: 150396 - DNA, 572 bp, Homo sapiens
actccgaaaggccccacctcttaatactatcacattggtgattacayttcaacacataaattttggggggacattcagagcatagcagtcaccaaatatcagtgtccagagtttttattggggtttcattatgtaggcatgattgatggaatccttgaccagctgatattacctgattcagtgccccaaccttctaatctcactgggctttcaaggtggccagctttcaccctgagtcatctatgagcacaaactctccaggggcccaccatgagtcacctcatcagcataagtggggtccaccatgaataacaaaggcactgctatcactcaggaaattccaagggtttggagattcaaaggctagattgctgctctttgggtagagttaattctttactacacaggcacctacctggggcaggcagcccctgagatggtccccactgacccccacctcctggtcatacataaggtatgaccacctcctatgctgaaccaaatgactcatttctggcaaatagaatactaaaaatgtgatggatatcacttctgggattagggtacagaaa

SEQ ID NO: 150397 - DNA, 572 bp, Homo sapiens
actccgaaaggccccacctcttaatactatcacattggtgattacacttcaacacataaattttggggggacattcagakcatagcagtcaccaaatatcagtgtccagagtttttattggggtttcattatgtaggcatgattgatggaatccttgaccagctgatattacctgattcagtgccccaaccttctaatctcactgggctttcaaggtggccagctttcaccctgagtcatctatgagcacaaactctccaggggcccaccatgagtcacctcatcagcataagtggggtccaccatgaataacaaaggcactgctatcactcaggaaattccaagggtttggagattcaaaggctagattgctgctctttgggtagagttaattctttactacacaggcacctacctggggcaggcagcccctgagatggtccccactgacccccacctcctggtcatacataaggtatgaccacctcctatgctgaaccaaatgactcatttctggcaaatagaatactaaaaatgtgatggatatcacttctgggattagggtacagaaa

SEQ ID NO: 150398 - DNA, 572 bp, Homo sapiens
actccgaaaggccccacctcttaatactatcacattggtgattacacttcaacacataaattttggggggacattcagagcatagcagtyaccaaatatcagtgtccagagtttttattggggtttcattatgtaggcatgattgatggaatccttgaccagctgatattacctgattcagtgccccaaccttctaatctcactgggctttcaaggtggccagctttcaccctgagtcatctatgagcacaaactctccaggggcccaccatgagtcacctcatcagcataagtggggtccaccatgaataacaaaggcactgctatcactcaggaaattccaagggtttggagattcaaaggctagattgctgctctttgggtagagttaattctttactacacaggcacctacctggggcaggcagcccctgagatggtccccactgacccccacctcctggtcatacataaggtatgaccacctcctatgctgaaccaaatgactcatttctggcaaatagaatactaaaaatgtgatggatatcacttctgggattagggtacagaaa

SEQ ID NO: 150399 - DNA, 625 bp, Homo sapiens
atcacatgggtccacttttacatggattttcttctgcttctgctacctggaagacagcaaaaccaacctctcctcttcctcctctgcctactcaatgcgaagatgacaaggatgaagccctttataatgaygcacgtccatgtaatgaatagcagatacatgtttcttccttttgattttcttaataatgtctttttctctagcttactttgttgtaagaatacagtatgttgacataaaacatcaaacatacaaaacgtatgttaattgcctgtttatgtccttggtaaggcttttggtcaacagtagggtattagtagatacgtttttagggagttaagtcatacatagatttttcagctgcctgggcagtcagtacctctaacccctgcattgttcatgggtcaactgtataatgagaagtgaaactgctgggtcataatatagacatatattcaattacagaaaatgacaaactgtttttcaaagttgctgtgttgatgactgttatgaaacctcagttcttgtcttcttagttcaaaaatatttaaacaagagacacagcaaagaagatgcagcatagagcaatgtatcacaaagaatactctcaaagttaggtgcagaa

SEQ ID NO: 150400 - DNA, 547 bp, Homo sapiens
ctatttactttttgccggctcctataacttctgaatctcccccttctcgtttcataaacattttgtgtatagttttaggtggcaatatttttgctcatttgggaagactgtgcctttttggagttgaatcaggctaacttgtgccttccatgtttcttcaggagtgggaaacaggagcagtgacaaatgctaaaatgtgggatggggcagaatggtttgagatgagagaatttgcagaaagccaggaggaagatgattgtttaaaaaataaaattttgtcattgtcccrccttgggtcttttccacacctttccagtggaaagcctgtttaacctgctttaaaaaaattgcagcaattggaagttatgagtaagggttgtgttgcttttctatttgacctccactcctgcaggactgaacaattcaatctctctttcccagcttacctgtggcatgtggggcctgcttgacttgaataaatggctgtttatggatgatagcatctggtatgcccctgattaggtcactgtgttatgttaagtatttc

SEQ ID NO: 150401 - DNA, 547 bp, Homo sapiens
ctatttactttttgccggctcctataacttctgaatctcccccttctcgtttcataaacattttgtgtatagttttaggtggcaatatttttgctcatttgggaagactgtgcctttttggagttgaatcaggctaacttgtgccttccatgtttcttcaggagtgggaaacaggagcagtgacaaatgctaaaatgtgggatggggcagaatggtttgagatgagagaatttgcagaaagccaggaggaagatgattgtttaaaaaataaaattttgtcattgtcccgccttgggtcttttccacacctttccagtggaaagcctgtttaacctgctttaaaaaaattgcagcaattggaagttatgagtaagggttgwgttgcttttctatttgacctccactcctgcaggactgaacaattcaatctctctttcccagcttacctgtggcatgtggggcctgcttgacttgaataaatggctgtttatggatgatagcatctggtatgcccctgattaggtcactgtgttatgttaagtatttc

SEQ ID NO: 150402 - DNA, 452 bp, Homo sapiens
actgtttgtaggaacatcaattggtttgaaacttttgaaaggtgctttggttgtagctttcatagttttaaaacatccctttacccagcattgccacctctagaaatgtatcccctggaaatactggaaagcacatatgagctaggttatgtttttggtagcattcactgcaagagcaagattaaaatttaaatgctcatcagtagggaaatggctaaactacggttcactcatagtacagaatactacacaacaattaaaagtttgtgatagactcgtaggaattgacacaaattgttctgattcattgtgtaaaaaacaaaaaagcaagtcacagttcattaaaagtgattttagttttgaaaaataactacgtaagtacctgcgtgaatgtatgcaatgcttagcaaggccaggactggggtgaggcaayaaggacacccagggagcaa

SEQ ID NO: 150403 - DNA, 607 bp, Homo sapiens
tgtttgttgggaggaccaggtttgtggatattcttaatgagtaggttttaagtacagattaaaggcctatcaagaaattttgaaaataaaatataacactgggtagtgttttagttttaaaacttccacaatcagagagagagattaaccttgcatgactcacataatgaataccttctatctggaagttaggtaataccaaatttccaaatgttcctgaaaaataaatcctaaagtttcagagctggaagggaacttargcatcatgtagactaactacctcttcttacagttgagtaaatgggccccaagaagttaatggcttgcccaagtcatcgagtgaaattaaatagaaagcctactacaaattccagggtcataagaaaaaatatgtttaaccaacagcccctccttgagatggaataacaaaaaagctcatggcccatgtctatcaagatctggaaaactttcgtcatctatatatacagagagacacaaaaatctgagtgaattttatgcaaataggcttcaaggaaactactattgtactttataatgaaaatatcattaaaatgactttgataacccaaaaatcaaaatggaacaa

SEQ ID NO: 150404 - DNA, 607 bp, Homo sapiens
tgtttgttgggaggaccaggtttgtggatattcttaatgagtaggttttaagtacagattaaaggcctatcaagaaattttgaaaataaaatataacactgggtagtgttttagttttaaaacttccacaatcagagagagagattaaccttgcatgactcacataatgaataccttctatctggaagttaggtaataccaaatttccaaatgttcctgaaaaataaatcctaaagtttcagagctggaagggaacttaagcatcatgtagactaactacctcttcttacagttgagtaaatgggccccaagaagttaatggcttgcccaagtcatcgagtgaaattaaatagaaagcctacyacaaattccagggtcataagaaaaaatatgtttaaccaacagcccctccttgagatggaataacaaaaaagctcatggcccatgtctatcaagatctggaaaactttcgtcatctatatatacagagagacacaaaaatctgagtgaattttatgcaaataggcttcaaggaaactactattgtactttataatgaaaatatcattaaaatgactttgataacccaaaaatcaaaatggaacaa

SEQ ID NO: 150405 - DNA, 607 bp, Homo sapiens
tgtttgttgggaggaccaggtttgtggatattcttaatgagtaggttttaagtacagattaaaggcctatcaagaaattttgaaaataaaatataacactgggtagtgttttagttttaaaacttccacaatcagagagagagattaaccttgcatgactcacataatgaataccttctatctggaagttaggtaataccaaatttccaaatgttcctgaaaaataaatcctaaagtttcagagctggaagggaacttaagcatcatgtagactaactacctcttcttacagttgagtaaatgggccccaagaagttaatggcttgcccaagtcatcgagtgaaattaaatagaaagcctactacaaattccagggtcataagaaaaaatatgtttaaccaacagcccctccttgagatggaataacaaaaaagctcatggcccatgtctatcaagatctggaaaactttcgtcatctatatatacagagagacacaaaaatctgagtgaattttrtgcaaataggcttcaaggaaactactattgtactttataatgaaaatatcattaaaatgactttgataacccaaaaatcaaaatggaacaa

SEQ ID NO: 150406 - DNA, 553 bp, Homo sapiens
gcaggtgattcttctgcccattccctggagtcttcttagaattttctctatgaaatcattcagtgctatctagcttctgatggggaagcttggactctctctgactgggagggttcttgattggctaaaagggtttatctggcaactcagctctccctctccgcctattgaaggagacggggggtttcrggttcagtaacctgggagttcctgtaatccccagaactgatagtcactttagggtcttctgctccctgccctgcatttcacatgtgggcacattcttaaattccctctggatcactatttaacagcagctggactctgaactcttggtatgcttggagccccagatagaacctggcttataccaggaaggtaattaattaatattttttcttttatacagtgtattcatttatctctctctatatattgtctacatgtgccccaaacagcaccagtgatcagggatatcataatgagtacaatggagacaggtgatccatgtattcggagagagaaggcacacaaataattgtaaattgtgcat

SEQ ID NO: 150407 - DNA, 485 bp, Homo sapiens
agaattcttaatacttggcttacttaatgctttttcatgtcatgaaaaagacacaaatttttcatcctgagcttttaaaatctcctcactgaaactttggaagaattatcatttgtggcattgctttggcaattatcagcaaagtctgaccagctggctcttgattaatctgtaccattcaagttatttctctttcataattggttattgccaagaattgaaaatacagcagcaggttgccacagcaaatactctcaccaagttgcacccaggagcttggccatgataatctcgcgtcttcctccactgcatgcacgtttaaatgtctttggtgcattgctgcatgcgctatcccatctcaatttctccatcccttctrtttccacacccatgaagctccttctacccccactcccgctggctgagatctgagatttcttctgtgtttgagaacactacaaagagattgcttccaccctaggaac

SEQ ID NO: 150408 - DNA, 560 bp, Homo sapiens
gcccactatccgcatcagacatggggaatgtctacagcaaaagaggggccatctaggaaacagtttggactcccctagtagggagctcaaggagaatgccctccattgcctgggatcaagaactaaagaccaccaaaaagttaactgacactcccaccaccccatacctcacctccatgagggaaaagaaggcatctatggccactcataggagccacagatagcactgaaaacttacaattccagtgtgattaaacactgtaggttgatggggcctgagtgccattatctttaatccttcaccacactcctgcccccagtgctcacctcctcacttgggagagcacagctgcccagatgtgtgtttcccattaactctgctgcctctagtctggaataaagaagacattttcatgccaaattaaaaatgacttggaaatgggcattgtgttgggagaattggccttttgaaagggatataaaaatgagggaagctgatttcatcacccgcctacagayaggccatcaaagcatcctgcccctgtgaagcaggcaggcca

SEQ ID NO: 150409 - DNA, 481 bp, Homo sapiens
aaagtgccaactggcgagaattcgaatatgctgtgaaaggtgggggcagggggaggttagtctggaaaggattaggtgtattctctttgtcatgggagatacaccaaacagtgactgtgggagagccagagatgctccaagcagtggaaaccacagatgttgccctgcaactggtagcttcatttttttcttttgctaagcctgctccaagagtggaggggtctcgttgtcgtcatggttttgatgmtctctggagacattagccttggggagagaccttatggggcatggggtggcagaggatgaatccagaaagaagtagagggtagaatgagaataatcaagggagccaatgaagcaaccccaataattaggcattggctcagttggttggatccttggtggccatcagaacttaagttctctcctgccttctgctcctctctagagtgctcaggactgtagatggcgtggttcttgg

SEQ ID NO: 150410 - DNA, 481 bp, Homo sapiens
aaagtgccaactggcgagaattcgaatatgctgtgaaaggtgggggcagggggaggttagtctggaaaggattaggtgtattctctttgtcatgggagatacaccaaacagtgactgtgggagagccagagatgctccaagcagtggaaaccacagatgttgccctgcaactggtagcttcatttttttcttttgctaagcctgctccaagagtggaggggtctcgttgtcgtcatggttttgatgatctctggagacattagccttggggagagmccttatggggcatggggtggcagaggatgaatccagaaagaagtagagggtagaatgagaataatcaagggagccaatgaagcaaccccaataattaggcattggctcagttggttggatccttggtggccatcagaacttaagttctctcctgccttctgctcctctctagagtgctcaggactgtagatggcgtggttcttgg

SEQ ID NO: 150411 - DNA, 530 bp, Homo sapiens
tcaattgcaagcctagcactrccattcctagctgtgtggctttggacaagttccttaacctttctatgcctcaatgtcatcatgtgcaaaataaggattgcagcacctgcattgtaaatggttgcaagggttacataattttttcaaaattttttgttgttgttgagataatatatagagaaatgtctctagtattcagttgaatgaattttcgtaaaatgaacacacttctctggccagcatccagaataagaaacaaacaagaccagaatgctgaagaccttgcttgggctctctgtaaataaagtaacttctgcgaaatgtttagtcaggtgtttggcacacatattatagacagttattaattattactactgtcacctctccctcatttccaaacacccttattctaccagcagcacaactgcattagtcagggtcccccagataaacagaaccaacagagttctgtttaataaatataaagagatttattatcaggaattggctcacatgattatggaggctga

SEQ ID NO: 150412 - DNA, 574 bp, Homo sapiens
tgaaaattccttagtgatccttatggaaaacgaaacccagttgacttcttttcttctccttgtctcccccagacttgttcttcaccctccccttgatgtcagacactgaccactctctatttctccagccacccatctctcagcatttcctattcagcccggatagattggcccttccagctatgctgtcaccaacaccartttccttgccctcatctttctgctcatcacctccctaatctcctctaatcatgggacagtggaagggtcaagatttttccacttctgttcacaattttttgaagttgctaggaaaaaatctcacatccatgctgacaagctcccttatgaattaaagttttccaactgcagctggctctgggctgcttggcagtactctgacactgagcattgtggcagctttagaccttgacattcttttcaacactgcttctactcttgctcatggcctttattgccacttacaccctccactgccttgaacccagcattcttcttggatttaggacacccccaaacctgaccatatctgattagaccaaaggtgttgcct

SEQ ID NO: 150413 - DNA, 333 bp, Homo sapiens
aagttcctctccaccatagagccttctctgatgcmcctccctctccattcgcacagagaggaataccatgagtgtgtcaggcccttttatatcctggaggctcttcactgttttctctgcctggaaaacttttgctctagttcatcacaggaccagttccttctctgagatcaacccaaatgtcacagctattctacctagagaagactcccatcactattctgttccctctgcagttcctctctatcacagggccttgtttaatttccttccttacacttattagaaattctgagtatgtgatatggccagttagggtctctgggaagccag

SEQ ID NO: 150414 - DNA, 562 bp, Homo sapiens
ctacagaacttttgcttacttctgcattttgtcaaaactttttttaaaaaaattctgaggccaagaatagatgtaaaagtacgaagaaacccccagtttggggggataattaaaaccctggtttcctttgtcggtaattgttagaatctcttggctccagggctttctttcaagtccccatctccactagcctcatctctggcctctggccaaggtacagaagacaaacaggacctggtttccctccaactcactgcccctcaggcctggcctttggtctgactgctgcttctttctctaactcagagycctgcagcatgttatccatagcttaggggaagatcagcactgagggataagccccaggctctcagctcccaggggagagttagggccccagctccaggaaattctcctttctctctctctcccccggcatatggaggcaataaggattatacccaagctctgagtagttacagtgcttattgagcaaaggagggaggagaaaatcctcttttcttcctccccccttcaaagctgatgagaaatcagaaaagcc

SEQ ID NO: 150415 - DNA, 562 bp, Homo sapiens
ctacagaacttttgcttacttctgcattttgtcaaaactttttttaaaaaaattctgaggccaagaatagatgtaaaagtacgaagaaacccccagtttggggggataattaaaaccctggtttcctttgtcggtaattgttagaatctcttggctccagggctttctttcaagtccccatctccactagcctcatctctggcctctggccaaggtacagaagacaaacaggacctggtttccctccaactcactgcccctcaggcctggcctttggtctgactgctgcttctttctctaactcagagtcctgcagcatgttatccatagcttaggggaagatcagcactgagggataagccccaggctctcagctcccaggggagagttagggccccagctccaggaaattctcctttctctctctctcccccrgcatatggaggcaataaggattatacccaagctctgagtagttacagtgcttattgagcaaaggagggaggagaaaatcctcttttcttcctccccccttcaaagctgatgagaaatcagaaaagcc

SEQ ID NO: 150416 - DNA, 537 bp, Homo sapiens
cttgctaagccttaagtgacaggctgtgtatagtcctggctttcaaggagttaagagttgagcatcagagaaaagccagatacaaagagccacaatacaaggaagagagtggaccatgttgtacaaggcacaggcaaagtgagctggaacaacttggagcaccttctagctggaaaatcagggrgaattcaagaaggagatggtcttcaagcttagtctttaatgcctagcttctggctgcacctacgcatctgccagctgctccgcatgacacaggagccagaggaatggctgctggggctgctcactctatgtccagaggccgctctagattcagccaaactcccaaggctcacgccttcagatcatctctggcttccttttcagaagagcttaactttcacccatgtcaactttccggctgcttctggactcagcctctggctccctctgaaacatacataataggaagcctgtctggagaattagcaaccagcagcatgaaactgttctcaaaagatgttcactcaatttaca

SEQ ID NO: 150417 - DNA, 605 bp, Homo sapiens
aacgccacagaagccatcaggcaagacagatgtttaatttagtcctggcaagagggtaagatatctatctgtcttccccatttactcatcttaatccttaattgccacccatcttccccaagcagtctgtctcatttactttgctcccatttgcaatcaagggctgagcctcaaagacatctggagtcttaaaacccagtagtaataagtagaaaccaacacaaaacaaaacaaaaaaaatcttttagaaatctctgaccatagataatgtggccccaaaagctccagtccccaaaagctccagtccccaggcttaatatcagtggagaagagggagggttggcagaggtacatccctctttaagactcagcatcagatttcagaattgactgtggctgccacttagccaggctctgggtcacagcaccaggctctgtaagttcttagagagccaggctcaggacccagggacctgcctgtgaaggaggcctgtggaggcagcatagaaagggcccaaggcaacctgyggcatttcaaggaccctggacatctgtgggggcagtatcagtatgttaagaggaaggagaaataaaggaatgagcac

SEQ ID NO: 150418 - DNA, 300 bp, Homo sapiens
agtgttatagatacattgcatatgtaatatatgttatctatgtaacataatgtattatattatatataatattagattatataatatatagcacattatataatatwtaatatattattggattatatattatatactattagattatatactatattatataatgtagtatataatatgttatataatatacaatataatattagattatataatatatgatattagattatataaaatattatataacacattatatactatattgtataatccaatattatataatatattacatat

SEQ ID NO: 150419 - DNA, 300 bp, Homo sapiens
agtgttatagatacattgcatatgtaatatatgttatctatgtaacataatgtattatattatatataatattagattatataatatatagcacattatataatatataatatattattggattatatattatatactattagattatatactatattatataatgtagtatataatatgttatataatatacaatataatattagattatataatatatgatattagattatataaaatattatataacacattatatactatattgyataatccaatattatataatatattacatat

SEQ ID NO: 150420 - DNA, 399 bp, Homo sapiens
gtgcttttgtctcccagaagggaaagtctcttagaggagaggaagtggttgcctagtgtattagtcagcattttccagagaatcagaaccaccgggttggaaaatgaagagagagagagaaagagagtggttttacagaattggttcacatgawtgtggagtctggcaaatccaaaatcttcagggtagccagcaggctggagacccagggaagagttgacattgcagctcaaggacaaggcagtcagctggcagaattctctcttcattggggaaggtcagtcttttttctcttaaggccttcaactgattagatgaaacccacccacatcatggcttacccatgtaatctgctttactcaaagtctgctgatttaaatgtaatttcatctaaaaaat

SEQ ID NO: 150421 - DNA, 399 bp, Homo sapiens
gtgcttttgtctcccagaagggaaagtctcttagaggagaggaagtggttgcctagtgtattagtcagcattttccagagaatcagaaccaccgggttggaaaatgaagagagagagagaaagagagtggttttacagaattggttcacatgaatgtggagtctggcaaatccaaaatcttcagggtagccagcaggctggagacccagggaagagttgacattgcagctcaaggacaaggcagtcagctggcagaattctctcttcrttggggaaggtcagtcttttttctcttaaggccttcaactgattagatgaaacccacccacatcatggcttacccatgtaatctgctttactcaaagtctgctgatttaaatgtaatttcatctaaaaaat

SEQ ID NO: 150422 - DNA, 513 bp, Homo sapiens
gtcccggctggaactggtagcatctttcaaggccttgtctcagatgccttcctgggttggcttcccggatcaggaccccacatgggtctccacatttggctttagagtcttggctttgcccttcccccagctttggtactgttttgtatgactttattaaaaatgttaagagatattttctggtataaaaaatacctgagatttttctgctttgacaaatgttatgatgtcaagtattggatctagtcttggggtctccccaggaataataaaatattattatctaataatattataagctaataattagcttacatagctgtggcactattctaagtgctttactcatttaatcctataataatcctaaaaagtaggygctgttatgtacttattttaaagatgagaaaactgagacagaaagagattaaactactttcccaatgccagataagctaggaagtagcagagctagaattattacctggtcattctcacatgtttaaacttgac

SEQ ID NO: 150423 - DNA, 609 bp, Homo sapiens
tttctgctttgacaaatgttatgatgtcaagtattggatctagtcttggggtctccccaggaataataaaatattattatctaataatattataagctaataattagcttacatagctgtggcactattctaagtgctttactcatttaatcctataataatcctaaaaagtaggcgctrttatgtacttattttaaagatgagaaaactgagacagaaagagattaaactactttcccaatgccagataagctaggaagtagcagagctagaattattacctggtcattctcacatgtttaaacttgacattaaacttcctgagcaagcgagtccctgcagataagctgagcagtaggccttggagaagaaagtctctgatttgctttgtctgaactttagggcccctatgtggaccccactccatcccatctgaacattctcatttccccccatttcccgttgtggagattctgctccagccaagagaaatttctccctgtcctctatcacaaccacaccactccctctgcaattctgtgtttattcatctgccacctctttctctgaatgctttcccttcttcctccaccccaattgaaatatcac

SEQ ID NO: 150424 - DNA, 609 bp, Homo sapiens
tttctgctttgacaaatgttatgatgtcaagtattggatctagtcttggggtctccccaggaataataaaatattattatctaataatattataagctaataattagcttacatagctgtggcactattctaagtgctttactcatttaatcctataataatcctaaaaagtaggcgctgttatgtacttattttaaagatgagaaaactgagacagaaagagattaaactactttcccaatgccagataagctaggaagtagcagagctagaattattacctggtcattctcacatgtttaamcttgacattaaacttcctgagcaagcgagtccctgcagataagctgagcagtaggccttggagaagaaagtctctgatttgctttgtctgaactttagggcccctatgtggaccccactccatcccatctgaacattctcatttccccccatttcccgttgtggagattctgctccagccaagagaaatttctccctgtcctctatcacaaccacaccactccctctgcaattctgtgtttattcatctgccacctctttctctgaatgctttcccttcttcctccaccccaattgaaatatcac

SEQ ID NO: 150425 - DNA, 491 bp, Homo sapiens
agtttggaaaataaaaaagacatgaagaagaaaattaaaattactcatcattccatctacccatatcattctcatgtattttctttgagccttttgtatattttacaaaatggaagcttaccacatatacaaktttatattttgatttttgcactttacattagggctataacaagtttgatgataaaatctcaaactcaccaggttttaaacatggaatgcttttacttttacaatatttcccgattactgtgccatgtcaaatccatctctctctcactggggaaaagagattcttgacaacactatccagttccatagctttcagtcacattcagttattaaggtggcattgttttggttttaagcttagtctttcatatttaaaacatttaattttgtatttaattgattcatgaatgtcctcagatttcctcttatccgcaaagggtgggctgcagttgcagcttatactaaaaagtaaagaggga

SEQ ID NO: 150426 - DNA, 460 bp, Homo sapiens
gccaaactttctcttactctgtcttacatgttcagcaaggtctaaaaaaagactgatctaccataaatctttctcaggaacctccatcaaagtgaaaaaaaggcagggtatggtggctcatacytgtaatcccagcactttgggaggctgaggtgggtggatcacttgaggtcaggagttcaagaccagcctgggcaacatggtgaaaccctgtctctactaaaatacaaaaaaattagctgggtgtggtggcacatgcctgtaatcccagctactcgggaggctgaggtggaagaatcacttgaacatgggagacagaggttgcagtgagctgagatcatgccattgcactccagcctgggagacagagtgagactctgtctctcaaaaaaaaaaaaaagccacaaataaatcaaaaaagaagaagaagatatcaagtccaggaaacagaaagtctaac

SEQ ID NO: 150427 - DNA, 573 bp, Homo sapiens
cacccgctgcttccaaatctgtgccaaaatattctatgctgcacagataaaatcctctgtcggttctacaagcctggcttttcctatagagaaccctcttataagcaaaaagtaaakctctcgtgaagagcccggatagctcagtcggtagagcatcagacttttaatctgagggtccagggttcaagtccctgttcgggcggcatgtctttgcttttgggtaccgcacttcgcataaaatggtaacaaaaatagttactagtttttaaagctaggtgatacagaaacttgatttccacaaaatacagcaaacgacggtggagggtaataaacatactttaaaacagtacaaacgcgagccgtattatcgaatttacattttctggtagccacattacaaagaataaaaagcaagcgaaattaatttcacggatctattttacttaccctaatataccaaaatcttattttaacatataatcaacattctaaaaatattaatgaaattttaagtctttttgtttgtacaaagccttccttcaaaagaagatgtgtatttagaagctggcaata

SEQ ID NO: 150428 - DNA, 573 bp, Homo sapiens
cacccgctgcttccaaatctgtgccaaaatattctatgctgcacagataaaatcctctgtcggttctacaagcctggcttttcctatagagaaccctcttataagcaaaaagtaaagytctcgtgaagagcccggatagctcagtcggtagagcatcagacttttaatctgagggtccagggttcaagtccctgttcgggcggcatgtctttgcttttgggtaccgcacttcgcataaaatggtaacaaaaatagttactagtttttaaagctaggtgatacagaaacttgatttccacaaaatacagcaaacgacggtggagggtaataaacatactttaaaacagtacaaacgcgagccgtattatcgaatttacattttctggtagccacattacaaagaataaaaagcaagcgaaattaatttcacggatctattttacttaccctaatataccaaaatcttattttaacatataatcaacattctaaaaatattaatgaaattttaagtctttttgtttgtacaaagccttccttcaaaagaagatgtgtatttagaagctggcaata

SEQ ID NO: 150429 - DNA, 573 bp, Homo sapiens
cacccgctgcttccaaatctgtgccaaaatattctatgctgcacagataaaatcctctgtcggttctacaagcctggcttttcctatagagaaccctcttataagcaaaaagtaaagctctcgtgaagagcccggatagctcagtcggtagagcatcagacttttaatctgagggtccagggttcaagtccctgttcgggcggcatgtctytgcttttgggtaccgcacttcgcataaaatggtaacaaaaatagttactagtttttaaagctaggtgatacagaaacttgatttccacaaaatacagcaaacgacggtggagggtaataaacatactttaaaacagtacaaacgcgagccgtattatcgaatttacattttctggtagccacattacaaagaataaaaagcaagcgaaattaatttcacggatctattttacttaccctaatataccaaaatcttattttaacatataatcaacattctaaaaatattaatgaaattttaagtctttttgtttgtacaaagccttccttcaaaagaagatgtgtatttagaagctggcaata

SEQ ID NO: 150430 - DNA, 554 bp, Homo sapiens
ggttagtgagggtacagtaagcctcccagaaagctgcaattctggaggaactctgaatttcatccccaagcgagctctgccccaatagcctcctcctttcagctgggtcccgcctccttatacagccttayggtctgtaaaccagccagtgcccccattcacccctcacttcccgcactcccaggccagtttctctccttcccctccccccttcactcctcctctttccgggagcctcgtgccgggtcctagaggggcagaatctggatgtcgaagggggcggggtcgggtcctatccctcctacccttgggccgcggaatataaggctccaggcgagcagggaaccggtccacacagggtccggaggagcaatggtcacccgggatcgagctgagaatagggacggccccaaggtgagaggcgggaggggagggagcagaggtccctggtttggctaggggactgggcccctgacgccgtcggtctggagagaggctggggacgcaggggtggaaggggagcggtgctccagaactccaggagccagaagctg

SEQ ID NO: 150431 - DNA, 554 bp, Homo sapiens
ggttagtgagggtacagtaagcctcccagaaagctgcaattctggaggaactctgaatttcatccccaagcgagctctgccccaatagcctcctcctttcagctgggtcccgcctccttatacagccttacggtctgtaaaccagccagtgcccccattcacccctcacttcccgcactcccaggccagtttctctccttcccctccccccttcactcctcctctttccgggagcctcgtgccgggtcctagaggggcagaatctggatgtcgaagggggcggggtcgggtcctatccctcctacccttgggccgcggaatataaggctccaggcgagcagggaaccggtccacacagggtccggaggagcaatggtcacccgggatcgagctgagaatagggacggccccaaggtgagaggcgggaggggagggagcagaggtccctggtttggcyaggggactgggcccctgacgccgtcggtctggagagaggctggggacgcaggggtggaaggggagcggtgctccagaactccaggagccagaagctg

SEQ ID NO: 150432 - DNA, 436 bp, Homo sapiens
gtagaaaggagtccaacagcaggaacatgccccagtaaagggaaacgaaagctgggaaccctagaccayagggcgcaccgggcttagagacacgggctggctatgacacttcccattaccaactcctagtgcccccctgtggccactttgagaatcacactttgccctgcccaaggtcagggcctcttgcaaagtccagtccattaccaatgtatcttctcaaccttcctggtataccttccgatccaatattattcccattggttaagaaaagatcttattctcccccaaccaaaaaaaaaaaatagaaaaataaaaaagatcttagacaacacctggttactcattacacatttattgtacattttcacaatctggatgcgccacagaattgggggcatggggtgggggaagaggggggcaggggacactggga

SEQ ID NO: 150433 - DNA, 595 bp, Homo sapiens
atttgagtctcaaaatcataatcaggagctgtgttttatgtgtttttttctttctttggcatgaagattttctcatcactctctgctcttctttaagtcctttctctgttcccccaaacgcttccctttaaaagattctcagaactcttgaggcccaactctgatatgtggcttcctattttrcataagcgacttttgaacagatgctatttctaagtggggaaggaaacatactggcatattatttttgagggaaaagttaaagattattaatattgctaactatatttagcaaaaagtattactttcttctataggtttgctaactcgtttttgctattctaggaccagcaactatgaacacattatcttactttctatgaacaacagaaaaaaaagcaaacacagtttgacttgtaagtcattgcaaagaaacagaccatatgtttcacattgtgccaaagcttcacaatgaaaaattttaagacagaatgaaaatgtagatgaaaaagaaaggaaggaagaagtggaaggagagagggaggtaggtaagaagaaaggaggaaagggagagttcattcattttctcttcctg

SEQ ID NO: 150434 - DNA, 582 bp, Homo sapiens
gaattcaaattttgcctaacacatagtaaatgcttaaaatataattcctctaatgtatcttttatatttaaaatcctaaagactgatgctactcttctccctttgtcttgcagattctgaacttttgctcagaagctaaagtttgctctccaaggcagagactcttgtatgtttcaggaagcgcatttctctaactgctctgttaggcttcctgtctgtcctcgatctgaactgatcacggccaggctcaaatgtgtggtaggtgtaactttcagatctgaacattatcttcctgatagaggaaatctttgcyttttctggcaaaaccaatttttatccttgagtaagtggctagatatatctgaaagtcttctctaatctttaaggggagggagatttgcttctcaaacttcacaatctcagaacagctcacattcatctctcatcctgggtggctgaagagagaccaggttactcttcctgcttcctcagggctcaacatctgcaaataccaggtgaattgctatctgtttatatttttccttctggtagaacggattaggtacaggctcacagtgctta

SEQ ID NO: 150435 - DNA, 582 bp, Homo sapiens
gaattcaaattttgcctaacacatagtaaatgcttaaaatataattcctctaatgtatcttttatatttaaaatcctaaagactgatgctactcttctccctttgtcttgcagattctgaacttttgctcagaagctaaagtttgctctccaaggcagagactcttgtatgtttcaggaagcgcatttctctaactgctctgttaggcttcctgtctgtcctcgatctgaactgatcacggccaggctcaaatgtgtggtaggtgtaactttcagatctgaacattatcttcctgatagaggaaatctttgctttttctggcaaaaccaatttttatccttgagtaagtggctagatatatctgaaagtcttctctaatctttaaggggagggagatttgcttctcaaacttcacaatctcagaacagctcacattyatctctcatcctgggtggctgaagagagaccaggttactcttcctgcttcctcagggctcaacatctgcaaataccaggtgaattgctatctgtttatatttttccttctggtagaacggattaggtacaggctcacagtgctta

SEQ ID NO: 150436 - DNA, 565 bp, Homo sapiens
tcaaattttgcctaacacatagtaaatgcttaaaatataattcctctaatgtatcttttatatttaaaatcctaaagactgatgctactcttctccctttgtcttgcagattctgaacttttgctcagaagctaaagtttgctctccaaggcagagactcttgtatgtttcaggaagcgcatttctctaactgctctgttaggcttcctgtctgtcctcgatctgaactgatcacggccaggctcaaatgtgtggtaggtgtaactttcagatctgaacattatcttcctgatagaggaaatctttgctttttctggcaaaaccaatttttatccttgagtaagtggctagatatatctgaaagtcttctctaatctttaaggggagggagatttgcttctcaaacttcacaatctcagaacagctcacattcatctctcatcctgggtggctgaagagagaccaggttactcttcctgcttcctcagggctcaacatmtgcaaataccaggtgaattgctatctgtttatatttttccttctggtagaacggattaggtacagg

SEQ ID NO: 150437 - DNA, 582 bp, Homo sapiens
gaattcaaattttgcctaacacatagtaaatgcttaaaatataattcctctaatgtatcttttatatttaaaatcctaaagactgatgctactcttctccctttgtcttgcagattctgaacttttgctcagaagctaaagtttgctctccaaggcagagactcttgtatgtttcaggaagcgcatttctctaactgctctgttaggcttcctgtctgtcctcgatctgaactgatcacggccaggctcaaatgtgtggtaggtgtaactttcagatctgaacattatcttcctgatagaggaaatctttgctttttctggcaaaaccaatttttatccttgagtaagtggctagatatatctgaaagtcttctctaatctttaaggggagggagatttgcttctcaaacttcacaatctcagaacagctcacattcatctctcatcctgggtggctgaagagagaccaggttactcttcctgcttcctcagggctcaacatctgcaaataccaggtgaattgctatctgtttatatttttccttctggtagaayggattaggtacaggctcacagtgctta

SEQ ID NO: 150438 - DNA, 585 bp, Homo sapiens
ctacattcctaagtaaggttctttacttggtctatggaaaaagaacttacagtttgaataaagtgagtgtatttccatgggaaatgaagtacttggagatatgtatacacacacatatatatatatcaaattagcttcaaatatttaaagtgaataaaacacacacaaaagcagattcttagtaaatgtcgttatgggcttaccacatrctttgaattatgctaaatactttacaaacgttattgtatttaatcccattagaccccagtaaattatttatttttagataagagaatgcgaaaacagaaatggtaggggaactataatatcacacacttattaagtgttgcttctaagaaccaaacacaggtctcatgatttcaaagtcaacaccttgccaacaattcaccaaaaagttggctagaagggtttcttgaatttgatggaggtttggaggtttcaaacctacagacctaaaaatattattgtcctttggatgaaaccagatggtggacattattgaggcaaaattccattgaagaatatagagttgtgacaaaacaagaaaaatatgtttgcttttat

SEQ ID NO: 150439 - DNA, 503 bp, Homo sapiens
ttagatcaatgcaaaagttaattgctgtttctgcaattacttttaatgacaaaaagtatgatttaaagaattaggtatgtcttcaatgtcagtacagaaagtatttacctcacttctgtgagcattattctgaaattatcaagttattgaaaatgagctaaaattgacaaagtgaatttaacaaagttaagtgaaaattatgcactcataatccaaaaatcaactacaaaaatgtgygagctgagtgacagaaagcagttatagctattttgaaaagaacttaaaatttctgcaactacaaattcagtataagacaacagggtctggtaaatacaatgttttaaataaatgcacattaaactaacgcattaaaaatattagggcataacattggaactgagtgtcaacaactatgtattacatcaaaaattgggtaccacctctattcccatgtctctgttgtatgctacagagaatgcaaagtggaggaagactgatattta

SEQ ID NO: 150440 - DNA, 503 bp, Homo sapiens
ttagatcaatgcaaaagttaattgctgtttctgcaattacttttaatgacaaaaagtatgatttaaagaattaggtatgtcttcaatgtcagtacagaaagtatttacctcacttctgtgagcattattctgaaattatcaagttattgaaaatgagctaaaattgacaaagtgaatttaacaaagttaagtgaaaattatgcactcataatccaaaaatcaactacaaaaatgtgtgagctgagtgacagaaagcagttatagctattttgaaaagaacttaaaatttctgcaactacaaattcagtataagacaacagggtctggtaaatacaatgttttaaataaatgcacattaaactaacgcattaaaaatattagggcataacattggaactgagtgtcaacaactatgtattacatcaaaaattgrgtaccacctctattcccatgtctctgttgtatgctacagagaatgcaaagtggaggaagactgatattta

SEQ ID NO: 150441 - DNA, 559 bp, Homo sapiens
tctttatctgcttgtttgttaatggacacttagtttgcttcaaatttggctatgtgaatactgctgcaataacataggagtgaagataccacttcaatacattgatttcctttcttctgartatatactcagcagtgagattgctggatcatctgatagttctaattttagttttttgaggaacctccaaagtgttctccccatggattgtaccaattcacattcccaccaacagtgtttgagggttccctttcctccatatccttgccagaatttgttactgcatgtcttttggataaaagccattttgactggggtgagatgtagttttgatttgcttttctctgatgaccagtgatgttgagcatattttcatatgcctgtttggcatttctgtgtcttcttttgagaatgtctattagatcttttgcctattttttaattgaattgttagatttttttccctgtagagttgtatgagctctttatatattctggtaacaaatctcttgtcagatggatagtttgcaaatattttccaccattttgtggagtgttt

SEQ ID NO: 150442 - DNA, 546 bp, Homo sapiens
atctggcctcacacatgccaccatgggaggctctggctcagctctcattattcaccaaaacaacktcctttccgtctctgtctgggtctgcaagctgctttctgcgcgaagaaagattccctgaaaccttttggcgccatcaacaacaacagcagcaatgaaagtttggcttgaaaaattcattcaagggataaaaaaatacaaaggaaatctatcattatggatgttttggagaggaaaaaaaaataaaagatccaggctttgttttgcattttggtaggaaacgatatatagctacatagtaaaactgttttattaaaaagatcttctcactctgaattcaaaatacgaattgtaccctcttatcatccagccacttccgaatgaaagttaaaaatgctgatactgtggaactagcccttggtattatatctcatagctgatatatttgtctaatactttggtttttgaaggcccattactcaggaccagtgctcaggctgttcattttaatcctttctggggactgaaaacaggaaagctagg

SEQ ID NO: 150443 - DNA, 428 bp, Homo sapiens
aactgaaccatgtatttaatatggggccaagggatcatatgttgttttgggtcccagcaaaatgaaaatcagagtgtggaggagagagagggagagggagagaaaaagagatcaggaaagcgaaggggagagggagataagacaaacaaatgatcataaatgaaggagggagaataaagagaattgagtaagcaacattgtgcatctccccatttcattctggttattgatcttgctctgtgttctccagcasacaccttgttataaatgaggatattgagtgaagaaaaagagttaataaatccactgcctttgccataactgctaatggaaatccatgagcagtttaaatgcgggtcaagtaaagagactaaactgggagtggaggacatggtagataagaatgagtaggcagcatgggtagtctg

SEQ ID NO: 150444 - DNA, 562 bp, Homo sapiens
actaaccctgtaattttgcctttttgaacaagtcatataaatggaatcacacagtatggaatcracagtatgtgtccttttgagtctggctcctttcacccagcaaaatgatactgactctcctatgtattgttttgtataacacaggtcattcttttttttgcccaggtgtatggcattgtatgaatgtattgtgatttgtatatccatttgccaccacttaaaggacatttgggtggtttctgacttttggcaattataaatggaggtgttttaaatatttgtgtacaagtttgtgggtgttcacatatggatacatgggtgtgtgattcccttgggtgtgcaactgctgggtcatattgttaagtgtacatttaactttttataagaaactgtgaagttatgcttcaaagcaatttcaccatgttgcattcccaccaggaatgtatgagagttccagttgctccccatctgtgtaagcattttgtattgtcaattttcttttaatgtgaacaactctgataggtatgtagtagtatctcatagttttgaatttgcattt

SEQ ID NO: 150445 - DNA, 562 bp, Homo sapiens
actaaccctgtaattttgcctttttgaacaagtcatataaatggaatcacacagtatggaatcgacagtatgtgtccttttgagtctggctcctttcacccagcaaaatgatactgactctcctatgtattgttttgtataacacaggwcattcttttttttgcccaggtgtatggcattgtatgaatgtattgtgatttgtatatccatttgccaccacttaaaggacatttgggtggtttctgacttttggcaattataaatggaggtgttttaaatatttgtgtacaagtttgtgggtgttcacatatggatacatgggtgtgtgattcccttgggtgtgcaactgctgggtcatattgttaagtgtacatttaactttttataagaaactgtgaagttatgcttcaaagcaatttcaccatgttgcattcccaccaggaatgtatgagagttccagttgctccccatctgtgtaagcattttgtattgtcaattttcttttaatgtgaacaactctgataggtatgtagtagtatctcatagttttgaatttgcattt

SEQ ID NO: 150446 - DNA, 562 bp, Homo sapiens
actaaccctgtaattttgcctttttgaacaagtcatataaatggaatcacacagtatggaatcgacagtatgtgtccttttgagtctggctcctttcacccagcaaaatgatactgactctcctatgtattgttttgtataacacaggtcattcttttttttgcccaggtgtatggcattgtatgaatgtattgtgatttgtatatccatttgccaccacttaaaggacatttgggtggtttctgacttttggcaattataaatggaggtgttttaaatatttgtgtacaagtttgtgggtgttcacatatggatacatgggtgtgtgattcccttgggtrtgcaactgctgggtcatattgttaagtgtacatttaactttttataagaaactgtgaagttatgcttcaaagcaatttcaccatgttgcattcccaccaggaatgtatgagagttccagttgctccccatctgtgtaagcattttgtattgtcaattttcttttaatgtgaacaactctgataggtatgtagtagtatctcatagttttgaatttgcattt

SEQ ID NO: 150447 - DNA, 554 bp, Homo sapiens
tttgaaatcaaaatttcgagtcattgctgttttagagattaagaattcctcacagttagcaataagggttttactaagaggaagtgaaaaatcagcttccacttttgagcaactattatggactaracattgggtcaagcagttcacaaacaccatgcacatttagtcttcacagcagcctatgagtatcttaccttatttctcaactagggaaacaggcccaaagagatttaatatcttgtccaagttagacagtttgtaagcatctatagtggaattctagagaacattgtctgactccaaagcccatgttcctagtcacaatttacatcacttcaacagagggggtgtattagtagctgtttactataatcaaccccaccagcctggcacggaatacatagcatgagaagaacccaaatgatgaaagaggagaaatctgaaccatagtggaaaaaagagaaaatcccttcgcttccactggctacagtttccgttaaacccttggagatagatttggaaataaatatcataatgctgtatattgtttatag

SEQ ID NO: 150448 - DNA, 577 bp, Homo sapiens
caacactctccaagcatttgtttctgtttctgttttttgagacagggtctcactctgttgccgaggctggaatgcagtggtgtaaacacggctcactgtagtagccttgatctctcctgggctcaagcaatcctcccacctcgacctcctgagtacctgggaccacaggcacatgccaccatgcctggctagttttttaaattttgtgtagagacgcagtctccttacgttgttcagcctggtctcaaactcctgggctcaagcaatcctccygccacagcctctcacagtgctgaattacacacttgaatcaccacacccagcctttcctaacatttgaactttaacccatcatttgagaaaaaagaaaaaaggaggaagcacacctatcaaggattttgttctggagaacctgtgaggattagagaacgtaaaaaagttagagttggccaggcgtggtgactcatgcctgtaatcccagcactttgggaagccaaggcgggtagatcactgaggtcaggaattcgaaaccagcctggccaacatggccaaaccccgtctctaccaaaaatacaaa

SEQ ID NO: 150449 - DNA, 603 bp, Homo sapiens
gaaatgacaccgtttatgttctttgcgactggcttacttyacttagcataatgcccttaaggttcatctgtgttgtaacatgtgacagaatttccttcctttttatggctgaataatatttctataattagttaaattataacaagtctttaatgatttaaaaagttgctattcaattaattggcctgcaataattaattgtggcaggaaataagaaggattagatttgggatgaaataggcttccccaggtctggggcctataacctaactagaagaaaactcctaccagctaaccagcatctaccatctttctccttggagctcaaggatagagaggagaattgctgtcattggaccgccagtgacaacttctggccatgacctttgcatattgcatatgcaatgttatgtggttcacaaactcatggctctataccatggaaatcagggtgaggctggggagtttttccagcctggtaaagacaggccacgtattccagggtcctttgatgcaagcatccctctttactttcttgagcaagaaggggaagtcagaattgattatagattcaaatgtgtactatcattgaatgtcagagct

SEQ ID NO: 150450 - DNA, 604 bp, Homo sapiens
gtgaaatgacaccgtttatgttctttgcgactggcttactttacttagcataatgcccttaaggttcatctgtgttgtaacatgtgacagaatttccttcctttttatggctgaataatatttctataattagttaaattataacaagtctttaatgatttaaaaagttgctattcaattaattggcctgcaataattaattgtggcaggaaataagaaggattagatttgggatgaaataggcttccccaggtctggggcctataacctaactagaagaaaactcctaccagctaaccagcatctaccatctttctccttggagctcaaggataragaggagaattgctgtcattggaccgccagtgacaacttctggccatgacctttgcatattgcatatgcaatgttatgtggttcacaaactcatggctctataccatggaaatcagggtgaggctggggagtttttccagcctggtaaagacaggccacgtattccagggtcctttgatgcaagcatccctctttactttcttgagcaagaaggggaagtcagaattgattatagattcaaatgtgtactatcattgaatgtcagagc

SEQ ID NO: 150451 - DNA, 604 bp, Homo sapiens
gtgaaatgacaccgtttatgttctttgcgactggcttactttacttagcataatgcccttaaggttcatctgtgttgtaacatgtgacagaatttccttcctttttatggctgaataatatttctataattagttaaattataacaagtctttaatgatttaaaaagttgctattcaattaattggcctgcaataattaattgtggcaggaaataagaaggattagatttgggatgaaataggcttccccaggtctggggcctataacctaactagaagaaaactcctaccagctaaccagcatctaccatctttctccttggagctcaaggatagagaggagaattgctgtcattgraccgccagtgacaacttctggccatgacctttgcatattgcatatgcaatgttatgtggttcacaaactcatggctctataccatggaaatcagggtgaggctggggagtttttccagcctggtaaagacaggccacgtattccagggtcctttgatgcaagcatccctctttactttcttgagcaagaaggggaagtcagaattgattatagattcaaatgtgtactatcattgaatgtcagagc

SEQ ID NO: 150452 - DNA, 641 bp, Homo sapiens
gtttctcccaggagcccacagcctgtctcatccaggacagggcatgcactgggagcatgtttggaccacagaccctcctgctgagtcatctgcctccaaactttgaaacaaatccattaagggcagctttggggaacgacgtaatatttttaggtgcctgctcacttcatgcccccttctcctgagaatcccttctgcagaagggcagggctcagctagcaccatctcaggtcacagttgacgggaccatggcgggacaacycatggactgcaggtaaatgagatgatcctcctggaatgggctggcagggagactctctcgtagacaagtcaggagtccacttggagtcagggctggcatgatctttccttctgcatggacagagagacagggcaggctgacatgcagagagacaggcaggctacagtacaaggagaccactgggtcgcagtaaggtgaagagcataacctcagtccttggccttctagttctggattccagtcccttatgaggcctggatgtgtttcctaccctgatattccatgagatacccctgaatccttccagtggattctaatgtgtgctggagcatgttgcatgcaaacagagacagagatgaggtggggagaaggggtgcat

SEQ ID NO: 150453 - DNA, 468 bp, Homo sapiens
agtgttgttgaacgtgctgcaggcttgttttatgttagccaccagctgaatctttgaatggtctgaaggcccaggatcagggcagacatctcacttaccccctgtctgttagggtgggccaggaattccttgagtttgctcagagaagacttatgctcatggagatgctcttgtggagagaaagatggtgcccataagtaggcttctcggaagctagcctttccaggctgggtgtggttggcttacgcctgtagtctcagcactttgggaggctgaggcagggggatcgcttgagccaggagtttaagaccagccttggtaacatagcaagacactgtctctacaaaaaaattttaaagtaaattagtcatgcatrgtggtgcacacctgtggtcccagctactcaggagactgaagcaggatgatcacttgagcccaggaggtcgaggctgcagtgagccatgatca

SEQ ID NO: 150454 - DNA, 578 bp, Homo sapiens
atatacaaatgaataagagttctgatttataccaaactacagagggacatagacttatatctcgagacaatgttgtatttgaagttgttgatttcttctgtccccattgggcctcttctgcctttagatgggtctctatgaagaaatttattagagtgaggaaacgtttatagcaggaggtcctaacttgccctacaccaaacttatttgtagaggcaaatcccttccaatcttctgaatttctgttccataarcacagtctttataccacacattttagtaactagccacaagaaagttcttttatcaactacccaaaaagcacaaggctgcctccataaaccaggcttatatgtgaatgtggaaaattcacatattgattggtgaatcaatcaattcaccaaattgattggtgcagcccaaatttaacctgaatgaaaaccacaagcaactctacagcttacaggtctgtggggtagatgggctgcctctccgagggagaaattcaatgtctacagtatcacggatcagcggaccacctctgacctcttgttctaagagtgtctccttgtctggtg

SEQ ID NO: 150455 - DNA, 587 bp, Homo sapiens
cttcatagagaatagatggtaaatgtctcttatcagactttaaaaggtgccagactcttagctaaatctctcctggatcaggaaaaacatggaaagggaaagagattctctacagaatgtagatttttctcgcaagtgatagctttgaggggccattttaaaatatgtcaaataaatctactttgaggtaaaatacttaaatttctttcagggcccgctatctgtcatgtgatgctagactayagccagtttgaagtttggtatcttcttgctacaaaaagtcttaagatctccgttttaatgttaattctgttcagttgtgcctgaattctaaagggaggagattatattgaggcatgtctgacccattttttccatcatggcctgaaccagtttttcaggtttactttggaatccccttggccaagaagaggggttcattctgtcagttgggtgtcttagaattttatttttggtttacacattgatgaagtaggactgaatgagctggtgaggaaagtctaaatgtgatttttcattttgaaatattattggttacattttttagtgtactattttctgatgga

SEQ ID NO: 150456 - DNA, 532 bp, Homo sapiens
gctttgctggacaaatggtctstcttgcaactgttcaactctgctgttatagcacaaaagcctccacagaaaaacagtcatggctatacttcaatacttaaaaaaaaaaaatgaaagcagtccatagtgtgctgatctttgttctaaaccaattaaaacctcatctgatgcatgcgccccattcatagcattgtggtgtgttgtacgttaatgcatcttaaggaaggatgcctttaaccattcactttcttgtataattcctttttctgttgattctgggtttaactatttaatttagtttgttcaatgggaattcagcaaatgtgacattaacagaagctaaataagtacttgtgcatcagtacttgccttcctggaactcacctgtcacatattaaggagcctggtctagactgctctataatgagttaccacatggagagagatgcccagccaaagtgcaccttaagtctagacaagttcataagaccatcctagaccctctagcctcagttgagcctccagatgctat

SEQ ID NO: 150457 - DNA, 542 bp, Homo sapiens
tggcgtcttccctcttttttcctcctttttcattctatttcttttcctccttctccgtatatctctttttaatcacttcagttcaaaatcaattagatgtgtccaagcaaggtaggcatttgggggttgaggttgatggaggggtatggaaggatgaagttatggccagggctgtctatcagagctggacgaccacaggtagaggtggggcctgccaagcctggtgaccagagtgaagtgtcaaaacctcaggattgtgaagctactgtttgcattgggagggcaggtgccttggggtgttgtagactcagcctagcaagagtgaggatgtcattgtaagaagagacgacctactgtgtgcagtgttggagactatacaggggratgaggctgtctgcaaggggtgagagaatctagcaggggtgttgggagagtgtttacatacaaggtgtttaattgaatgagtgaatatattaaggaaaatgggatttaggcttctcaacattagataaggctgtagctcaccgagagtaaacactgag

SEQ ID NO: 150458 - DNA, 414 bp, Homo sapiens
tcacatttgttaaatgatcaaagtgaacatcaccagtaatggggaaaatcaaaactgtatcatccaataggctgcagtgagatgaacatagcattagatctgtgatttgcttgttaaagatgcataaatggaaactaatcctgaggcaacatcacagaatcccaaatcacagacactctaataaacaacagcaaaacctcaaagaaatgtcctgtagtcttcagatgtgttgaggttatgaaagtcaaagaaggttgagaaattgttttgcatcaaagaaaaccaaaaagaaatgacaaytacatacaatgggtaaatctggactgcattcttttgtcataaaggatattgttataataactggtaaaacttgaatggggtctgaggattagagggcagtaatgtgccaatgtt

SEQ ID NO: 150459 - DNA, 559 bp, Homo sapiens
tagcattgacatcttaacaatattaagtctgtccacatgaaatatctttccctttatttgtggcttctttaatttcttttgtaaaattaattttattttattttctatkgacaaattaagagttataatatatttatggtataaaatgtaatgttctgatatatattcacaccgtgtgatgattacatcaagttaattagtaaattcatcacttcacatacttatctttttgtggtaaaagcatttaaaatcaactttttaagcagtttttcaacaggaaaggtaccattattagaatcaccattttgtgcaatagatcactaaagcttatttcttccatctaattaaaattttgtaccctttcatcaacatcttccctttccccatccacccccacccccagcctcttgtacctaccactttactctctatttctacatattcaactttttagacttcacaaatagtttaaatcatgtattatttatctttctgtgtctggtttatttaattagcataatgttctccatgttcatgttgtcacaaatgacagaatttc

SEQ ID NO: 150460 - DNA, 454 bp, Homo sapiens
cttaatagctggaagaaacttaccttgagtctcagttgagactttcaactttggacttttgagtggatactgaaatgagttataactctggggactattgggaaggaattattgtatttttgcaatataagaagaacatgacatttgggggaccgggttcaaaatggtatagcttggatgttcgtctcctccaaatctcatgttgaaatttgatccrcagtgttagagatgaggatctaatggtaggttttggggtttcagggagcgatccctcatgaatagattaatgctctccctcagaggtgagtgagttctctccttactagtctctgaaagacctggttgttacagagagcctggcagtgaccccctccctcttgcttcctctcttgccccatgatgtctgcacatgctgactctatgaacaaattaattgaaagtgtctggcacagtc

SEQ ID NO: 150461 - DNA, 525 bp, Homo sapiens
agaattcagcatgtgcaaagactgtcaccatctgattgtcagtagctatctcaggaccaacgaggagatcatgttgttggttggcaacaagactgatattgagaagtgagtgataygctagaaactctttaagaaacttattgacctgtgatgatgagactaagatatgtcttttagcatagtggtggttgtgcaaacagtaagtcaagtataattgaaatggggcaaaatacacagtgagccagaaacactgaaaatatagataacaaagaaccccaggagtggtggaggatcagatagaatcaggcttctaatagaaggtgagatcattgggggcaggggcggaggggtgaatctaatagaaagaagctcatgggtaaatggagagagagaaggttggataaacttgctgagcttacaggagagaccggtagctgtcatgcaggcattgtatacatggagaggtgagatcagaggtctttgtaaaacaaaggattcttcaccttggcatcccagggccatata

SEQ ID NO: 150462 - DNA, 582 bp, Homo sapiens
acttgccttcctttgtgttcttccatttataaaatcattaaattcttccacttataaaatcattgtgtttttttctaatacagtcttagaaccacatcaaatagtgtcataaattttgcatcaatcctcattttcaaaaactaaaaaacacaaagaaaatcagttgtttttgctcatattttgtttaccatgttttatctcttttcctgattttccaatgattctgcctgaatcatttcttttctgttcagagaacatctttagtcactactttagattagttctcctgaccacaagttctcttagttattttttttccaatctctaatgtcttaacttcccccttgattcctgacagatattttcactgggcataaaaaatgttgtgccacttccttcyagtctttatggtttctaataagaaatcccttgttactcaaaatgttttcccgttgcagataaggtgtttttttctctctcactcatgttttttaatctttagttttcagaagttttgctagatatcttagtgtggatcggcttgggtttacactgtttggggattgctctacttcttaaaac

SEQ ID NO: 150463 - DNA, 513 bp, Homo sapiens
cagactaatacaccggctctctaggatacatgaggcaaaaagaaaacgagtccttccttaggtcctatggtccctgaatggtttgtttcatttgctctacctctcaatcttcttatgtttgtttttatgtacactattgaaaatttttaggtgtatttagcaggtggaataaagaaaaatatgtatctactttatctttccagaagtagaggtcttctcttgattgtcttttagtatttatttcactaagattactgtgttaaaacagatagatgcctcttgctcataagagtggggaataatcacatactgttcttggatttaaaattttgaatccatatcacttctttattcagctaacaaagcgtgagcacttataayacagtatgttaaacagacattatatgacatgctctgtggtttaggggtctgatatggtttagctgtgtccccaccccatattcatcttgaattttagctctcataatcaccacgtgttgtgggaggggccca

SEQ ID NO: 150464 - DNA, 602 bp, Homo sapiens
ccacaaattttaagcaggccctaagtaggaatcctattacatttcttaatacacttcccaagtcccttcactctcattcaatcagataacaattttgcagcctcctctctctctctgaaaatcttcaatacctcctctccatcttcgcgcttcttcagatctttgatcaaatgtcaatttcccagtgacgattctytaatgctaatggacattattgcttctacccaagcccctttgccttgctcagtatttctctggcactagtctccttctgactcatcatattaatgggcttacttagtaggtgtattgtttgtcttccctagtagaatatgaactcctcaattacaggaaatttgtccactttgtttatgggatgtatctttagagcctagaacactgtcaggctcttcttaggcactttcagtgactatttgttgaatgaataagccaatgcagaaaggacattctgctttcaaatggacacagaactggaaaatcaagcagaaaagtcctgtttcctcagtaattaggagaggttgggccaaaggccaacgaacggcagaataacaaacatctcactcaagagaaggactgtgggt

SEQ ID NO: 150465 - DNA, 602 bp, Homo sapiens
ccacaaattttaagcaggccctaagtaggaatcctattacatttcttaatacacttcccaagtcccttcactctcattcaatcagataacaattttgcagcctcctctctctctctgaaaatcttcaatacctcctctccatcttcgcgcttcttcagatctttgatcaaatgtcaatttcccagtgacgattctttaatgctaatggacrttattgcttctacccaagcccctttgccttgctcagtatttctctggcactagtctccttctgactcatcatattaatgggcttacttagtaggtgtattgtttgtcttccctagtagaatatgaactcctcaattacaggaaatttgtccactttgtttatgggatgtatctttagagcctagaacactgtcaggctcttcttaggcactttcagtgactatttgttgaatgaataagccaatgcagaaaggacattctgctttcaaatggacacagaactggaaaatcaagcagaaaagtcctgtttcctcagtaattaggagaggttgggccaaaggccaacgaacggcagaataacaaacatctcactcaagagaaggactgtgggt

SEQ ID NO: 150466 - DNA, 638 bp, Homo sapiens
ctatgacatgagttctgtaattgacacattattataataaaattattgacaacattcttagtctctcataatttctaaaggactattctaaaatgtcagcagtagccctataggatgagtcttcccctgtaaaactctgaatgactcggtttcattgcacagagaatatctttcttgtccaccactttattcccaacgttcaattcaatgtctgaatattatctgagttcagtatcagggtttttgtttgtttgtttgatttttgaagcagagtctcactctgtcacccaggatggaatgcagtggcaccatctcagctcactgcagccttcacctcccgggctcaagcaactcttccgcctcagtctagctgaaactgcaggggagcaccaatccacccatttcatttttcattttttagggasacagggtctcactatgttacccaggctggtctcaaactcctgagctgtttgtctttttttttctttctttggttttttgttttgttttgtttgagacagggtctcacctgtcatttaagctggagtgccgtagcacaaacatgacttacttgaggttcatcctcccaggctcaagtgatcctcctacctcagccttccaagtaggtgggactt

SEQ ID NO: 150467 - DNA, 638 bp, Homo sapiens
ctatgacatgagttctgtaattgacacattattataataaaattattgacaacattcttagtctctcataatttctaaaggactattctaaaatgtcagcagtagccctataggatgagtcttcccctgtaaaactctgaatgactcggtttcattgcacagagaatatctttcttgtccaccactttattcccaacgttcaattcaatgtctgaatattatctgagttcagtatcagggtttttgtttgtttgtttgatttttgaagcagagtctcactctgtcacccaggatggaatgcagtggcaccatctcagctcactgcagccttcacctcccgggctcaagcaactcttccgcctcagtctagctgaaactgcaggggagcaccaatccacccatttcatttttcattttttagggagacagggtctcactatgttacccaggctggtctcaaactcctgagctgtttgtctttttttktctttctttggttttttgttttgttttgtttgagacagggtctcacctgtcatttaagctggagtgccgtagcacaaacatgacttacttgaggttcatcctcccaggctcaagtgatcctcctacctcagccttccaagtaggtgggactt

SEQ ID NO: 150468 - DNA, 638 bp, Homo sapiens
ctatgacatgagttctgtaattgacacattattataataaaattattgacaacattcttagtctctcataatttctaaaggactattctaaaatgtcagcagtagccctataggatgagtcttcccctgtaaaactctgaatgactcggtttcattgcacagagaatatctttcttgtccaccactttattcccaacgttcaattcaatgtctgaatattatctgagttcagtatcagggtttttgtttgtttgtttgatttttgaagcagagtctcactctgtcacccaggatggaatgcagtggcaccatctcagctcactgcagccttcacctcccgggctcaagcaactcttccgcctcagtctagctgaaactgcaggggagcaccaatccacccatttcatttttcattttttagggagacagggtctcactatgttacccaggctggtctcaaactcctgagctgtttgtctttttttttctttctttggttttttgttttgttttgtttgagacagggtctcacctgtcatttaagctggagtgcmgtagcacaaacatgacttacttgaggttcatcctcccaggctcaagtgatcctcctacctcagccttccaagtaggtgggactt

SEQ ID NO: 150469 - DNA, 509 bp, Homo sapiens
ggtgtattgaggttctatgaaacaatgtcctcattttagaaaatgcacatagaagaataaaacagtattatttctgcgtgtctgtgtgtgtgtgtgtgtgtgtgcatgtgkgtagttttcaggggttgggggaggctatttggtaaagctaaggtagtaaactgttaccatttgggaatctggatgaagaatatatggaatttatttgtcttattctttcaactctctataaaattatgcccaaataaaaaaagttaaaagagaaaaaaaaaacctcatgtattttatagatgtaataagaaaatagcttaattctttgcccagcgcttacttcaaatgtgttcattaggtagagaactttccctgtcactagatgaaaacatgggcagttgttcttagacattttggatacttcttagctcagtattcttttcaaaatcactaaacacagactcagaaattagcatgtagtctcaggtaataaagctttcaacctaaatcaggtataa

SEQ ID NO: 150470 - DNA, 509 bp, Homo sapiens
ggtgtattgaggttctatgaaacaatgtcctcattttagaaaatgcacatagaagaataaaacagtattatttctgcgtgtctgtgtgtgtgtgtgtgtgtgtgcatgtgggtagttttcaggggttgggggaggctatttggtaaagctaaggtagtaaactgttaccatttgggaatctggatgaagaatatatggaatttatttgtcttattctttcaactctctataaaattatgcccaaataaaaaaagttaaaagagaaaaaaaaaacctcatgtattttatagatgtaataagaaaatagcttaattctttgcccagcgcttacttcaaatgtgttcattaggtagagaactttccctgtcactagatgaaaacatgggcagttgttcttagacattttggatamttcttagctcagtattcttttcaaaatcactaaacacagactcagaaattagcatgtagtctcaggtaataaagctttcaacctaaatcaggtataa

SEQ ID NO: 150471 - DNA, 509 bp, Homo sapiens
ggtgtattgaggttctatgaaacaatgtcctcattttagaaaatgcacatagaagaataaaacagtattatttctgcgtgtctgtgtgtgtgtgtgtgtgtgtgcatgtgggtagttttcaggggttgggggaggctatttggtaaagctaaggtagtaaactgttaccatttgggaatctggatgaagaatatatggaatttatttgtcttattctttcaactctctataaaattatgcccaaataaaaaaagttaaaagagaaaaaaaaaacctcatgtattttatagatgtaataagaaaatagcttaattctttgcccagcgcttacttcaaatgtgttcattaggtagagaactttccctgtcactagatgaaaacatgggcagttgttcttagacattttggatacytcttagctcagtattcttttcaaaatcactaaacacagactcagaaattagcatgtagtctcaggtaataaagctttcaacctaaatcaggtataa

SEQ ID NO: 150472 - DNA, 430 bp, Homo sapiens
gacaagggaaaaatctaatcaggcaatcattttctctttctacagtttaaattatttagttacacctgcaatgtttggcaataaaaaccaatttgggattttggtttgattattaggaattttttctgaccgtgttttttataacttggtactcttttgcctttttctaatatacagttgtattttcactgttttaagaataagcttactttggctctctttagaatcacacrtatctattcagagttaaaaaaagaaattaaaatgcaatatttaaatgtgttatgaataaaacactattatgataaaaatctattcattagctaagaatagaaaaatgaacttacaaaagtgaaatcaaagagactaaagtgatgtagacttcctttcttttcagcaattgatagaagcaaattcagttgctattgaa

SEQ ID NO: 150473 - DNA, 430 bp, Homo sapiens
gacaagggaaaaatctaatcaggcaatcattttctctttctacagtttaaattatttagttacacctgcaatgtttggcaataaaaaccaatttgggattttggtttgattattaggaattttttctgaccgtgttttttataacttggtactcttttgcctttttctaatatacagttgtattttcactgttttaagaataagcttactttggctctctttagaatcacacatatctattcagagttaaaaaaagaaattaaaatgcaatatttaaatgtgttrtgaataaaacactattatgataaaaatctattcattagctaagaatagaaaaatgaacttacaaaagtgaaatcaaagagactaaagtgatgtagacttcctttcttttcagcaattgatagaagcaaattcagttgctattgaa

SEQ ID NO: 150474 - DNA, 609 bp, Homo sapiens
caatttcaggtttgtcttcggattctttctctttttttgatgtttagaaaattatttgttacatcttgtaggacctactttttgaacttttcatcccctgtagttgccaattctgcatgtactagtcctctagaaataggttaaactgaagcaacttgatggaaggaattytccacagggcttgttttccaaagaaaagtattatttggaggagaaaagttataagcctacctaagcatatcataaagctgttcaaaaataactcagacccagtcttgtggatggaaacgtagtgcttgagtcacattctgcttaaagttgtaacagatacagatgagttaaaagaaaaaaaaatccatttctgatatagtgaccttggagaagatgaaatgcctcagtgtgtttgttattaacaaaaataacaaagatgaacaaggacccaaacttctaatagggcattgggcttgtcaaaaagcatggcctgaatttcagcctccacactcttctgtcccccaagaccctttttagccagggaaatatgtgtagtgcatgtgagccctgagaggagtgtagcatataagcaaactattattaataggatgttggcat

SEQ ID NO: 150475 - DNA, 609 bp, Homo sapiens
caatttcaggtttgtcttcggattctttctctttttttgatgtttagaaaattatttgttacatcttgtaggacctactttttgaacttttcatcccctgtagttgccaattctgcatgtactagtcctctagaaataggttaaactgaagcaacttgatggaaggaattttccacagggcttgttttccaaagaaaagtattatttggaggagaaaagttataagcctacctaagcatatcataaagctgttcaaaaataactcagacccagtcttgtggatggaaaygtagtgcttgagtcacattctgcttaaagttgtaacagatacagatgagttaaaagaaaaaaaaatccatttctgatatagtgaccttggagaagatgaaatgcctcagtgtgtttgttattaacaaaaataacaaagatgaacaaggacccaaacttctaatagggcattgggcttgtcaaaaagcatggcctgaatttcagcctccacactcttctgtcccccaagaccctttttagccagggaaatatgtgtagtgcatgtgagccctgagaggagtgtagcatataagcaaactattattaataggatgttggcat

SEQ ID NO: 150476 - DNA, 585 bp, Homo sapiens
gcttgttttccaaagaaaagtattatttggaggagaaaagttataagcctacctaagcatatcataaagctgttcaaaaataactcagacccagtcttgtggatggaaacgtagtgcttgagtcacattctgcttaaagttgtaacagatacagatgagttaaaagaaaaaaaaatccatttctgatatagtgaccttggagaagatgaaatgcctcagtgtgtttgttattaacaaaaataacaaagatgaacaaggacccaaacttctaatagggcattgggcttgtcaaaaagcatggcctgaatttcagcctccacactcttctgtcccccaagaccctttttagccagggaaataygtgtagtgcatgtgagccctgagaggagtgtagcatataagcaaactattattaataggatgttggcatacctaagaaatattgcaggtttggttctaaaccactacagtaaagtgaccattgcattaaagcaagtcacacacacatttttttttggttttccagtgcatataaaagttatgtcatactatattgtagtttattaagacataatgctattatgt

SEQ ID NO: 150477 - DNA, 585 bp, Homo sapiens
gcttgttttccaaagaaaagtattatttggaggagaaaagttataagcctacctaagcatatcataaagctgttcaaaaataactcagacccagtcttgtggatggaaacgtagtgcttgagtcacattctgcttaaagttgtaacagatacagatgagttaaaagaaaaaaaaatccatttctgatatagtgaccttggagaagatgaaatgcctcagtgtgtttgttattaacaaaaataacaaagatgaacaaggacccaaacttctaatagggcattgggcttgtcaaaaagcatggcctgaatttcagcctccacactcttctgtcccccaagaccctttttagccagggaaatatgtgtagtgcatgtgagccctgagaggagtgtagcatataagcaaactattattaataggatgttggcatacctaagaaatattgcaggtttggttctaaaccactacagtaaagtgaccattgcattaaagcaagtcacacacacatttttttttgkttttccagtgcatataaaagttatgtcatactatattgtagtttattaagacataatgctattatgt

SEQ ID NO: 150478 - DNA, 585 bp, Homo sapiens
gcttgttttccaaagaaaagtattatttggaggagaaaagttataagcctacctaagcatatcataaagctgttcaaaaataactcagacccagtcttgtggatggaaacgtagtgcttgagtcacattctgcttaaagttgtaacagatacagatgagttaaaagaaaaaaaaatccatttctgatatagtgaccttggagaagatgaaatgcctcagtgtgtttgttattaacaaaaataacaaagatgaacaaggacccaaacttctaatagggcattgggcttgtcaaaaagcatggcctgaatttcagcctccacactcttctgtcccccaagaccctttttagccagggaaatatgtgtagtgcatgtgagccctgagaggagtgtagcatataagcaaactattattaataggatgttggcatacctaagaaatattgcaggtttggttctaaaccactacagtaaagtgaccattgcattaaagcaagtcacacacacatttttttttggtttyccagtgcatataaaagttatgtcatactatattgtagtttattaagacataatgctattatgt

SEQ ID NO: 150479 - DNA, 480 bp, Homo sapiens
atgtgtcttttgtattccttgggtggctaaccataggcaaactaccaaacctttttgagtctcacttaaaacatgaaaaatctagtaattagactgatcttgtaaattacaaaatcagtttaccccctataaaattttctcttacactttggatgattatatgtcaggtattgttgttacttgtccagctgaggcatggtacccccgtggagtaggcttggagttcagttcggagctttaattagcagatttgctaaatggcaaagaccaactcatacagttattctctcttagataatcacccaatttgggaagagtgatgataagaatctcttctcatgaagagcactcaagagctgagtaggaccagtagtaactactrctggatgatctgtcattggcttctttagagtgcaatcttgcttcttggctagacagaaaataaatgaaatcagtaatttctgacctgacttggatgtc

SEQ ID NO: 150480 - DNA, 553 bp, Homo sapiens
aatgcttttatcacaatatattcattcttggatttcttagggcaaactaaacwggaatgacatgtatctatgaaattattagtaaattttgatagttagtaaggtatttgattcttttaagcctgattttacaatctgatctctgtattatctcaattattcttaaagtaatgagactagataaaatcaacagaatcagattatatatataacataaaataactctaacagtagccaaaattcagaaattagtaatagaagaaaaataacactgaaaataaatgagataggaagaaaactgagaggaaatccaaaagagaaaaataaatgtttcaagaagaaaggagggtttatttgtgtgggatgctgctaatcgttcaaattttttaaatgcaaacattttgcaaatttgttatcatgaaagttactgacaaaaggaattttaacacagtggtgctattaattgttattatgcttcacacattactactagatctagatattcaactataaatttagtgtccattctttaatacataaaactgcaactctt

SEQ ID NO: 150481 - DNA, 553 bp, Homo sapiens
aatgcttttatcacaatatattcattcttggatttcttagggcaaactaaactggaatgacatgtatctatgaaattattagtaaattttgatagttagtaaggtatttgattcttytaagcctgattttacaatctgatctctgtattatctcaattattcttaaagtaatgagactagataaaatcaacagaatcagattatatatataacataaaataactctaacagtagccaaaattcagaaattagtaatagaagaaaaataacactgaaaataaatgagataggaagaaaactgagaggaaatccaaaagagaaaaataaatgtttcaagaagaaaggagggtttatttgtgtgggatgctgctaatcgttcaaattttttaaatgcaaacattttgcaaatttgttatcatgaaagttactgacaaaaggaattttaacacagtggtgctattaattgttattatgcttcacacattactactagatctagatattcaactataaatttagtgtccattctttaatacataaaactgcaactctt

SEQ ID NO: 150482 - DNA, 553 bp, Homo sapiens
aatgcttttatcacaatatattcattcttggatttcttagggcaaactaaactggaatgacatgtatctatgaaattattagtaaattttgatagttagtaaggtatttgattcttttaagcctgattttacaatctgatctctgtattatctcaattattcttaaagtaatgagactagataaaatcaacagaatcagattatatatataacataaaataactctaacagtagccaaaattcagaaattagtaatagaagaaaaataayactgaaaataaatgagataggaagaaaactgagaggaaatccaaaagagaaaaataaatgtttcaagaagaaaggagggtttatttgtgtgggatgctgctaatcgttcaaattttttaaatgcaaacattttgcaaatttgttatcatgaaagttactgacaaaaggaattttaacacagtggtgctattaattgttattatgcttcacacattactactagatctagatattcaactataaatttagtgtccattctttaatacataaaactgcaactctt

SEQ ID NO: 150483 - DNA, 553 bp, Homo sapiens
aatgcttttatcacaatatattcattcttggatttcttagggcaaactaaactggaatgacatgtatctatgaaattattagtaaattttgatagttagtaaggtatttgattcttttaagcctgattttacaatctgatctctgtattatctcaattattcttaaagtaatgagactagataaaatcaacagaatcagattatatatataacataaaataactctaacagtagccaaaattcagaaattagtaatagaagaaaaataacactgaaaataaatgagataggaagaaaactgagaggaaatccaaaagagaaaaataaatgtttcaagaagaaaggagsgtttatttgtgtgggatgctgctaatcgttcaaattttttaaatgcaaacattttgcaaatttgttatcatgaaagttactgacaaaaggaattttaacacagtggtgctattaattgttattatgcttcacacattactactagatctagatattcaactataaatttagtgtccattctttaatacataaaactgcaactctt

SEQ ID NO: 150484 - DNA, 463 bp, Homo sapiens
tgttatcactcgtctgctacggcatggccttttacagcctataaactctccttacaattcccccattttacctgtcctaaaaccagacaagccttacaagttagttcaggatctatgccttatcaaccaaattgttttgcctatccaacccatggtgccaaacccatatactctccaatcctcaatacctccctccacaatccgttattcrgttctggatctcaaacatgctttctttactattcctttgcacccttcatcccagcctctcttcgctttcacttggactgaccctgacacccaccaggctcagcaaattacctgggctgtactgccgcaaggcttcacagacagcccccattacttcagtcaagcctaaatttcttccttatctgttacctatctcagcataattctcataaaaacacaggtgctctccctgctgatcgtgtctgactaatct

SEQ ID NO: 150485 - DNA, 472 bp, Homo sapiens
cttgaattttcactctagatgttgtatagggagaattcagagagattcttttaaataatttcaccactatcatttaaacctctctctttactttatatctttaggtcttgtggagattttcgtattagtttaatggattgagtaagagctattctagatatcggaaaggttatcttcgtttctctagtttgtgtttggggtactaattttcaccttaaaaaaatggcatgagaacaaaaggcagcagaaacttctgcagacttaaatgtccctgtctgacagctttgaagagagtagtggttctcccagcatggagtttgagatctgagaacggacagactgcctcctcaagtgggtccctgacccctgagtagcctaactgggagacaccgcccattaggggcagactgacacctcacacagccyggtacccctctgagacaaagcttccagaggaagaatcaggcagcaa

SEQ ID NO: 150486 - DNA, 515 bp, Homo sapiens
gagcaagtttaaacacagtgtccttggatgaacatttggttgataaaattgtaaagaaaagcaaggaaatgatagctatagaagtcacagtcatagttaytttggagaagacagaagtgtctgtgactgtgacagggcacacgtaggtgcctaaagttttatttattgacctgagcaatagtttcaagagtgtaatttaaaaattgagtttctcagataaatacacaaatggaacagaatagggaccccagaaataatgccacacacctacaaccctctgattttcaacaaagtggacaaaaacaagaaatggggaaaggactccttattcaataaatggttctgggataactggatagccataagaagaagattgaaatgggataccttccttaaaccacatacaaaattcaactcaagatgaattaaagacttaaacgtaaaacctaaaactatacaaactttggaatataacctaggaaataccattctagacataggacctggcaatgatt

SEQ ID NO: 150487 - DNA, 515 bp, Homo sapiens
gagcaagtttaaacacagtgtccttggatgaacatttggttgataaaattgtaaagaaaagcaaggaaatgatagctatagaagtcacagtcatagttattttggagaagacagaagtgtctgtgactgtgacagggcacacgtaggtgcctaaagttttatttattgacctgagcaatagtttcaagagtgtaatttaaaaattgagtttctcagataaatacacaaatggaacagaatagggaccccagaaataatgccacacacctacaaccctctgattttcaacaaagtggacaaaaacaagaaatggggaaaggactccttattcaataaatggttctgggataactggatagccataagaagaagattgaaatgggataccttccttaaaccacatacaaaattcaactcaagatgaattaaagacttaaaygtaaaacctaaaactatacaaactttggaatataacctaggaaataccattctagacataggacctggcaatgatt

SEQ ID NO: 150488 - DNA, 601 bp, Homo sapiens
cgtttgctccttcaaatgcgcagacaccagtgcaaggcttgatgaaccacagtaatggaggcgaatatgtcatcactaaaggaaattaaagttttagtactcgaccccagagaaatgaagatctatcaattttctgataaataacacaaagtaatcatctaaaagaagcttgacaagatgcaagaagacaggatagacaactaaacaaaatcaggaataaaatacatgaacaaaattagatgtttaataaagaaatggaaaccgtaaaaaaaaagacctaaaaagaaaacctgaactaaagaacacaatgacagagttgcaaaagcaatagacagcttcaccagcttactcaatagtgctaaagaatcaggatacttgaagacaagtcacctgaaattatccaatgagaggaacaacaacaacaacaacaacaacagaaaaaaagaatggaaaagaaggaagggagcatatgggacctaaaggacagcatcaagcaaacaaacatatgcattgtgggagtccaagaaggagaagaataagagcagtagaaagcttatttaaataaataatgtcygaaaacttcccaaatcttggtaggaat

SEQ ID NO: 150489 - DNA, 547 bp, Homo sapiens
ctcccttacacctgcaagaatttgagctgccctagagattacagcaacaacaacagacaaaggaaagagggggaaaagtctcaaaattattaagagccttaactgtattatgtattgttcatttaattstcacaacaactttctgaaataaatattatccttcagttcactgataaggaaactgaagcgcagagaattaatctgtaacccaagtgcccacagatagtaataaaggaaccagagtctgtcctatctatggactttctgctctaccttgctgtcaataatatgaagaaagcacatggaaaagaagagcttttagccactggtgttaaacaggacactttgaaacaaatctcttctaagtcgttttacttagtttttatttgctgacaacaaactttttgtatctgttccaaggcatttcacaatttcataagagtggccaaatttggggatctttgttggagttctctaaactaccctgcaaaaccatcacactaggggtcacaatctaagcttgatttattacgtgtgttgttttgtt

SEQ ID NO: 150490 - DNA, 547 bp, Homo sapiens
ctcccttacacctgcaagaatttgagctgccctagagattacagcaacaacaacagacaaaggaaagagggggaaaagtctcaaaattattaagagccttaactgtattatgtattgttcatttaattgtcacaacaactttctgaaataaatattatccttcagttcactgataaggaaactgaagcgcagagaattaatctgtaacccaagtgcccacagatagtaataaaggaaccagagtctgtcctatctatggactttctgctctaccttgctgtcaataatatgaagaaagcacatggaaaagaagagcttttagccactggtgttaaacaggacactttgaaacaaatctcttctaagtcgttttacttagtttttatttgctgacaacaaactttttgtatctgttccaaggcatttcacaatttcataagagtggccaaatttggggatctttgttggagttctctaaactaccctgcaaamccatcacactaggggtcacaatctaagcttgatttattacgtgtgttgttttgtt

SEQ ID NO: 150491 - DNA, 503 bp, Homo sapiens
acatccttaccggtgctggcaaattgaatcagaatatttaacaatagtaaatactgttatttaccagcagattacttcttaagaatgtgttttttagaaaaccaaataccacatgttctcacttataagtgggagctaagcattgagcacatatggacccaagtatggggacaatagacactggactattggagggaggacagaggagggaggatggggtggcttaaaaaactacctatcgggtactatgcttactagcaaggtgacaggatccacactccaaaccttagcatcacataacattcccatgtaacaaatctgcacacgtaccccactggtctaaaatagaagttgaaatttttwaaaaaaatggtttaagaaaacctggaaaaaaaaaaagaatgtgttttcaagttgatccaagtcaaatagctttattttaatggatacagattccaaaacaaacagaattaaacctcatacagttgaaagggcactgtaat

SEQ ID NO: 150492 - DNA, 641 bp, Homo sapiens
gccccctcaacgtcaggcaagggcagacaccaggaataggctgtgttggtttttggttgccccactgactatccatctgcagttgtttttcttccattctgatcatcaatcatagtgtgacttaaatgggtcaggataaggagtccccagctgccatgcacagccacagcagccactgcccacagtcctttctgtgggctttctgggcagcattagtggaaagtcctatctgtgaagtaaactaacaagattgggggaggggtccccttatttatttaatcatcrctccccaaggctaaactggtggcctggcaacagtgagtattttctctgagctcagaagccaactccaagtgttcagggtgaacaggttgggaaacttgagaaccacacagacatcaggaaaaattccgtgagtggttgtctgtggtgaaatgatgatatggccctgagtttgctctccccaggagaacttggaagctgcccccttttccacctcccacctcacttggaactaagtaaaccaagaaattctaggaagcagcccaacctgaaagagctggcttctccaggaaaagagaggggagggtgaagagacccagggtctgtccgtcccaaggggatggtcagtcacagaagtc

SEQ ID NO: 150493 - DNA, 560 bp, Homo sapiens
agccttcttttcatcggtaaaatgggcataatgatagtatattctttatagagttggggtgaggattggtgagaccatatgtgtgtgtgtgtgtgtgtgtgtgtgtagtctctctgtatataaaaacacatataatgtgaatatatatatgtgtatatataaaatagtgctagcaaaatagtagctattatgccaatcagggtaggagatgacagggaaataaccataatacagggagaatattttataataatcaggatggtgacgcccttagacacggtggctacaggctctcagtggtttcccatagctctaaaataaagatgtacttagctcactggcttcatctatcttcattttctctgctctctctacttcatctaccccgctttgtactacactgcctagaygttcctgctccccagacctacagattccaggtgaaacatcattcactagcagaagcttttcttgaaccccagatggggtcaagtttatgtcccccactagatactctcacagtatcctttattttgattagtgtctgttgtccatctaga

SEQ ID NO: 150494 - DNA, 560 bp, Homo sapiens
agccttcttttcatcggtaaaatgggcataatgatagtatattctttatagagttggggtgaggattggtgagaccatatgtgtgtgtgtgtgtgtgtgtgtgtgtagtctctctgtatataaaaacacatataatgtgaatatatatatgtgtatatataaaatagtgctagcaaaatagtagctattatgccaatcagggtaggagatgacagggaaataaccataatacagggagaatattttataataatcaggatggtgacgcccttagacacggtggctacaggctctcagtggtttcccatagctctaaaataaagatgtacttagctcactggcttcatctatcttcattttctctgctctctctacttcatctaccccgctttgtactacactgcctagacgttcctgctccccagacctayagattccaggtgaaacatcattcactagcagaagcttttcttgaaccccagatggggtcaagtttatgtcccccactagatactctcacagtatcctttattttgattagtgtctgttgtccatctaga

SEQ ID NO: 150495 - DNA, 538 bp, Homo sapiens
tttaaattctctgaccctcagttttctcatctgtaaaaggagatggtacaatcaaggttgttgcaagtctttgcaaagcaytgagagttgcaggccctcacattgatagttgttattaagaaatgaggagggaatattcataaagaaatctccctccacatatttaatctcactttctccacaaccaagattatcttactttgttattaccaattgctaaaattttagactcataagtactatataaatttccttttcccaaccaccttgtggtactctccaaaacagaccttcacggttgggcaatggtaacaagacccaattaatgccacaaaggccatgctgtggcaccttgctaaattcctctttctgggtgtaaatgctttaaaaacagtgtgctgttatctcgaggactggtccttgggttttagataagctgggactttccatcggtcttctttctgctcatggtaaacatcacctttctcagaggtgccctgtctctgttatatatataacgctccacacaggtcagata

SEQ ID NO: 150496 - DNA, 538 bp, Homo sapiens
tttaaattctctgaccctcagttttctcatctgtaaaaggagatggtacaatcaaggttgttgcaagtctttgcaaagcactgagagttgcaggccctcacattgatagttgttattaagaaatgaggagggaatattcataaagaaatctccctccacatatttaatctcactttctccacaaccaagattatcttactttgttattaccaattgctaaaattttagactcataagtactatataaatttccttttcccaaccaccttgtggtactctccaaaacagaccttcacggttgggcaatggtaacaagacccaattaatgccacaaaggccatgctgtggcaccttgctaaattcctctttctgggtgtaaatgctttaaaaacagtgtgctgttatctcgaggactggtccttgggttttagataagctgggactttccatcgktcttctttctgctcatggtaaacatcacctttctcagaggtgccctgtctctgttatatatataacgctccacacaggtcagata

SEQ ID NO: 150497 - DNA, 464 bp, Homo sapiens
aaacaaataagttggaactttaaaaggaaagcagagtgtaaaagtttgaaaattttgtaacctattcatgtctaggcagagaaagaaaaagcttttttgggagaggaagtcaagcagactgtggatcaaccacttattagagatatttgtatakaagaagaagccagtgctaatagccaagacaacaagaaaaagccttcgaaggcatttcatagacctgcacagcagcctctcccatcacagacccagaggcctaggaaggaagaatgctttcctgggccaagggctccactgccctgtgtgtagcctcgggaggcagctcccacatcccagctgctcccactccagcctcggctccaaggggcccaggtacaggttgggccatagttccagagggcataagctactgtaagacttggtggcttccatgtggctttaagcctgtggccgcacacagtgcaaga

SEQ ID NO: 150498 - DNA, 608 bp, Homo sapiens
agcatgctgtgctcatgaatctttaactaaagagcttctttgtgtcttttccttttttgaaatacagctcaggatccaggaatgtgatgcttaaccctgaaaaggaaaccttgtgcaaatggttccttgaaaaccagcatgtagcctgttcataaattttatgatgtgtgaagcacatgttcaaggaagtatttattagtaagaccataagttaaattaggaagggtggwtcatatcttaaatattccatcatttttcgtaatgtttatgtacccagacccaagtgtgaaacttaaatttgtttttaatgtattctcctgataaatgatttactctagtcaaatgtattttcttttggttccctggatagtcatgttttacagttgggggaagataagaaaatccttttaaattactctttcaacacatacaaagttaaaatttctgtgcagacatcatagaataattttcctgctggacttaataaaatgtagtatgatttcaggtatattagtacaggcatactttgttttattacacttcactttactgagcttcacagatactgcattttttacaaattgaaggcttgtagcaacacgcaagca

SEQ ID NO: 150499 - DNA, 534 bp, Homo sapiens
tccatagtctatatcctttatgtgtagacacagacccacttctatatccaaagccatccttcaaagagttagtttcacattaaagaaaagtaatatttcgttstgcttcaactgccagtttaagaatctcttcatcataatttatctcacttcacccaaagaatactattttctactaatagttttcattgattgtttttctcaaactgatcatttttaaaggtagcttcaaaatcatattattttgccacatttaaaaggtgagctggactcatacaaatagtcaactagtttttattggtaactcattcaagtccataattgattgctttattaccgcagcagaacgactgggcaaacattaaattcaatgtaccagaactcccccaaattaactaagttacctcagaatctagtattttagattaaacagaaccagtttaagttaatatggaagacactgcaaagatatctatgtctgccaactctataaaaaagaaactcagctttgacaactgaaacttgagtacgatt

SEQ ID NO: 150500 - DNA, 509 bp, Homo sapiens
atttcagatgcctccaagaaaacaatacatcatatattggagttttacaattattcctcttctcttgagggttgataatactttccaagcctaatttgtattctatttttagaatacaaccctgctttattctatttatttggtcttcttgttcttgtccatcttctgaagttggttaatcaccattgataccacaacctgagttaatcattgtctcagaagacytccatcttcattccaatgtgcactgcactgcctggggcttgcctactccctcaataagtgtcctagcatgatatttccataattttgagggcttgctacccactaataaagcctcataattgtgtttctgtgctttctgaagttcaactttgtcttgtatatgttctatgtacctcatgcactgtgaagtatgcccggggaggcttccattactatctttcttctgcaccaagatgtcgggctttctcccccgtgtcctctatttgcctccactacttatagtc

SEQ ID NO: 150501 - DNA, 521 bp, Homo sapiens
gccatgccctgtatcctgtgcccataagaaccccagaccacagactcaggsgacatacacacacagaagagagaagtgtctcaacatctagaggagaagaagcagctggatattagaaactatggttggagaggagttttgctaagtatggttaaggagcagtttggcctgggacagccaaactccaggggaagcccaccttctgactcagccccctttccagctccccatcccactatgaaccacttccttcactcaataaaatctctgcattcaccatgtcccaagtctgtgtaacctcattcctcttgggcattggacaagaatttgagacatgcaatatgcagcaacccaaaaaggctatcacattgtccatttgccctcgttggcaaagggcagccaccccacatgacgagacaaaaggcccactgagcttgtaacacgctctctggggctccaggggtcacagatacaccctcctgcatggcagagctaaaagagcattgtaatatgcttggatg

SEQ ID NO: 150502 - DNA, 521 bp, Homo sapiens
gccatgccctgtatcctgtgcccataagaaccccagaccacagactcaggggacatacacacacagaagagagaagtgtctcaacatctagaggagaagaagcagctggatattagaaactatggttggagaggagttttgctaagtatggttarggagcagtttggcctgggacagccaaactccaggggaagcccaccttctgactcagccccctttccagctccccatcccactatgaaccacttccttcactcaataaaatctctgcattcaccatgtcccaagtctgtgtaacctcattcctcttgggcattggacaagaatttgagacatgcaatatgcagcaacccaaaaaggctatcacattgtccatttgccctcgttggcaaagggcagccaccccacatgacgagacaaaaggcccactgagcttgtaacacgctctctggggctccaggggtcacagatacaccctcctgcatggcagagctaaaagagcattgtaatatgcttggatg

SEQ ID NO: 150503 - DNA, 521 bp, Homo sapiens
gccatgccctgtatcctgtgcccataagaaccccagaccacagactcaggggacatacacacacagaagagagaagtgtctcaacatctagaggagaagaagcagctggatattagaaactatggttggagaggagttttgctaagtatggttaaggagcagtttggcctgggacagccaaactccaggggaagmccaccttctgactcagccccctttccagctccccatcccactatgaaccacttccttcactcaataaaatctctgcattcaccatgtcccaagtctgtgtaacctcattcctcttgggcattggacaagaatttgagacatgcaatatgcagcaacccaaaaaggctatcacattgtccatttgccctcgttggcaaagggcagccaccccacatgacgagacaaaaggcccactgagcttgtaacacgctctctggggctccaggggtcacagatacaccctcctgcatggcagagctaaaagagcattgtaatatgcttggatg

SEQ ID NO: 150504 - DNA, 521 bp, Homo sapiens
gccatgccctgtatcctgtgcccataagaaccccagaccacagactcaggggacatacacacacagaagagagaagtgtctcaacatctagaggagaagaagcagctggatattagaaactatggttggagaggagttttgctaagtatggttaaggagcagtttggcctgggacagccaaactccaggggaagcccaccttctgactcagccccctttccagctccccatcccactatgaaccacttccttcactcaataaaatctctgcattcaccatgtcccaagtctgtgtaacctcattcctcttgggcattggacaagaatttgagacatgcaatatgcagcaacccaaaaaggctatcacattgtccatttgccctcgttggcaaagggcagccaccccacatgacgagacaaaaggcccactgagcttgtaacacrctctctggggctccaggggtcacagatacaccctcctgcatggcagagctaaaagagcattgtaatatgcttggatg

SEQ ID NO: 150505 - DNA, 509 bp, Homo sapiens
atttcagatgcctccaagaaaacaatacatcatatattggagttttacaattattcctcttctcttgagggttgataatactttccaagcctaatttgtattctatttttagaatacaaccctgctttattctatttatttggtcttcttgttcttgtccatcttctgaagttggttaatcaccattgataccacaacctgagttaatcattgtctcagaagacttccatcttcattccaatgtgcactgcactgcctggggcttgcctactccctcaataagtgtcctagcatgatatttccataattttgagggcttgctacccactaataaagcctcataattgtgtttctgtgctttctgaagttcaactttgtcttgtatatgttctatgtacctcatgcactgtgaagtatgcccrgggaggcttccattactatctttcttctgcaccaagatgtcgggctttctcccccgtgtcctctatttgcctccactacttatagtc

SEQ ID NO: 150506 - DNA, 589 bp, Homo sapiens
ctaacttacttctacagtaacattgtccctcttgcagttccttgaacttacaaatggactgcctattccaggcattcacacatgctaggagctctctggaatgttctttacctgcctgamttctaattaaaggccagatctcagcttaaattttgcgcctaagacgcatgatccaattctctaatttaaacttacaaaacgttgcttaattcctataggtgatttttcaagttatttttatttgtgctcttatttgtgcatttatatatttattcatttatttattttagttttgtctttcccactaaagtgtaagtttcacaagaacacagcttgagtgtattttttttttagcattgtatacctagcatttgtcatagagcctagtaaatattaggtacagcggccctccttttctgcatgtcatatattcaagaccccagtagatgcttgaaactatggatagtaccataccatatatatactatgatttatcttatatatacataaatacaataaagtttaatttataaattaggttcagcaaaaaataaacaacaaaaacttaaaactataattataacaatat

SEQ ID NO: 150507 - DNA, 622 bp, Homo sapiens
tccaattcctctcatttctcaatctaagcccagaatatgttgtaatagagtcaggatctgctttaatgacactgtgacttcagttttataagttataaattttcatcctggctcctgtgtaaggtagtgcaccctacttagtaactgaagattctaaggacagaattattaaaaggattttgcaaggtggcaggttcaaggttggctttcacgggaatctgattccaattcacatactttggtccactaagccattctgccttttcttacaaggatccctgaagccatatatttaagtcctaaactgaagttaaatgtcccaaggaattttctgggctttatattttaacctttctatgttttcaagctgaaattactaaacttgattttgtgtcagaaaaggccaagtgggtacctgtaaggttttacattttttgtaggtaacaagaggtctggtgggaggcagctatttgaagaatttttgttagctttctsttattaaaacaagcccctcactaagaaagttcagatgttttgcaaaaattggaagcctagctatcttgaaaatgtgaaattaggagacacattaaaggcattaaccatttatatgagcctattaatg

SEQ ID NO: 150508 - DNA, 585 bp, Homo sapiens
taaaacaatttcactatttcttttggccaaggacatacctttggtttcccgtctattaatcttctatttaaacactaactagctgtatttcttctgtgctttcagttcatatatcctagagatcaaatttcagttttatatctgttaaaagaatgtttatgaaaagtgagagccctaaaggggataactttagataactttcccactgttcagtagattaygcatatttaaaatatgatatgatttttaaagctgccaaataatttagttatataagaatctaatgaccatttgggagatatgaagatatttctagaaattaacttaaggagaagattaacatacataattcttagaccaaagcaggttccttaagtatgctgtagcaaataggatttcactctacaatagtgaaacatttaaactatgtgtaccaattaataaaaattattggaaaatgtattgaaaatatcaatagcctaaagtgcaaacaggatataacaagtggtgggcaacatttttatttcctttggaaatttaaaatatccttatatattaataaaagtttatatcacaatttgcaat

SEQ ID NO: 150509 - DNA, 480 bp, Homo sapiens
tcttttcaccaagtaagtagctatgtgattttgagcaagttatttatcagttctgagccataattcttttacaaaaatggtttakctctatttggctggcacaaacctgaggaagattaaatgccttaagacataaaaaatacctatcacagttaatatgcagaaacttcttgctattaggaaatgaaccaagatatagtattatgaaggctactaacccttaaatataaagtaagcttcaaatgtggtactagattaaggaggtatatttttcataactctatatcgagcatctcctcatatcttaaattgaaaggcttaaaacagaatcaggtaactttaggctacccaaattcctaggcccacaacattcttgcactaaaaataaataaataaaaagcaggtcataaacagttcctgtgttttgagctaaatttatagctgaactaagtatgtagcagatgctcagagcattcttgt

SEQ ID NO: 150510 - DNA, 480 bp, Homo sapiens
tcttttcaccaagtaagtagctatgtgattttgagcaagttatttatcagttctgagccataattcttttacaaaaatggtttatctctatttggctggcacaaacctgaggaagattaaatgccwtaagacataaaaaatacctatcacagttaatatgcagaaacttcttgctattaggaaatgaaccaagatatagtattatgaaggctactaacccttaaatataaagtaagcttcaaatgtggtactagattaaggaggtatatttttcataactctatatcgagcatctcctcatatcttaaattgaaaggcttaaaacagaatcaggtaactttaggctacccaaattcctaggcccacaacattcttgcactaaaaataaataaataaaaagcaggtcataaacagttcctgtgttttgagctaaatttatagctgaactaagtatgtagcagatgctcagagcattcttgt

SEQ ID NO: 150511 - DNA, 480 bp, Homo sapiens
tcttttcaccaagtaagtagctatgtgattttgagcaagttatttatcagttctgagccataattcttttacaaaaatggtttatctctatttggctggcacaaacctgaggaagattaaatgccttaagacataaaaaatacctakcacagttaatatgcagaaacttcttgctattaggaaatgaaccaagatatagtattatgaaggctactaacccttaaatataaagtaagcttcaaatgtggtactagattaaggaggtatatttttcataactctatatcgagcatctcctcatatcttaaattgaaaggcttaaaacagaatcaggtaactttaggctacccaaattcctaggcccacaacattcttgcactaaaaataaataaataaaaagcaggtcataaacagttcctgtgttttgagctaaatttatagctgaactaagtatgtagcagatgctcagagcattcttgt

SEQ ID NO: 150512 - DNA, 480 bp, Homo sapiens
tcttttcaccaagtaagtagctatgtgattttgagcaagttatttatcagttctgagccataattcttttacaaaaatggtttatctctatttggctggcacaaacctgaggaagattaaatgccttaagacataaaaaatacctatcacagttaatatgcaraaacttcttgctattaggaaatgaaccaagatatagtattatgaaggctactaacccttaaatataaagtaagcttcaaatgtggtactagattaaggaggtatatttttcataactctatatcgagcatctcctcatatcttaaattgaaaggcttaaaacagaatcaggtaactttaggctacccaaattcctaggcccacaacattcttgcactaaaaataaataaataaaaagcaggtcataaacagttcctgtgttttgagctaaatttatagctgaactaagtatgtagcagatgctcagagcattcttgt

SEQ ID NO: 150513 - DNA, 597 bp, Homo sapiens
tctcttactcagcaattcacaaactgctgttttggagaagaagatctactaggagtgacttcagttatataaagtctaataaatgctgcatatcattttcttcttttagaaatttcatatgcacaatatagtgttaggtcctgcagtaaagaaatcacagaactgtcaaaaacccataccctttgccgtatgttttgtgattctttgacctggtgcctggcactaagagtaataatatcaagaagtaacacaattataayttttatatcctaatagcctcggcataagaatatctttgcaatttcattttaacataaataatatctttctgagattagagctatgcaataatggggtagaatgtcttatgtggtaataagctctctgtcgtttggtgcatttggtgacactcaagcaaagactggtattggtgtagcagtctgtgtgttaaaaaaatctctgcactgtattttggatactattaaacgtctaaagcagttcaaaattctaaagtatatgattttttcaatgccttgtgtaaagtttgcttttcatgctcatcactttgcctattaataaataatctaaaaagggagc

SEQ ID NO: 150514 - DNA, 597 bp, Homo sapiens
tctcttactcagcaattcacaaactgctgttttggagaagaagatctactaggagtgacttcagttatataaagtctaataaatgctgcatatcattttcttcttttagaaatttcatatgcacaatatagtgttaggtcctgcagtaaagaaatcacagaactgtcaaaaacccataccctttgccgtatgttttgtgattctttgacctggtgcctggcactaagagtaataatatcaagaagtaacacaattataatttttatatcctaatagcctcggcataagaatatctttgcaatttcattttaacataaataatatctttctgagattagagctatgcaataatggggtagaatgtcttakgtggtaataagctctctgtcgtttggtgcatttggtgacactcaagcaaagactggtattggtgtagcagtctgtgtgttaaaaaaatctctgcactgtattttggatactattaaacgtctaaagcagttcaaaattctaaagtatatgattttttcaatgccttgtgtaaagtttgcttttcatgctcatcactttgcctattaataaataatctaaaaagggagc

SEQ ID NO: 150515 - DNA, 556 bp, Homo sapiens
tgttccctctccttatagggaaaacagccctgttagattaaaattgcacacttatgaccttatttaaccttaattacctttttttattatctccaaatatagtcacattgtgaagtagaactttgaatataaatttctttgagaggagggacacaattcagctcataactttgtcattggttagtatcaccatgtacttattgttcaaacacacacctggagactttcagaacagttaggatggcttgaacattaaaacttactcctttgctgcactatctctagcaaatcaagaatataatcagtatttgtactgatgtaactctggccaatgtctctatattttggagatagctttagcccctactcatcattaaaatattggacataagcttccataattgctcagcaaagcatgccaactgacaaacaaaagaaacaccaagtcaagctttttctgtttatgagataagactgtraatcaatacataagtttttctcacctagagaatatcttttcatggataggagctgtattttaactggaaggttagtt

SEQ ID NO: 150516 - DNA, 600 bp, Homo sapiens
tgcctacttactaacacatccacttccttcaccttcttgccctgcttcttctctcaggaagctaacccagcaaaagaagtatcccaggttccttaactatttagatgctgggtacagttggccaatgagaggcctggtggaagactatagagtgaaaagaaggcagcaaccaggttatttcaccccctttctccttgaatctgataggggcagagtaaccagcggaagccaagtcccctccctggcttgagcttttactgcataggccctttctacagtcccggttcctactgttctatccccctctgtcatcccaaactttgataatgccaagttttccatttggattgcctcaccatattatgtttggactttaacgtttgaatttgtaaatagctcaatgtgttattacctctttattgagctactttgcatgagtttcatttgtctgactagattcttattcctaacaccgwtgttacattctgaagacttgatttagcaaatttataaacttgttctgttttagtagcatatttggtggaaatagtaacttatcctcccttgcttttttgagagttaggtaaagttggccctgaa

SEQ ID NO: 150517 - DNA, 608 bp, Homo sapiens
cctgtggtatctttccttccttgtttcacagttagaaatggctcctatctcttcctttataatgttaagggttttgctacagactgtggcaatgatactaggcagaatctacgtttggcccacccatcagaggtgcagttcagaacaatgtggtttccctttgttcttagaggagccattcccacccccaccccaacagctgtaggcacgtgatgcactacagctctccccatttcccactcccctcctggcttgggtacttgggcatgtccacagcgtgcatgagccacacccagtggccacgaggggtggaagagaaccacagctgctgccaaggccctgcacagcaagatggctggcatcttctgcttgccgtcccctcctgccatgaacctgtgaccacagagccttttttcccatggttgaaggatccttacttgtctaaaccagggaaggaatacagtaattgaagaaacccaattgcacagagcaagagactctcccccrtctcccatcctttcgtactttaagtttttttttttttccctaagggagataattcttttcctcagcgttctgcttataataaggaaaataatggaggagcc

SEQ ID NO: 150518 - DNA, 508 bp, Homo sapiens
tcccaggcgtgtcttcccacctgcagtctggaaatctccaatactcaaagagaagcttctcatagagagatagcaagctggattttggggtcaggtgkctggattaaaagattttgatgcaatgttttttgttttgtttctgttttgtttttccccattttccatcatcacgcagagcatgaggaggaactagaaattccctccactgtggtcagaagtttgaggggaataaaagggttggtggactagaaatgtttgaaacaaagatgaaaatagcatagtataaagaaatttgacatcaaaatcaataatcaaaaagggactcctgcacagggtcagaatgaggtgttcatggccagggaggactcacactacagagtcctatacacagtagacctaggggcagcagaaaccaacaaaaattaaagggtcatatttggagcagagattcccctcccctttaccattgtgtagtcacaatcactccacatataaaccaggtgaccga

SEQ ID NO: 150519 - DNA, 568 bp, Homo sapiens
agagtatggaaaccagagataggtgacatatattagacacactacataagaaggggcaagtggaaacatccaagctggctttgtgatgtctaagaagtgctggtgataggcagagtgtcccaggcgtgtcttcccacctgcagtctggaaatctccaatactcaaagagaagcttctcatagagagatagcaagctggattttggggtcaggtggctggattaaaagattttgatgcaatgttttttgttttgtttctgttttgtttttccccattttccatcatcacgcagagcatgaggaggaactagmaattccctccactgtggtcagaagtttgaggggaataaaagggttggtggactagaaatgtttgaaacaaagatgaaaatagcatagtataaagaaatttgacatcaaaatcaataatcaaaaagggactcctgcacagggtcagaatgaggtgttcatggccagggaggactcacactacagagtcctatacacagtagacctaggggcagcagaaaccaacaaaaattaaagggtcatatttggagcagagattc

SEQ ID NO: 150520 - DNA, 550 bp, Homo sapiens
ttatgcagatcttgcttctcactgaacaccggcttaaaaaggtttgtttctctctgtatttgtagtgcactctgctttcattacacatggtggaatgacacagaaaaatattttgatttaattttacaccagtctatcaattttaagttgtgctctatgaatatacattgtagaggataatctctcactattaaatcaatcaaatttgaaagattattaaataatgtatgtgagaatgcctagaatagtgcaccttatgtcatataggctttcggtttatttaatccaggtatgaaacataaggagggkggataacaccaaggatgatcctagattttagacatttgtccactaattttacacgtgaaaagatggaaattcacagtgtttatctgactgcttaaggtcacacccttggggtaagaattaagagcctaggaaacatgtccagtttgacaagctttccatatgctgtgctacttccctagacactgatgcaataacaggaccatactacctttattaattaattatcgctttacattataac

SEQ ID NO: 150521 - DNA, 550 bp, Homo sapiens
ttatgcagatcttgcttctcactgaacaccggcttaaaaaggtttgtttctctctgtatttgtagtgcactctgctttcattacacatggtggaatgacacagaaaaatattttgatttaattttacaccagtctatcaattttaagttgtgctctatgaatatacattgtagaggataatctctcactattaaatcaatcaaatttgaaagattattaaataatgtatgtgagaatgcctagaatagtgcaccttatgtcatataggctttcggtttatttaatccaggtatgaaacataaggaggggggataacaccaaggatgatcctagattttagacatttgtccactaattttacacgtgaaaagatggaaattcacagtgtttatctgactgcttaaggtcacacccttggggtaagaattaagagcctaggaaacatgtccagtttgacaagctttccatatgctgtgctacttccctagacactgatgcaataacaggaccatactacmtttattaattaattatcgctttacattataac

SEQ ID NO: 150522 - DNA, 498 bp, Homo sapiens
ttttttttttggaaaaaaattacatatgtagaagttgaaaacaggtgcatatataaaacaaaaaaaaagatcattggaaatgtaaaatactttttacaaattttggcatgaatttctatgtaacacttggaaagaactggagagaatatcagtaaaaatttaagaaacagtttttgagtattgtagggtgtctctttaataagaatttatyacagtcaatttttagctattttaaaacagagcctattttaacattatttcaatagtcccactcttttattggaaacaatgtagataaaaatttaagagacactttttgggaaattgtgtaatctggccaatgttttaattatttaagagtagaaaatgctttttatattctcttttttaatcttttatttcaatcatgcatgtactcaaaagaattgtatcacatctttgctaagctttttattaaagagaaaggtattgagtgcctactataggttaggcacttta

SEQ ID NO: 150523 - DNA, 537 bp, Homo sapiens
aagtgttcattttgaatgttatttttgttgtatttcagttagtttctagagattttgacatttattatagcctgcatttttaatggtagaaaacttataatcttaccaataaaatayaaaagattaatataatttatattttgatttatctagaatccatttatttaattaaattggtaactttattattgactcatttgaatagttcattatttttagggggtaattattattttaacagtaaaatacaagagaaatttaaattgttttgtgttgaaaatgtagaacagtgtgattcagagcatttaaggagtcctaacagagagaatgtcaactacagtgctggaagtgtagttacatggttcaaggaaatgaccttaacatcataaaaaatgaatgtggttggactctggcttgtttacactgatattctttcaaagcatgcttcataatttgttattaaacacaagccagacttggaaagacaaacttttcatgttctcacttatttgcgggagctaaaaattaaaacaaacc

SEQ ID NO: 150524 - DNA, 537 bp, Homo sapiens
aagtgttcattttgaatgttatttttgttgtatttcagttagtttctagagattttgacatttattatagcctgcatttttaatggtagaaaacttataatcttaccaataaaatacaaaagattaatataatttatattttgatttatctagaatccatttatttaattaaattggtaactttattattgactcatttgaatagttcattatttttagggggtaattattattttaacagtaaaatacaagagaaatttaaattgttttgtgttgaaaatgtagaacagtgtgattcagagcatttaaggagtcctaacagagagaatgtcaactacagtgctggaagtgtagttacatggttcaaggaaatgaccttamcatcataaaaaatgaatgtggttggactctggcttgtttacactgatattctttcaaagcatgcttcataatttgttattaaacacaagccagacttggaaagacaaacttttcatgttctcacttatttgcgggagctaaaaattaaaacaaacc

SEQ ID NO: 150525 - DNA, 508 bp, Homo sapiens
tagttaggtcacaaaaaaatgagaataaacacctctctgactttcacagtctgtccattttctaaccccttcytagaattggggtgctttttatacaaaaagtagttatgcatcagtaatacattcatattttatatttctcaagaactttcactcaaaaatccatatcactatcttaaatatacatgaagagtttgacaaaaaagcctgctattttgaatggtaattttcaaggttttttttgtacattattccatttgttactcaaacttatagaagttctcatgaatatagattagaaaagatgtcctttacagagaaagaaattgaaaactcagagaaaaatggttttccaaaataaatgaagtgcagtgctctttgaaatctgtgttgttttgattttggattgaagacactgcagcagaaactttactatgccagaaatcccagtgaaactgattctccatgccaataatggagattccctctccttagaatatttttgtca

SEQ ID NO: 150526 - DNA, 548 bp, Homo sapiens
ctggggttacaaactcaggccactatgataggcatctccagactggtcacaaaaaaagctgctgtcttcacattcaaagtagtaggttagcccatttcttattattcagatttctgtataagtcagcttcttgtcatctttgtctcacaccttcaagaaacatacttcagaaccgtgagtggtcccactgcattgccaacctaaagaaaaggaggcacaccactctccccttagaaatttacattctaagacagctctctctaaaaagtctccccaaaatactttctcctctcatcaatctgatctatttttgtaacttaaatcttgtagaaaaagcaacaaataaggraacatgtttgtttggttttttttttgtcatttgctttgtaaattctgcatgtaaagctttcctaatattcacttaactgtcagatatctattgggtttgtattttagccaacattaaggcacaaaagaatcatctcgtctggcatcctgttaatactcacataagatattattattaatatataacaaataataattat

SEQ ID NO: 150527 - DNA, 582 bp, Homo sapiens
gcagttttccctgatatccttatcaaatgatgtgcccatgtttctcaacattataagaacatttttgacccctagcccagcatttctcattctgtctagcagaatgagaacgaacatcaataaataatacagtttgctaaatatctgtgtatgtttgtgactagggatgagtaggtaaatgtctctatgtcattaaatgtactgaacaactatgaagttgccctcattctgaatttattaagaaatacaagaaaaacaaaatgaaacaaataaatgaaaatcttacagtataaaaggcataagataaaaatcaatactttggtagacattagaatttcattaatcataaagaatttctgctgctaacacttagatctgaatgaactagaaaatatctgtaaatggttgacccactcaggttctgagtggctgcatgacagaacaatctttgatttattacaaggatcccagtatgggacccatctcctcaatacaactcactatcaagaggagaamacataacatgcctttgaaaaatgttcttccccagatttagtgccctgtgaattgattgttattttt

SEQ ID NO: 150528 - DNA, 617 bp, Homo sapiens
ctgctaacacttagatctgaatgaactagaaaatatctgtaaatggttgacccactcaggttctgagtggctgcatgacagaacaatctttgatttattacaaggatcccagtatgggacccatctcctcaatacaactcactatcaagaggagaacacataacatgcctttgaaaaatgttcttccccagatttagtgccctgtgaattgattgttatttttgtagcatgatgtgaatgtctactatattgtaagagattctatgagtttcttggggcaaatacacataggaataagtttccgcaaaagaacttaatgtaatttttagaaaacaaatacatacacatataaattaatgaagtagataaatgtcagaaacaggccatgaatatatatgtgagctacatacagtgatggacagcctccaagtttcaaaactgtataagaccttagttaaaagtagtcaagtatgaccaccagtgaagaatagaatagagagagtgmagagtagagatgaccagaagtagaatactttaaaagaaaaaaaaatacattcttacatctcattcaaacttttatgtacataattgctcccacatctgaaaggtgctgccat

SEQ ID NO: 150529 - DNA, 502 bp, Homo sapiens
agtaagggctaagagaattcattacccctaaatgagctttgcaagaaatcattgagggagttctaggcatagaaacaaaagaaccatacctactaccacaaaaacacacataagtatgtagcacacagaccctaccaagcaagcataagatagaaactacaaagcaactagctaaaaatttcacgatgggacccaaacctcacatattaaccttgaatgtaactggcctaattgctcccacttagctttgaatgtagatggcttaagtgttccacttaaaaggcacacartggaaagctggataaaatataatctgctgtctcagagcagacgttgctattcttttttactattattattctttaagttctgggattcatgtgcagaacgtgcaggtttgttacataggtataaacgtgccatggtggattgctgcacccatcaacccatcatctgcattaggtatttctcctaatgacatccctcacctagccccccaccc

SEQ ID NO: 150530 - DNA, 502 bp, Homo sapiens
agtaagggctaagagaattcattacccctaaatgagctttgcaagaaatcattgagggagttctaggcatagaaacaaaagaaccatacctactaccacaaaaacacacataagtatgtagcacacagaccctaccaagcaagcataagatagaaactacaaagcaactagctaaaaatttcacgatgggacccaaacctcacatattaaccttgaatgtaactggcctaattgctcccacttagctttgaatgtagatggcttaagtgttccacttaaaaggcacacagtggaaagctggataaaatataatctgctgtctcagagcagacgttgctattcttttttactattattattctttaagttctgggattcatgtgcagaacgtgcaggtttgttacataggtatamacgtgccatggtggattgctgcacccatcaacccatcatctgcattaggtatttctcctaatgacatccctcacctagccccccaccc

SEQ ID NO: 150531 - DNA, 429 bp, Homo sapiens
attgaaacttaaagacctcataaaaataatgaatgcaaaataactcattaaaaaattgttggttaccttttgaaatattttagatataatgtgttaaataaaatatattttaaaattaatatcacttctttttttatctgataggattactttagatataaattaaatatcagtataaaattaagtgctttctttgaaaagacatttattaaacaggaagaattttgtgggaaggtgatgaaaatgctattggttatattttggaatgccagtctatgaaatgtaattatttcaattcaaaggagctatatattcaaaaagaaaaactaggtgatattttctcttgtggttyactactgtatgtctttgtatttcttttttcatgcttggaattgatgttctgatggattacacagtgcaacatttatg

SEQ ID NO: 150532 - DNA, 369 bp, Homo sapiens
ttctcctggctgggtgcagtggctcacatctgtaatcccagcactttgggaggctgaggcgggtgaatcacttgagcctaggagttcgagaccagcctgggcaacatggtgaaaccccgtctctgcaaaaaaaaatacaaaaattagctgggcawggtggcgcatgcctgtggtcccagctacttggaaggctgaggtgggtggatggcttgagcccagggggcagaggctcagtgagccgtgttcgtgccactgtatgccagggctgggttacagagccagaccctgtcttgaaaaaaaaaaaaagggaaaaaaatgtgttcccctataaatatggcttcaatgtttatggcaatattaaattatatt

SEQ ID NO: 150533 - DNA, 476 bp, Homo sapiens
ccaaaagcatctgacacacgagcctggaaccgtttattatcctctattataattggtgccttgctgacaagtctctgctactggactctaaactatttggaagcccttcccctccctatcctggcatgctgcctgacaccataggtacctawcaaggtttctgctgtggctgactggctgggtgggatgggatgaggggatggatggaaggaaaggttgattatcatctctgcccatgactgctgcctgctcttagaaatcctgccaattccataataggtgtgtgtgccaatgggagaatgaatgaggaatgggtggcttagtgcagttccaccctgtcatctaccgaagaatccaaaacacaagtgatactgatgcagtgtggcccactgctgtgggaacagtttatctgtggcagctggcaaccttccaaggactcagtttccactcactgtgatttgacttgagtttccaat

SEQ ID NO: 150534 - DNA, 495 bp, Homo sapiens
gtctccatgcagaggactcargctccagctatggctacaacatagggtttttatacaagaaaaataaagtgaattgagcctgaaagaaaaaaagaaaagaggggaggagaaggtgtccgttagtcttcctcctcctttcagagtgacccagagtggagagaaagatagaaagagtgccccacttctcctctttcatcccatctcctcagggtcccagcaaccatcatagatgccacccatggatgcaagcataaccttcgcccatggatctagaggagctagtcggcaagagtagtcatgtttacctgtatgaggccctagctctccaccctgctggtttcccagacccacatgacccataaggctcccagggtaccccaggggcccagaagagattgcacaatagttgaatttgggcaagaccctttaatggagggagtgtcttaactctatccatacattctgttactactgcccgggcaaagttatgaattc

SEQ ID NO: 150535 - DNA, 495 bp, Homo sapiens
gtctccatgcagaggactcaggctccagstatggctacaacatagggtttttatacaagaaaaataaagtgaattgagcctgaaagaaaaaaagaaaagaggggaggagaaggtgtccgttagtcttcctcctcctttcagagtgacccagagtggagagaaagatagaaagagtgccccacttctcctctttcatcccatctcctcagggtcccagcaaccatcatagatgccacccatggatgcaagcataaccttcgcccatggatctagaggagctagtcggcaagagtagtcatgtttacctgtatgaggccctagctctccaccctgctggtttcccagacccacatgacccataaggctcccagggtaccccaggggcccagaagagattgcacaatagttgaatttgggcaagaccctttaatggagggagtgtcttaactctatccatacattctgttactactgcccgggcaaagttatgaattc

SEQ ID NO: 150536 - DNA, 556 bp, Homo sapiens
agtgccacataaaaatagacattaaattcagcaaatttgtcgaaatatgcccttgtagcaaactgtgtaaattaatcactagagaataacaatgtgctgaaaaggttacgcctttactctgttctaagagaaattattgcacctgcaggcccttgtagcctaaatagccatgctttatatcatttgctattctcgtactcttctctttatgggccacagctgacaagaccaggaatggacacctacccaacatagggtctgctgagcaacccgcaacctctgtggtctgtttaaaaaatatgagctgggccaaatagactctcttggcactttgaaacaagaaatatggaaggcttgaagsttttactggttaaaggtgggagctgcagctaaaagttcaggaactagcagcaaggatgggaaggctgtggctgcaagctgaaggagggagagcaatgaagatcagatggtggtggcatggaaagcagcagccctgtgggggtagtggaatcacattaatggcagagcacaagggcaaggatctgccgctagagcc

SEQ ID NO: 150537 - DNA, 553 bp, Homo sapiens
tgtcatgaggatccttaaagatgtggaaaggtccacatggggaggagctgatgcctcctaagaacaccagcacactcttgggaggaccatcttgaaagcagattctccagccccagtcaagccttcagatgaatgtggctccagtcaatgtcttgattgacacttcattagaaacccaacccrgaaccagccagctaagccactcctgaattcctgacccacaagaactctgtgagatagtaaatgcttgttcttattttaaaccactaagttctggggtgatttgttacatagtattacatagctattatgctgtctgtaagaaaaatatagttgttcttgttgagtgtttatataccatgcattggttttttcaccttctttttatttatttatttatttatttattttttgagatggagttttgctcttgttgcccaggctgaagtgcaatgatgcgatttcggctcactgccacctctgcctccctggttcaagtgattttcctgcctcagcctccagagtagctgggattatgggcacccaccaccat

SEQ ID NO: 150538 - DNA, 553 bp, Homo sapiens
tgtcatgaggatccttaaagatgtggaaaggtccacatggggaggagctgatgcctcctaagaacaccagcacactcttgggaggaccatcttgaaagcagattctccagccccagtcaagccttcagatgaatgtggctccagtcaatgtcttgattgacacttcattagaaacccaacccagaaccagccagctaagccactcctgaattcctgacccacaagaactctgtgagatagtaaatgcttgttcttattttaaaccactaagttctggggtgatttgttacatagtattacatagctattatgctgtctgtaagaaaaatatagttgttcttgttgagtgtttatataccatgcattggttttttcaycttctttttatttatttatttatttatttattttttgagatggagttttgctcttgttgcccaggctgaagtgcaatgatgcgatttcggctcactgccacctctgcctccctggttcaagtgattttcctgcctcagcctccagagtagctgggattatgggcacccaccaccat

SEQ ID NO: 150539 - DNA, 582 bp, Homo sapiens
gagagagtgaaaagccccaggggcatagggtgcccccttttacattttaagtggacagcaaggtgagtgggcccagtggctgctccccccccccccccagtcccagtattacaggccaagcagggagacatcatggctcaaaaaattttgtcaaagaattttgatgtttttactttaaattttaaaaaawgcaatatttttacttaatactttaagcatatgtgaccctttggttttattcctcccttcaaaaagggtttttttttaaggccccctttttttttttttttttttttttttttttttttttttttgcaatgccttcccctttgaaagcatacttttgctgtttgctgtgttttgggcagccagtctcttctgatgggtctggtgtctctagctgcatgtatggcctcaggagagtaaagatctgggtctgggtttagggtgtgttggagccagaatcacagatcacagctttgtgagggtggacagagccctggcagttctggcttacagccaaggtgctgggcatacaggcacccattaaaaagtgggtacatttggaaaaaaagaaagaaa

SEQ ID NO: 150540 - DNA, 574 bp, Homo sapiens
tgatattttatcttctccttacctgaggaagaagaatgctcagtaattatttcactatgcttactaattgtttcactaataattcacttagtaattattttagatttgctccaaaataaaagtaagataagtatctttaaaagaataaagtgtatctatgtaaagtgctccattcacctggctcttgtcatcataacatagctgttattatggtatttgctgttgttgttgctagtatattattatatcttaaaattcaaaataaaatggtcaggcctgagacagaaatagtaaggctctaaaccagctttcactagcaaaataagcatttttgctttgctctttttgttaatcatctttgttyaaaccattctccccaacccttttctttgttttgtttttaaattgccttatgcggagcttgcagtgagctgagatcatgccactgcactccaccctgggtgacagagctggactccatctcaaaaaaaaaaaaaattgccttatgggtaataactgtgtttgtagtggatcaatattaaaattccttaaaatattataatctagtaagctt

SEQ ID NO: 150541 - DNA, 574 bp, Homo sapiens
tgatattttatcttctccttacctgaggaagaagaatgctcagtaattatttcactatgcttactaattgtttcactaataattcacttagtaattattttagatttgctccaaaataaaagtaagataagtatctttaaaagaataaagtgtatctatgtaaagtgctccattcacctggctcttgtcatcataacatagctgttattatggtatttgctgttgttgttgctagtatattattatatcttaaaattcaaaataaaatggtcaggcctgagacagaaatagtaaggctctaaaccagctttcactagcaaaataagcatttttgctttgctctttttgttaatcatctttgtttaaaccattctccccaacccttttctttgttttgtttttaaattgccttatgcggagcttgcagtgagctgagatcatgccactgcactccaccctgggtgacagagctggactccatctcaaaaaaaaaaaaaattgccttatgggtaataactgtgtttktagtggatcaatattaaaattccttaaaatattataatctagtaagctt

SEQ ID NO: 150542 - DNA, 367 bp, Homo sapiens
agtggcactgtgacaagcagagggacattgaacaaagccatgctaaggggagacatcacaagaccagctcggtgtgtaaatgcaagcaggactcagygagttttctatttgtgtccaggaggtgaggggaccaaatgcctcagaggctggcatttgagacccataacctctccggtggcagatgggacactgaggcttgagctgtgaccttcctgggttcccacagctgggcagagcaaagtgaggtagaagcccagggttcggcctggcccattcctctccgttttccaccatggggcctcccagggtttcctcttcaagcctcaaggcaggccagggctggaagtagcacagcgctgatgaaggg

SEQ ID NO: 150543 - DNA, 526 bp, Homo sapiens
cacgcaggctgggcttccttctccactcagcagtgtctttgcaattcttctaatggaagaaaagaaaggtgagaggagagaagaccagaggcagggagattcctgcgaggcagatgagaaacctggggcaggggtaatgctagcccaaggggcaggggagacaggagggcagagcccaaaggcytgaaggatgggtaagtgccagggagctatttagatgtggagaggaggacagggagaagcaagggtgccccgggactcatctgaacccctgtgcgtgtggtactgctgttcaccattcaggagccaacgtttagctcctagggtagggaacaattctgaattcatttttagatatagcaaatgtcagctggagttcttgatgacttcagaattattactttttgggtgcagaaaaaagtaacaaactataaaaacctatttttccctaagcctttaagattaattttgaattttattatcctaactgtaaatccaaattccctgaaacagcctcatttacaac

SEQ ID NO: 150544 - DNA, 526 bp, Homo sapiens
cacgcaggctgggcttccttctccactcagcagtgtctttgcaattcttctaatggaagaaaagaaaggtgagaggagagaagaccagaggcagggagattcctgcgaggcagatgagaaacctggggcaggggtaatgctagcccaaggggcaggggagacaggagggcagagcccaaaggcctgaaggatgggtaagtgccagggagctatttagatgtggagaggaggacagggagaagcaagggtgccccgggactcatctgaacccctgtgcgtgtggtactgctgttcaccattcaggagccaacgtttagctcctagggtagggaacaattctgaattcatttttagatatagcaartgtcagctggagttcttgatgacttcagaattattactttttgggtgcagaaaaaagtaacaaactataaaaacctatttttccctaagcctttaagattaattttgaattttattatcctaactgtaaatccaaattccctgaaacagcctcatttacaac

SEQ ID NO: 150545 - DNA, 427 bp, Homo sapiens
ttctattttcaattcaatactgcagaattatttcatgccttctcccatgcygtatcaaccttttcttttacgtgagcactctgtaactacagctaagtagctacatggaaactctggctcccagcatcaatacatttcctcatttgctcaatcctacaaaacacacagtgcagtttcaaaattgctatgcccttatcactatgaacaacaaacatgctaattagcaatcaatattcttaaaggtctttttacatgtagagggagggaatatagtctaagtactgttttcaaaagttacttgtgtttatccatttttacttctttgtgatgtgttgctaactggcaacacaatttgattcattgttttctatttgtgttcaattttaattttttcctcatttttgctgatttaattttctttataaat

SEQ ID NO: 150546 - DNA, 566 bp, Homo sapiens
catttgctcaatcctacaaaacacacagtgcagtttcaaaattgctatgcccttatcactatgaacaacaaacatgctaattagcaatcaatattcttaaaggtctttttacatgtagagggagggaatatagtctaagtactgttttcaaaagttacttgtgtttatccatttttacttctttgtgatgtgttgctaactggcaacacaatttgattcattgttttctatttgtgttcaattttaattttttcctcatttttgctgatttaattttctttataaatatgcaaatggtcatgtttccaagtcaaagctttgcaaacaagcacatgcaaagwaatgttacgtggttctccattccttttcccatatttaaaatcatcctctgttggtaacaaatttcgtagtttcttattgcctttctatgttttatttgcaaaaatgaggaatacatatgtataaacacatgcatatatagatacataacagcatgctaccttttttaagtttaacaatatattttggaaatcacaaatcattacataacaatttatacataccag

SEQ ID NO: 150547 - DNA, 521 bp, Homo sapiens
cactgtttttcatagctgttgtgctagtttacattttcataagctcaattataaatgaaacaggagatatcacaatcaaccacagaaacacaaaagatcttctgggcgaggtggctcacgtacgtctgtaatcccagcactttgggaggctgaggcggacggatcacaaggtcaggaratcaagaccatcctggctaacacagtgaaaccccgtctctactaaaaaaaaaaaaaaagtacaaaaacaattagccgagtttggtggcaggcgcctgtagtcccagctactccagaggctaaggcagtagaatttcttgaacccggagacggagcttgcagtgagccgagatcgcgccactgcactccagcctaggcgacaaggcgagactccgtctcaaaaaaaaaaaaaaagaaatacaaaagatcattcaaggctactatgaacatctttacacgcataaactagaaaacctagaggagatggataaattactggaaatataccactctcctagcttaag

SEQ ID NO: 150548 - DNA, 521 bp, Homo sapiens
cactgtttttcatagctgttgtgctagtttacattttcataagctcaattataaatgaaacaggagatatcacaatcaaccacagaaacacaaaagatcttctgggcgaggtggctcacgtacgtctgtaatcccagcactttgggaggctgaggcggacggatcacaaggtcaggaaatcaagaccatcctggctaacacagtgaaaccccgtctctactaaaaaaaaaaaaaaagtacaaaaacaattagccgagtttggtggcaggcgcctgtagtcccagctactccagaggctaaggcagtagaatttcttgaacccggagacggagcttgcagtgagccgagatsgcgccactgcactccagcctaggcgacaaggcgagactccgtctcaaaaaaaaaaaaaaagaaatacaaaagatcattcaaggctactatgaacatctttacacgcataaactagaaaacctagaggagatggataaattactggaaatataccactctcctagcttaag

SEQ ID NO: 150549 - DNA, 567 bp, Homo sapiens
gagaacaggacagaaggtttggggtgtacggtgagaaaagggaacttatttaatagtcaactaagaatggaaaagtatatgaattctagaaggtattaagggctcacttgaagttcatgattctaaaacatatatcattggactacccattacaactatgctgaatactagaatacctggctcagagtttatctgaaagtatattcactattctaagcaaatttagtcttctgagggtacaatttatctccatttcccccaagagttcttggaagaacctrtctcttccagtttcaaacactatagatctttctggcactccacctttatttctgtcagtataataacatttagtccatcacatatttgcaacacagaagtgactggccctgtggatactaaacagctgttgagcaaatacaggagtggatgtttccgtctactgaattaccaaccttctaaatgtttaaaaatgaactcatagaattcttatataatttgggaaatgagaaatataaaaaatctatttccttgttagtatactggttaacaagtggtggagccagc

SEQ ID NO: 150550 - DNA, 596 bp, Homo sapiens
attattctggcaagttgggaaccattgatataggatttgtgagactcaataataatagacttttgaggcacagcatttcctaaatttaattctttatttttttgtttacctccatagaactgccaaactaatttgaattcaatttgctttttccttaaaatgctgaactaatgacaacaacacttacctggtttcacaagctacaagmctagaaagaattcttaactatcccagaacttcactgtctataaccagttaagaacaaataactaataaacctactttctccacatctttcaaatctatttcttaacatcttcactggcagtaagtttttacaacttttgttacctctcagtttcctgttttgtctcttttgctccaatctacttcccacatgtaaaacaaataattcttctaaaatataaatggcttcacattgtcttttttagctttgcccattaaacagttctggggacaatgacagctcagtacaacaaaaactgcaagggcccaaatctatattttaaaataatattttcaaccaataggccaagcctccttgattccaacatagctgattctagtgttgtgat

SEQ ID NO: 150551 - DNA, 562 bp, Homo sapiens
aagtaaacttatctgtggagtgcagcttggaatcttaatgtaggatgtctgtctgtctggcagatttcagagagttaattgcagtacaaccagaatattgataccttattttcccataattttttagattgatagcagaacaactaacaggatgctaaaacataaataaatgtctacactatgtcaaatgactcatttaatagtgttatcatgcagagatttactatgagtttatggttatttgtatttcttcatcagtagttgacaatttttgctctattctgacataataaaatttcctttgtcaaatcttattactgagacatggacatcgaccacaaggccagcctttactagyctattttatttcccttcttaaatcttcgggttagtaaaacttctaaggagaagtttggcatgaaaattgcaagtagcactgaatgtaaagtgttatatgggatgatgaagagagaatataaaatgaatctgatgggacagctcagaaatctgagatataaagcaagcatgcattcttcttttcagattttattgatattctgga

SEQ ID NO: 150552 - DNA, 581 bp, Homo sapiens
ctctctttctaataatgattctaatcaccattctactctttgcttctgtgaagtcaactttktaaaaattccacctataagtgagatcatgctgtatttgtctttctgggcctggcttattttacttaacagtgttctctaggttcatccctgttgtcacaatatatacaacaaattttgactgccattgttaattaacaaaattcatggaatgtaatcaaactggacttcatttttttccccacacattctttaaatattctcacgaaaagtagtctgtctcttgccaatcttgcagtcccttgacattggcaatcactctcatgaaaaaaaaaataaaacttttaaaaactctcatgttgagttgcaaacagtctgaattcagcaaggaattagcactttgaacatgacttacacttttgtctcacaacgatgaggtttgatgtgtgtgaagcaatttctgactttctgtttctgtacatatttctacctgcagtactagataccattttttacattcctggtaaaagcaggggaagagcatggtagttaagaacagtagaaagttctttactgacttc

SEQ ID NO: 150553 - DNA, 598 bp, Homo sapiens
caggtcttaagttttaattattgaaatttcactttttaatttcttatataatgaatgtttacatcattcatacttatatatgtggaaagaaatcttggttaaaatcctcctttttaagatagtttttttcatgcaatttctttgtgaaaaactaatttatgaaatcaaaatggccataaacttacatcactgaaaaattcaaataacttttctgaaggagatgataattataggtctatgtgtggatttctaatttagccttgactaataatatctaaatgataawaagctttatttgaggaatgaaaatcagcaatagacattccacttttgttctaatttaagcctctcacatgctaaagagttttaattataacgcttagatagtgcaacttccatatcatgtgaatttcctaataatttagcttgaagttacttttaaattatttttctataacataacatatttatttatatacttattaaaacctgtggctgaatcaaatattgtaagaaagagaaaccattctagatgtttatgaagacaattataacttcatcattgctttaagttgcctggcattgagatagctgagcc

SEQ ID NO: 150554 - DNA, 598 bp, Homo sapiens
caggtcttaagttttaattattgaaatttcactttttaatttcttatataatgaatgtttacatcattcatacttatatatgtggaaagaaatcttggttaaaatcctcctttttaagatagtttttttcatgcaatttctttgtgaaaaactaatttatgaaatcaaaatggccataaacttacatcactgaaaaattcaaataacttttctgaaggagatgataattataggtctatgtgtggatttctaatttagccttgactaataatatctaaatgataaaaagctttatttgaggaatgaaaatcagcaatagacattccacttttgttctaatttaagcctctcacatgctaaagagttttaattataaygcttagatagtgcaacttccatatcatgtgaatttcctaataatttagcttgaagttacttttaaattatttttctataacataacatatttatttatatacttattaaaacctgtggctgaatcaaatattgtaagaaagagaaaccattctagatgtttatgaagacaattataacttcatcattgctttaagttgcctggcattgagatagctgagcc

SEQ ID NO: 150555 - DNA, 479 bp, Homo sapiens
gaattcactaacttaacatgcttatgactcaacagcagctagctttataagtggtggaatagcctgctaaaagtatagtactgtacttactaggagacaaatctctttagggtcatggcattctccattcataaaccataattgatttattctaccctaaaccagaagccaattatgttaccacttttcctatagctagaatacattcaggaactaaaaagctgggrgtggaaaacttctctccaagcgattacacaaaataaatcactgaagaaatttctacttaccatctctctggcctgggttttaatgactttcaaagttctaatgtccaaagtagaaatgttacaattaataaagatcatggttgcattttttaaaaacaagaaactgatattgctctctgtgattctcatgccatgcatagaagaggggaactttcatggcaagatgattattcttggtcatcaaggagaaag

SEQ ID NO: 150556 - DNA, 479 bp, Homo sapiens
gaattcactaacttaacatgcttatgactcaacagcagctagctttataagtggtggaatagcctgctaaaagtatagtactgtacttactaggagacaaatctctttagggtcatggcattctccattcataaaccataattgatttattctaccctaaaccagaagccaattatgttaccacttttcctatagctagaatacattcaggaactaaaaagctgggagtggaaaacttctctccaagcgattacacaaaataaatmactgaagaaatttctacttaccatctctctggcctgggttttaatgactttcaaagttctaatgtccaaagtagaaatgttacaattaataaagatcatggttgcattttttaaaaacaagaaactgatattgctctctgtgattctcatgccatgcatagaagaggggaactttcatggcaagatgattattcttggtcatcaaggagaaag

SEQ ID NO: 150557 - DNA, 532 bp, Homo sapiens
tatttctcccaaggaaaatgaatagtgagtgtttcatgatgtttatgcagaactctttcatttccaagttaattttgcctaattaattcagaaataaatgattatattaagaatacagacaacctggaaaatcaatggcaatgtttaaataataacctacaaagattatgcaggaagtaaaagatgttttgggggtttttagatcattagtgtatttctactctaaatttttttctgattttatatataattaatattaatgagataaacatactagagtcattttgaaaggtagatcctttaaaatttttaamaattaattgtcattattaataaataagatagattcttctgggttaaaataatgctttaggttcaagttctaatatctcaatacactcagcgttttgttaaaatgtccatacaaaagtatatgtaatatgtatacatccttggcagaagaaactaaggataagaattgcccacatatccaaaaacaatttctgccaaataaaactgacagaattcaatg

SEQ ID NO: 150558 - DNA, 527 bp, Homo sapiens
tagcattcatgctcctaggtaattactcaactgatttaaaaacttatctccaaacaaaactttgcttgcaaatgtttataacatatagtttagccataatttccacaaaccagaagtaacctagatgttctttataggtgaattcataaactatggcatatccatccatgtgacagaggaggcagttagaggccagttatgtagatagagagggagggtcttgggagtggaaaaacactttgggaccacacctgcattgcccatgtagataatgggaagaaatttgattaagaacttcctcttatgccaggatgtttgctcacaagggactgtcccaacttaggtgcaggtgaaataaatcaacctaaatatctttaactggacccagctcaytataatatcattaacatgacatcagcatgtggctttagcccccctgtaggtttcacttctgcactcatgggtaataaccaagatgtagacactatggccagccccaggcatgcacagatgcaacacccctagga

SEQ ID NO: 150559 - DNA, 589 bp, Homo sapiens
catatatataaagcaaatattattagagctaatgagagatataggccccaaaacaataatagctggagaattcagcattccattttcagcattggaaagatcttccataaataatatcaacaaaaaattattggacttaatctgcattatagaccaattatatgccagtaaattgaaaaatctagaagacatagacaaattcctggagatgcacaacctaccaggtttgaacccatgaagaaatgcaaaacctgaacaaactaataacaagtagtaaaactgaagctagaataaaaactcttcaaggaaagaaaaatccaggactcgatagctgcacagctgaattctaccaaatatgtraagaacaaataccaatcctactcaaactattctgaaaaatagaggagaagcgaatacttccaaactcaaatctatgagaccagtattaccctgataccaaaaccaaagacatatcaaaaaaacaaaaaaaactaaaggccaatatctatgatgaatattgattcaaaaatcctcaagaaaatactagccaaccaaattcaacaataaatttaaaaggttatttattatg

SEQ ID NO: 150560 - DNA, 552 bp, Homo sapiens
ggagggttgaggatggttaataggtacaataaaaatcatagttataaagagtgaataagacttactatatgatagcacaacagggtgactatagttaacaatttaattgtacattttaaaataactaaaacagtataactggattgtttataacacaaaggataaatgagggaatggataacccatttattgtgatgtgattattatgtattgcatgcctgtataaaaacatctcatgtgtcctataaatatatacacctagtaagcacccacaacaattaaaaattaaaaaaataaaaatgtaaataataataatatraggtgcatgaagggcaatgactttcattttcttttttatcaaactagctccagaactcagaacagtgcccaaaagacagtacatgctaaaactatgtgtgcaagaaatgagggaattaataagtggagtgtaactaatggcaatttaataaggattattcaaatttgatattaaaaataaagttaaagttagtaagataactaagtctactagcaaaacgggcttgtacacaa

SEQ ID NO: 150561 - DNA, 489 bp, Homo sapiens
gtatttatgagaacagaatgtgatgttgcaagtcaacatgtattttattgtgcagttataatagaagttaacttatattttgctaagaaaaagcagtttactactatcctctcaaaacaaaattagatagatttcttattttaaaatgccaatgatgaagagtatcagtttttgtattcaattcttccttctattttgatatttagaattgatttgattttgctaacttaaccagtaaaggttatatcttgcaataaatctttcaaagttctactagagctaaattggttaagaaaaaataaaacattctgcctctaacacagcctaatttgacttgttggatatttgtgacagcaaagttcaaaatcttgccaagattaagaccttggaaaaaccaaagagttccaaagatacactgatcttccaggccttcggaataacttactgttacttatactycattcaaagaatgactatgaaaaatggccc

SEQ ID NO: 150562 - DNA, 552 bp, Homo sapiens
acatttgataaactgaagatcattctgactgcatcatggcaaacaaaaatgaaagaacagtacaaaaggagaatgtttcaatctattatcagtattttatgttattccaactcagcaatacctctaagtccagacaatcaatttctgccagttgttcactttgcatcagtagcttgacttaatttcttgcacataatggtcaaattatattctatacatgttgtattcctgtgacagcccaatattagtccccagtatcttccataacttttggatcaagaaagaaaacaaaggcctatccagagtttcttctccccttcttcactccaatgccagtgcacattctcaatgtaggatgttttggycctacgttgtgctagtaaagaccattttgccagacaaaattttcttcttacatgtaataaatatttctcttctggtgtctccaaaaagtaaatggcaaagacggtaaactttccactcgaataaaataatgcaaacttttgcttatacttgaggcaggtgttcagcctaagctttgctttcatgtaa

SEQ ID NO: 150563 - DNA, 552 bp, Homo sapiens
acatttgataaactgaagatcattctgactgcatcatggcaaacaaaaatgaaagaacagtacaaaaggagaatgtttcaatctattatcagtattttatgttattccaactcagcaatacctctaagtccagacaatcaatttctgccagttgttcactttgcatcagtagcttgacttaatttcttgcacataatggtcaaattatattctatacatgttgtattcctgtgacagcccaatattagtccccagtatcttccataacttttggatcaagaaagaaaacaaaggcctatccagagtttcttctccccttcttcactccaatgccagtgcacattctcaatgtaggatgttttggccctacgttgtgctagtaaagaccattttgccagacaaaattttcttcttacatgtaataaatatttctcttctggtgtctccaaaaagtaaatggcaaagacggtaaactttccactcsaataaaataatgcaaacttttgcttatacttgaggcaggtgttcagcctaagctttgctttcatgtaa

SEQ ID NO: 150564 - DNA, 601 bp, Homo sapiens
aagcagcatgctcccccttttgttacctcttgaagtgcctccaattcatcatgtatattctgggccaagtctgtgtattaaaaaaaaaagataggaggtggtaccaggaagaacaaatcacagtctgtaatttattggttgtgtgacattaaatatgtcccttcaccattttgaaccatggttttcttacctataaagtaaaaataagatctacctcttggggtttatgtgacaattacataaagtgtgtgtgtccgtgcatttctgagcagaatgactgacagtgctacagtaccttagtggtaccaagaagagtgcttattgttttttgttttgttgttgttgttgtttttcatgtatcacaagtgcttttttcatgattttttttcaaaatacctcatmtaaaggtatagaattagggatttttcaggtaaagtaagaaatgcaacagccattatgggaaaaaatccatatacccacttttgatttttagcccaggcacatcagaactgactacatttctaattaaacttcaagaaataatgttcacattaaataagtctgtaaaaccaaagcactggaagataatgtaaaatattat

SEQ ID NO: 150565 - DNA, 403 bp, Homo sapiens
aagttttcagtttttttaattatgaactgttctgtagtgaacatattgtccatgtcttcyttcacatattagtaagagttgcgattaaaaatagtactagatttaagttacattttctatctgtctattgtttcatagtatccagagaatatccagaaagtaggtacaacttggctttccttcgtattttgccattgtttgccaaaagtggttgtaccagctttatttctccctagatatatctaagattttcatttttcacattcacataaacacatagtgttaccaatcttattgatatttttcaatctgttttgtgtaaaatcatatctcagtgtgactgtaatgtacatttctattgttacaggttgaatattcttttatttgcctgttgaccaattga

SEQ ID NO: 150566 - DNA, 611 bp, Homo sapiens
ataactccattattttggttctgaataaaaagggtgcatttccactaaagaaattcagaattgagagagctgacatctgttacacgtctatcatctacatggcattaaagaaaacattttgcattcattgttttacttaatacctacagcagctctttgaggcacacaatttccctgtcacagataaagaaacaggcttttagagtttggataattgggccattttttaataagaaatacatctggagtagcaggattgaagctcatatyggtctatctctaaagcccatattttactctaatatcatgctacaagatagcttttactactaaaacttaatgtaaaaaaataggaaagataatagccaagtttgagaaagaatattggcaaaggttattaaaaattttgaagatataaagttttcaatatataatctcatattaaataagtgggagttaatatacatacatatatgataaagtgacaatttggtgggctgaaattaatggtcctccttcctatcataacatagaggctgtaccaattaacattcccaccagcagtgtataagcattcccttttcactgcatccacaccatctattgtattt

SEQ ID NO: 150567 - DNA, 611 bp, Homo sapiens
ataactccattattttggttctgaataaaaagggtgcatttccactaaagaaattcagaattgagagagctgacatctgttacacgtctatcatctacatggcattaaagaaaacattttgcattcattgttttacttaatacctacagcagctctttgaggcacacaatttccctgtcacagataaagaaacaggcttttagagtttggataattgggccattttttaataagaaatacatctggagtagcaggattgaagctcatatcggtctatctctraagcccatattttactctaatatcatgctacaagatagcttttactactaaaacttaatgtaaaaaaataggaaagataatagccaagtttgagaaagaatattggcaaaggttattaaaaattttgaagatataaagttttcaatatataatctcatattaaataagtgggagttaatatacatacatatatgataaagtgacaatttggtgggctgaaattaatggtcctccttcctatcataacatagaggctgtaccaattaacattcccaccagcagtgtataagcattcccttttcactgcatccacaccatctattgtattt

SEQ ID NO: 150568 - DNA, 580 bp, Homo sapiens
gtttggccatgtaacataatcccatgtttcttggaggctttgttcatttattctaattaattcttttttatttttatttgagtaggttaattcaaaagccttgtctttgagctgagatattctttcttctactttgtctagtgtgttgctcaaactttccatgcattttgtaactttytaaatgtgccttccactgtcaagagttaggattagttttcctttaatatatttatctctttagaaaattttttattcatatcctaaattgtttttaaactttgtaaatgttggttttgatatttctcttgcatctctttgaataacttaataatcaactttttaaattctttatgtggtattacaaagactccattttgatttggatccattgctcgtgagctggtgtgatttttggggggtgttacaaaaccttgttttattatatttttcaaattaattttctggtttattctcatttggataggctattttaattatttttgaatttatttgtgattcaactgtgtttctttatttccattttttttcccttgaggatataactttaatgtttactgtt

SEQ ID NO: 150569 - DNA, 583 bp, Homo sapiens
atggtttaacatatgcagagcaataaacatgatgcagcatatcaatagaatgaaggaaaaacatatgatcatttcaatagacgcagaaaaagcatttgacaaaattcaacatccttttataaatacaatttttggttaagagtatataaaagaaacatacctcaacacaataaaaaccatagatgacaaacccacagctaacatcatactggatagcgaaaagctaaaatcttttactaagaactagaagaacacaagtatgcctaatctaatgtttcttatgcaacataatactggatgttgtagccagagcaattaggcaagaaaaagaaataaatggcttcaaatagaaaaggagaaagtgaaattttctccgtttgcagatgacatgatttttatattaacaaaacctagactccctcaaaaatactcacrgaaatggaacatttactaaagttacaaaatacaaaatcacattcaaaactcagtcacaataataatgagctagctgaaaaagaaatcagaaaagcaattccatctccactgactacaaaaaaaaatctaagaataaatttaacaaaga

SEQ ID NO: 150570 - DNA, 556 bp, Homo sapiens
acattgaagaaaaaagtttaaaggcatatatcagatgatgcaaactttaaaccaacaatagtaaaaagggacagagaaaggtattacataataataaaatattcaattaaacaggaagacttaactatcttaaatatatacttaamaaaaactggagcacctagattcataaaacaagtacttctagacccccaaaaaacttagaaagccacacaataatagtgagagatttcaacacactgatagtgttaaacataatattgaggaggaaaactaacaaagaaattctagacttaaactcgacacatggccaattgcacctaataagcatctacagaatacttaacccgtcaaatgcagaatatacatcttctcgtctgcacatggaacatactccaaggtcgaccacatggaccataaagtgagtctcaataaattcaaaaaaattgaaattataccattttactcaaagaccataatggaatttaactagaaatcaatgccaagaagatctctcaaaatcacacaattacatggaaattaaacaacttgctcc

SEQ ID NO: 150571 - DNA, 572 bp, Homo sapiens
aaactctaacattctataaactctttgagagattaactataatcctgtcacaaaactttgtgaagcaacacttatgtatgcagaagcacaaaataatgctcagagattatctaacatttgtgaaaaaacaaagaaatccctaaaatagaagaatgtatttggagactcataaaagtaaaaccctaaagtctcagtgaaactcaaaatcttatctggatgtctagtcatattcaacgtttcttcctgtattatttctgcagttgctaaaaaaaggtttattgctatggatgtacttaacatattttagaaatttgtatccctaaaggttatactagccatacamaccacaatttctagaacttaaataatatagtccacagataaaagtaaaccactgtctcctagttaattatgttttggtgtgagacatcctaatgccagatcagtttaaattatctttttaaatgagggagagagagattacttcagggagagatgacaagtaattgtttatctgaagcacatatggccagacaccaaagagactaagtcaactagcatagttaattaat

SEQ ID NO: 150572 - DNA, 572 bp, Homo sapiens
aaactctaacattctataaactctttgagagattaactataatcctgtcacaaaactttgtgaagcaacacttatgtatgcagaagcacaaaataatgctcagagattatctaacatttgtgaaaaaacaaagaaatccctaaaatagaagaatgtatttggagactcataaaagtaaaaccctaaagtctcagtgaaactcaaaatcttatctggatgtctagtcatattcaacgtttcttcctgtattatttctgcagttgctaaaaaaaggtttattgctatggatgtacttaacatattttagaaatttgtatccctaaaggttatactagccatacacaccacaatttytagaacttaaataatatagtccacagataaaagtaaaccactgtctcctagttaattatgttttggtgtgagacatcctaatgccagatcagtttaaattatctttttaaatgagggagagagagattacttcagggagagatgacaagtaattgtttatctgaagcacatatggccagacaccaaagagactaagtcaactagcatagttaattaat

SEQ ID NO: 150573 - DNA, 515 bp, Homo sapiens
caaaacctgagctctgggtcattccagcttttggatattgtaaaagtagcaatgaactggcaaagtaaactaagaagcagcaacacaggaggtaagattaatgaaacaggtgtctgtgctgccaagcctggtgaaggatctcagagagcaaaagtgaacaagtgcatrgaatgttcacgagaagtcaacgtggggactgagaagtaactattggctttagcagtgtgtaggtcaatgggaccttggcaacggtaattccagtgaaatgttagggaaaaaaaatctgatgggagtgggtgtgagcagctctttgctaattttaaaaccatggacacattttttaacctctgtaaatgtcagcttcctcctccataatatgagataattattcatatgttaaaacaatttctgtgaagattaaatgatatagtgcttacaaagtatgtcttaaaacttctggcgcatactgctaaaaacatgtcagctattttcctttcctttctgtcctcctacta

SEQ ID NO: 150574 - DNA, 409 bp, Homo sapiens
attgttattcccaactgctccccatctgcattttgtagaaacaaaagttgagaattaaaaggtgaagtgatttttttttaatcctgcaatcaccaaatattggagtcagtattcagttatatggtatcttaatgtcacagacttcacatatgagaagaaaagcattctgggtgtttgtgtgttgttagatgaaatmaacatgcatgttgatctgacagcatcaggtgactttattccatgctggcaggggactgctaaacattagacagctgtaagttgattttcatgatttttctatggctctgacttgtgttcttgtgatttttattgaaatgtatatgtgtgtgtgtgtgtgtatatatatatacacatacatatatatgtgtgtgtgtgggctagcaaggaattc

SEQ ID NO: 150575 - DNA, 407 bp, Homo sapiens
tgttattcccaactgctccccatctgcattttgtagaaacaaaagttgagaattaaaaggtgaagtgatttttttttaatcctgcaatcaccaaatattggagtcagtattcagttatatggtatcttaatgtcacagacttcacatatgagaagaaaagcattctgggtgtttgtgtgttgttagatgaaataaacatgcatgttgatctgacagcatcaggtgactttattccatgctggcaggggactgctaaacattagacagctgtaagttgatyttcatgatttttctatggctctgacttgtgttcttgtgatttttattgaaatgtatatgtgtgtgtgtgtgtgtatatatatatacacatacatatatatgtgtgtgtgtgggctagcaaggaattc

SEQ ID NO: 150576 - DNA, 409 bp, Homo sapiens
attgttattcccaactgctccccatctgcattttgtagaaacaaaagttgagaattaaaaggtgaagtgatttttttttaatcctgcaatcaccaaatattggagtcagtattcagttatatggtatcttaatgtcacagacttcacatatgagaagaaaagcattctgggtgtttgtgtgttgttagatgaaataaacatgcatgttgatctgacagcatcaggtgactttattccatgctggcaggggactgctaaacattagacagctgtaagttgattttcatgatttttctatggctctgacttgtgttcttgtgatttttattgaaatgtatatgtgtgtgtgtgtgtgtatatatatatacacatacatatatatrtgtgtgtgtgggctagcaaggaattc

SEQ ID NO: 150577 - DNA, 454 bp, Homo sapiens
ggttataccaattatgctaatttgataattatacattgtatacacgtattgaaataccactctctatcccataaacatgtgtaaatactactgtcaaccaaaaataaaagggcaagggaggtgaggaagaaagcatgaatcctccacagattatgttttkatgacgtatgagtgaccaccataggcacattcctaattatagtgagaagatatttcaatagtaactatttctagatgaaaatcatctttagcaaatatctttcattttggttattggttctatccagtgtcaaccgttcttatgtctattatccactaattcatacagaagctaatttggttagtgctgtgactggctctgaggtgagggattccacagaggtggcttcactttgcaagtaaaatctagaaggaaaatgcctttgccttggcactgctaaccttgtacttaacc

SEQ ID NO: 150578 - DNA, 454 bp, Homo sapiens
ggttataccaattatgctaatttgataattatacattgtatacacgtattgaaataccactctctatcccataaacatgtgtaaatactactgtcaaccaaaaataaaagggcaagggaggtgaggaagaaagcatgaatcctccacagattatgtttttatgacgtatgagtgaccaccataggcacattcctaattatagtgagaagatatttcaatagtaactatttctagatgaaaatcatctttagcaaatatctttcattttggttatyggttctatccagtgtcaaccgttcttatgtctattatccactaattcatacagaagctaatttggttagtgctgtgactggctctgaggtgagggattccacagaggtggcttcactttgcaagtaaaatctagaaggaaaatgcctttgccttggcactgctaaccttgtacttaacc

SEQ ID NO: 150579 - DNA, 590 bp, Homo sapiens
ttccagtatgaaagattcatatttatcactgcctactcctctaaaccaataatcgcatgtccacaggcatattgtttaataatgagtaggcattaaatcaatatttacagtccactgttattttcagttcagctcttgtaaagagcaggccacatttctctggatcattttctcctgctgatacttgtggcttttctgagacatgcaataaatgggtgcatgattcctggtgaagaatcacaatatgtgtttctgaagaggcaataagagtttgagttttgcaatctcttttgtcaatacctttgtacgtctgtggcttaatggaggtcatctgccatygcatatgccttatctccacttacttaactccacttcctctttcaccttgtatgtgtaaattttaaatgtatattttcaatgtgtatgatatgttttcatgcagatcttttctccaaggattgcttccggcaggtttgttttcatctttatgtgtatagaattcttcaaaaattgtagtctctgcttatttattaagtcatttttctttattctttctacccatgataaaaattaaaagaaacaaaaacata

SEQ ID NO: 150580 - DNA, 493 bp, Homo sapiens
tttatcctgtgcgctcttcctcctggcaccttatgaagaagttgcttgctcctccttcaccttttgcgatgattgtaagtttccttctctccagccatgtagttctgtgagtcaattaaaccacctttgttataaattatccagtcccaggtagtatctttakagcagtgtaaaaatgaactaatacagagaattggtacctggagtaaggtactgctatgaagacaaaccaaaaatatggaatcaattttggaactgtgtaacaggcagaggttggaacagtttggagggcttgtaagagcatagaaagatgtgggaaagtttggaacttcctagagttttgctaaatggttttcaacaaaatgctgatggtgatatggacaatgaagtctaggctgaggtggcctcagatggaaatgagggaccttattgggcactggagcgaaggtcactcttgctatgctttggcaaagagactgatggcattttgcca

SEQ ID NO: 150581 - DNA, 499 bp, Homo sapiens
ggttttaaaagtggcaatttatcctgtgcgctcttcctcctggcaccttatgaagaagttgcttgctcctccttcaccttttgcgatgattgtaagtttccttctctccagccatgtagttctgtgagtcaattaaaccacctttgttataaattatccagtcccaggtagtatctttagagcagtgtaaaaatgaactaatacagagaattggtacctggagtaaggtactgctatgaagacaaaccaaaaatatggaatcaattttggaactgtgtaacaggcagaggttggaacagtttggagggcttgtaagagcatagaaagatgtrggaaagtttggaacttcctagagttttgctaaatggttttcaacaaaatgctgatggtgatatggacaatgaagtctaggctgaggtggcctcagatggaaatgagggaccttattgggcactggagcgaaggtcactcttgctatgctttggcaaagagactgatg

SEQ ID NO: 150582 - DNA, 547 bp, Homo sapiens
tcaagcttgccctttggggctgttctttgtgacctgagaataactactgttctgtgttcctggagctatttccccccttaagagaactatgactcaaaggcttctgtaatctttctgtaccagaaacaaaggttttatctcagaaaggttaagatggcaggtagttagtactgtatttgcttaacctactcaactccagaaatgccacggaagatgtgtgagcctttaagtaaacctgagctttttycagtgtatgtgagatgcctcaaatgtaacatttcattaggttaaaaaaacagtgaatggttttgatttccctggagctataaatggaaatagtcaatctgggtcattatacttagtctttgaaagcaaatattttctcactatgtctactcttccctccatatgatctatacccacagaactattttaggagttacaggtaaactaaaatttttcttgaattaggtacaactgaacttgaatgttcatgagataaagtaactaaaatcatctgataatgatattcagagtccacagagct

SEQ ID NO: 150583 - DNA, 486 bp, Homo sapiens
aaaattctcctttgacattagcttgagcttaatgcatagagtctttagggagtcattctgattcctctgtgtaatgggacataaagttattactaactctgtattaataccccaaatataaatacactgggatatgatttagatgttttgtcccttccaaatctcatgttgaaatgtgaccgccaatgttggaggtgggcctactgggaagtgtttgggtcatgagtagggaccctcatgaatgtcctgtcctcatggtaatgagtgagctctcactctatgagttcacacaagctcacacaagctctggttcttcaaaagagcctggtacttcctccctcattctcttgcgccctctcaccatgtgacgcgcctgctcccccttcatcttccatygtgattataagcttctgaggccctaatcaaaagtagatgccagccagcactatgcttcttatacagaccacagaaccttgagccaaataa

SEQ ID NO: 150584 - DNA, 528 bp, Homo sapiens
tcccaccattctttcttagcagtcactgactgggagattactgaacctgagggattagcaacttgttagatatgcactgtgcttttaggcacgtcctaccagaaaataaagcagatgaattcactcaggaggagtaacagctttaagaaatcactggttctgtggctaacagaacagaaagcctgactgatcacagccatctaatgtgcaggaagctaaatagtacractaccaatcactcccagatggctcctgaatccatgcagtcattcttttgtgtgtggtgcacttcataatgaagaagacttcactctggagggtttttttcacacaaagcttttcaatctgtaaccaactctgtttttgtctcttcatcccaatcccctcctccaccttatggagaatttaaaaagcaagtactaacccctaacacctatgtccagggcaatctttcctagacatacaccatttgtctcactcttcatcttatcaaacagcaccctgtccatattctggggtccctgtccc

SEQ ID NO: 150585 - DNA, 481 bp, Homo sapiens
gcctgagggacagtaacatttaaatctcaggcagaaattattttaaaatatacaataaagtattgttcactatagtcacctcgttgtgctgatgtgattattacacattgtatgtctgtattaaaacatcatatgtaccccataaatatgtacaccaattatgtactcataataattaaaaataaaagttaaatacaaaaggaaatggggacaataaacaaaacagtggccattatattaaaaaaaaaaaaaacttaggcagaaggatttgcytgctgtccccagcaaatttttctaatggtaagttaatatgtctcactggctatccttaaaaacttaaaattgaagggatatttctgtgttattaataaatatttatttaaaatcttccttttctcagataatttcctaggtgctggagacacagacctaaggaatagtctctatcctggaagagcttagggacccaacctgccatgtg

SEQ ID NO: 150586 - DNA, 452 bp, Homo sapiens
acctctttcctttataaattacccagtcttgggcagttctttatagcagcatgagagcagactaatacaggtatggaaattagcattttagaataatatctaggtatatttagtgaaagttgaatacttttcattatgtcttgctgtaaagaggtaaattacagttattagtgtcagcaccatgccacatctttataatctacttccattctaatgccaaatgtaaggaagacagctcaagaatccatggacccacaagccacattcagcttcaaacacgtcagaccatagggactcattcagaaatcataagcaatgctgagtcaagaaatgaaagtaaagaactactttatatgacatttaaccagaacaarggaaaagtcttgaagctacccacataaaatatctgagacagaatttcaacctatggtggacttctgaagacttttgta

SEQ ID NO: 150587 - DNA, 580 bp, Homo sapiens
ttaatgatgtggaagaaaatagaactactgctatacaaacaaaaatatgttcacttaataagtgaacaaccagataagcactattttctctttttaaatgaatattttggagttaagtaaataaagacacaattatccaattaattttttcctttttaatgtgtcatgttgaaatagaatcttataaccaggttactagaaaaaccaaaagataagtaacaatggcatgaatgctgtgatgatacacactcctttcatcttcccactgacactaccagatcaaccacagactgtagactttgtcttaggactggctcaatttccatgaagtcctctagagctgagatggctgaaacagacgtgtatcccctgcagagacaaaatggagctataggggaaacactgggactagaagtggcttctgcctcmgaatacaataaatgtctcacagtataaaatgaaggtcttccaaagtttctcactcattaccatattccccatagccccaaattatcattttatgaaactgactcctattgttgagcaattaatggaatactttctcttatatataaaatat

SEQ ID NO: 150588 - DNA, 506 bp, Homo sapiens
ggagtaactgccctcacgattcaattacctcccactgggtccctcccatgacacatggggactatgggaactataattcaagatgagatttggatggggacacagccaaaccatatatcagagtccacttctttcccctgctacctaccacagggcaggtgctggtattcaaggctgaaagatctaaagatggatcacatcacaggastccttgcagacactcccaagtaccagcctggagtgtagtagctcccctggggggtagaaccagaagagaaagtacaatcactgaagctctactctcaggaagccacatcaagacagtaccatgtgggacaaaagaatctgaacagcagcccttgaacctcagatcttccctctgacatagtctacccaaatgacaaggaaccagaaaaacaattctggtaatatgacaaaacaaggttatttaacacccataaaagatcacactagctcatgagcaatagatccaaaccaagaaaaaa

SEQ ID NO: 150589 - DNA, 451 bp, Homo sapiens
taagcacctatgttgggagtaattggatgtagtcagtgctatccttagtgaaatactctaattttctttttttttgcataaatcagaaagtatggacaaaaataatctacaaaaaggagacaaactaaagtgagttagcaatcccaagtccaactggcaagaaaatgttacttaaaaaaaatgagaaaaccaagtattatacatgaagatgtactgggacccacatgaactaatagggacagtaggcagagaaattctaggcagaaaagggcagggtgcccggtgagggcccccrccctcaagcctggaactgtagcccaaagtgaaaactttacatccctcttttcccactcgaatgttgccttttccaaaattaccttggcccactccatcctccatcctgtacccatagaaaccccaggctccactggcagagagcagagaagaagag

SEQ ID NO: 150590 - DNA, 451 bp, Homo sapiens
taagcacctatgttgggagtaattggatgtagtcagtgctatccttagtgaaatactctaattttctttttttttgcataaatcagaaagtatggacaaaaataatctacaaaaaggagacaaactaaagtgagttagcaatcccaagtccaactggcaagaaaatgttacttaaaaaaaatgagaaaaccaagtattatacatgaagatgtactgggacccacatgaactaatagggacagtaggcagagaaattctaggcagaaaagggcagggtgcccggtgagggcccccgccctcaagcctggaactgtagcccaaagtgaaaactttacatccctsttttcccactcgaatgttgccttttccaaaattaccttggcccactccatcctccatcctgtacccatagaaaccccaggctccactggcagagagcagagaagaagag

SEQ ID NO: 150591 - DNA, 400 bp, Homo sapiens
tcctgcgttatattcagccaattcctagatttagaaaagcttacagatacagatcaaagaaatgggttggaaatcaacagaaagcaagtcaatgaaaaggcttattttggrtctatggagaaaatgaagggaatgccaaatgggtaaggtactgagtgtacaaacagtctatttgcctggaaattgaagcagatagcacttcaaagtttgggtcagtgatataggtagtcgtgtgtggcaaataaacagctttttagtctcaatggtataattgctttatacgatctgtgagttttatacttttaatgtgcgtttaggacaggaagtatcatcctttcatttccatgtttagaactcctttgagcatttcttgtagaaccaggccaggggagatgaattc

SEQ ID NO: 150592 - DNA, 597 bp, Homo sapiens
ggtacttaaaagtttgaagcactatataatacttcatgaaataatcactctttaggaaataaacaatgatgacacaataacacaatgattttggaataattaaagaaaaatttcaattcattttaaaattcttactgcagaaaaactctcattacctactcagaactttttagaaactgatttgtggctttttttttyctcaattttttgagtcctcttgggattttgatgctatttttgagggaaaatggtctcaattttactcagctgggcatgtttctaacatgtgtttcactgattgtagaattatttattagccttcttaagataacataagtttaaaaatgctgtaagcctccatttttttttcctttaatgaactcaggtctacgaaaactgtctggttagtttaagagaaccttaaatttggtggagggatgaacagtggaatgattggaagtaataaagagtttctaaaagtggaaacaggaaacaaatcaatgatgaaatataattttgctttcatgaaggcctaaagaataatgggctttataaggaatgataaaattaaattttagaagcaaggaatgcagaggt

SEQ ID NO: 150593 - DNA, 632 bp, Homo sapiens
gcaaaatatgtcttctctgaccactgactttggttcaaggacattctattgatgtgagcaagtctttcttagagatgtgctacagtctgagactgttcctaatcttacctctttgctactgtttttccagaagtcagacctgtcttattccttctctggctctgcaatccccattttattttacatgtgtttcctcaataaatctcttgcatagataaactcttmtgagcatcttttgttagaggatctgaactaagacaattgatactgaaagaggtccaaaaataggtggcaagatgggaattggagacaggatcaatcacctgcccacaggtaaaatggatgtcatcctaagtggtaggtgaggcatagacagtctctggcacaagatggtaccctaattgctattgatttcaccacttgagacatgaaaatatgttccaatggaataaaataccctttcaaatgcaataattcaggcatttgaaagataagagtttacgaggcagcatcaaaaagacaaggacttctatattatgttggtgccttgcagagaaataatgagaaactgatggatgtaaacaagcatttaacagcaaaatgtgagcaccagagggtctttttgctggctt

SEQ ID NO: 150594 - DNA, 321 bp, Homo sapiens
cacctgggaaattcattgcaaaaagatcattgcctgggcacatactcatcaggttatctaaagttaagaaaaatgaaagaatctaaagagttgcaaggaaaaagccttgggtaatctataaaggaaaacctatcagtttaacagcrgatttctcagcagatccctacaagctaaaagggaatggggtcctatctttaacctcctaaacaaaatgattatcagccaagaattttagatccagcaaaactaagcttcataaatgaaggaaagacacagtcttttttagacaaacaaatgctgagcaaatttgccattaccaag

SEQ ID NO: 150595 - DNA, 547 bp, Homo sapiens
aggctaaagacacattcctcaacaagtgggaaggaaagagaaagtaaccacattcatataaatgctgtttatgctcaaggttctgtagtatagtctctctctctctctctctcccccctctccatcctctctctctctctctcccccaaccctacctcaagttctctgcacgggggtggtgagggggagtgggtgcagcctaaactccaaatgtctggaggtctgcttgggcgtggagtagaaagggccccacttcaccatggtctctgtagaggaaaatctgggttgttcaggstgctgatctgagtgagtgggtgctctgactggctggagatctgcctaagtgtggagtggataaagattcagtgcaccacagtgtccgcatggcgagggtgaggtggctcaggctgcagagccagttgagcaggtgctccaagtgcctggagatttgtctgggcttgaagttgagagggaccctctgtaacaggatctctgcacaggaagggtagggtgactcagactgctagttcatgtgagtgaatactcc

SEQ ID NO: 150596 - DNA, 482 bp, Homo sapiens
gaccagggtgaattatggtaaatgaattattcaggtgtgttcaattagtagcactgtatagaaactagactttatattttttaattagatggaagactgattttgcaacaacttttttacaatttaatacaaattgaaaagtgtttaatgaatctgatgccattactctaaatattttatacattgaattaaaagtaaaaagtatcttyagtccttgcttttctttcttataatttccatgcactacaattcttgtgctttcactggtgtggtaattgctttcatctgtgaacagttaaaaaaccctgtccatttctcttcaataaccacataatttgaaaatgaatcattagattacctcaagtagactgaaaactaatacttctgtatatgtattcaatagtctttctgctcagaaccagaaggtagatagcggtagctgttttgtaaaaccttttatttcagtagcctctctgtgttca

SEQ ID NO: 150597 - DNA, 562 bp, Homo sapiens
ttgtctgtgttactgtgctgattgcttcttttgctgtgcagaagctttttggttkaactaagtcccatctatttatctttgtttttgttgcatttgcttttgggctcttggtcatgaagtctttgcctaagccagtttctagaagcatttccccagtgttattttctagaatttttatgatttcaggtcttagatttaagtctttgatccatcttaagttgatttttgtataaggtgagagatgaggatccagtttcattctcctacatgtggcttgccaatgatcccagcaccatgtgttgaatagggtgtcctttccccgctttatgtttttgtttgaagtcatgtagtgtgatacctccagattttttctttttgcttagtcttgctttggctatgtggtcttgtttttagtttcataggaattttaggattgctctttatacctctgtgaataatgatattggtatttcgatgggtatttcattggatttgtagatggctttcggcagtatgctcattttcacaatattgattctacccacccatgagcatgaaatgt

SEQ ID NO: 150598 - DNA, 562 bp, Homo sapiens
ttgtctgtgttactgtgctgattgcttcttttgctgtgcagaagctttttggtttaactaagtcccatctatttatctttgtttttgttgcatttgcttttgggctcttggtcatgaagtctttgcctaagccagtttctagaagcatttccccagtgttattttctagaatttttatgatttcaggtcttagatttaagtctttgatccatcttaagttgatttttgtataaggtgagagatgaggatccagtttcattctcctacatgtggcttgccaatgatcccagcaccatgtgttgaatagggtgtcctttccccgctttatgtttttgtttgaagtcatgtagtgtgatacctccagattttttctttttgcttagtcttgctttggctatgtgrtcttgtttttagtttcataggaattttaggattgctctttatacctctgtgaataatgatattggtatttcgatgggtatttcattggatttgtagatggctttcggcagtatgctcattttcacaatattgattctacccacccatgagcatgaaatgt

SEQ ID NO: 150599 - DNA, 562 bp, Homo sapiens
ttgtctgtgttactgtgctgattgcttcttttgctgtgcagaagctttttggtttaactaagtcccatctatttatctttgtttttgttgcatttgcttttgggctcttggtcatgaagtctttgcctaagccagtttctagaagcatttccccagtgttattttctagaatttttatgatttcaggtcttagatttaagtctttgatccatcttaagttgatttttgtataaggtgagagatgaggatccagtttcattctcctacatgtggcttgccaatgatcccagcaccatgtgttgaatagggtgtcctttccccgctttatgtttttgtttgaagtcatgtagtgtgatacctccagattttttctttttgcttagtcttgctttggctatgtggtcttgtttttagtttcataggaattttaggattgctctttatacctctgtgaataatgatattggtatttygatgggtatttcattggatttgtagatggctttcggcagtatgctcattttcacaatattgattctacccacccatgagcatgaaatgt

SEQ ID NO: 150600 - DNA, 490 bp, Homo sapiens
gaattcttttaacatttccctgttcagtataatgttggctctgtgtttgtcatacacggcttttattacattaaagtatgtcccttccatgcckattttgctgagggttttaatcataaagggttgctggattttgtcaaatgctttttatgcatctattgagatgatcatgtgatttttatttttaattctgtttatgtggtttatcacatttattgaagtacatatgttaaaacatccccacatttcaggtattaagtccacttgatcatggtggattatctttttgatatgctgttggattctgttagctagtattttgttgaggatttttgcatctgtattcattagggatattggtctgtagttttcttttttttgttatgtcctttcctggttttcgtattagggtgatactggcttcatagaatgatttagggaagattctctgtttctctagcttgtggaatagtgtcaataggattggtac

SEQ ID NO: 150601 - DNA, 490 bp, Homo sapiens
gaattcttttaacatttccctgttcagtataatgttggctctgtgtttgtcatacacggcttttattacattaaagtatgtcccttccatgcctattttgctgagggttttaatcataaagggttgctggattttgtcaaatgctttttatgcatctattgagatgatcatgtgatttttatttttaattctgtttatgtggtttatcacatttattgaagtacatatgttaaaacatccccacatttcaggtattaagtccacttgatcatggtggattatctttttgatatgctgttggattctgttagctagtattttgttgaggatttttgcatctgtattcattagggatattggtctgtagttttcttttttttgttatgtcckttcctggttttcgtattagggtgatactggcttcatagaatgatttagggaagattctctgtttctctagcttgtggaatagtgtcaataggattggtac

SEQ ID NO: 150602 - DNA, 623 bp, Homo sapiens
cagctgattattttttcttccaagaatgaaaatcaagcagaattgattcctacacgaaaaaaaagcacacgaatgccaaacctttcctttggtggactggacactaaccagatgagagtaaatttcttatccgtggacgtatgtaagctactgctgctgtgtgctctccacagccatatttattgtattaaacaatcagcactaaaccttcaaaaattgcccagtgttcctagttaaatgttcagaggggagaaatagatatattttaaataatgttttgctaatgaaaagagtaaatatttttgtttaaatcagcaaaaactttccattattttatatttccgtctactatacctaaaacaaaagattgccgttatacctgggttccrctgatgcagtcagccagcacctcctcacatgcacacatgattagacataggtgcactcggtaccaagagtccattttatggtccagcatatactccattgattcatcatcactgcatgtgttcagccagtgtatctcacactatccatacaaatctaaaattgatactggaaatgttattataggaggcagtgatcgcatttaaaatcaggccacctacaagtttaattttcaa

SEQ ID NO: 150603 - DNA, 552 bp, Homo sapiens
tacaactatgtgagaggcttctggtgtgaacagaatcctgtggcagaatctgtaagtgtaaacaagcaccttagcagtgggaggtcaggtccacaaaatatccagagccataatcacaaccataatcactagtctgccatcctgtatactgtggtactggagtacttttatctttcctcttgtctcagagttagctgatcagggacagtgcatatgacatctggatccaggatctgcagctctaccagggcagttctgttttccgtttkcactccacaaagttagcctgagtctctcctgcctggatcactatgggggcttcagcccagggtcactgaggacactctcaccagcatcagtgagttatttgagacatttgaggatgtcctgtgcagactggggtcagtgtgacaacaaagtctaattctggttccattttcagagaaagagaaatgacttatccagggtttgttcctcccctcacagaaagaatctccttgttcataacagataagagttgttccagtttttttggttctttggtgaaaatga

SEQ ID NO: 150604 - DNA, 606 bp, Homo sapiens
ggcaaaccacaaggtaaacttattagcatcgtaggattttaaccactcacctatgagggaaacatgcaatgccagctctttgcatgacgccgaggattaaggaggcaattgtttctttataaatcatagtgtggtgagtagtagaatggtcctctgctagaaatctatttcaaccatcatctgaataccctttaaaataccatgtctctccatcaggggaaagctamcccattctcactctcagcagagccatttgggtcactgccctggggatcctgttggttgggccactaatgacagccagtgacaaagagcatgtgagagcagagtcaatctgacagtcctgctctgactagttggtatctcttggtgcctcaggcaggcctagtggagaaggaacacagtcatatggttgggtatacacattttcgctaaaggggacattaacgacaccatgaccataggtcccaaattctctggcagtgtctccattcacatcatttcccccagtaatggcagatcattaaatacatccaggagtgtgatttgatttttatgcttttgtaagatttcctcagcaagtcaattcacaaatgtgaaggaaac

SEQ ID NO: 150605 - DNA, 606 bp, Homo sapiens
ggcaaaccacaaggtaaacttattagcatcgtaggattttaaccactcacctatgagggaaacatgcaatgccagctctttgcatgacgccgaggattaaggaggcaattgtttctttataaatcatagtgtggtgagtagtagaatggtcctctgctagaaatctatttcaaccatcatctgaataccctttaaaataccatgtctctccatcaggggaaagctaccccattctcactctcagcagagccatttgggtcactgccctggggatcctgttggttgggccactaatgacagccagtgacaaagagcatgtgagagcagagtcaatctgacagtcctgctctgactagttggtatctcttggtgcctcaggcaggcctagtggagaaggaacacagtcatatggttgggtatacacattttcgctaaaggggacattaacgacaccatgaccataggtcccaaattctctggcagtgtctccattcacatcatttcccccagtaatggcagatcattaaatacatccaggagtgtgatttgatttttatgcttttgtaagatttcctcascaagtcaattcacaaatgtgaaggaaac

SEQ ID NO: 150606 - DNA, 553 bp, Homo sapiens
agtcattattctggaggtcacaagatcaagatatgcaacctccccaattactcctacagataacatcactattgcagaacctaagattggccttttgagatatgctatcaggttttttgtacgtctgacacctgccaaccagctcccgtagccccactcagaagcagctcagcctgcaggaagactatttcccaaacccctataattgcacgcccaagcaatcagcagcaagcacccaytgccgagccacccccatctcttcccccaaactatccttgaaaaagcctagtccccaaatgctcagggagatttatttgagtaataattttgtctcccccatggcatggctgacctcatgtcaacaaaactctctctttactgcaatgccatgatctccatgaattaaattttgtttgtgcagtgggcaggaagaacccgttggaaagtcacagtcacttcgggtctcactggcctaaatcaaagtgtggattggctgggcttttacctggaggctctagggaagaatgttctctttccggctgttggaagaatt

SEQ ID NO: 150607 - DNA, 553 bp, Homo sapiens
agtcattattctggaggtcacaagatcaagatatgcaacctccccaattactcctacagataacatcactattgcagaacctaagattggccttttgagatatgctatcaggttttttgtacgtctgacacctgccaaccagctcccgtagccccactcagaagcagctcagcctgcaggaagactatttcccaaacccctataattgcacgcccaagcaatcagcagcaagcacccactgccgagccacccccatctcttcccccaaactatccttgaaaaagcctagtccccaaatgctcagggagatttatttgagtaataaytttgtctcccccatggcatggctgacctcatgtcaacaaaactctctctttactgcaatgccatgatctccatgaattaaattttgtttgtgcagtgggcaggaagaacccgttggaaagtcacagtcacttcgggtctcactggcctaaatcaaagtgtggattggctgggcttttacctggaggctctagggaagaatgttctctttccggctgttggaagaatt

SEQ ID NO: 150608 - DNA, 577 bp, Homo sapiens
tggctacactaagactgtcagtgtagacaaaacagccttctattggaagaagatgtcatccatgactttcatagttagagagaattcgatgcctgccttcaaagctttagtggacaggacaggctaactctcttgttaggggctcaggaagctggtgactttaagctaaagccaatgctcatttaccattccaaaagtcctagtgcccttaagaattatgctaagtcagcagagtgtggtggctcatgcttgtaatcacagcactttgggaagccaaggtaggaggattgcttgagcccaggagttcaagaccagcctgtgcaacatggtgaaaccccatctctacaaaaaatacaacaacaamaaattttcaggcatggtggtatgtgtctgtcatcccagctagttaggaagctgaagtggcaggatcacttaaacctgggaggtcaaggctgcagtgagccatgattgagccagtgcactccagcctgtgcaacagagcaagatcctgtctcaaaaaagagaaagatttatgctaaatctactccatctgtgctcgacaaatcaaaaaacaaat

SEQ ID NO: 150609 - DNA, 436 bp, Homo sapiens
aggaaataggaggaaacatttatttccttcctctgtcccataaaatttcactttcaggaaagggcctgatgttagtcatttgcacctccatgtgaatttgacacttcttccccagaggtatttacctacctgttatgctctctaattaggaggaaatctgagttctataaagttcagatgtcctgtggtttagcccacctacttcctcaccagactttcagaaataacagtttagtcctcaaaggagatcccttcttcatgatccatccatccatccttctaccagcgactaatagctctgactctacggtttcctcttttggtgatcrcatttccctcatatttgggatctctagtgttgtgtgtgagatttcctggctagtaaactgtttgcgatacagagccacttaataagaaaaaccagagcagcctccag

SEQ ID NO: 150610 - DNA, 634 bp, Homo sapiens
ggtttagagtgctggtggtaaatccgctctgaggccagagagctaatgagtagaatttgagcatggatttcaacctagaactattttaaaccaaagcctgtgcctcaaaccactgtagtagacttaaagaaaatagaagagtagttgttaaaatgtatcaagtcctgctgcgtgccaggcatttaacagaaatggcatgaatcattctcaagcgactctcckggctttgtcccttcggggatgtggctccccgtggcaggatctgcgaggtgcgatgcgtacagaaggttgggaccagcagcctcttcaatctctggagaagctccctgctgctctgtaattcttcctcctaagtagaggatagcgcttcctcccaaccacacaccagataccgccatgcccatccctcctgggctggtgcaccctgaaatctgctgctgggtgaaacagcactttcacttaatgcttcagatagcagaggaccgacagctgtgactttatttggtgatggaataaataaggtgagggggacgaggggcacagaatgttcttcaagggtgcccattttcataatgttatttttctaaatctgcatcttcccagtcccaaaccttcttcagcttttttttgttga

SEQ ID NO: 150611 - DNA, 482 bp, Homo sapiens
gtttgttataggaaattacatttgttaaaatgtgtgctatagcaaattgttagttcactaagagtgtaaactatttttgtcayggaagtcttattttaaccacccaccttgtgacaattaactcaatttctataatcttatcaaatttgttacttcatttgtacataagtgaatcagcattccttgttactcaaaaatcatcaagcctttttttaggcttttttaaacaaatattttgtattctaaaagttgtatctctaaagtaaaatttaaattattttctttttttaatttttgtttttattatattttgtttttatcatggcctatattattactttggtaacattctctttaaccctcaaactaataaaaaactgtcactcatcacaaaagactgggtaaattaagaagtacagttgatccttgaataatatgggtttgaatttcaggtgagttttcctttgcctctgccacacctg

SEQ ID NO: 150612 - DNA, 506 bp, Homo sapiens
tctcctatactcagtccgttttctctgcttggaacattctcttccttcctcctctgtggtcaagasttactctttcttcaaagaccagcctaaatcccacagcctcctgcagctgtcccttacattggaggttctagtcttctctgttccctagagttggcagctctcggtgcccatgttattctgagcacgtgctcctttctattgttaggtgattttgcatttgaccctgcttccctgctctttcctgaaacccctggaagggcctgcatctgtggttcccaaacagtgcaccaaggagccctggggcttttcaattaattcacaggggtactaggagatattttcagtttgtgagggaaacacagtgacatctgttggacaccacatgaactaacagctcaaaataatttgcagttttggcatgaaatcatattcattactttcaatttggtcttaccaatttaaaaatgaatttttgggccgggcatggtggctcacgcctg

SEQ ID NO: 150613 - DNA, 506 bp, Homo sapiens
tctcctatactcagtccgttttctctgcttggaacattctcttccttcctcctctgtggtcaagagttactctttcttcaargaccagcctaaatcccacagcctcctgcagctgtcccttacattggaggttctagtcttctctgttccctagagttggcagctctcggtgcccatgttattctgagcacgtgctcctttctattgttaggtgattttgcatttgaccctgcttccctgctctttcctgaaacccctggaagggcctgcatctgtggttcccaaacagtgcaccaaggagccctggggcttttcaattaattcacaggggtactaggagatattttcagtttgtgagggaaacacagtgacatctgttggacaccacatgaactaacagctcaaaataatttgcagttttggcatgaaatcatattcattactttcaatttggtcttaccaatttaaaaatgaatttttgggccgggcatggtggctcacgcctg

SEQ ID NO: 150614 - DNA, 506 bp, Homo sapiens
tctcctatactcagtccgttttctctgcttggaacattctcttccttcctcctctgtggtcaagagttactctttcttcaaagaccagcctaaatcccacagcctcctgcagctgtcccttacattggaggttctagtcttctctgttccctagagttggcagctctcggtgcccatgttattctgagcacgtgctcctttctattgttaggtgattttgcatttgaccctgcttccctrctctttcctgaaacccctggaagggcctgcatctgtggttcccaaacagtgcaccaaggagccctggggcttttcaattaattcacaggggtactaggagatattttcagtttgtgagggaaacacagtgacatctgttggacaccacatgaactaacagctcaaaataatttgcagttttggcatgaaatcatattcattactttcaatttggtcttaccaatttaaaaatgaatttttgggccgggcatggtggctcacgcctg

SEQ ID NO: 150615 - DNA, 506 bp, Homo sapiens
tctcctatactcagtccgttttctctgcttggaacattctcttccttcctcctctgtggtcaagagttactctttcttcaaagaccagcctaaatcccacagcctcctgcagctgtcccttacattggaggttctagtcttctctgttccctagagttggcagctctcggtgcccatgttattctgagcacgtgctcctttctattgttaggtgattttgcatttgaccctgcttccctgctctttcctgaaacccctggaagggcctgcatctgtggttcccaaacagtgcaccaaggagccctggggcttttcaattaattcacaggggtactaggagatattttcagtttgtgagggaaacacagtgacatctgttggacaccacatgaactaacagctcaaaataatttgcagttttggyatgaaatcatattcattactttcaatttggtcttaccaatttaaaaatgaatttttgggccgggcatggtggctcacgcctg

SEQ ID NO: 150616 - DNA, 460 bp, Homo sapiens
ctcactatagtacaactaaattcaggattggagtgggggtggttcttcaattgagaagtctcctcctgagttggagaacactagaactgagcattcctgaagtagatcctgtcagtcctgctcatttgcccttcacaggttctgtacacaggttgttttcctcctttagggttttatggttrccctcaagcacatggaggcccgagaccagggcagtaggtaggcacctggcacatggtaggcatacgattcatattggttgggtaactagatgaaagtgggtacccatgtggctccactgcctctcctcagttaggtaccttcctgatgaatcactctttcctcatgctacagatttgccatttctttttgttcaaattttaccagtcttggaagagaaggcaagttttctgtaacctgtttagggaatctttggaattctgtttgggcttctctagtg

SEQ ID NO: 150617 - DNA, 439 bp, Homo sapiens
tttttgtttatattctgttgtcaccctagagtttgaagtatttcaagtgttttaaagcacattttgtatgaagataattatcatgcttctaatgtatttgggagctgaggtattttaattaatgatgtgccagcaaccctttcaaatagggtgaagtgtgatttttaaggccttcatctgcttggtcataattagggacatttggaacrttcaggcataatatctgctgatttgcacactttcattaagcaatcaggactgaatgaccaagtgaccacactttcattggatcaggttccaattgttgaggtggaggggccttctgtgctttctcctcctctcccctgcccagtttttcctataacatttacacacattctgtgttcatctaaaacaacactactgtgcgtattttttcaaggccttgatttttgtagaa

SEQ ID NO: 150618 - DNA, 553 bp, Homo sapiens
gtcataaacactgtgcaaggaatttcctttatttttccctttgagacagggtcttgctctgttgcccaggctggagtgcagtggcacaatcacagctcactgcagctttgatttccggggctcaagcaatcctctgcacctcagccttccatatagctggtactacaggtgtgcaccaccacacccggctgatttttttactttttgtagagacagtctccttacgctgyccaggctggtcttgaactcctaggctcaagagatcctcctgcctcagcttcccaagtgctggaattacaggtgtgagccatgatgcccagccaaggaacattcttttaactaagcatttgaacatacccatgattttgtccttcaattagaatcccagaagtggaaacatcagctcaaagagtaggaatatctgaaggcttttgatgtaaacggactcctcaaaagttgtactgctttaaactccaataactagtgatccattttctccatgctcactaatgctgctaatcaacactgaggattaacttgttcttggattctc

SEQ ID NO: 150619 - DNA, 553 bp, Homo sapiens
gtcataaacactgtgcaaggaatttcctttatttttccctttgagacagggtcttgctctgttgcccaggctggagtgcagtggcacaatcacagctcactgcagctttgatttccggggctcaagcaatcctctgcacctcagccttccatatagctggtactacaggtgtgcaccaccacacccggctgatttttttactttttgtagagacagtctccttacgctgtccaggctggtcttgaactcctaggctcaagagatcctcctgcctcagcttcccaagtgctggaattacasgtgtgagccatgatgcccagccaaggaacattcttttaactaagcatttgaacatacccatgattttgtccttcaattagaatcccagaagtggaaacatcagctcaaagagtaggaatatctgaaggcttttgatgtaaacggactcctcaaaagttgtactgctttaaactccaataactagtgatccattttctccatgctcactaatgctgctaatcaacactgaggattaacttgttcttggattctc

SEQ ID NO: 150620 - DNA, 230 bp, Homo sapiens
tctagagcttggcccagtgtccatagttcagttattatgaaatggattcaggctttatgtattttgacaaygtctatgttcaaaggaagatccaagtttggtgggtccttaagctcatacaatttggaagtctctcctttagaaaaagagtacgaaattataaatttaaaattgttggggctccaacagctgcagcttagtgcagagtaagccttggtagcctcatggta

SEQ ID NO: 150621 - DNA, 416 bp, Homo sapiens
gaattctactggtgaaattttgggcaacaaaaataattagctttgaatgtaattgctttataaaattgacttctttttatgaacttcttatggagcaactgacagggataaacctgtggtttgtgaccaatcagagcccttagttagaggactgtgaaagactgcatacctctttataggccagttagcatctgtcagtctcgtagtcaccaggggcctatttaattgcatctttaaactctaaactgtggctgtctacgctcagaaaaatgaggtatggatggggtgacagcacttcaagtsgtggggcaggggcaggatctgcgtgtgtcaggggcattcaagggaggtgcagacagaaagactccccatgcccatggcccttgggctcagaaactgatgaaactgggttgacc

SEQ ID NO: 150622 - DNA, 594 bp, Homo sapiens
atttaaacttagaggcaaaaaaagtatggccctaaatgtgtatgttagaaaagaaaatagactaaacattgatgagctaagaatgcataataataaattagggaaaaaacatcaaattatgtcagaagaaagtagaaaaagaaaaaagataaatatagaaattaatttgartagacaatacatacaacagcaaggatcaattaagctcaatgacagctttttaaagaaactaataaaatttataacccccactgtactactcaggtaaagaataatggcagaacaaataatcagtaataggaataaaaaatagaaaggacactactacagatactatagaaattaacaatattctagtaggatattatgaaaaactttatgacaataaatttgaaaatttacatgaaataaacaaattcctaaaaaaatttagcttaccaaaattggtcccagaagaaatagagaattagaagagatttataatacttaaaaatattgattctgtgattatataccagaaagagaactccagccaagatagttttaatggctaattctaataaatattaaagaagaaataacaccaattttaca

SEQ ID NO: 150623 - DNA, 594 bp, Homo sapiens
atttaaacttagaggcaaaaaaagtatggccctaaatgtgtatgttagaaaagaaaatagactaaacattgatgagctaagaatgcataataataaattagggaaaaaacatcaaattatgtcagaagaaagtagaaaaagaaaaaagataaatatagaaattaatttgaatagacaatacatacaacagcaaggatcaattaagctcaatgacagctttttwaagaaactaataaaatttataacccccactgtactactcaggtaaagaataatggcagaacaaataatcagtaataggaataaaaaatagaaaggacactactacagatactatagaaattaacaatattctagtaggatattatgaaaaactttatgacaataaatttgaaaatttacatgaaataaacaaattcctaaaaaaatttagcttaccaaaattggtcccagaagaaatagagaattagaagagatttataatacttaaaaatattgattctgtgattatataccagaaagagaactccagccaagatagttttaatggctaattctaataaatattaaagaagaaataacaccaattttaca

SEQ ID NO: 150624 - DNA, 594 bp, Homo sapiens
atttaaacttagaggcaaaaaaagtatggccctaaatgtgtatgttagaaaagaaaatagactaaacattgatgagctaagaatgcataataataaattagggaaaaaacatcaaattatgtcagaagaaagtagaaaaagaaaaaagataaatatagaaattaatttgaatagacaatacatacaacagcaaggatcaattaagctcaatgacagctttttaaagaaactaataaaatttataacccccactgtactactcaggtaaagaataatggcagaacaaataatcagtaataggaataaaaaatagaaaggacactactacagatactatagaaattaacaatattctagtaggataytatgaaaaactttatgacaataaatttgaaaatttacatgaaataaacaaattcctaaaaaaatttagcttaccaaaattggtcccagaagaaatagagaattagaagagatttataatacttaaaaatattgattctgtgattatataccagaaagagaactccagccaagatagttttaatggctaattctaataaatattaaagaagaaataacaccaattttaca

SEQ ID NO: 150625 - DNA, 594 bp, Homo sapiens
atttaaacttagaggcaaaaaaagtatggccctaaatgtgtatgttagaaaagaaaatagactaaacattgatgagctaagaatgcataataataaattagggaaaaaacatcaaattatgtcagaagaaagtagaaaaagaaaaaagataaatatagaaattaatttgaatagacaatacatacaacagcaaggatcaattaagctcaatgacagctttttaaagaaactaataaaatttataacccccactgtactactcaggtaaagaataatggcagaacaaataatcagtaataggaataaaaaatagaaaggacactactacagatactatagaaattaacaatattctagtaggatattatgaaaaactttatgacaataaatttgaaaatttacatgaaataaacaaattcctaaaaaaatttagcttaccaaaattggtcccagaagaaatagagaattagaagagatttataatacttaaaaatattgattctgtgattatawaccagaaagagaactccagccaagatagttttaatggctaattctaataaatattaaagaagaaataacaccaattttaca

SEQ ID NO: 150626 - DNA, 593 bp, Homo sapiens
acccaaatgaatattgttagtaccatctcatcatcatcatgtatcaatcaccttccatactttgtttaaatattgctaagacagacatactatatcttaaataccttcttttaaatgtttttcaagatagcattatatatagtataaattatttgctctcagcatgattattagaggcatactttgacttaaggtcaatcactttatgccttcccacatatgtaatatacatcaagggctgtagggtatatacatagggcctcctaagtctcattttggagtgcattttatatttttactgtatgtgtatgcatatgtatgtattttttcctttatcaataacttctaatttatattaccttgctatatttcatgtagctatgaggttgccacaaatctttttttaaacatagcaattataactggaaaaatyatatgtatataaatgcactgagaataggttggatccataccaagaattttcaaagcacagtatctcccacagaaactcaataacttctggctgaaagaacgaatgaaagaataaggaaggatagttaatagtaatcttagacaaaatgccccagagcagg

SEQ ID NO: 150627 - DNA, 596 bp, Homo sapiens
gaccttcagcatatctaatgttttacaactgtgctttaactagattaactttataggacttttatttttattaaataccagaggcattttgcaataacatattttaatgatcaacaaacattcctgttcatgcaataatacaaaagctgccaaaacagatacgctagttggcaggaagcactacgtgaagactgtatctaaatgtaaaaatatttagattatccaaaagtagaaatgttcaaaagttgaaacttcctttgaccagtaagatcccactgagatacagagactgtgaaatatcaatttagaattattgacctaagaataattttctttagggggagagaaaacatgaaccggggattactgtgcatattttttttttggtgtaaaacagcgawaaaaatgcagtcttactgcttctgtgttagtgctggtagtactgcatacaataaacgtaaaataacatggttcaagaatgggtggaaaaaaatcacaatgtaaaatgttaaggaaatcacacaatagctagtgaatggaacaaagggaactaagccttagatattctaggattcgttctcagatactaagtatga

SEQ ID NO: 150628 - DNA, 548 bp, Homo sapiens
aacactgaaacacagaaattatagatgacacaacaaatggaaacacatcacctgctcatggatgggaagaataaaatgaccacactgctcaaagcaatccagactccatgcaattcccatcaaaataccatcaacattcttcacagaactagaaaaaacaatcctaagattcgtatggaaccaaaaaagagaccatatcaccaaagcaatactaagygaaaagaacaaatctggaggcatcacactatctgacctcaaattacaacacaaggctatagttaccaaagcagcatggtactggtataatgacaggcacatagaccaatggaacagaacagagaacccagaagtaaagccaaatacagctaactgatcttcaacaaagcatacaaaaacataaatttggaaaaggatacccttattcaataaactgtgctggaaaaactggcaggccacatgtagaagaatgaaactggatccccatctctcaccttattaaaaaatcaactcaagatggatcaaagacttaaatctaagacctgaaacca

SEQ ID NO: 150629 - DNA, 545 bp, Homo sapiens
gaaattatagatgacacaacaaatggaaacacatcacctgctcatggatgggaagaataaaatgaccacactgctcaaagcaatccagactccatgcaattcccatcaaaataccatcaacattcttcacagaactagaaaaaacaatcctaagattcgtatggaaccaaaaaagagaccatatcaccaaagcaatactaagcgaaaagaacaaatctggaggcatcacactatctgacctcaaattacaacacaaggctatagttaccaaagcagcatggtactggtataatgacaggcacatagaccaatggaacagaacagagaacccagaagtaaagccaaatacagctaactgatcttcracaaagcatacaaaaacataaatttggaaaaggatacccttattcaataaactgtgctggaaaaactggcaggccacatgtagaagaatgaaactggatccccatctctcaccttattaaaaaatcaactcaagatggatcaaagacttaaatctaagacctgaaaccatgaaaatccta

SEQ ID NO: 150630 - DNA, 427 bp, Homo sapiens
ctgcaggatttcaacatccttaaaacaaaacactagcagttactgattggaacatactttcctttgggatctacatggcctttgcaagaatagcataaatagcacatagcctagcccctatctytaaaaaaaaaaatccttactccatggttatttgggagtgatgggtttctggagggctgttttaaactcaaaggacaggcataaaccctttgaatcttcacttctcacaggaatctgatttccatcaagtaggaaagaaatcatgaagcccagtcagctcttaggtagtgttttaagtaaggtgaaggaaaaacaaacattagggaagttcaaagacaaaaaatcctacaagaggacaaccatgattgaaactgtactctgatttctgttatgggtatgtgcacccccacaagctcatgaattc

SEQ ID NO: 150631 - DNA, 532 bp, Homo sapiens
ttcttccctctcccagcagtgtggagcttaaagaaaaggttgaggatttggatgtgtgtccattaacctcattccagccagttccataggtctcayacaagatactaccagagtctcaggccccaggagggatgaaggctgcatcctgtcccaaagctgggtctgaaggaataggcatcaagaaaagagataccttgactcttgtcagtggtgcactggtgcctcatggaaactaggcttggggcttccctctttgcttcccacccctccccttccagcagcctattaatcactgagtataaaatactgtctggaggaccctattcccccacccctaccctgaggctccctgccaggcagaaggctgcaagctaagcagggagaaaagagagaatgggcggcaggcaggggtgcccatcatttatcaaccaaacacagcggccagccactctttccagcagcattctggcaggctgggcaggcgatgcagccagtgttttctggcaatggagagcacagtcccacaagaatt

SEQ ID NO: 150632 - DNA, 543 bp, Homo sapiens
cctacacccaagcggtaccctcaggcccatcttcaagtgaaagtcatccccttcccactctgtaaagttggaaagatatgactgcactatcagatgtacaaacatcatggcagggtcacaagaaacatgaaaaagcaaggaaatatgaaaccactaaaaggaacacaataactctccagtaactgaccccaaagaaacagaaatctacaaattttctaaaaaggaattcaaaataatgaacaaaggaaactcagtgaaacataagagaataaaaacagaccattcaatgaaattagaaaaataaatcatgatctgaatgagaaattcaataaargagatatcatttaaaaaatctcaataaaaatcttaagagctgaagaattcaatgaaataaaaaataccacagagggttcaacagcagactagatcaagcagaagaaagaaccttgaaggtttctgaaatgactcagaagagaagaaaaagaaaaaagaatgaagagagcctatgggacaccactaagcaaacaaatattcacattgtag

SEQ ID NO: 150633 - DNA, 567 bp, Homo sapiens
agcagactagatcaagcagaagaaagaaccttgaaggtttctgaaatgactcagaagagaagaaaaagaaaaaagaatgaagagagcctatgggacaccactaagcaaacaaatattcacattgtaggaatcccaaagggggaagaaacagaaaaggtttatataaataaaataattggtaaaaacttcctaaatcttgggacttaggaagagagagagatytacatacaagtcaatgaagctcaaagatctcagataaactttagaaggttctctccaaggtacactataatcaaactggcaaaagtgaaaagacaatgaaatagttttaaaaacagcaagagaaaactgtctagtcacatataaggggatgtccatcagagtatcattggacttttctgcagaaaccttacaagcctggagaatgggatgacatattcaaaatgatgaaagggaaaaaaaaaaaaaaaaaacctgccggctaagaatactataccaaggaaaactatccttcagaaatgaaggagaaataaagtcttccccagacaaataaaagttgaaggaatt

SEQ ID NO: 150634 - DNA, 567 bp, Homo sapiens
agcagactagatcaagcagaagaaagaaccttgaaggtttctgaaatgactcagaagagaagaaaaagaaaaaagaatgaagagagcctatgggacaccactaagcaaacaaatattcacattgtaggaatcccaaagggggaagaaacagaaaaggtttatataaataaaataattggtaaaaacttcctaaatcttgggacttaggaagagagagagatctacatacaagtcaatgaagctcaaagatctcagataaactttagaaggttctctccaaggtacactataatcaaactggcaaaagtgaaaagacaatgaaatagttttaaaaacagcaagagaaaactgtctagtcacatataaggggatgtccatcagagtatcattggacttttytgcagaaaccttacaagcctggagaatgggatgacatattcaaaatgatgaaagggaaaaaaaaaaaaaaaaaacctgccggctaagaatactataccaaggaaaactatccttcagaaatgaaggagaaataaagtcttccccagacaaataaaagttgaaggaatt

SEQ ID NO: 150635 - DNA, 524 bp, Homo sapiens
tacaggaggatgtgcataagttatatgcaaatactatatcattttatacatgggatttgagcaaccatsaatttttgtatcttcaagaggccctgaaaccaatcctccacagatactgagggatgactacatacattgtacaaatttatttttccttcttcacaatgtcacaaatagaagattcattcttaccactgatttcagtaacctcagcataagatttctttcctttccttagtaagttgagaactttcacgctttcatttaaaggaagcactttacaacttctgtttggcatatccaaattgctagcatcactcttcttgtgctttgggaccattaaataaaataaaggttatgtgaacacaagcactgtgataccatgacactccacctgataaccaagatggctactaacacaccaatgagcagatagcatatacggcatggatatactggacaaaggaatgatttacgtccgggacataactatacaagatttcaccatggtactcacaacagta

SEQ ID NO: 150636 - DNA, 440 bp, Homo sapiens
aagtccctgaaggtttttggcctgagaggcattacaataccctccagaaagattaatctggagggaggaggaacaaaagggaagaatatcaactgtaaatatttaggagggagataaaaataaactggtggcagctgcaatggaaaatgtagctgcctacagagttagagaactgcaggtgtatgtatacataggactccaaagaagatgtcaraaaaaatcagcctatctttctggctgatacacaaaaagttgtcaagaagagattaaaaagaaaagtgaaatgaagtaaatgaatacaagttttccaaatctaggttaatgggtgactagttattattatcattatctgaaatatggaattcagtaaagcagttggtttgggataaaggagatggtgagctgatgagttccactcaatacaagcaccaaacaatagg

SEQ ID NO: 150637 - DNA, 581 bp, Homo sapiens
gagtggtgggagactgactgcaaagaggaacaaagaactttatggggaaatgaaaatgttctatatcttgataggggtatggattgtatgactgtctagatttttcaaaactcaaatggtgtatttttgacatcgccacattgcacttaaataaatcatacatcaatgaaaaaagtcaatagatacagttagtatgcatagaatggacacagatggcaaaatattagaagataaaactatttttcctatggttatttacatttttaagattttccttaaacaaagcattagttacatttaaaaaaaaaggccctcaaaagcagtttcattgataaggtgacatttgatcaaagacctgaaggargcaaggaagccagctgtatggatgtatgtgagaagaaccttctaggaagaggaaacctgaactataaaatccttgaggttttgacaagagcagcgacaggctgtgacttacattttagcaggtctgttgtggctgcagtgtttagaatatacaagggcagaaacaagactagtcagaaggctactataacaatccaggtaagagctgactgaagctt

SEQ ID NO: 150638 - DNA, 576 bp, Homo sapiens
cctgattgattcatctcaagaagaataataaagtcctaacaacagtgctgtctctgcctcctgtctgcagtgcttaccatttataaagttctttygtaaatacaatccaatctgagcctcaccacaatcctgggaaacatgggcggtggcagcttgcattctccccattgcatggatgaagccagtgagataccagctggacaaggttagcatctgtccagctaacagaccaggtattccaactcagtccagtcatctttatgccacaaggcagttacaaaaatcaggccaggtcattcagatgaccacgatgaagaagaagttctaggatggaactggaaggagccttgtgttcctatgaagatgggaatttgaattctatgtctaatcacccaggtccagcatgggatgggaattcccatgcaggcatataagatgtgttcatccaacttcagaaccacatacaatagctgcctcctattgaaatgtctatttttaacattctatctcaaaagaaatctcttccacagggcagtgagcctagaccccaggagttaaaaataataatgagaactc

SEQ ID NO: 150639 - DNA, 367 bp, Homo sapiens
cctccggtacctaccataggactagcaggaacgtgtgggctccattttccacttgcagtgggtggaactgcaaggcctcctgtcacctggcagcrgtcccccaccagacagtctctctccggttcttttcctcattcaggtggccaagaggcagatcagccgggtctctgctaagcggatgtccaatttgggactggaatgccaggccctccttcttgccagcacccccactttgagcgattcttagagctaccactcccttgacttcaaggggcccaaggactctgctgccttgcctccttggtgaggggaggaaaatatcctttctccatgatcatcaaacattgtctccccaaaatgacattct

SEQ ID NO: 150640 - DNA, 367 bp, Homo sapiens
cctccggtacctaccataggactagcaggaacgtgtgggctccattttccacttgcagtgggtggaactgcaaggcctcctgtcacctggcagcggtcccccaccagacagtctctctccggttcttttcctcattcaggtggccaagaggcagatcagccgrgtctctgctaagcggatgtccaatttgggactggaatgccaggccctccttcttgccagcacccccactttgagcgattcttagagctaccactcccttgacttcaaggggcccaaggactctgctgccttgcctccttggtgaggggaggaaaatatcctttctccatgatcatcaaacattgtctccccaaaatgacattct

SEQ ID NO: 150641 - DNA, 556 bp, Homo sapiens
ttggatgtgagtaatcagataacactgacttgaaggacttgcagaacattgtttgcattggaagcagaaccaagaggtactaagatcccactgctggacctccttggccagatgtgctagccacatctggtccccaaacacaggcactggcactgctagtattttgtactccgttctgtgcctgtctttgtggagtgaatgtcctctccaaaggagatgaggtaaattaaccaaggkacaaatcctcgcagcacagtgggaagtaattctcactgcaacttgttgggggaagagctaacccccttccttctctcccagctcccagtcagggaattgggccagcttctttttaactatataatttttacagtcccctcacaccagctcatgttctctgtttactctacaaccatctttcttgcccagccaacaagaaaagtttaaagtgattgcctgcttatatctaaaatgcttccagactgtagacttctttggtgcttacagatttgcatggaaagagaaggctgaaagttttatgacttgaaaattcagactt

SEQ ID NO: 150642 - DNA, 406 bp, Homo sapiens
ccgactttgccttgctggccctctggctctcctctcctctctacacactattttctctgctgggaatgccctccctgactgctttgcctgtctcactttaataaagtctgaagtcttggcttataggtaagttccttgaggaacctttctgtgattgacaccctcccaccatccccactccatcataggtcgggtctgagcacctgacccacgatggagtgggtcctcaaccatgccatcatcactacactcctcctgggcctagaaagcggctgtcccttaaaaggcacaatcgtgctgcctacagattttgataggccttcatttagatatgttttctttttaacttttcattttgatacaacttcaaacttacmgaaaagtcacaggaatagtatagagaatt

SEQ ID NO: 150643 - DNA, 586 bp, Homo sapiens
cctgtcctgatccatgctggggctcaggaagtgaaggcaattggggagaagggtaataaagaggcrtgctctggaactgacagagttgctttaatcttagcttctatgctatcaattccctctgtgccctctggcctaagtgttgtcatttgcaagataatgatacctacatcattggtattatgaagatgaaatgagctcatacatacaaaggtcacagaatctggcacatgctaagtgttcagtaaataaaagttagtaataaaaaattttattaacagcttcgtgaaatggacataacaaaatcggccacagcctccaccctgaatctccaggatacaaatgactcaaggatttcttccccttctcacagccaaatttcaagagtctggaatatcccctacctggaataacaaagtatggcacagtgtcaaagaaaaacaagtcagaaaccggccaggctggtatataaagcaaggcttccttccctaactaggggatgcaccacactgctctctcaaaccctggagggatttcctcagccacgtgggagggaccatgaagtttacagtttaaagccacgtgc

SEQ ID NO: 150644 - DNA, 609 bp, Homo sapiens
attatcttggcattctttccacttcattataattatctgatttttaaaggtgtcttagccttacaaaaaattgttaggattcctctaaatgggtgcttcatttgcaaaacctcaatctaccaccaacttgtcacagccagacctattacataaaataaaacagacacgtggaggaaattgtttcctgatttaggtgagtaaagctagtgagaagtcttttgaggcattttctatctcastatgtttcatcttttcagaagaattctgttttcccattaagaagacaactgtcaggtgaaaaggcccagaaatctagtagggctgtgtgtggatcagtcacatccgtgaagccctgaaattgtttgatctatctgatactaagtgtctgcattcttggcagaatcaggataaatgactccttttttttcttctgttcctgcacatttggcataatacaatcatagagagtgaataatagtccaattcagctctcagtttctgcattgattcctccagagaaatataataagctcgttctttggttggctcctgattttgattgacagaaaaaataacagcagaaagattacattttgccagcatcctaaa

SEQ ID NO: 150645 - DNA, 559 bp, Homo sapiens
agaaacaacagcgggagaaggataaggagaaaagcaaggaccttgccaagagagcctctgtgacggagaggctggacctcaaggaggagccaaaagaagaccccagtggagcagctgtgcccgagatgccaaaaaagtcctccaagattgccagcttcatccccaaaggggggaagctcaacagtgccaagaaggagcccatggccccttcccacagtggaataccaaaaccaggaatgaaragcatgcccgggaaatccccaagtgccccagcgccttccaaggaaggggagcggagccggagtgggaagctgagctcaggactcccccagcagaagccccagctggacggcagacactccagttcctcttccagcctggcgtcctcagaaggaaaaggcccaggagggaccaccctgaaccacagcatcagcagccagactgtcagtgggtctgtcgggaccacccagaccacaggaagcaataccgtcagtgttcagctacctcagccccagcagcaatacaaccatcccaacactgccacggttgcacctttcct

SEQ ID NO: 150646 - DNA, 427 bp, Homo sapiens
tcatgttctgaggagataagcctgggtgtttgtggagatggatggatccttctgtctttatctgtcccctagcccctgtctctttgatggcacatcctcaggaccatgggagactgtgtggagccagtccacacagtggtgctgctgctctgtgtgattctggtcagcgacattgctcattgctcaggctacaccacacccyttgctgaatgaggcacatgggattcaggggccacgtcatacacatggatgagtccactccaggcagatggaagctccccaacccctgcccttaaagttcttatcattcccagagctttcactgacagtgcctgattcgatcctgtgctggagatgagcagtgcatttggccacattgcacaattggataactaatacttgtacacacaaaagaggattaatgatc

SEQ ID NO: 150647 - DNA, 481 bp, Homo sapiens
aaatgcaaatcaaaactacaatcagatatctatcatctcgccccagttaaaatggcttatatccaaaaaacagataacaacaaaggctggcaaggatgtggagaaaagggaaccctcatacactgttgatgggaatgtaaattagtacaacctatatggagaatagtttggaagttcctcaagaaaacgaaaaatagagctaccatatgatccagcagtcgcattgttgggtatacastcacaaaaaaaggaaaccagtatattaaagagatatttgaactcctatgtttgttgcagcactgttcataatagctaagatttgttttcttcttttttttttcctttttgagacagagtctcgctctgtcacccaagttggagtgcattggcacaatctcagctcactgcaatctccacctcccgggttcaagagattctgctgcctcagcctccctagtagctggaattacaggtgtgcatc

SEQ ID NO: 150648 - DNA, 572 bp, Homo sapiens
gctgttcttactttatagggttgtgttttgttttgttttgttttttgacagagtctcactctgtcccaggctggagtacagtggcacaatctcagctcactgcaaccttcacctcctgggttcaagcaattctctcaccttagcctcccaagcagctgggattacagggcacgcaccaccatgcccgactaatttttgtattttttcagtagagatggggtttcaccatgttggccaggctggtcttgaactcctgacatcaaatgatccacctaccctcagcctcccaaagtgctgggattacaggcatgagccaccgtgccccgcccttactttatagtttatttaaatgaagttcagagaagtcaagcgactcacccaaagtcacactgctgaagtgagtaactgagccagagttagaattcagacatgcatactccaaagcctgactcttcaccaccaagaaactgtctttaaaattcmgaaacgaagttgtgttaaaagggcaggctgctactgggtaactttttatttccatagaaattgaatcatggtaatcattccaggaagct

SEQ ID NO: 150649 - DNA, 528 bp, Homo sapiens
attgcttggaggcatcagcccttgtaaggttgagcgtaggccagcctcacacaggtgtgactgcagcccccaaccacagccactctctctcaccagcttcctgaaacttcctatttctgtacctgggaactaagcccttccttccaggatagtagagttggcagctgctgaccgtggacggcaccacatcacagcttccacggctggtaccaggcccttctaggagcaggagggaggcagccaagaagacaaagaaggctgtggggaagaaggcaaggcaaagtcgagacctggggaaaaggtgggccgtagctccaggaccatcctaggagctaaaatgttggcctgagcaggctcacagccatcaggagatgggaccaaggccaccacctctgaacatcactcagaagatgtaaatatagcyggaatgggaggcacgtcacttggaaacttggaacctgagctcctcatgcacactgaaggccagagaagcaggggttcctgtcggtcaactctcagtggacttcc

SEQ ID NO: 150650 - DNA, 551 bp, Homo sapiens
aaatgcagtgttttgaagggctcaaaaccatgtgtggatgattgctgaaatctctcaattacttaatcatgttcccatgaataaatacaaaaaagaaacccacgaggtcagatcagtggttcattctacccggtgtacagcaccaatgctgacatgaaaggatcatttgtcacttgtgttccatgatgtcgacttcaaaagattcagtgactgcccaagcaggtcaagcttgtcctaattacaaattgtaactcaaccattcatcattttagcacaacccttttagaaggtattagtacagatctataaagattttattcacttatgcatctgttaactcaaaaacatttattgagctccttctgtgtgccatgaaatttctgaagtattggattcagaaatgagtgaattgcttctcaaaagctcaggtaaaaggacttattgtccctcaaaagctctggtaaacaaacacctgctatgtaattatagrcagattatgatggagaagagcaagaaacaccatagaatcacagtgtagggggtgtgttttc

SEQ ID NO: 150651 - DNA, 559 bp, Homo sapiens
gttaaatcagaatcctgagtcagggatcttcccttccaagcaaggtgttttcttacttcacccaacatgcctcttcatggatgcaccttyctgagttgcagccagctcctcggagggtaagatgactgtcatttctgagtccgaagatcaggccatgatgtggtttggctgtgtctccgcccacatctcatcttgaattgtaactcccataattcccacgtgttgtggaaggaaactggtgggagataactgaatcataggggcagtttcccccatactgttttagtggtagtgaaaaagtctcacaagatctgatggttttataggggaaaacctttttgcttggttctcattctctcttgcctgctgccatgtaagatgggccttttgccttccagcatgcttgtgaggcctcccagtcacgtggaactgtgagtccattaaacctctttttcattataaatcacccagtctcaggtatgtctttattggcagtgtgagaaaagactaatgcaggtcactcaggattctcatcccagagagaataaaatgaaaagca

SEQ ID NO: 150652 - DNA, 383 bp, Homo sapiens
caggaaacaattatgtcatacataaagtggagttcaggaagttttatggtaaccacgttaagtatacccacttacaatcaaaactacttatgcttggatgtggtgactcgcgcctgtaaccccagctccagggaggctgaggtgggaggattcctgaggccaggagttcaaagaccagcctaagcaatgttgcgagaccctgtctctacaaaaawtaaaaaggggaaaaaaaaatgttgggtgtaatggtgcatgcttgtagtcccagccacttgggagactgagacagaagattgcttgagcccaggggttcaaggctgcaatgattcattgtcacactactgcgctccagcagcttgggtgacagagtgaaaccctgtctc

SEQ ID NO: 150653 - DNA, 647 bp, Homo sapiens
ctttttttttaaagtaagaataaacttatttttttcacatggcagcaattggcccatgctttatagaagttggaccctttgatggctttttacttgcagttttccacaattcccactatgttcacaattcacaagggctaactttccttcctgcctgcttcagtcatgctacctgtgagtcttttgtaagaagctaagttgacattgactccaagtttcccaaagctcacgtggctattgtttttctgccrttgcatttgctcttccctctgacttgaatggctttctcttccatttccatattactgaaactaaaaattggcaggggtggggaagactaggactctggagatgtgaaaactttggagagtttatcttacttttgcagccttttataccctggataatttgtagattatatttaccaaggcaggacgctgagaatccaggtttatactagtaaaggacggctggtgggggtccaagaaaacagtagaacatttagcagacttcggtggtctcattaagcttagtatgtgttttctaatttcacctggatttttattcatatcatacaacctaacagctcacatgtcagcttaccatatggagactctcagttctgcatgcgtaagtcataaaggatc

SEQ ID NO: 150654 - DNA, 660 bp, Homo sapiens
tcaggaggctgaggcaggagaattgcttgaacctgggaggtggaggttgcagtgagctgagattgcaccactgcactccagcctgggcaacagggcaagactccatctcaaaaaaaaaagaaggctaaagataggattcgaattccttctggtttgtaaattttatactgaaaagtctactatttgtctgataggtttccctttatagcttacctgatgcttttgactcactgctcttagaattctttccttcacactgactatagatagtctgatgactatgttccttggtgatatcctttttgcaatgaatctcccaggacttctttgagcttcttgtatttggatgtctaaatctccagcaaggtcagggaagtttttctcaattattccctcaaagaagtttttcacttttttttttttttttttttttttttttttttttkgctttttcttctccttcagggacaccaatagttcttatacttgtccattttacataataccatatttctgggacgctttattcattcctattaattcttttttctttatttttgtctgatggggttaatttgaaagccttgtcttagagctctgaaattctttcttctatttggtctagaatattgttaaaactttccagctcattttgtaatt

SEQ ID NO: 150655 - DNA, 539 bp, Homo sapiens
aagaaaaattgtgtaggcacaacgctccacatatagtaaatgtacaataactaatcttcggaattttgcctcttctcagaatcttagatgaacgcaatgtttaatgttttcccagatacattctatatttatcatttaataagcatcygactagaagcgtgaaagaaacaatggcataactagtttttactgcataataatgttaaagggtacttaaaagttctgaagaacactgtcccatatatgtgaaaaatcaattttaccataaaacctgaatcatatgaagttgaaaacctgaaaaaaggactacccccacctatcaatcatttgtttaacttgccattacattgcatttgagtcagcataatctttatttcaaaataacatttttattatataaaaatgtaaaaatccagcaaaaccagaaatacgaatatatttttctgggctttcacatttgttgatttttattcgcgatctttttcaatacaatttacaccctcatccccatttccagtctgattatacaagtgctaagt

SEQ ID NO: 150656 - DNA, 602 bp, Homo sapiens
cctcaacaattctcatgcccttgtgcagtcccctccaacaatgaaaagtgttgacccatgtaaccagtaagatattgtgacaataagatattgtgacaataagatattgtgaaatgagggtgtttggctttgtcataatacaccttgcagcttttgccctgctctgtcatggatcactcaatcggcgggagccaggtcatgcagacacacagccctgtggagagatccatgtggcagggaactgaggattcttgccracagccagcaccaacttgtcggctatgcgtcagccatcttggaggctgatcttccttcagacgactgcagcctccccatgtgacctcatgagagaccctgtgccagaaccacccacctaagctgctctggctctgaccctcaaaaattgttcattgtttctgaggtgctaggttttggagtattctgttatacaccaatagaaaagtaataaagccactgtctccttgacctctttaatgttaaaatagggcaatgcctttatttcagaattacagccacagtccaagttccaagggaccgcagtcaaatttgcatagcacggggaattttccatttctgaacag

SEQ ID NO: 150657 - DNA, 583 bp, Homo sapiens
tgaactcacacagaaaagcagagagtagttcttgggctaaaacctaaggtcatttttactccacctcatcttcaccaaggtctatcagaatctttagaaatttctcatggattcttatggttattactgtagtcaagttgaatgttctaactggaagactcaaatgactggatatataagcaacagtcygaaaacagcagtcataaacagaatttagtatatatcaagttaaaaatacttcacaaaagtaacctcatctatctaatgacatataattgcttttgtgctgcatatttaggcaaaaaaatagttccataaattattagaagtattttttttagggagccaaactcaactttttcaactttttttaacaccagggaagcatttcccctagtactctatatgtattttaacacttaccacatacacattataacaatgacatttctttctctattataggttttatgatcattccagttggctgcaaactttctattctctgagctcctatatcattttgttttactgcagtgaaatttgtatagtcaaatgtacaaaccttaataagtttttataa

SEQ ID NO: 150658 - DNA, 603 bp, Homo sapiens
ataagcaacagtccgaaaacagcagtcataaacagaatttagtatatatcaagttaaaaatacttcacaaaagtaacctcatctatctaatgacatataattgcttttgtgctgcatatttaggcaaaaaaatagttccataaattattagaagtattttttttagggagccaaactcaactttttcaactttttttaacaccagggaagcatttcccctagtactctatatgtattttaacacttaccacatacacattataacaatgacatttctttctctattataggttttatgatcattccagttggctgcaaactttctattctctgagctcctatatcattttgttttactgcagtgaaatttgtatagtcaaatgtacaaaccttaataagtttttataatgtgtatacccatgtaaccatcacccccattaagttacaaatgttaacactgttccagaaaattctctccaagttaatcaccatctcccataggcaaccactgttcagatttctatcaccatagattagttttgtttttgaacttcttataaatggaattgtacagtayatattcatatatatgcctgtcttctt

SEQ ID NO: 150659 - DNA, 567 bp, Homo sapiens
ctagatcgtgtttgtggctgtgttcttcaggatattttccctcaccttgaggtaatctagcattacttcatctagcattactaaaatagcattacttcaggatggtggaggatcggcaatctaatagcaaatctttattgaactcttcttactgccttaacatgtgccggatgctgagagatgaattcaaagcctcttagggagtttatattctagaaatctttgatcagaaattcctagaagagagggaccttgtgttcagcactctgtagcagttcttaaacagtagcacgcataataacagggcttttaaaaacatttttgagcctcaaaaccgggtatcaggattcagtgagtaaggggtggaggataattcgaatttctggtaagcacacatgatgctgatggggtggtcgccatcccagcagcacagctctaaacgcggttcataactgtgtgtattttctcaatagtgttagaaaagcarttgctgaaaagtcacacctggttctacaatatttactcttaggttttggttcgatagtctaaattaaaaaaaaaaagttt

SEQ ID NO: 150660 - DNA, 610 bp, Homo sapiens
cttgtcgatgaaaccatctctgttctgatcaatcatgttgaaggcctctttgaactcctgaatctgtgactggtcaaacatagcaaacacattggatgttgcacgctgagggcgcttcttggtcttggtctttgttcttttgctcgacatggtggtggttaagtcctaattaggaaaggaaatacaataaaaaccaaatcaacatctaagattacttaagtttgaatcaaaacaatgattaacaaaagtacacagaaccaactttcctgatatgtttgagctactcagaaatgtgtctttagaagacacatctcaacaagattacatatgtcctgtactgctatatagctaacaacagctgataaccaaatctgctgatttgataacaataaaaaaccaagaagcaaaaaaaattaggtacttaggaaactcccaagttctatacttcagcagtataggggtgctgagggacactaattcatcttcagtaggtcccygctttgcagccttagcctaaactggctattccatagtacggtggacagaaaggtgaagaatagtaagaatgactaactgatggaacaggtcttcatctcctaatctctattga

SEQ ID NO: 150661 - DNA, 391 bp, Homo sapiens
gaattcaggatgagatttgggtggggacacagccaaaccatatcactggctctgatagttaactggagaaatgctgtttyaactgttaaaagacaaagattcctgatatctaagctgttttgaagtatatagcctaacatagtgatactataatagttcgttaatgaataaacgtagtgattaaattacatttactaaattaatcttatgacacaaatattatttttgaatccccgaaataaaactaatacctaaaacaaaaattatagtcgatgcttactttagccaatcttttagtttcctcatctgtaaaagggcataataatagtgcccactttattcagtggttgtgaggataaagcacaataatccatgtaaatttcttagggag

SEQ ID NO: 150662 - DNA, 391 bp, Homo sapiens
gaattcaggatgagatttgggtggggacacagccaaaccatatcactggctctgatagttaactggagaaatgctgttttaactgttaaaagacaaagattcctgatatctaagctgttttgaagtatatarcctaacatagtgatactataatagttcgttaatgaataaacgtagtgattaaattacatttactaaattaatcttatgacacaaatattatttttgaatccccgaaataaaactaatacctaaaacaaaaattatagtcgatgcttactttagccaatcttttagtttcctcatctgtaaaagggcataataatagtgcccactttattcagtggttgtgaggataaagcacaataatccatgtaaatttcttagggag

SEQ ID NO: 150663 - DNA, 426 bp, Homo sapiens
aaaacagcatggtcaacatttttaccaagataagaggaaatttactccttcatatggtatctccttaggatttacagtttatttaataactagaggttccagattcttccagatggtcctttctttatctgactaaagttttaagatcatggacatcggtctaaaataacaaaataaaatataaaataaagttttatagctggggtataagagagtttrgccatgctaatagatagataaaggataaaacaattttgaaaagagaacttaggatctggtggtagtatgtggccaacagagaccaccaacatgtaagaaccatatctatatagaatcaattatcagaggatgcattctaaaatggaaaggaaaattaaaagctagcagtaacttgagcttaatgctcaaaaaataccatacagaaaa

SEQ ID NO: 150664 - DNA, 579 bp, Homo sapiens
tttcctgcaaagtgacttgggttgaatggggatatgcactacattatgtttaccatgaggagcttgctgagaagacaggcacaggtccagagtctgaattattccaccctttgtgttgcttctccttgattacttcttgatgtagttaggtggcataacctggcaggtaacagctcaggctctaggtccaaactacctgagtttggattcaggttytaaaatttaccagttatatggtctcaagtatattatgcaacttctctgtgcttcttcaatttccctatctgcaatatatacaaataatatttacctcataggttgtttgatgatctaaggagtcaatacaggaaaagctcttggaacaatgcccagcattagtaagcactatataactataataagttagtccattctcacactgcaataaagaaccacctgagactgggtaatttatgaaaaaaaaaaaaaaagaaagaaaacaggtttaattgactcacagttccacaggcttaacaggaagcaagactggtaggactcaggaaacttacaatcatggcagaaggtgaagaagaagtaagc

SEQ ID NO: 150665 - DNA, 410 bp, Homo sapiens
ttcatattgtttaatcttcctgatgtccaacagaatttctctagtgccctatggaagcccccattttcaaaactctaaatggcttagcctatttttacttctataaaggaagatttgaggcagtttataaacaaaacagggttttgtttttgtttttgtttttgtttttgttttggctcacagttttgcagactgtactcaaagcattgcaccagcatatgcttctggtaagggccttagaaagcttccaatcatggcagaaggcaaagagggagcaggcatgtcacagtgataggtggtagaatctttttaacaacaagatttcacaggaactgttagaattcattaaatcccaggagaatggtacgaagcycttcatgagggatctgtccccgtgatccaaacacctc

SEQ ID NO: 150666 - DNA, 598 bp, Homo sapiens
ctcttctcggatctaatgttttcatgcatgccagtctaaaaatgctgactgcatcatagccctggcagccaacattaagcttgtaaaacaacagaaaagcaacagtaaaactgctatttgtgttttatggaactatgcaaaactaagaaaatagcagagtacccmaaagttggatttttaaatattcccagtggtctaatttttttacccactcattattttgtgccaattcattttggcacacttccaaagtctttttttaaaactattatgtatgtctaaatagaaatgagttgaaacactgactgacatctgcctatgcatatatattattttaatgatatatctaagtgaataccattcttttgattattctcatattgtattacttgtttatattatattgggatatacagtaatacaagatgtttcagagacattaatcaagtggctcaactaagttctatcaattcaaaattcacaaagttttgagctgtgagtaatgtctaccagtacacaggtttagctttatttagccatcatcagtgtatgacacttagctatagctaagcacttgattagcctttaaatgtttact

SEQ ID NO: 150667 - DNA, 620 bp, Homo sapiens
atgtgttatttatgagtgtaacacaatcacccataagtactttggcaggatgaaaccctaaaataatgggatctcggacaggttagttttgttcagagagattgaarcaggggatgtctagggtgtgatgaactattcagggactctgggatggaatcacagtgcactacaatctctcagaaagaagaagtcctatgaaaccatttggatgggaaaacaatgttcattgtagcagtattcacaataattaagacatggattcaacctaaatgcccattaatgacaaattgaataaagaaaatgtggtacacatacaccatggaatactatacagccatgaaaaagaacaagatcatgtcttttgcaggaatagaggatgttatcctcagcagactaatacatgaacagaaaactaaataccacatgttctcactcctaagtgggagctaaatgatgagaacttatgaacacaaagaaggaaacaagagacactgaggtctagttgaaggtggagggtgttgtagaggttattacatcacccaggtattaagcccagtacctaatagttatcaacaaacccctgtgacatgagtttacctatgtaacaaaccttcacgtgc

SEQ ID NO: 150668 - DNA, 620 bp, Homo sapiens
atgtgttatttatgagtgtaacacaatcacccataagtactttggcaggatgaaaccctaaaataatgggatctcggacaggttagttttgttcagagagattgaagcaggggatgtctagggtrtgatgaactattcagggactctgggatggaatcacagtgcactacaatctctcagaaagaagaagtcctatgaaaccatttggatgggaaaacaatgttcattgtagcagtattcacaataattaagacatggattcaacctaaatgcccattaatgacaaattgaataaagaaaatgtggtacacatacaccatggaatactatacagccatgaaaaagaacaagatcatgtcttttgcaggaatagaggatgttatcctcagcagactaatacatgaacagaaaactaaataccacatgttctcactcctaagtgggagctaaatgatgagaacttatgaacacaaagaaggaaacaagagacactgaggtctagttgaaggtggagggtgttgtagaggttattacatcacccaggtattaagcccagtacctaatagttatcaacaaacccctgtgacatgagtttacctatgtaacaaaccttcacgtgc

SEQ ID NO: 150669 - DNA, 336 bp, Homo sapiens
aaggcccttccactccactcgttggtcccattgacagccttcctcctttaaatttgaggactctcatcttcttgatcctttctgtctagacccagtttaactaractttatgagcagacattggtctcttcaagcatgaatccaaacctttctgacctggatataggtcagcagtttctttgaatttctgcttctgtttccctatgggctgagaatgccttggggattaagagagacaaatataaataatccaaaggattattattttgagatgttattctgtcacatatttatttatgcttatgtggaaagacttaaaagagtttgtggaaaatg

SEQ ID NO: 150670 - DNA, 470 bp, Homo sapiens
atttgagtaaatatgctgtaagcgtggtacaattcttggcaatggagatacaaagatgataatttttctyaaagtcaaagtcagtttgaattcctatctagtgatcatgtggaaggaagagataacattgagaagttgagagaaaaaaatgacaaacatagagatgacactgtatttatttatatactgataggacaaatattaagaaatacttatattttctatttcatattgtcgcaagtaaggtgatccgacttttgagataacagcttaatttatgttttttccaagctgtattagcttattcagaaaaaatacttcctctttttaaaagtttgagaaaacatattcaattcaatgcaaaatactgctgcttgacatatataatttttgtgtatcttgaatcagtatgcctcatagagtatatatttagatgtaatactttaatcaattttattgatggaaagata

SEQ ID NO: 150671 - DNA, 644 bp, Homo sapiens
ggaaatgggctactaggctagcatgaactttgcttcttatgtgaagtgatggggttggggtaacaggttgtggtaatagggtgaccgggagtccagacatggctgttaccagctcctcttctctacatctttctacagatttcacaaaggtagsttccaaaattatttttccctatatctttgttgttccaatcttttttatttttaatctctgccttctctacttaagagacagacagacagacatatctcgtgatagctgcaggatggttctttgggaggccttgaactgacccagttttccaacctttctcacttgtagttctcaggaataactttggaatgctctggtaatgcagcaacctgagatatgtcagaactggtcatggcagcccaggctctgctcctgtcccacttaggaacggaatgtccttcaaaccgtagtttatatcaagaggtccttgaaaatgaaacactaagacaagcttctactgatgagtaggaatggagcaagcagccaagcattctcaaaacaaaagaagcaactgcatcctgcatcccaggatgactcatctaggatctctctatctctgtctgaagtccaccattacagagcacgcttttaggtccatgactgatgaaaa

SEQ ID NO: 150672 - DNA, 519 bp, Homo sapiens
cggtgtttaaagggaaatgtccagagaccggggactctgctgggtagagcatcagcaacataacacggtgggaaccacaagcttagacatcaaagatgaggtcgaagccttgctcagtcacctcttggctgtataacttgcacagataattcacttctctgagccttgatttctccaccggtgaaatggaaagacttagcttgaatyccaatgaccactgaccagctgtgtgatcttatatatgttacttaacctctctgagtttcttcctgtctaaagcggaggctactggggtggctgttggctttatgtggtacctttgggtaaatctgaaaaaggtccccctctgggcagtggcagtcctagcccatagaactgttgtgaagattaagaaaacgctgcggtgcctgtttatatttatatttttctggctgaagaccaatttctccagcgttgagggttaattgagtgcatggctctggtctgcctgggaaagtgccagaaaagaaagaaaggcca

SEQ ID NO: 150673 - DNA, 546 bp, Homo sapiens
tgttgtcccctacctgaagagggaataaaccctgaagtctgggcattggaaggacaatttggaaaagcaaaaaatgcccacccagtccaaatcaggctaaaagaccccaccacttttccttatcaaaggcaatatcccttaaggcctgaagctcataaaggattaaaggatattgttaaatatttaaaagctcaagccttagtaaagaaatgcagcagtccctgcaacagcccaattctaggagtacaaaaaccaaacagtcagtggagactagyccaagatcttagactcatcaatgaggcagtaattcctctatatccagttgtacccaacccctatatcctgctctctcaaataccagaggaagcagaatggttcactgttctggacctcaaggatgccttcttctgtattcccccgcactctgactcccagtttctttttgcctttgaggatcccacagaccacatgtcccaacttatgtggacagtcttgccccaagggtttaaggatagccctcatctgtttggtcaggcactggcccaa

SEQ ID NO: 150674 - DNA, 564 bp, Homo sapiens
gaggttaataacttatccataatcacccatctattaagtgatacaaatactagtttgctttttcctgcatcctactatgcctttaatatgttaatttttttttttwaaatccttaaaaatagtaatcacccggctgagcgcggtggctcatgcctgtaatcccagcacgttgggaggccaaggtgggcagattacgaggtcaggagttcgagaccagcctggtcagtatggtgacacccctctctactaaaaatacaaaaaaaaaattagcggggcgtggtagcatgcacttgtagtcccagctgcttgggaggttgaggcagaagaattgcttgaacccaggaggtggaggttgcagtgagccaagatcgtgccactccagcctgggcaacagagtgagactccgtctcaaaaaaaaaaaaaaaaatagtaattacccatgtgattcatatggtactaagcaacattttcatttatcaaaaaattgttactacttggcagtggaattaatagattaactctttttgaactttgagtgagatgttaatatttttaaaaagatct

SEQ ID NO: 150675 - DNA, 453 bp, Homo sapiens
tggttacctgaggatgtgaagggtggtgggggtggagggaatggggatggctgatgggtacaaacaaacagaaagaatgaataaaacctaatatttgctagcacaacacggtgactgtagttatagtaaaaaataatttgatggtacattttaaaatagctaaaagagtataattcrattgtttgaaacacaaaggataaatgcttgaggggatgaacaccccatttactctgatgcaattattactcagtgcctgtctgtatcaaaatatctcatgtaccccataaatatactaatctactatatacccataaaatttttaaattaagaattttaaaaaagaaaaaaaaataaatacattcttatcattataaccttggggtaaacaggcaaagatttcttaaagaggatacaaaaagcactaagcataaaaaagataagaaattggaattc

SEQ ID NO: 150676 - DNA, 430 bp, Homo sapiens
gaattcatcactcatctacctgaaagtcttccttcttttcttgtgacagagacttaatgattgacactaccaaccacctagctgctcaggctaaaatcctgagtgtcacccttgactcatccttctttctttcccactgtttgtacttatggtgttcatttctcccatctctgctgctatccttccctacaatgtccacccttttctgttttttgggaaagctgtaacagactctttacctatattcctatataatctgagatattctgactaatcttactaaaattcagatctcatcaagttwctttcctgatttatacccttttgtggcaccttgttttttggacaaaagttcaaaatctaacctaggaaaaaggtccttctttatctaatcagggcacattttcccacttctactctctgttccagc

SEQ ID NO: 150677 - DNA, 595 bp, Homo sapiens
actttctctattcttacgcttgggctgctgggtgctgctagagatgtccttttaagtggcatgtggatggcactatgaattaatgatttctagccttgctcaacaacccgtaggaaatttttcttctattttttttcwctcttgcttagaaacctgttattctaggcagccctctcttttattctccgtaggaactatttaaaatctgctttgttattctgaagacctctgtccttctacctctccctttacttttaatgcatgattccattttctgtttcacaaagaaaattaaatttatatggtgcaaactttctcaattaccagccagcctccttaaaaatgtatctgtatctgaattcattcttgccctcttcccttctgtatctggttcttagtctttactaactcttttccatcagcatttaaacatgcatgtggaagacagtactgattggctatgtagaaactattcccagcccctgtctctttactgcttaaaagtaggtctagaaagtcaaaagataatctagttgctcttagagctgagtgtggccatgtgaaccagttctaaccaatgagacacaaggaacag

SEQ ID NO: 150678 - DNA, 595 bp, Homo sapiens
actttctctattcttacgcttgggctgctgggtgctgctagagatgtccttttaagtggcatgtggatggcactatgaattaatgatttctagccttgctcaacaacccgtaggaaatttttcttctattttttttctctcttgcttagaaacctgttattctaggcagccctctcttttattctccgtaggaactatttaaaatctgctttgttattctgaagacctctgtccttctacctctccctttacttttaatgcatgattccatttyctgtttcacaaagaaaattaaatttatatggtgcaaactttctcaattaccagccagcctccttaaaaatgtatctgtatctgaattcattcttgccctcttcccttctgtatctggttcttagtctttactaactcttttccatcagcatttaaacatgcatgtggaagacagtactgattggctatgtagaaactattcccagcccctgtctctttactgcttaaaagtaggtctagaaagtcaaaagataatctagttgctcttagagctgagtgtggccatgtgaaccagttctaaccaatgagacacaaggaacag

SEQ ID NO: 150679 - DNA, 595 bp, Homo sapiens
actttctctattcttacgcttgggctgctgggtgctgctagagatgtccttttaagtggcatgtggatggcactatgaattaatgatttctagccttgctcaacaacccgtaggaaatttttcttctattttttttctctcttgcttagaaacctgttattctaggcagccctctcttttattctccgtaggaactatttaaaatctgctttgttattctgaagacctctgtccttctacctctccctttacttttaatgcatgattccattttctgtttcacaaagaaaattaaatttatatggtgcaaactttctcaattaccagccagcctccttaaaaatgtatctgtatctgaattcattcttgccctcttcccttctgtatctggttcttagtctttactaactcttttccatcagcatttaaacatgcatgtggaagacagtactgattggctatgtagaaactattcccagcccctgtctctttactgcttaaaagtaggtctagaaagtcaaaagataatctagttgctcttagagctgagtgtggccaygtgaaccagttctaaccaatgagacacaaggaacag

SEQ ID NO: 150680 - DNA, 596 bp, Homo sapiens
aatacacctaaactgtttgaagatgggaaatttatacatgaaatgagctagcaggcttcctttggtatggggacactgttattctaaaattaaaaaaaaaaaattgaatggaagtggactgcttcaagatggtaacacttgtagctgcaatttttagcccagtagagaatgaaatggaaaggcagctacatgctgactgcacaagcaggtgcaccccaagccasgaggggtatcttcaccactttccccacggccatgaccttctgataactgaaatgggaaaacacttgggagagaaaaacaccaacaacacttggcttctcttcagcacagcggccaggacgaagcgggaggccactgatcgaagggcccccagtggaccggagctccctgtgcggcctgcgcccggccctcccctgcacttggcagcctgctccccgaggcccagcccacggtaccctctgtgggcgcctggctggtggccagtgtgactctcgctgggagggcatgctcagagctcacgggagccttgtcctcatggttttgaaggtttcagatgaagctcagggaacacggtcccccaccgaagctggacc

SEQ ID NO: 150681 - DNA, 599 bp, Homo sapiens
atatatatatataatatatatgtttatatataaatgattaatatcatataaaacatataaacattatatatatatatttacatatatatatatatatttcacagaacttcagacttcctagctagattgacagctgagttatttgcccatctctagtgactgacaacaggtaatggaaaggctttttaccgtgatataacggcacagaatatttcctaatttactgctatagttctcatcaaaagtaccctggcaaaaaaataacactagatttatcacttcaattactggaatttcacatttagttttaggagacatgtttctgtaatgtgacaggctttacagattctgracttcttctgacattgcagttatcaggtaatcagagagagatataaatgcaagcaattgttacagttttataacttttaatggtatctactggcaagaaataaaacagaccataaactgatggtcttggttagatgacaaaaaaagccttttttgtcagcttaaaaaaatgttcaactgtctgaaaatggacaggaactacctttaaaccatcataatgttataattacaaatgggttttttgaggt

SEQ ID NO: 150682 - DNA, 575 bp, Homo sapiens
tattctaagtgaagtaactcaggaatggaaaaccaaacatcatgttctcactcatatttgggagctaagctatgagaacacaaggcataagattgatataatggattttggggactcggggaaagggtgttggggggtgagggacaaaagactacacattgggtacagtgcacactgcttgggtgatgggtgcaccaaaatctcagaaatcaccactaaagtacttatkcatgtaaccaaacaccacctgtttcccaaaacactattgaaataaataataataaaataaaaataataatgtactttaaaaaggaactaaacgtttctacctcacttattttatctttttagcatttcctatcttttacagtgctcttgcttttcgtcttttttgtatcttttctctaaatatatacaaaattaaacggaaatttaaatttcttttgccttgcaagtgaatttctttaatgttttggaactataactttagtttaacaaaaccaccaatccagggtactgagatagtattgttggaggatacaaagataggtaaggtttgtctttgtgctcagtat

SEQ ID NO: 150683 - DNA, 570 bp, Homo sapiens
agatactaaattgtcattggaaataaagcccaaaatagtaggctagattccacatactaaacctaatcaaggcaactgtstgcaaaaatagaagactttagtactagaagattcccaacacaataactcacatttctgggattccagagaaacttacccttaataccaaaaaccaggaaaattccaatttgaataagaaaagacaaccaagtaatgccaataataagatgaatcagaagttaaaatttcctgacaaagattttaactgtcataaacatgcttcaaacatcaattaaaaatcaccttgaaataataaaattattaagtctcagaggttgattataaaaaagttataaagaatatgtcatacaaaaaacaagattaaaaattacatgatcatgtaatatgacaaaattcaatacacacatgattatagtgtatacatatatgtgtgtgagtatatatatgatatatatgatatatcatatgggatatattattatatgtactcacatgagaaaactaagcatagagaagaacttcctccacttgataaagaatagctgcaaa

SEQ ID NO: 150684 - DNA, 462 bp, Homo sapiens
atttagaatatcaaagctacttgtctaagataacaaaattaggaatcagcaaaagcaggagtaaagtttatgtcttcttgagtaccaggctaagtgttctccctcatataaatccatctcaggtgtgagtaattgrtctggtgactcgctttcttctttatccactgagaactcaggtatgcttctctcataggagaaagtactcagtgtagtcacctacccacgaatagggttgttttgtttatttatttttttctttgtcaaggatatttttctcatattgaaacttcgtaaatacatttattaattgacttgtgtaaattgaaggtgatcaggacagttgaacatcttgaggaaaaacacccatgatagttgtaatttgaaatggggaccagatgagtcctgtacttccactcagaatcaaaaacaaccattttttcactaagtgatcaggtgcgtttc

SEQ ID NO: 150685 - DNA, 618 bp, Homo sapiens
atttaatttttaaaatttctagtgagaatctttggtttcatgcatgttatagatttggagagatccctamgtactacgtactgcattcactttcatttgaatatactatattggcttaaatagaaaaaggacaaaaaaaaaggtatttgtctcagctaatacaatgatgaatttactggtattcctttctgtccatttgttcagattccaatataattggacagcataattcacagggtttcaggttaaatgtttacaacacatttggatgacaaatctggatgggtatagggaagaccgtcaggcctgaacatggaaacgtatatggcacattgaaatgggcagtgattttgatgcatgtccacagttcactccagcagccagtagttctaggcaactgtgtacactcatacatttccattaagccaaatgttattcctggaacttcaaaattagagcacttcactctctggaaagatatccaaaaatgtatctgattaaaaacagctgcagctgcacccattgagccagaaagctgaactggactcagggcagcctcttgtcacaactcctgctgtggttattcatgagttagaaacacagtcattttagagacat

SEQ ID NO: 150686 - DNA, 651 bp, Homo sapiens
tattttagtgtcatccttatgtgtaagtttaacaataaccttatgttttcaattgtccctcttgcataacccttcaaagatttcttaatacagttggataataaactcttacactatttttcttttctctaagtaataattcagataaagataggttgcttaacaaccttctcactctccacctgttatcaaattccactgccacatatttgaggtttttattacagtaacatgtcctttttctgactaacatatattattgggtaaaatactgcataacaaactatacaaactcagttacttaaaggaacaataacttattmtatgtcacacagttgtataatggctggagtaactaccgatacaggctaggtttggttgggagactctgcttctagctgcatatttagctataagtttcattcggatctgctcaggatgtgtttattgtaggtttcagattgaagggtaatgactatctgagaaacagttactttctcatggatatagcagagttgcaaaagacaagccaaatagcacaagcacattttaagtctctgctcacctcatatctgttaatgctccattgactacaaaacatgcatgatcaacctaactgttaaaataacctttccaaagaggaggagaggg

SEQ ID NO: 150687 - DNA, 651 bp, Homo sapiens
tattttagtgtcatccttatgtgtaagtttaacaataaccttatgttttcaattgtccctcttgcataacccttcaaagatttcttaatacagttggataataaactcttacactatttttcttttctctaagtaataattcagataaagataggttgcttaacaaccttctcactctccacctgttatcaaattccactgccacatatttgaggtttttattacagtaacatgtcctttttctgactaacatatattattgggtaaaatactgcataacaaactatacaaactcagttacttaaaggaacaataacttattctatgtcacacagttgtataatggctggagtaactaccgatacaggctaggtttggttgggagactctgcttctagctgcatatttagctataagtttcattcrgatctgctcaggatgtgtttattgtaggtttcagattgaagggtaatgactatctgagaaacagttactttctcatggatatagcagagttgcaaaagacaagccaaatagcacaagcacattttaagtctctgctcacctcatatctgttaatgctccattgactacaaaacatgcatgatcaacctaactgttaaaataacctttccaaagaggaggagaggg

SEQ ID NO: 150688 - DNA, 394 bp, Homo sapiens
cttaaagattttgccaaaaggctcctagaacttataacaaactttaataaagttttaggatacataatcaatgtacaaacatcagtaatatytttatacaccaataatattcaagctgaaagccaaatcaacaacacaatgccatttatacatcatccacaaaaaataaaatacctgggaacacatctaaccaagaaagtgaaagatctctataataactacaaaacaatgctgaaagaaatcatatatgatataaacaaataaaaaaaattccatacttatgggatagaataatcaatattgttaaaatggccatactgtccaaagtaatctacagataatatgcaattcccatcaaactaccaatgtaatttttcacagaattggaaaaaaa

SEQ ID NO: 150689 - DNA, 624 bp, Homo sapiens
ccctggtaatgattcagaaactacactctgttcttcagcttttaccttctaaaccatagctcacacaatgcttttgtttcacatggcatttcctatatttgccttcctttgatccccttctgtatttgcattattgtgtcatatataatgtacattgggtgactcagaacaggttattcagtttgtaaaaggaattggggaatttatgttattaaaagccattcatgtctagtgttccattattggaacgctaagcatgtgggagttatttatatcctactgctcaaggtcattgccaaggtctgatttttcaaattcaaatgtcaggcataaatgggttaataaaaagtgagtgccacaaacatatggaaatgcccctctccttaaagccaacttttctaatattaaactcctctcacacttgctcagccattcargttaccttgaggaatgggctgtagacattccctaatgtatggatatacatcactttaagagagcatgcacttatcagtaacttgcagccctacgcaccactgctactactgtggtttgtggtgctatttatccacacacaagtccattaaacttgatgactgggataagaaaaaagtaaaactgtat

SEQ ID NO: 150690 - DNA, 468 bp, Homo sapiens
caggagatctgatgagtttctaaaggggagtttccctgaacagcctctcctctgtttgcctgccaccatccatataagayatggcttgcttctccttgccttccaccataattgtgaggcctccccagctacatgaactgtaagtccatatcatatagccaaaatatccactgttcaataaaaaaattatttaaaacaagaatctcaacaatatctttgggatctatattatggagagttcatatgcttgacacaaaaacacgatccataaaacaaaaaattgataaattgaacttcatcaaaatttaaaacttttgttctctgaaaaaccctattaagagtggatgagaagacaagctaaagtctgacagaaaatatttgcaagccacatatttcagtgaatactgctatataaaataccgaacactgaaaactcaactgtaaagatccaaaccatccaaaccatcc

SEQ ID NO: 150691 - DNA, 603 bp, Homo sapiens
aatgcttataagtctagattaaccattgttaagcacaaaagataattattaatagtgaattgataacaagcaatataaacccagatactcttaatgaaaagagattcaaaaaccttctgtgtcttcaaaaagaggtaccatctcaagatacactgttaggataactgtggagagaactgcattgcttttcagatacaattaaattagcctccagtataaacactcttcatatttgctcattttaagcttaggtaatcatttggaagtttctttaaaaataatgaatcaaatttacatagtagttttaacttgttaataaaattacaagttttatcctgtcttgtttgcaaacttattaccagagatgtggttttatttgattaaaaaaaataacttccaaaattcagtgcaaytaccctatcagataaacttttatttcacttatgaaagaaatatgttctgggcatttccatgtacaaaatctggtcccaagattataatatataatacatgaaaatactcatcttcttatttactcatgcaaaagggtgtgtagccagtgtacctaaaacaacatgcagatcataaaggaatttgataata

SEQ ID NO: 150692 - DNA, 545 bp, Homo sapiens
ggttgtccatgagggccccactcctgcagcaaacttcttcctgagcatccaggcatttccatacatcctctgaaatctaggcagaggtttccaaacctcaattcttcacttctgtgcacctgcaagctcaacaccatgtgaaagctgccaaaacgtggggcttccaccctctgaagaaacagcccaagctgtacattggccctttttagtcatggctagagcagctgggatgcagggaacaaagtctcyacactctacacagcagagggatcctgggcccaggccacaaaaccattttttccccctaaacctccaggtgtgtgatgggagtggcggccacaaaggcctctggcataccctgaagacattttcttcattgtctttgtaattaacttttgactcctcattacttatgcagatttctgtagctggcttgaatttctactcagaaagtgggatttttcttttctattgcattgtcaggctgcaaattttccaaacttgtatgctctgtttctcttttaaaactaaatgcttttaacagc

SEQ ID NO: 150693 - DNA, 545 bp, Homo sapiens
ggttgtccatgagggccccactcctgcagcaaacttcttcctgagcatccaggcatttccatacatcctctgaaatctaggcagaggtttccaaacctcaattcttcacttctgtgcacctgcaagctcaacaccatgtgaaagctgccaaaacgtggggcttccaccctctgaagaaacagcccaagctgtacattggccctttttagtcatggctagagcagctgggatgcagggaacaaagtctctacactctacacagcagagggatcctgggcccaggccacaaaaccattttttccccctaaacctccaggtstgtgatgggagtggcggccacaaaggcctctggcataccctgaagacattttcttcattgtctttgtaattaacttttgactcctcattacttatgcagatttctgtagctggcttgaatttctactcagaaagtgggatttttcttttctattgcattgtcaggctgcaaattttccaaacttgtatgctctgtttctcttttaaaactaaatgcttttaacagc

SEQ ID NO: 150694 - DNA, 545 bp, Homo sapiens
ggttgtccatgagggccccactcctgcagcaaacttcttcctgagcatccaggcatttccatacatcctctgaaatctaggcagaggtttccaaacctcaattcttcacttctgtgcacctgcaagctcaacaccatgtgaaagctgccaaaacgtggggcttccaccctctgaagaaacagcccaagctgtacattggccctttttagtcatggctagagcagctgggatgcagggaacaaagtctctacactctacacagcagagggatcctgggcccaggccacaaaaccattttttccccctaaacctccaggtgtgtgatgggagtggcggccacaaaggcctctggcataccctgaagacattttcttcattgtctttgtaattaacttttgactcctcattacttatgcaratttctgtagctggcttgaatttctactcagaaagtgggatttttcttttctattgcattgtcaggctgcaaattttccaaacttgtatgctctgtttctcttttaaaactaaatgcttttaacagc

SEQ ID NO: 150695 - DNA, 602 bp, Homo sapiens
caaaatgccaccagtctctttgctaaaacagaaaaagagttaacctttgcaccagttcccaacaagttcctcatctcgatctgagaccaacttagactggattttattgttcatatcattatcagcattttggtcaaagccattcaacaagtctctagggacttctaaacttttctacattttcctgtcatcttcttctgagtcctcctaactsttccaacctctgcttgttacgcagttccaaagtcacttccacattttggggtatcttttcagcagtgccacactctactgtattagtccattttcatgctgctgataaagacataccacaaactgggcaatttacacaagaaagagatttattggactcacagtttcgagtggccggggagacctcacaatcatagtggaagatggaaggcatgtctcacatggtggcagacaagagaagagagcttgtgcagggaaactttcctttttaaaatcatcagatctcatgagactcattgactaacacaagaacagtgcaggaaagacctgccaacataatcaaatcaccctccaccaggttcctcccatgacactgggaattgtgggag

SEQ ID NO: 150696 - DNA, 385 bp, Homo sapiens
aagcagctgactcacagttctttggctgtcccagggtgcctgcagtggcaactcaccrccttcaaagtgtctttggattctctcggctttcctgatatgttcctgtggtagtttttggagataaagttcatgatgtcggtctccatgccctgctctatccctccaagttggagctgaaagacagtcctgtcccctatcttgcattttttcccttttatatatagaaaatttaaccaagaaatggtttaggatgttggcttatgtacaaatgtagtttttgtccagcagagcccaaaaccataactttgaaggttatctgttgtaccagaaagaaattatttgcatctctacttgacaaaaattagcaagtatatatttatttttg

SEQ ID NO: 150697 - DNA, 598 bp, Homo sapiens
agtaattctagaaaacctcaatactgtttttcctaacagctgcattattttgcattcctaccaacattgcacaagggttacaatggctcacattcctatcaacagttgttattttctgggctttttagagaatygtcattctaacagatgtgaggcaatatttcattttttgacttacatttccataatgattcatgacagttggacttttttttatacctgtgggttattttaatgtcttttggggggaaatatctatccaagtcctttaccctttatttatttatttatgtatttaatttactactaacctataggaattttttgtatattttgcatattaacttcttatcagatatataatatggcatgtccttttgcttcacttccttcatttgtatagaaggggtagtgttattacttactgcatggtgttattgaaggtttgaattgattaatattcacaatatgcttagaaatgtgtttgctcaaccatcaatagtacacaacattaacaggataaagaacaaaaatcacatagagaaaaagcatttaacacaatttaacagcttttcatgataaaaaacacaaattaatg

SEQ ID NO: 150698 - DNA, 509 bp, Homo sapiens
gcactgctggtcaccaagtgactaacaaaccagagccgtagggtgcactcctatcagtactttatagattccagaagggcataaattgtgtccattttcttactgctgcagagctagggcctatctcagtgcctggcacaygataggtcctaatgtttgttgagtcattagtgggtccatagcatttcaaaggaaaacactctgaagagtgatctaagatagagtgacagttgtgatatgggtgtttatagatactacctctgaggtgggaagatggaagaaagacaccttagttttgctggattttattttttatttatgatgctatcatcactgtgttgggctgtgacacagaacagaggctgacattggggaaacctggggctaagcagatgagtctgaggtagaagtggaaaaatgaaaagaaatggcaagattttagaaacatccaaaccccccccaagcagccaatgattctcccttagcaatgtgacctccctctagtcttc

SEQ ID NO: 150699 - DNA, 621 bp, Homo sapiens
ggctttcccacctaccaactgcatgaccttaaataatatacataactctcaactggaaagtttccctgactgtaaaataaaaatagtaatagtttctaattcatagagttgttataaggatttgatattacagactctaaagcaactccatcttagatgttawtctgtcatattgacttctgattaaccccagtatggtgattgcttctaaggtttctactttcatgtatttaccataaattttgcccttagttcaaaacaatcatattattgttgttaaaagaaaaactttagactaattaaacttaacagtttaattaagcaaagcacgatttgcaaatcaggcacctcctgaactagaatagtttcagagaagctctggtgtagctgcctggtcaaagatatatggacagaaaatggaaagtgacatacagaaaacagaagtgaagtacagaaacagccagattggttacagttcagcatttgccttatttgaacagctggtcgcctttgatggaccaaaactcagtgattggcacaggaataggttatagcctgttaacacatccagttaggctacagttcaccgtgtaggaagagaacttgaggttcaacttaata

SEQ ID NO: 150700 - DNA, 589 bp, Homo sapiens
tatggaaattagcattttagaataatatctaggtatatttagtgaaagttgaatacttttcattatgtcttgctgtaaagaggtaaattacagttattagtgtcagcaccatgccacatctttataatctacttccattctaatgccaaatgtaaggaagacagctcaagaatccatggacccacaagccacattcagcttcaaacacgtcagaccatagggactcattcagaaatcataagcaatgctgagtcaagaaatgaaagtaaagaactactttatatgacatttaaccagaacaarggaaaagtcttgaagctacccacataaaatatctgagacagaatttcaacctatggtggacttctgaagacttttgtaaatttgtatatagatctacaaggattgtctttggtcagtgtgtgtcttctattaaactctattgatctcattacaataaaaaaagaaaggaaaaagtccaaatcccacattgttaagggacagaaaattcttccagaacagtgctttttgtgttaaaaatatatctattataaataagcattcctttgaatttgtattttgcagtaag

SEQ ID NO: 150701 - DNA, 520 bp, Homo sapiens
gctgaactgctctccaggacagctctacttagcaacaagctagaccctatggtctattcctgggactttgctaaagcaatagaataaatattggcccctactacaaattccaaaacctaatatccaattaacayatattagtcatcttccgatacatttggcctcttatttacagacagtaaagaaattatcaattatcaatcaattttaaatatctaaagtattagaattgacaatatgaacatagtccaaaatgctatactattctccaagcaagaagccaagtttattttcatcggtggtatgttcataaatgctgacagctgtatacgtagtctgtggcagactgtctttcccagagatggctgcaacagtatctcctgtcccaaatgcttttctaaaaccttgccactccgcatcaaaacacagaatctaattttcctgcctttgaatcttggagaatttatgagttacttgcaaccaacaaaatgtggtgaaagtgatgctgcatgatttccga

SEQ ID NO: 150702 - DNA, 520 bp, Homo sapiens
gctgaactgctctccaggacagctctacttagcaacaagctagaccctatggtctattcctgggactttgctaaagcaatagaataaatattggcccctactacaaattccaaaacctaatatccaattaacacatattagtcatcttccgatacatttggcctcttatttacagacagtaaagaaattatcaattatcaatcaattttaaatatctaaagtattagaattgacaatatgaacatagtccaaaatgctatactattctccaagcaagaagccaagtttattttcatcggtggtatgttcayaaatgctgacagctgtatacgtagtctgtggcagactgtctttcccagagatggctgcaacagtatctcctgtcccaaatgcttttctaaaaccttgccactccgcatcaaaacacagaatctaattttcctgcctttgaatcttggagaatttatgagttacttgcaaccaacaaaatgtggtgaaagtgatgctgcatgatttccga

SEQ ID NO: 150703 - DNA, 520 bp, Homo sapiens
gctgaactgctctccaggacagctctacttagcaacaagctagaccctatggtctattcctgggactttgctaaagcaatagaataaatattggcccctactacaaattccaaaacctaatatccaattaacacatattagtcatcttccgatacatttggcctcttatttacagacagtaaagaaattatcaattatcaatcaattttaaatatctaaagtattagaattgacaatatgaacatagtccaaaatgctatactattctccaagcaagaagccaagtttattttcatcggtggtatgttcataaatgctgacagctgtatacgtagtctgtggcagactgtctttcccagagatggctgcaacagtatctcctgtcccaaatgcttttctaaaaccttgccactccrcatcaaaacacagaatctaattttcctgcctttgaatcttggagaatttatgagttacttgcaaccaacaaaatgtggtgaaagtgatgctgcatgatttccga

SEQ ID NO: 150704 - DNA, 490 bp, Homo sapiens
agtctaggcatttaagctccacattatgatgatttttatgacagagctgcccaacaggcaggcagaaactttaataggtctatatcctagtctgatgactcatcctatacaatcctgctctcgtcccgtttctttcacaggygttagacccaaaccttttgcactcctaactccattttagagtatacttccaggaaaaccaaacagatacaccaaataatggcataactaacaaacagaatattccacacatgtatatattggcttaatttgtgtcaggcattcaccacttactgaacccatcactggaaaaaggcaataccgtgacagtgagtccatgacaataaaggaaaaacataactgacttcccacaaaagcagagtttgagtctagaaaatatgccttggatgcctatctcaatggattgcctggggtctagtgctaatatccaaactatgtggaatattgtatataccatgtcctgccagat

SEQ ID NO: 150705 - DNA, 585 bp, Homo sapiens
aacttatagtgaaaagaaaagctggattatagatgagagtgtgggatagttcatcagcatgtgagtagatgctagataaactggaaccattgcctcttctctgtcttcataagcataatactcttcagtaaatgagtctgccattctggtctttagtttttatatctataaaataatgatactgtactacataagtttaagttcttttttatctgggatggatgactgagataactttttgctaaatgattgtgctttagacttttttccttttctgctttttcttttatagtcttgtgatgatggggataatgggcctcatgtgatctcattctgggaaagggtactaggtgggaccaagtccacctgcactcccctgtctcctattcatggtatttgagaacttctattgctcctggataccaggtattggctattgagatgatgcaattttgtctcaggttcatctttttagagactrtcctccactaatgcaccctaagtgttcctatatcatgttagatgttggatgatgttttttttttccctgaaaatctcaagttcttttgagtctatgtcctgaaa

SEQ ID NO: 150706 - DNA, 617 bp, Homo sapiens
attttgtctcaggttcatctttttagagactatcctccactaatgcaccctaagtgttcctatatcatgttagatgttggatgatgttttttttttccctgaaaatctcaagttcttttgagtctatgtcctgaaaagccatctgctagtcctaatgcttctattacctttattccactttcttgtggggggtttcacttagaaagaagggaaatgaagacttcatgtttgacttcctcctctgtttcttttcctcttgcctatgctcttgagcctgaggtagtttattatattcttttctcctcttttagcatggcaaaagwccttgatctagttttctaagtctgaattctaatattgtaatggaaacaagaaaagccttatattcaagattattgtcttgctatatggatccagaattattggcagacatcaaaatgtagactgccttttttaattttatttatcttgtagcaatcttgatctttttagaggcaaatgctatgcctggcagaaaggtgaggtcagacacagagaaatgcaaaaggattgcatttagatatatttccaaacaacatccttgttatccttgttacataatgtcatatcatatttct

SEQ ID NO: 150707 - DNA, 354 bp, Homo sapiens
aaaagaccttgatctagttttctaagtctgaattctaatattgtaatggaaacaagaaaagccttatattcaagattattgtcttgctatatggatccagaattattggcagacatcaaaatgtagactgcctttttwaattttatttatcttgtagcaatcttgatctttttagaggcaaatgctatgcctggcagaaaggtgaggtcagacacagagaaatgcaaaaggattgcatttagatatatttccaaacaacatccttgttatccttgttacataatgtcatatcatatttctcatgttattttgttttctgcttcttttccatctgacatgtccaaatagtgttta

SEQ ID NO: 150708 - DNA, 634 bp, Homo sapiens
ataatttaacccacaacagatgttatgcagatgttggtctacttgatgcctgcacctggagttagggattgttattggtatgaatcaaagtctcttcctaatttctttatttagaagacatatatgctgtactctttcaaaatatacagtgtaaggttytgagtctgaaacagtgtttcgtagtcaagcccaatcagggctcagctattagaaatgccactttatattttgtccattttactcccagtgctgttactaatgtttctcctctttgacatcctctgaccactttaacaagaaattgagaagactcccaatgggcactgtgagtggaccttacgttaatgtggacttcctttttttatgcttccagtttttgtatgcattaccccatcttcctggaaagacatacctgcttacctgtctgttaggcttagtacttcagagttctcttttgtgaaattttcttagaccaaatagcgctgactgtcagccgtgtgcacaagttcagctattctgactgattttttgggggttgggggacagggactcattctgttgcccaagctggagtgcagtgctgcaatctcggctcactatagcctctgcctcctggtctcaagtgatcctccca

SEQ ID NO: 150709 - DNA, 609 bp, Homo sapiens
taattatatttttattatgcaggaatgttaaattttattctcacatatattgaattttttctggaggaaattgaaatagcatattaagaattcagcaattcttttatgtactgtaggtttactatatttaggctttctgtaaacacaattttgtaaattgaaaagaaactgggttataaggctactatacagggttacttatgttcaaggacagtaagaaataagttgtaaatatattgtttacagattggttttattttggtttatttgatgtaggaaatgatacagatgygatacatgttgagatttaaaaggatacaaatcttgtgatattttaagggtttattacagattatattttctattatttatcacatacctactataataacaactgaaagtacagcatcataacttgcaggttgattaataagttagtgaccatgcatttaaatgagagttagaaatagtttaaggctagtgatgaaaagtacatgtaaatctcacagtgccgaaattaggttctatgtctgatatataccatacaatgctttacaaaaacatattcataacatcagcacagtatgctcccaatgagtatttaaactg

SEQ ID NO: 150710 - DNA, 609 bp, Homo sapiens
taattatatttttattatgcaggaatgttaaattttattctcacatatattgaattttttctggaggaaattgaaatagcatattaagaattcagcaattcttttatgtactgtaggtttactatatttaggctttctgtaaacacaattttgtaaattgaaaagaaactgggttataaggctactatacagggttacttatgttcaaggacagtaagaaataagttgtaaatatattgtttacagattggttttattttggtttatttgatgtaggaaatgatacagatgtgatacatgttgagatttaaaaggatacaaatcttgtgatattttaagrgtttattacagattatattttctattatttatcacatacctactataataacaactgaaagtacagcatcataacttgcaggttgattaataagttagtgaccatgcatttaaatgagagttagaaatagtttaaggctagtgatgaaaagtacatgtaaatctcacagtgccgaaattaggttctatgtctgatatataccatacaatgctttacaaaaacatattcataacatcagcacagtatgctcccaatgagtatttaaactg

SEQ ID NO: 150711 - DNA, 636 bp, Homo sapiens
ttagtttttaagaattagtaaaagtatctcatttttttcagaaattaataagaaaattataggctgggttcaatgggtcatgcctgtaatcccagcactttgggaggccgaggcgtgcagatcacttgaggccaggaatttgagaccagcctgggcaacatcgcgaaaccccatttttactaaaaatacaaaaattagctgggcatgtgacgggcacctgtagtcctagctactcaggaggctgaggtgggaggatcacctaacccccgagaggttgaggcagcagggagccgtggtcacaccactacactccakcctgggtggcaaagtaagaccctgtctcaaaaaataaaaaataagaaaattgtagtattggccaatgttcaatagatactaataatgttattttaaataatgccattaattttttataaggttaggtttacattagcaggaggattcaatctaatttgttggatcttaagcatgatttagaaatcagtcataggtgattgggtgtgagtcaaccaagtgtgaagcaggtttgtaagtgataaagagaaaggaagagttgttcccatttctctcccttggaaaaaaatctgctttaaatccattcaagatgtaaagataatt

SEQ ID NO: 150712 - DNA, 596 bp, Homo sapiens
tggaatccatagactttagctggtcaaaagggaaaacaaacacttcaattttcaagcaagggtccattgtcattaaaagtgattgtgcctgaatttatgtcaacgtgtgaggaaagtgcagaaagtaagtgaaaagaagagaacatggttgagggcgtgatgcctggtacaatgacagtggcaccaattttgatctctaattagtctgtcaaaytgcctgaagtaccctctgttaatattgttcctataggaaaacatatttctaaatttatgacccatgtgatgaacctttaagaaagtcctctcattaggtaattttggaaaatgctgaattttatatctccctcctgtaattttatgatgtaattgtatgatgcacattagaatattagtctctgagaaatcttgctgtaaagaaatctgtttaactttgtttaatccagcattttctcagattggtggaccattaagccttctatattttagtgtatgttttcatgtaatactcattgcatctagtggtactagctttcaatgaagcacactgtaaaatgctgctttagaagaaaacatggtttcctaagtgggcagcccaa

SEQ ID NO: 150713 - DNA, 596 bp, Homo sapiens
tggaatccatagactttagctggtcaaaagggaaaacaaacacttcaattttcaagcaagggtccattgtcattaaaagtgattgtgcctgaatttatgtcaacgtgtgaggaaagtgcagaaagtaagtgaaaagaagagaacatggttgagggcgtgatgcctggtacaatgacagtggcaccaattttgatctctaattagtctgtcaaattgcctgaagtaccctctgttaatattgttcctataggaaaacatatttctaaatttatgacccatgtgatgaacctttaagaaagtcctctcattaggtaattttggaaaatgctgaattttatatctccctcctgtaattttatgatgtaattktatgatgcacattagaatattagtctctgagaaatcttgctgtaaagaaatctgtttaactttgtttaatccagcattttctcagattggtggaccattaagccttctatattttagtgtatgttttcatgtaatactcattgcatctagtggtactagctttcaatgaagcacactgtaaaatgctgctttagaagaaaacatggtttcctaagtgggcagcccaa

SEQ ID NO: 150714 - DNA, 461 bp, Homo sapiens
agagagtgtatgtcaagagtggttgaggataacagtgaagttttggagagtaattgagtagaagaagatgctgatccagtgcagggattggtggacttgacagtttagtacttatctattcacaacttacaattctgtcttctttctcattggtttaaagttaagattatgaattgataattcataggagccagacagatcccatagatttgttttgtttgtttcctgttattttaataagccaagttttaaaatgaagagcttcatatgcaaattttagatttccaggtgtaaagaataagccagaagatctgaaataattcactggagttgagcaatatttagcgtctttagacaaggcctgtattctcctttaagctcagccccttayattacccagcaaatgcatagtgtataatgcatatcactcatttgtgaggcttgtctggcctgtgtaggtg

SEQ ID NO: 150715 - DNA, 355 bp, Homo sapiens
ctttactgatttgttgctgaaaattagctatctcaaaatgtttccaatacgttatttatcagtctcactctgtgtctcccctctaccacctcaccatcatgccccagcttgttttgttttgtttttaaaagttttcttcatacatgttctggaacaagttcctgtggtttgttcattccggcctccttatcttgccatccygttgcatcctgtgttgctggtgaggccttgagtcctctgctctgtgaaacacagcttcttctaatagatattcctaccgacacactctcattggttttggggaggtaccaccccattttgcttctaaggtcagtccttgctcctggctagttaa

SEQ ID NO: 150716 - DNA, 351 bp, Homo sapiens
cacagaagtaggatggccatgtgatgttggcaagggtgcaaagacaattcattgcagaaaggtaatctttttaacaaaagatactggaaaaactggatatccatttgcaaaataatgaacttcaacctatacctcacgtaatatacaaacattaactcagtatacatcataaacctaaatagaaaatctaaaccataaaacttccagaggaaactatggagaaagtcttcaagacttttgattaygtaaagatttccttagctatgatactaaaagcaagattcataaaaattgtaaattagactatcaaatttggaatcctctgcttcttgaaagacattattaagagaa

SEQ ID NO: 150717 - DNA, 569 bp, Homo sapiens
caacttctactttatcccttggtttctrgacctacaaattccactgaattggtattgtagcaccatacaatgaaattgcatttgagatgagccttgaaggagccagttgcaacaagtctataaggtgggaaggattcccagaggaaaaagcattgtaagagcaaaatattggaggcaggaaaatacacagtgtgtttcagaatccatttcattggagcactaggtacacataggactatattgagatgaaggctgcaaaggaaagttgggtcatatgatgttgtgctgaaaaggttgtatgtaattctgtaatccattcagggctttgagagacaaattggctgatgatagctgcactttagggagattggtggatcgccaggccttagtatagatttatatggttcaagagaaaaggtggttataatgatcctctgattttccatatgacaagcctgcaaccgcccaaaactttggtgtttttacctacatctatattcttttccccatctagtgccctagaaataattatcttccacactgggcaaaatttaagagctagtttaatg

SEQ ID NO: 150718 - DNA, 569 bp, Homo sapiens
caacttctactttatcccttggtttctggacctacaaattccactgaattgrtattgtagcaccatacaatgaaattgcatttgagatgagccttgaaggagccagttgcaacaagtctataaggtgggaaggattcccagaggaaaaagcattgtaagagcaaaatattggaggcaggaaaatacacagtgtgtttcagaatccatttcattggagcactaggtacacataggactatattgagatgaaggctgcaaaggaaagttgggtcatatgatgttgtgctgaaaaggttgtatgtaattctgtaatccattcagggctttgagagacaaattggctgatgatagctgcactttagggagattggtggatcgccaggccttagtatagatttatatggttcaagagaaaaggtggttataatgatcctctgattttccatatgacaagcctgcaaccgcccaaaactttggtgtttttacctacatctatattcttttccccatctagtgccctagaaataattatcttccacactgggcaaaatttaagagctagtttaatg

SEQ ID NO: 150719 - DNA, 563 bp, Homo sapiens
caaaaaaagttgaaatatagcaaaatatagaaaaattcataaaacaaaaagctttctcctcaatgatttatcaaagtgaacacccctgcaaccatcatcaggtcaagattgccagcgcattagaggcttgctttcacctccaytgaattgctcccctccttaaatgtaatcattaccattactttgttttattcacatcttttgtttttctttatagttttactggataagtatgtatccctaaatcactttatacagcactttctgtttttatcttccctgtatataaatattataaagcatacactattcttgtctatcttgtttttttccacagtttttacaatattcatcatgttgttgtgagaagtagtttttaaaatttttggccctgtttgcagatggcatgattgtatatttagaaaaccccatcatctcagcccaaaatctccttaagctgataagtaacttcagcaaagtctcaggatacaaaatcaacgtgcaaaaatcacaagcattcttatacaccaataacagacaaagagagagtcaaatcatgagtg

SEQ ID NO: 150720 - DNA, 541 bp, Homo sapiens
taagcttagtcactttaaaatctatcctggtatctggaggtcatattactctgtttctcttgtatgttgtacctggagggtttcatccctgttgatttattgccttgtgtccatattttggattatatggtaaaatagtattttttaattggagaaataatttgagtcctagcatgatgtcatttttctgcagagaggatttatgttagctcctgccaggcacctggtcacactagaaatacaggagtgcctcaattcaattctaggtatgatggcttgaagctaagctgcrgtcccagtaaagagatgttcacttttaattcaacattacttctaagattaagccttttcatgtctcaacccaaagagatagacttacctaccacctcagcatagtaggtaagtgtactgtacctcaattccatttttcctagtgctgtgaggctatataaattgcttcttagctgaacctccagatttctcagaaaagtagctccaaaagtcaggcttatcttcctcttcttctgtcctcctaagtctc

SEQ ID NO: 150721 - DNA, 605 bp, Homo sapiens
tctggtttcatgcaatttaaaaagtcaaacagactttccttatcttgcaacgtagatagatcgcaactactgtctgcataacaaaattaagtgacacttatatttaataatcttttccatgatgcactgtcctgtayattgcttttgagttttattaagcaactgagtgacatgattagctatattttaccaaaaagagatctagtcaccatcaatcagcaccatgacttcaagtcaggatctgattcttagcatccttttaagataccatgcggcgtctttcattgatccatgaatatatgactcaggtgtgttgcaaagcacgaagacactggctgagagcttgagccaacaaggtgctgtgcaggtagataaaggaacatagcatggagaaaatgttttaaaggtaatgtttgttcttttggactagggaagctcttcaccacgtaaaacaaataatactagaagatgcagtgagaaaaagacatatgaagacagacaacatatttttatagaaatgtaaaagccttttaatttctgcttccaatttcccaccctcttcagtggttttatttgctgcctccttgattctgcatccactcccc

SEQ ID NO: 150722 - DNA, 496 bp, Homo sapiens
cattcaatattgattgattgccagttccctgggaagcagktttaatatatgccccagaatctcctcacttttccagcagacttgggctgagagaagaaccactgggcacactctttacctattacttttgtttacatccttagtcctggaagggaacagcatactctcatcaaaatagcatattctgtttctggattattaattgctggaaagtgcttccataaaaaatgggtgagaatagagaagaataaataaaatgtgagagaggtggattttgtttcttatggacatattttgactgcacagtactggattatttcttaggaaataaatattttgtgttatctatgatactttatttgtgctcctccccagcacaccttccctgtgatgcaggctgtgcacttatttgcgtttatcttttgtttgggcggaactcctatgggagaataaaactgtcatagagaatgaatatatcttctctgcaaagaaacta

SEQ ID NO: 150723 - DNA, 543 bp, Homo sapiens
atctatagatcgtcactcaatgcctggctcaaagagatacttaggaagtgcttcctgggtcattgaattctagtaactctctattaatacatgctgttccttcctttgttcataggaaaaaaggaaaatttgcttttcttcaaagacctctcaggatgtacaggaaaatgtggctgataaagaagacacatctggtcttcctttgttggggaatttataggaggtagtctcagctgtcaggccgctagtaactgataatgtaaaatacgatgytatgtgaagaattacagaggatctgtaagattcctgtacgactcttgctgcctgacagctgcattctgtaactcttccaaggacaaaagaaggactcattaagtccagaatttcctcagctggttgcttaaaatcaaacagtaaagctgagaaaggacaaagcttccctcttctcctccagcaaccagcagggtgttcacttttgacacatgaaagacacatactttcaagccttagggacagaagcttgggcggaaattcaggttgtga

SEQ ID NO: 150724 - DNA, 370 bp, Homo sapiens
atttgtctatttaattctttggcttctgttctgatttttgatattacttttcttttccttactttgggttcaawttgctcttccttttttcatttttttaagtcagaaacttagattttattttctagtatagataggcatttaaagctacacatcttctaatcaccatgctagttgtgtcctctattactctgttgcattcttaacattaattttcaaacattttctaagtttctttgtgatttctctttggtctatgggttatttagaagtgggttatttaatttctaattatttgggctttttctatagatctaatttttatagatttttaagttaatttcagtttaggaagagaacatactctgtg

SEQ ID NO: 150725 - DNA, 530 bp, Homo sapiens
gtgcctatacctaggagctccccaagctagacctgtgacactctctttgggctctgcagttcctggcatctccaaacttccaggtgccactgcattctcctcatccagacatgggtgcccacagtggaagccacgtgcaatacatctggtcctggcacagcttggcacagaactggtacctgtgccagcacctgtagcttcccaccccgctgtgcacagtagccagaccatgcgcttgcttgcccacacactcctctccactacgtgcctggtgcacccttggcaggtgtgtgattctggctggtagcacaagccgagcayagcctgctgggatgagtggacataacaagcccaggggcacaatcaattactcaggcagacatgctgctggccaaagaggtttctagctcgtgaagtgacagtccaaggattctgtgacatgggtaacaaggaagatatggtgaaacggtaataatcacatatcagcgggccaaggtaggcattagggaaggaatcaaaatcttaggcag

SEQ ID NO: 150726 - DNA, 560 bp, Homo sapiens
aacaaaaaataaaacagactctatttatacatcatgcctgtatatgtagaaaacccaaaagaatctacagaatacctccagaactaataagtgagttttgcaagactggaagatacacagtcaacacaygggcaaaacaaaccatcagaataattccaagtacagtaataattcaagaataaatggtttcagataatcttatttatttatttatttgtttatttttagagacagggtcttgctctgtcacccaggctggagtgcagtagcacaatcgaagcccactacagctcctgggctcaagtgatcctcagcacccccaagtagctggaactacaagtgtgtggcactatgctgggctaatattttaatttttattttgtagagatgggggtcttaatattttgcccatgctggtctcaaagtcatgggctccagggatccatccaccttggtgttccaaagtgctgagattataggtgtgagccaccacacctggcctataatcttatttagtatgtcttgagacatctgaaaattttctaaaattaaactataca

SEQ ID NO: 150727 - DNA, 654 bp, Homo sapiens
gtgttttggttgctaactctgttgtagacattatgatttattaggattgaacatatagtgttttatttttgaaattttgatgtattcaaaaattgtggctcaaattaaaaatacatctctattatatttttaaattacaaaatcccaaagggggtaaataaaacaacacatcaaatatatatagttattgatgtatatagtcaaatatatacaataataaatgtatttgtataacttttgcaactgaaatttwaaaaaaattcaaaatggctgattaaagaaagtgagtaggataattataaattagattaatctgtctatttaaagaaatacgggcccatatagaatccagggtcttttaccttaaaattatgatctctgtgcttgtgtttcagaatgggcatgctctttcatttgtctactctctttccttacattagtagcagcatctcaaaatgcctaaggaagaattctcataagcagattttcaaaaagccatatgtgcttattttcaacagctaattgcactgggctgttgccagtaagacaactgatccttcatgtagttttcctgtccatagagtttgagatactgcttcattatcctcccctttctttattagactcagtagttcggagattttctgaggcggc

SEQ ID NO: 150728 - DNA, 654 bp, Homo sapiens
gtgttttggttgctaactctgttgtagacattatgatttattaggattgaacatatagtgttttatttttgaaattttgatgtattcaaaaattgtggctcaaattaaaaatacatctctattatatttttaaattacaaaatcccaaagggggtaaataaaacaacacatcaaatatatatagttattgatgtatatagtcaaatatatacaataataaatgtatttgtataacttttgcaactgaaattttaaaaaaattcaaaatggctgattaaagaaagtgagtaggataattataaattagattaatctgtctatttaaagaaatacgggcccatatagaatccagggtcttttaccttaaaattatgatctctgtgcttgtgtttcagaatgggcatgctctttcrtttgtctactctctttccttacattagtagcagcatctcaaaatgcctaaggaagaattctcataagcagattttcaaaaagccatatgtgcttattttcaacagctaattgcactgggctgttgccagtaagacaactgatccttcatgtagttttcctgtccatagagtttgagatactgcttcattatcctcccctttctttattagactcagtagttcggagattttctgaggcggc

SEQ ID NO: 150729 - DNA, 403 bp, Homo sapiens
  misc_feature (1)...(403): n = A,T,C or G
atgtttgtatgtctcatcccggagtcatacgttaaatcttaacatggtattaggaggtggaagcttcaggaggtaattgcatttgaagggaggactctcatgaatgggattaatgcccttataaggagagacacaaatgctggcttctctttctctctccaccaygtgaagataaagcaataaagtggctatctgtaaaccaggaagagggccctcaccaagaacatgactgggctgccaccttcttgttagatttccagcttggaattgtgaaaatatttgtttttttaagccacccaatctatgatattctgttgtagccacccaaactgactaaggcacctaataaagactgaaaaaggtaagaattcnnnnnnnnnnnnnnnnnnnnnnnnnnnnnnnn

SEQ ID NO: 150730 - DNA, 584 bp, Homo sapiens
ttgcattcatattaataactcttatttaaaattcagcataaaaatgtacatactaaaatctgaggaaaaagatctggacatatataactgacaagtgattagtaatcaaaatatataaaggacttctacaaattaaaatatgtgtaagtatgtatatattttatgaaatagtcaatgcatattaataggtatttacctaagggaaaacccatggtaaaacataaatatgctcaaacctaataaatagaaagattcaaagtaagtccatattttataccatttgatgtctaataagtagtcaaaaatgttgaaatttcataatatcaagtattagagaggtgtgggttaagaattcataaacagttgctkgtaaaaacatttgggaaaaccatataccatgagacatataaaagactgttcttagcaggatcggttgtcttaacaaaaatactagtaatgacgctagtgggtatcaatagaaacatggattaaaaaaatacagtacattcagaaaatgaaatatgttaatatgttacagcagtgaaaactaatgaatccaaatgcacgcaatagcatgaagaacc

SEQ ID NO: 150731 - DNA, 584 bp, Homo sapiens
ttgcattcatattaataactcttatttaaaattcagcataaaaatgtacatactaaaatctgaggaaaaagatctggacatatataactgacaagtgattagtaatcaaaatatataaaggacttctacaaattaaaatatgtgtaagtatgtatatattttatgaaatagtcaatgcatattaataggtatttacctaagggaaaacccatggtaaaacataaatatgctcaaacctaataaatagaaagattcaaagtaagtccatattttataccatttgatgtctaataagtagtcaaaaatgttgaaatttcataatatcaagtattagagaggtgtgggttaagaattcataaacagttgcttgtaaaaacatttgggaaaaccatataccatgagacatataaaagactgttcttagcaggatcggttgtcttaacaaaaatactagtaatgacgctaktgggtatcaatagaaacatggattaaaaaaatacagtacattcagaaaatgaaatatgttaatatgttacagcagtgaaaactaatgaatccaaatgcacgcaatagcatgaagaacc

SEQ ID NO: 150732 - DNA, 584 bp, Homo sapiens
ttgcattcatattaataactcttatttaaaattcagcataaaaatgtacatactaaaatctgaggaaaaagatctggacatatataactgacaagtgattagtaatcaaaatatataaaggacttctacaaattaaaatatgtgtaagtatgtatatattttatgaaatagtcaatgcatattaataggtatttacctaagggaaaacccatggtaaaacataaatatgctcaaacctaataaatagaaagattcaaagtaagtccatattttataccatttgatgtctaataagtagtcaaaaatgttgaaatttcataatatcaagtattagagaggtgtgggttaagaattcataaacagttgcttgtaaaaacatttgggaaaaccatataccatgagacatataaaagactgttcttagcaggatcggttgtcttaacaaaaatactagtaatgacgctagtgggtatcaayagaaacatggattaaaaaaatacagtacattcagaaaatgaaatatgttaatatgttacagcagtgaaaactaatgaatccaaatgcacgcaatagcatgaagaacc

SEQ ID NO: 150733 - DNA, 574 bp, Homo sapiens
agcttcctcctcccaccaactgactcacctctttgctcccacatcccctatgtatacctcagacattaccattctttatgtcatcttctgtttacctaccagtctctttgacctaacatcaacattcttcatatcacagcaccaaacagggttcatggctcataacagatgctcaatcagtattataaaaagtgaagctcagkaaggctgaagtgatttgcttaacaccatatagcttgtaagtggcagacctggcattttgattcacctacatctcattagatcaaattcaagtcactatccctttagttcatatctctaatattttacagcaatattattactgcttcataagaaacaggacaaaaaccacattaaatgaatgctaacttgaagtattaccaaccaaaatgaagatagaaatataatttaagctcaaacattaacaatattttccacgtgaaataaattgtctacttagatttaacacaattagttaagaaccatctaattaattagcattcttagtagtgctatttttatactgaacatttttatactgagctttaaagag

SEQ ID NO: 150734 - DNA, 492 bp, Homo sapiens
  misc_feature (1)...(492): n = A,T,C or G
gcttggcatatagtcagccctgaaaaatactctttgaatagaaaccatttagatattttggtgtctctctgtctctccttgaaatatgtcagttaatctattcattagtaagtaatctttagagttctaattttggatgcccctagaacagtgatsgtgttctccagattttgtgaactgaaggcaactgagnctggcttggagggtcatgctgnagggtgttggggctagnaaaccccagtctattgagttaggaatttgtgagctccaactctggaaacaaatctcagttttttcccatccttgtttttttttttttttgaagatccttggaatggtcacgggtctctactaccacctcctattgcttccaatccttctgatttatgggattccatctctgaagtgtgaagcctttttaagcttttactgtagtggcaatgatgagaacgtaaacagggaattcaaaaagcccctttattactctttgtt

SEQ ID NO: 150735 - DNA, 460 bp, Homo sapiens
taattacttttcattatgtaaaagcactttgtgaacagtgaggtaaatgtcatggccatatacttgattttaaacagcttttaaaaaatgtaatcggctttaaaaatgctgtgttctgtgtttgcaaggaactagcagcagtggtgaaggtggctctgtctcatttaggagttaggtcttagcagaggaacaggttcaacaactaccttttaaattctcactgaagccattttaattaatttacttatttcagtggtcagcttttatagttgtgtggattcgtttctggcactaagaagatttaacatatacctgtggaggatatttaactcaatgttaaaggaagcaaaactaaacggcataaagagtttaaggragcattaattcatccttactgccttgaaattgttcagcattaatagatttagaaaaccgttgtgttaaactattaacctaaaat

SEQ ID NO: 150736 - DNA, 569 bp, Homo sapiens
cttggagaaagctaactggattatagagtaagtaatgggatacagaagctttcacctaaattggatttccagtaaagccaacctttactatttggaggcaaggcttgggaaaacattcaggtaaggtcactcatgtatttcaaaggatttgtggttgcttggactgtgttgtctataagactggggtygttggttctgtgctgtgccaggagaagtagcagtttttgttgttagaaaatttaataatgaaagggattaaatatttaagaaagaaaatggtcttgctgtagctcctgaaactttgttttactgatgaagtagggtaaaaaatagtatggaaagatgaagggagtaaagcatttattacttatgtgaaatgcccattgttgctacaagatctttctatattgtaaagtaattataagaataggcaaaggaaattttcagattgtccatatttgcttgaagataatgtgtagctactgtatgccttatttaattatttttttgagtgtcattcacaatcacaaaacgatacccttactgaaagtgttagtggataaacttaa

SEQ ID NO: 150737 - DNA, 406 bp, Homo sapiens
ctttttctctttgttagggtggggttcatgatcctttaccactttctatatctcaattggaagcccaattttcatggattttaartgtaaatgacctctagccctaaccattcatctcttcgcaatatgtccataccctactagacatccctgctttgatacttaatagacatgtcaaaattgtaatgcccagttctaagctcataatcatatccttagctacaacctaaaggtgtctcatacagtgttcccccattcaactaatggcaaatccattcttttagttactcagacacaacctttaacccacttttaatctcacatatattctctcaggaaatgcttttagttctttctgcaaaatatgtgctacatcggatcccttcttaccggctacattgttgtc

SEQ ID NO: 150738 - DNA, 407 bp, Homo sapiens
cctttttctctttgttagggtggggttcatgatcctttaccactttctatatctcaattggaagcccaattttcatggattttaagtgtaaatgacctctagccctaaccattcatctcttcgcaatatgtccataccctactagacatccctgctttgatacttaatagacatgtcaaaattgtaatgcccagttctaagctcataatcatatccttagctacaacctaaaggtgtctcatacagtgttcccccattcaactaatggcaaatccattcttttagttactcagacacaacctttaacccacttttaatctcacatatattctctcaggaaatgcttttagttctttctgcaaaatatgtgctacatcggatccyttcttaccggctacattgttgtc

SEQ ID NO: 150739 - DNA, 580 bp, Homo sapiens
taggtggttcacttgaggccagctgggtgtggtggtgcacacctttaatcccagctactggggaggctgaggcacaagaatcgcttgaacccaagaagtggaggttgcagtgagccaacattgggccctgtactacagcccgggcgacagagcaagactctgtctcaaaaaaaacaaacaaaaaattgatttggtctttttaaatttgaatctaacttccacattttttcttttacacttacataaattcttagcactcygatcaattcctttgtttggggtttcatattttcagttttgtgagctttgtttaatatgaaaacagtatgaaacctagtggtatcacaagttcgtgaacagcaggagcgataagtcacttaaaatatgaagctcatgaggttgtgttgattatttttcaattctctaatctttttctagatgacctgccgctcttcttaaggtaacaacagggtgtgggagaattgatacatgaatactcttgaattgacagataagtacacttggctttggtgatgttaacatagctctgtgcgcacccctttcactaccatgaccatca

SEQ ID NO: 150740 - DNA, 533 bp, Homo sapiens
ttaaagcacctaacctaccaaacattatagcttagtctaatctaccttaaacatgctcagaacacttacactaacctacacttgggcaaaataatctaacacaaagcttactttataataaagtattgaatatctcgtgtaatattttaatactacatattatgccaaaatcaggatggttttgtgccatcataaagttgaaaaattttaagatgaactctcataagtgggggaccatttgcatgtctattctttccccaataccactctatttttaactcttatacctttaaagtgagtcttgaaatcaaatagtgttagtcctcaaggtttgttctttttcttttttaaagctttgattatcctagataatttgaattagtttgtcaaattctatccaaaaagtatgctgaagttttgattagggttactttaaatctacagatmaatttggggagaatttacgtcataataatgtaaaatcgtccaatccatgagagcagtatgtccttcatttattttggtctttagtt

SEQ ID NO: 150741 - DNA, 606 bp, Homo sapiens
gttagtcctcaaggtttgttctttttcttttttaaagctttgattatcctagataatttgaattagtttgtcaaattctatccaaaaagtatgctgaagttttgattagggttactttaaatctacagatcaatttggggagaatttacgtcataataatgtaaaatcgtccaatccatgagagcagtatgtccttcatttattttggtctttagttactctcagcaatgtttgacacttttcagtctgcagatttcatacatatttgttaaattttccctgaaatatttcttggttttgattgctgtaataaattgaattktatcttttagcttctttttttcaattgtgtttagctagtaaattgaaataatgtcactatatattgaccttttttacccagctaaatttacttgctaatgccaatagatctttcttagattccttatgattttctatgtacacaatcatgtcatcttgttatgaattgaatgtgccacccaaaaagatacttcgagttctaatacacattcatacctgtgaatatgaccttatttggtgagatggtctggctctgtgtccccacccaaatctcatcttgaattg

SEQ ID NO: 150742 - DNA, 606 bp, Homo sapiens
gttagtcctcaaggtttgttctttttcttttttaaagctttgattatcctagataatttgaattagtttgtcaaattctatccaaaaagtatgctgaagttttgattagggttactttaaatctacagatcaatttggggagaatttacgtcataataatgtaaaatcgtccaatccatgagagcagtatgtccttcatttattttggtctttagttactctcagcaatgtttgacacttttcagtctgcagatttcatacatatttgttaaattttccctgaaatatttcttggttttgattgctgtaataaattgaattttatcttttagcttctttttttcaattgtgtttagctagtaaattgaaataatgtcaytatatattgaccttttttacccagctaaatttacttgctaatgccaatagatctttcttagattccttatgattttctatgtacacaatcatgtcatcttgttatgaattgaatgtgccacccaaaaagatacttcgagttctaatacacattcatacctgtgaatatgaccttatttggtgagatggtctggctctgtgtccccacccaaatctcatcttgaattg

SEQ ID NO: 150743 - DNA, 508 bp, Homo sapiens
agctccacaacaccagtgtgactccatatttgcataatgtgttccaaaaatattttgtaaatttgtgagggtgaagggttattcccaattttaataacataatgggacttaaataaagggcatgccttatgaatccattgtaatctatttttcataaaattcattattctccagtttttctaattttgtaagtttagttttctaatcagcacttttctaaatgaaawtgttatatgtccatatagttgagtttcctgaccacccacatagaggtggggtgtgtgtgtgtgtgtgtgtgtgtgtgtgtgtgtgtgtgtctgcaaatgtaatccatttgctctcaggagattggaagggtgatgactactctttattttgtatcatttcatattggctagaatattgcttggcacagggggataataaataaacactcttgactgactgacaggtttctttattggagtcacttacattctccctggaatttcagtgcgatagttgtatt

SEQ ID NO: 150744 - DNA, 581 bp, Homo sapiens
cctgcttgcaagctatgttaggttgccatagtttcatggatgtgcagaagacacagtccttcttggtcagagaaaagaaagtttattactcacagcaatagccatagcctaagtatcctcattttcctgccccagttccatgagccccagttgccacaggtcagtgtgactaaagccagtggtgcctgcacacagggtgggtggtgttataagaaaagattctctggtttaagacattctaattatttgtaagactgaaagcacacctgcacacaacctttgcttgggagagagacattawctttattattatagtggacaacaaacaaatctgctctccatcccagtgggagacactatctctattttccaaggccttttgctgtataaacatctgtgaaaagataatccaatataaaagctgtcagagcctctgctagtgaaatattcatgagaaaccaggagagaattttcttacatcagaagcttactccttcatagccaaagaggaatgatcatttatcttcataatttgtgtaaccaaatgacaagtttaattaacttttctttttttttttttt

SEQ ID NO: 150745 - DNA, 626 bp, Homo sapiens
gtgtatattcttggatcataagatgtgtgacacagttccaccaccacaaaagaaataggaaaaaaagctrttactactgatactacatagtatttataataattgttatagattatatttactgaattctgactatgtcagtcactgttataatcactgagcaccaacttaatcttaacaaaactattataacatctttattttacatatgaaggaagtaaggcacaaagaggctaaactaacctctccagtaccacataacatcaggattctgacccctgtgatatgtctccagagcctgctcactaagtcccaaataccagtacaggccttgtgatttatggagatttcatttctctctctagctctctcttttttttacatcaactttatagaagtatcatttataaacaacaaaatgtacctatgtttagctaccatcacaatcaaggtatagtgcattcctagcatcccggaaggttcactggaacccctttgtagtcaatgttctcatcacctagattggttttgactttccaaaatttcatattcatggaatcataagtaagtactctctgtatatggcttatatggcttcttccacacagaaatatgtttttgagagt

SEQ ID NO: 150746 - DNA, 626 bp, Homo sapiens
gtgtatattcttggatcataagatgtgtgacacagttccaccaccacaaaagaaataggaaaaaaagctgttactactgatactacatagtatttataataattgttatagattatatttactgaattctgactatgtcaktcactgttataatcactgagcaccaacttaatcttaacaaaactattataacatctttattttacatatgaaggaagtaaggcacaaagaggctaaactaacctctccagtaccacataacatcaggattctgacccctgtgatatgtctccagagcctgctcactaagtcccaaataccagtacaggccttgtgatttatggagatttcatttctctctctagctctctcttttttttacatcaactttatagaagtatcatttataaacaacaaaatgtacctatgtttagctaccatcacaatcaaggtatagtgcattcctagcatcccggaaggttcactggaacccctttgtagtcaatgttctcatcacctagattggttttgactttccaaaatttcatattcatggaatcataagtaagtactctctgtatatggcttatatggcttcttccacacagaaatatgtttttgagagt

SEQ ID NO: 150747 - DNA, 530 bp, Homo sapiens
tgaattcagcgtcaactgattttaagacaaatcattgattctggaaatctggagttkattgtcatccttgaggctgaaaatcaaggtttcttgttctccatctaccctcctttctttagatactcctgagttactgctttggtgtttggaaataatatcataggtctagattaagtatgaggtctagaaacgtaattttccctgggctaattgtttaaggggcttgattttggtttcaacttctctattttgcaaatgtgaaacgggtactaagaaaagttggaataatgccaataaaaaaaaaatccccaaccccatgcagaatctgaaggaaacatctctgaacaaaatgtagcaaaacagaaaaatgggggcagaataattttgagagtgtttgcttaactcccaaagtaaaggagtttaagtttttattttatttcttcctgggaacctggtattgaacgagaatttacaccaaactgtgtatgtatacaaattgtgtgtgtatatggttgataatgtaaaattgg

SEQ ID NO: 150748 - DNA, 530 bp, Homo sapiens
tgaattcagcgtcaactgattttaagacaaatcattgattctggaaatctggagtttattgtcatccttgaggctgaaaatcaaggtttcttgttctccatctaccctccttyctttagatactcctgagttactgctttggtgtttggaaataatatcataggtctagattaagtatgaggtctagaaacgtaattttccctgggctaattgtttaaggggcttgattttggtttcaacttctctattttgcaaatgtgaaacgggtactaagaaaagttggaataatgccaataaaaaaaaaatccccaaccccatgcagaatctgaaggaaacatctctgaacaaaatgtagcaaaacagaaaaatgggggcagaataattttgagagtgtttgcttaactcccaaagtaaaggagtttaagtttttattttatttcttcctgggaacctggtattgaacgagaatttacaccaaactgtgtatgtatacaaattgtgtgtgtatatggttgataatgtaaaattgg

SEQ ID NO: 150749 - DNA, 412 bp, Homo sapiens
tttggcttactagcagacctggaaacactttggtattattctatcacagagggagaagtgacagattcagttgggagagagataagatcctggatgtgcaaaatgagagatttacagggctttgaatgcttcctggagacattgggctttgtcatagagacaatgtgtagccacagaaggatataagcagcacagtgmcaaaatcccatttctattccaaaggttcctattatagtagtgaatgtaagggtaaggaaaggcaaataaaggtcagaaaatgcaaaataataagacaaaggatggtgtattaatattaggcaataaaatgtctaaggaaaattcttaaatatgacaaaggaattcatttataataatatgttgtttacaattttatgatcaaataatataatat

SEQ ID NO: 150750 - DNA, 552 bp, Homo sapiens
ttgtctaattgttcttcactcccattcttctcctgagtatagaagyggacctcaattctgtccattcattttgaggctcttagccaccattttaaaaccaaatcaaataaaaatcccgggcatcccatggccatctacatgcctttagggcaaaccacctgctgttctcaagtctcagatgacaggcttcctggagataccatggccaatcccccaggttactgggcatgttggccatattttgaatcagtttctcttcatggagtacctagctgttgcatggggctggaagaggttttggagcaaatgaggatttctcgccagggttacaccctggtgttatctgaagccttctggactgaccccagcctctgattgcttgatccggcatcagcaacaggatatccaattttctattgcaaatttcctccttttccatctgcgactgccatatctcttatcctctgtatgcaatgctgcacagatttttatggtgtggggaaatagtcctgttaggaaagattagcaaatgccatataaactgggaatata

SEQ ID NO: 150751 - DNA, 604 bp, Homo sapiens
ggaaattatactgcaaggtggtcaaacacatcacctgttaacttttgtctcttgtcttcttaacagtttattcttacaggatacctcacagtaaccgataagaaatcaaaacttctggtaagccacttaaactacataaaatttaaaatcttctatttgttttatatcatctttatgtatgaagcctttagtaataaagttacctttcaggaaaatctgtatgcatcaaagttgcagttcagatcattcctatttgccagtgccactgtttgcctgacagacattcttacacttgttcccatttccctggtcaagtaaactaaaagagttgtttattggaaaccattctgcatccctgtaattcattgtttgtaattaggggtaattccytgccctgcaccccccaggacccagaaatattggacaacatctgaagacatttttggtcattacaactggtgttattggcaacaagtgagtagaggccagggacatttctaagcatctaaaatgcacaaggcagcctccccccaacacaaaaattatccaacaaaaaatgtttatagtaccaaggttgagaaaccttgctctaaccaaaaccaat

SEQ ID NO: 150752 - DNA, 616 bp, Homo sapiens
acattccccatgttacaccttatacactcccctcgttttgagtgtaggcaagacctgacttgtttcttgttgttgttgttgttgagatggaatctcactttgtcacccaggctggagtgcagtggcgcgatctcagttcactgcagcctccacctcccgggttcaagtgattatcctgcctcagcctccctagtagctgggattacagttggtgggattagccaccacgcctggctaattttttttgtacatgtttagtagagatggggtttcaccatgttggccaggctagtctcaaacggttgacctcaagtgatctgtctgcctcggcctcccaaagtgctgggatgggagacctgacttgtttctaaccaaaagaatatagcaaaagtgatgggatgtcactcctgtgttatgttctatataagataccatcttagcagactggagaagcccttgctggctttaaagaagcaagctgccatgttgtaagacagtctacagataagccaggcaacaaggagcttcaggcagtccctaggtgagagcagctcccaactcagagccaaaggtcatcaaggaaacakacttcagtcctacagttaaagatgaattc

SEQ ID NO: 150753 - DNA, 470 bp, Homo sapiens
aaatcattctactataaagacacatgcacaagtatgtttactgcagcactgttcacaaaagcaaagactgttactttaatgtttactttaatgtttaatgtttactttaatgtttaatgtttactttaatgtttaatgtttactttaatgtttaatgttaaagcccattactgttagattggataaagaaaatgtggtatatatacaccatggaatactatgcagtcatgaaaaagaatgagttcatgtcctttgcagggacatggatgaagctggaaaccatcattctcagcaaactaacacaggaacakaaaaccaaacactgcatgttctcactcctaagtggaagttgaacaatgagaacatatgggcaaaaggaggggaacatcacacaccggggactgccaaagggtgaggggcaaagggagggatagtgttaggagaaatacgtgatgtagatgacgggttga

SEQ ID NO: 150754 - DNA, 569 bp, Homo sapiens
aaaacttacagagacttttcaccgtagacatagctattccagtaaaaaaaatgagtagacttcaaaaaagcgttgtgagtatccttcgtaaatgaaattgattattatctttatgaagtggaaattggctgagagacaggttaggtcacatgagaagttaacaagtggcagaaccaagaggtaaacctaattattttatttcaaatcaattaacatttccaattttatgtaaattctggtaacagcatcatcctgwtgtatttattttcatagacagaaaaaaattaaagagtagccttaggatcatttttaacacctagaatttatagcagatgatagataatttaggagttaggtgaaaaaaatgataacaaggagaaataagtcatcataacaatgtgggaaaatatatttctacagtgtaatataaatggaaaagcaatgctataattcaatgtccagctcatggctgtatagaaatacatcatgaagccacagggaataagcgaaataggtgagaatgactgcaccataaatatatgtaatgatgtcttgtgaaatgaaatgta

SEQ ID NO: 150755 - DNA, 518 bp, Homo sapiens
ctgggagattcctgatagaggagagtcaggaattgtaagattatatatatttacctccaaaaatgtacttctttcagttcggatatgtactgatggtttaaccattccaagtagcccattactaacaatgtccataagaactgggaagcaattcaatcttttggcattgcatgctaacgaaaagctgtaattctaaaatataacaagtaggatataagttctcaaatatcttcattttgttctctaaaaaagtcaaaatttgacatgttaaattaagaggttatgtttttcatatggtgttaaataatcacaataaaaagccaaacactgtgtaagtaaaatcaaatactgtataagtaaatcaaaacatgtatatagtaaaactaaatcatgtatctgatatttaggacaccrgatgtcttgcttgaggccagaatcatatgttcagtgtttattgtttaagaacaaaacagaagttttggaatacatgtgttataaaatccttgaggggaaacatg

SEQ ID NO: 150756 - DNA, 573 bp, Homo sapiens
ttttttttcctcttccctatgggttatatttccccgcttcttcatatgtcttgaaatttgtattttatcrtggatgttactttaacaaaacaggaacactgaggtaaacaatggccagaaaatggcatgactcttcctctgtcagactactgatgtggatggcagaactgatctaatttgtatttggcaagtgcctgggcttttgcacaggttttattagattcagtccactcccagcttcgaatgttttaaaggtagaatcaggtctttcccttagacgtgactttgaattatagcactggaaaaattctatatatttctctatagccctgctatcaaatatctcaataatgattaatctcactgattttcagcctgtcatcactttttgtttatttatttgttagtatacatctctccactcctcattcagtgactggaccctagtggactcatgtattacacaaaaggaaagacccatgaaccctgatgatgtcttgctcaagacactatgcagcttcttgtgtttctctctccgtttttctgagtatctgcccccagctactgctgtac

SEQ ID NO: 150757 - DNA, 573 bp, Homo sapiens
ttttttttcctcttccctatgggttatatttccccgcttcttcatatgtcttgaaatttgtattttatcatggatgttactttaacaaaacaggaacactgaggtaaacaatggccagaaaatggcatgactcttcctctgtcagactactgatgtggatggcagaactgatctaatttgtatttggcaagtgcctgggcttttgcacaggttttattagmttcagtccactcccagcttcgaatgttttaaaggtagaatcaggtctttcccttagacgtgactttgaattatagcactggaaaaattctatatatttctctatagccctgctatcaaatatctcaataatgattaatctcactgattttcagcctgtcatcactttttgtttatttatttgttagtatacatctctccactcctcattcagtgactggaccctagtggactcatgtattacacaaaaggaaagacccatgaaccctgatgatgtcttgctcaagacactatgcagcttcttgtgtttctctctccgtttttctgagtatctgcccccagctactgctgtac

SEQ ID NO: 150758 - DNA, 610 bp, Homo sapiens
atttcttctcctggctccaaatcttgcccctgtagacacctatcccttatctctgtctgccacttagatatagcaccatcaccttcaacttagtaggttgagaattgaagctctctcccaggagagcaccagttccacgtcaccaactgggtgttagtgatgctgctaagttttctagtcactcaggtttgtgaccttggacttgctgcctcctttttggtccctctgacatgtctcctctttcctccttccctgcccactcctccatcccattctttacatcactcctaggcaaacctttctttgacctgacactgctttcactacattctttctttccctgctcaaactttcccatacccaactggctcctccatgtagttgtcaaggccaccatgatcttatctcatcctaccagttcaaatgggcttttccactactgctcaaaatagtaataaaaccaccwgccacacattacaaatgagctttgcactcatctcaattaatcctcacaaagctaactggaagccaaaaaggcaaacattgtccatattttacaggctgaaatactgtgacaggcacagggtcacatagtaaaaactgcctggag

SEQ ID NO: 150759 - DNA, 622 bp, Homo sapiens
tttttgtggtcaaaagtgttccaagtcagggagaccaagcaaaggaggcacaaggccggccacagagggaaggatgggactctgggcagccagaccccagtgggagccctgcgtctgggagagatgaaagacaccccctcaccccagctggyagggggcagccccagctctaggaagactgccttcctgcacccccttgccaaaagatggcatctctcctccaaccatgcagctgtcctggcccccctaccccaccgcgtctcctaggtgagaaaaacacccataaccatcctcacgggcacccagcaaccctgaaacactgtgtctcgggcaacttttcgagctgcagctgttccctgaaaaagtcacacatcagccaccaggagtggtgggaaaggctgaattctggagaagagggatgaaggttggggaggtgggagggagggaagggaatatggtcaccagaggaaaaaagtcaatcaacgaggaaaaatctgtttctaaaaatgtaatgcaaacaacaaaaaaacaggctttgagcaagccttataagccctggggcccaggcctgtccttagttccccgggaatggcccctgctccccgtcccatttcacaggggt

SEQ ID NO: 150760 - DNA, 542 bp, Homo sapiens
attatacatttgtcactgatatcttctccactagaatgtaagctccatgaaggcaggggctttgctatactcactgtggtatccccagtgcccgaatcagtgcctggcatggtcaatagacatttattaggygaatgagtaaagaagggaaggaaagatggaggagtgctgtaactgtggatttccctccctttccttcctcctccggctcacagcaatgatgggagggggccttttcagtttccaaagccctctctcccctacacactcatttactcctcacaacaaacctagaagatatataagggaatgcgttattatctcacttcacagacaaggggtctgaggccaaggcagcccagtgacgtggacacaaggctgatggcaggctgcccctttccaagccagtgccagcaccagggggcaggaggctaaccccctcctagatctgacttgaccttccattctgccccccaggaggaccagggcccaaccctgaaaggtgggagttagaacaggaagccacaggtcccaattgccag

SEQ ID NO: 150761 - DNA, 542 bp, Homo sapiens
attatacatttgtcactgatatcttctccactagaatgtaagctccatgaaggcaggggctttgctatactcactgtggtatccccagtgcccgaatcagtgcctggcatggtcaatagacatttattaggcgaatgagtaaagaagggaaggaaagatggaggagtgctgtaactgtggatttccctccctttccttcctcctccggctcacagcaatgatgggagggggccttttcagtttccaaagccctctctcccctacacactcatttactcctcacaayaaacctagaagatatataagggaatgcgttattatctcacttcacagacaaggggtctgaggccaaggcagcccagtgacgtggacacaaggctgatggcaggctgcccctttccaagccagtgccagcaccagggggcaggaggctaaccccctcctagatctgacttgaccttccattctgccccccaggaggaccagggcccaaccctgaaaggtgggagttagaacaggaagccacaggtcccaattgccag

SEQ ID NO: 150762 - DNA, 586 bp, Homo sapiens
tgggtataatatgtgtattcttaacaaaacataaaagcatgatgaagatatatacccagcagaagtgtgtatatttagttaccaaaagaaacatataagaatgttcattgcagcactattaataatatccccaaaccagaagcagcccaaatgaatattgacagtagaatggataaatatatggtggtatattcaccttgaaacactattcaacaaatgagcatgtaaaaactacaatgatacacaacaatataaatgaatctcacaaacctaaatattgagcaaaagaggccaggcacaaaaaactgcattctgtatgattttatttatgtgcagttcaaaaatagataaaaagtgaaaatagtggctgctcttgaaggtggggcagtgacggttaggggcttgggagggaggcttctgcaatgctgttaatrttcagtttcttgatctaggagctgcttacatgggtgtgttcagtttgtgtgctttttggtatgtatgttatacttcagtagaaagttataaaaaccatgagactgcaggataagtcccctcaataaacttcggttcataggaaaaaaaaaaa

SEQ ID NO: 150763 - DNA, 623 bp, Homo sapiens
ggctcaaaataatgccaaaaagtccataactagagacattatagtgatatttacatatataaaaatcaaagagatgatgttcaaaactgctcatctcagatcttcatacttgaaaaccaagtggggtcacrtttttttctaatgtttattttttattaatagatgtggctccagtgtcttctggaaatggatattgagataaagaaacctaaaggtatttcgcattttttctcatattagtgacttaattttttgttgttttttcttcagggtaggggaatggggagaggatgtcagtgttttacaatttggacactcaaaggattctagagcctcaaggactcccagggatctgttcaccacacttggccagttgccatggtaaaaacctcaactgtgcctgaagtctcccaatccagagactgttgtattctctccagaaaataacctagtgtcttctgctgagttgtagaagagacaatcccatgcttcacaaaatgggggagaagatataaagatttggtcattttttattttattatttttaaaaagtcgtattatcaaatatctacaaaattacaaagaagagtataaaaaaaccccttgtacctaacactccaatt

SEQ ID NO: 150764 - DNA, 534 bp, Homo sapiens
tagatattcctttttccccttgattagcattttctcttacttgctatcttttttacattttggttatttctgtagtttttgtgagtatagatgtattttgaagtataaaatcacaaattttattaaatgattacatttaaaacttctgacataatataaattaacaatagattttaatgcaatttttgacatattttgagctgatttttctgattcacagtagcagagctagatataaaggaggctgattacatgtcatctcctcatgtatctgggaattcttttactgtgcactaggaggatagaasggtgcttgtgggcggatccagggacatgcccagctgaagaatattctatcccagtgcaatgtgatgaattatactctcccaacctggcaagtttctgatgacttctctctgccactttatgacagcttaatttctgaattatattttagggaatcactgaaattattatttatactgtccttaaaaattattatacaaaaatctcagataacgtatttctttcaga

SEQ ID NO: 150765 - DNA, 604 bp, Homo sapiens
tcgagaccaagctgaccaacatggtgaaaccccggctctactaaaaatataaaaaattagccagatgttttggcggctgcctttgatcccagctacttgggaggctgaggcaggagaatcacgtgaacctgggaggcggaggttgcactgagccgagattgcaccactgcactccagcctgggtgacagagtgagactccatctcaaaacaaaaacaaaaacaaaaagccaaatatatcatttggactgtttggactcctggtctcttctcctattgggtaggtgtggggttggatgcagggaatggaagttagactcggagttgtaccyccattaagataagtgaaggaatgcccacagggctgggagcacagattttcaaccccttttggaagatgtccattgaagcttgtctggacctcctgtatttgcctttgttttccttaccttagtttgtgtagaaattttaaaagctcatccatttaaacagtatatacataatgatttttataaataaagacctctgtacatgtagtatacaattctgcttagtcatcctacccatattgtttgactgataaatgtgatctttttgtctgttttt

SEQ ID NO: 150766 - DNA, 604 bp, Homo sapiens
tcgagaccaagctgaccaacatggtgaaaccccggctctactaaaaatataaaaaattagccagatgttttggcggctgcctttgatcccagctacttgggaggctgaggcaggagaatcacgtgaacctgggaggcggaggttgcactgagccgagattgcaccactgcactccagcctgggtgacagagtgagactccatctcaaaacaaaaacaaaaacaaaaagccaaatatatcatttggactgtttggactcctggtctcttctcctattgggtaggtgtggggttggatgcagggaatggaagttagactcggagttgtacccccattaagataagygaaggaatgcccacagggctgggagcacagattttcaaccccttttggaagatgtccattgaagcttgtctggacctcctgtatttgcctttgttttccttaccttagtttgtgtagaaattttaaaagctcatccatttaaacagtatatacataatgatttttataaataaagacctctgtacatgtagtatacaattctgcttagtcatcctacccatattgtttgactgataaatgtgatctttttgtctgttttt

SEQ ID NO: 150767 - DNA, 604 bp, Homo sapiens
tcgagaccaagctgaccaacatggtgaaaccccggctctactaaaaatataaaaaattagccagatgttttggcggctgcctttgatcccagctacttgggaggctgaggcaggagaatcacgtgaacctgggaggcggaggttgcactgagccgagattgcaccactgcactccagcctgggtgacagagtgagactccatctcaaaacaaaaacaaaaacaaaaagccaaatatatcatttggactgtttggactcctggtctcttctcctattgggtaggtgtggggttggatgcagggaatggaagttagactcggagttgtacccccattaagataagtgaaggaatgcccacagggctgggagcacagattttcaaccccttttggaagatgtccattgaagcttgtctggacctcctgtatttgcctttgttttccttaccttagtttgtgtagaaattttaaaagctcatccatttaaacagtatatacataatgatttttayaaataaagacctctgtacatgtagtatacaattctgcttagtcatcctacccatattgtttgactgataaatgtgatctttttgtctgttttt

SEQ ID NO: 150768 - DNA, 595 bp, Homo sapiens
cctgaagagatatttagaactaagttttataccaaaagttattgaatgtgcacacctgtaacactaacaacaacaacaacaacaaaaaagccctatacatcccatttagctctacaattacatagtccagagctacggaagatttatgtcaggtcttcgagctatcaaaaaggatattccctgagagggatataagacatcaaaactccaaggcttgagatcacagcaggtttaataaagaaagaaaaacagatgtcaatgtaaaagrgggagattatgaaattaattgtaaaataaaaagtggcatgctgagcaacattttcttccaatgtaaataatgttaggaacatatgcaatatgaacaatgatggctatttttcttttaaagattgttattattttaaacaaatcttagttacagtgaaaacaactaatatacattaacaagtaacgttattaaaaagctaggccaattgataccgcatggaaagggaatcactgtagttatgacacctaataaaaaggatttaggtctgctccttgaagtgaaatagaataggaatggtcagcaggctactggatacagatgaactga

SEQ ID NO: 150769 - DNA, 595 bp, Homo sapiens
cctgaagagatatttagaactaagttttataccaaaagttattgaatgtgcacacctgtaacactaacaacaacaacaacaacaaaaaagccctatacatcccatttagctctacaattacatagtccagagctacggaagatttatgtcaggtcttcgagctatcaaaaaggatattccctgagagggatataagacatcaaaactccaaggcttgagatcacagcaggtttaataaagaaagaaaaacagatgtcaatgtaaaagggggagattatgaaattaattgtaaaataaaaagtggcatgctgagcaacattttcttccaatgtaaataatgttaggaacatatgcaatatgaacaatgatggctatttttcttttaaagattgttattattttaaacaaatcttagttacagtgaaaacaactaatatacattaacragtaacgttattaaaaagctaggccaattgataccgcatggaaagggaatcactgtagttatgacacctaataaaaaggatttaggtctgctccttgaagtgaaatagaataggaatggtcagcaggctactggatacagatgaactga

SEQ ID NO: 150770 - DNA, 531 bp, Homo sapiens
ttgtgtaatttgaaggttgtagtgttttctaccttgaacaatctattataataaagggctggctagtgaaattctactcatttctaagcccctttattaaaatgctcattccaggagaaatgagactcatgaatgggatattataatctatttgctaaaggaacagaccagtagaaataatctgttaccataaaatgtctcctaaatatgtgtggaaataaaagtggctcattatccaatgatttcttaaacatatactttagttagcttagattaataaagtcaaaagttatcaggtttaaaatataataatttttaagaactaaattttaaaatatacaaccagaatgctctaaaaataacatttcaatatccatccactctccagctctccttcttcccgtgaccacctctctctctcctctccctgttctctcctctctcctctggctctcccgtgctggtcatgctaatgtcactrcggtattatgacattagcatttcaaactacattgaacaattctaactata

SEQ ID NO: 150771 - DNA, 605 bp, Homo sapiens
gcgaattgttgtatttttaatagatacagggttttgccatgttggccaggctgtctcaaactgctggtctcaggtgatctgcctcccttggccttccaaagtgctgggattacaggcrtaggccaccatgccagcctcttttccctttcttaatgatacctttggtgatcaaaaggtattaattttaatatatcctaatttattagtatctttctttaaggtaaacatttaatttcccttttaagaaacctttgactagtccaggccaagaagatattctaagatttcctctttaagttttatcattttatctgcacatttaattctaagatgttcctaaaatgggtttattaaatgatgtgaaggttcaagatgcattttttctatatgaatattcaattgaccaatttattgaaagaaccacttttcacagtaaatggcttggtaaaaaaaaaaagtaaataattgtaattttcattaaaactattatcctatattactagtccccaaaattcaaaagaacaaggagaaaatgattttagaattattatataatgaatatacattgagaaacaaaaaatatagccatcaccaaaataagtatt

SEQ ID NO: 150772 - DNA, 605 bp, Homo sapiens
gcgaattgttgtatttttaatagatacagggttttgccatgttggccaggctgtctcaaactgctggtctcaggtgatctgcctcccttggccttccaaagtgctgggattacaggcataggccaccatgccagcctcttttccctttcttaatgatacctttggtgatcaaaaggtattaattttaatatatyctaatttattagtatctttctttaaggtaaacatttaatttcccttttaagaaacctttgactagtccaggccaagaagatattctaagatttcctctttaagttttatcattttatctgcacatttaattctaagatgttcctaaaatgggtttattaaatgatgtgaaggttcaagatgcattttttctatatgaatattcaattgaccaatttattgaaagaaccacttttcacagtaaatggcttggtaaaaaaaaaaagtaaataattgtaattttcattaaaactattatcctatattactagtccccaaaattcaaaagaacaaggagaaaatgattttagaattattatataatgaatatacattgagaaacaaaaaatatagccatcaccaaaataagtatt

SEQ ID NO: 150773 - DNA, 408 bp, Homo sapiens
atactcttctgcttgcatattctttcattcagcaggattttgagatccatccatgctgttgtatcaataattcattccttttcactgctgagtaatatttcattgtacataccacatttcatttatcctttcaccttctgaggaatattttggttgcccaagttttgagcttttatgaacaaatctgctgtcagtakttgtgcaatagtctttgtctagacatgtctttatttctctttggtaaatacataggaatggaatgactgacatatatggtcattgtgtatttaacattttaagaaaattggcagttttctaatgtggctatactattttatgtacccatcagcagtgtataagagcttcaattgcaccacaactttgtcagcacttggtattgtcagccag

SEQ ID NO: 150774 - DNA, 583 bp, Homo sapiens
ccagccccacacaaggagaggctgagctcagacatgcctattgctgcccccacctagtggtctttctctgcctaccctggtatcagaagacaaaaatcgtaatcttttgtgagctctatggccctgtccactgtctgagaaaactgaatacttaagccggtgtccctagggcaagtttgcatcctccctataggaccatagctgacgcactcttgaagtgccacctcccggctggaggccaaacaacacaaaaccagcgcactaaacaaaaacacaaccaagaaccctcacagagtccacttcactcccctgctatttccaycagagcaggtcctggtatccatggctacaagacgtaaagacagatcatatcacaggactctttgcagacactccccagtaccaacccacagcctggtagctccactgggtggctagacccagaaaaacaagaacaatcactatagctccgctcttaggaagcctcattcctaggggaagggggagcctcattccaaatcaccacatcaagggagcaccccataggacaaaagaatctgaacagcagcaaaccccagatctt

SEQ ID NO: 150775 - DNA, 583 bp, Homo sapiens
ccagccccacacaaggagaggctgagctcagacatgcctattgctgcccccacctagtggtctttctctgcctaccctggtatcagaagacaaaaatcgtaatcttttgtgagctctatggccctgtccactgtctgagaaaactgaatacttaagccggtgtccctagggcaagtttgcatcctccctataggaccatagctgacgcactcttgaagtgccacctcccggctggaggccaaacaacacaaaaccagcgcactaaacaaaaacacaaccaagaaccctcacagagtccacttcactcccctgctatttccaccagagcaggtcctggtatccatggctacaagacgtaaagacagatcatatcacaggactctttgcagacactccccagtaccarcccacagcctggtagctccactgggtggctagacccagaaaaacaagaacaatcactatagctccgctcttaggaagcctcattcctaggggaagggggagcctcattccaaatcaccacatcaagggagcaccccataggacaaaagaatctgaacagcagcaaaccccagatctt

SEQ ID NO: 150776 - DNA, 583 bp, Homo sapiens
ccagccccacacaaggagaggctgagctcagacatgcctattgctgcccccacctagtggtctttctctgcctaccctggtatcagaagacaaaaatcgtaatcttttgtgagctctatggccctgtccactgtctgagaaaactgaatacttaagccggtgtccctagggcaagtttgcatcctccctataggaccatagctgacgcactcttgaagtgccacctcccggctggaggccaaacaacacaaaaccagcgcactaaacaaaaacacaaccaagaaccctcacagagtccacttcactcccctgctatttccaccagagcaggtcctggtatccatggctacaagacgtaaagacagatcatatcacaggactctttgcagacactccccagtaccaacccacagcctggtagctccactgggtggctagacccagaaaaacaaraacaatcactatagctccgctcttaggaagcctcattcctaggggaagggggagcctcattccaaatcaccacatcaagggagcaccccataggacaaaagaatctgaacagcagcaaaccccagatctt

SEQ ID NO: 150777 - DNA, 583 bp, Homo sapiens
ccagccccacacaaggagaggctgagctcagacatgcctattgctgcccccacctagtggtctttctctgcctaccctggtatcagaagacaaaaatcgtaatcttttgtgagctctatggccctgtccactgtctgagaaaactgaatacttaagccggtgtccctagggcaagtttgcatcctccctataggaccatagctgacgcactcttgaagtgccacctcccggctggaggccaaacaacacaaaaccagcgcactaaacaaaaacacaaccaagaaccctcacagagtccacttcactcccctgctatttccaccagagcaggtcctggtatccatggctacaagacgtaaagacagatcatatcacaggactctttgcagacactccccagtaccaacccacagcctggtagctccactgggtggctagacccagaaaaacaagaacaatcactatagctcygctcttaggaagcctcattcctaggggaagggggagcctcattccaaatcaccacatcaagggagcaccccataggacaaaagaatctgaacagcagcaaaccccagatctt

SEQ ID NO: 150778 - DNA, 587 bp, Homo sapiens
gttcctggtccgatggccacaacactccaacgagtggtgccagccaaagcgcttcatcaggcagtggcaatgtgattaatgcttgtttgcatgtgccagcagcagtggtagtacaccagggttcacccttgttagctggggtggggcgctggcagaccagcaactgccagcctctgtatgcgcattcacagtggcagcagtggcaccatggaggggaggggtcactggcatctgtgtgtgcattcacactggtgggcagtgttggcatagcagtggatttctggctggggtggggctggcaaactccttgtgcatgttcacactggtggcaatcgtggtgggaggcagggccactggccttcctgagtgctttcacaccagaaatggcagcactgcaacacagcagcargtgggggacgggtacactcacgctggcagcaatggcgcagtgggatgcacgcacatcactgcaccagcatggaagggcaaggttcacccatgcacacatgtgccaatatggcaataggaggatggccttgggtgagtgcttgctggtaaagcagcatgggggaggctgcagtagaggg

SEQ ID NO: 150779 - DNA, 587 bp, Homo sapiens
gttcctggtccgatggccacaacactccaacgagtggtgccagccaaagcgcttcatcaggcagtggcaatgtgattaatgcttgtttgcatgtgccagcagcagtggtagtacaccagggttcacccttgttagctggggtggggcgctggcagaccagcaactgccagcctctgtatgcgcattcacagtggcagcagtggcaccatggaggggaggggtcactggcatctgtgtgtgcattcacactggtgggcagtgttggcatagcagtggatttctggctggggtggggctggcaaactccttgtgcatgttcacactggtggcaatcgtggtgggaggcagggccactggccttcctgagtgctttcacaccagaaatggcagcactgcaacacagcagcaagtgggggacgggtacactcacgctggcagcaatggcgcrgtgggatgcacgcacatcactgcaccagcatggaagggcaaggttcacccatgcacacatgtgccaatatggcaataggaggatggccttgggtgagtgcttgctggtaaagcagcatgggggaggctgcagtagaggg

SEQ ID NO: 150780 - DNA, 587 bp, Homo sapiens
gttcctggtccgatggccacaacactccaacgagtggtgccagccaaagcgcttcatcaggcagtggcaatgtgattaatgcttgtttgcatgtgccagcagcagtggtagtacaccagggttcacccttgttagctggggtggggcgctggcagaccagcaactgccagcctctgtatgcgcattcacagtggcagcagtggcaccatggaggggaggggtcactggcatctgtgtgtgcattcacactggtgggcagtgttggcatagcagtggatttctggctggggtggggctggcaaactccttgtgcatgttcacactggtggcaatcgtggtgggaggcagggccactggccttcctgagtgctttcacaccagaaatggcagcactgcaacacagcagcaagtgggggacgggtacactcacgctggcagcaatggcgcagtgggatgcacgcacatcactgcaccagcatggaagggcaaggttcacccatgcacacatgtgccaatatggcaataggaggatggccwtgggtgagtgcttgctggtaaagcagcatgggggaggctgcagtagaggg

SEQ ID NO: 150781 - DNA, 609 bp, Homo sapiens
gcatccccggccatgcccccctgcaaacattccctcatcaaaactctctgggctctgtacaggctggagtcctgccccaaccatctctctaagcaactctctctgccagctcaagtgtgggggtcatggggtcttctgctgccaggattccagaggtccaaagcaagagcagctcactccttgcctgctcaactcacccattccccaggagacattaggagccaggaagaagacccagtgtgtggcagccccatgcaggattcccagcttcctcccctttcagcccagtgtctctgtcctccctctgtccactctcagtaactttcctctgaagatcgacttggaatgtgccagtcttcccaatgtcctasccccttggtggcagatattctttctagctgcatctagtcagccatcatttcccacatttattgatttacctatcttgagcaatccttgcatcccaacaataaacccacttggtcatggtgcctgatcacttaatgtgctgttgaatttggtttgctggtattttgtcaaggacatcgtctttggaaacagattttaattacactaatgatgccataaatatttcacaattatttttaa

SEQ ID NO: 150782 - DNA, 509 bp, Homo sapiens
taaaaaattccacaaccattcatgatttttaaaaatatcctgacaaaatagagacatttttaatttgataaatggaatctaccaaaaaaactataagtaagaaaaaactacaagtatgaaaaactagccaggtgtggtggctcacgcctgtaatcccagcactttgggaggctgagctgggcagatcacctgaggtcagsagttcgagaccagactggctaacatggtgaaaccctgtttctcctaaaaatacaaaaaattagccaggcatggtggcgtacgcctgtaatcccagctactcggaaggctgaggcaggagaactgcttgaacccaggaggtgaaggttgcagtgggccgagatagtgccattgcactgagtgaataagagcgaaattccatctcaaaaaaaaaaaacaaaccatgaaaaactgaaagcattccctttaagattgggaatgatacaatgagtaccacccactatgaacatgctcctattcaacactgtagt

SEQ ID NO: 150783 - DNA, 609 bp, Homo sapiens
gatagctaatagccaacatatctatgagaagtcaccaacatggaagatgtttttcctatatttcagagcactatttaattttgctttcttcctttaaaatttaacacacaggcttaagtccaaagtgaacctaattgaggttgaagaagtattgtttcggtatggctgatcttttctcagtcgtggtttttgatttttttgtttgtttgtttttgaaatggagtcttgttctgtcacccaggctggaakgcagtggcacagtctcagctcattgcagcctccaccacccaggttcaagtgattctcctgcctcagcctcccaactagctgggattacaggcatgcgccaccatgcccagctaatttttgtatttttagtagagacggggtttcgccatattgtccaggctggtctcgaactcctgacctcaagtgatccatctaccttggccttcaatcatgttttggttgtaaaacttcatttatcattgtgattggcactattttttggatttgcaaatatataaaaaaatttaaaataaatacataaatgagctgctacaggaaaagatggcaatactgacatagtaaaaatggccagcaagtata

SEQ ID NO: 150784 - DNA, 582 bp, Homo sapiens
gcagaaaggagctacccactatgtgtctctgagctgttctattgctcaatgaagctcctctttgtcttgcttaccctccacttgtctgcatacctcatttttcctagtcgcaggacaagaactcaggacctgtygaatggcagggctaaaagagctgcaacaaaaacagggctgaaacatgctccttgctcgccttgttgaaggcaaagagaaggagagaagagctacagccccagacctgggcgctcccgagccagggctatgacttcctctttgggttcgtgtggttcttggctcctccttgggttcctgtggttcctggcatctccaagcttccaggtgccaccacattccccagtgacagttgtggaagctgcttgcagtatacctggtccagccacagcctcacagagagctgacacccatgctggcacctggagctgcccacccactgcagcaggtggcatacctgactgcacagcggccagaccccatgcttgctcacataccccttgctgctccatgcctaactcacccttggcaggtgttggatacaggcagtagcctgagccaagagcagcg

SEQ ID NO: 150785 - DNA, 582 bp, Homo sapiens
gcagaaaggagctacccactatgtgtctctgagctgttctattgctcaatgaagctcctctttgtcttgcttaccctccacttgtctgcatacctcatttttcctagtcgcaggacaagaactcaggacctgtcgaatggcagggctaaaagagctgcaacaaaaacagggctgaaacatgctccttgctckccttgttgaaggcaaagagaaggagagaagagctacagccccagacctgggcgctcccgagccagggctatgacttcctctttgggttcgtgtggttcttggctcctccttgggttcctgtggttcctggcatctccaagcttccaggtgccaccacattccccagtgacagttgtggaagctgcttgcagtatacctggtccagccacagcctcacagagagctgacacccatgctggcacctggagctgcccacccactgcagcaggtggcatacctgactgcacagcggccagaccccatgcttgctcacataccccttgctgctccatgcctaactcacccttggcaggtgttggatacaggcagtagcctgagccaagagcagcg

SEQ ID NO: 150786 - DNA, 494 bp, Homo sapiens
tgtgtaattgagacaacataaagtctaaatgtggagagataaagtatgtaagttttttcattttttgttttttcctatactttgagatctaagataaattttcatctctttaaaataacttgttatcrctataaaatgctttttgtgagcctcatagtaaccacaatgcaaaaacctataatagatttactaaaaataaaaagcaattaattaaaacataccaccaaagaaaatcatgtaaccataaaggaagaaagggaaagagaagttaccaaacaaccagaacacaaacaacaaaataataatatttaagtccttactgatcaataataacattgaatgttaatgaactcaattctccaataaaaaggcatagagtgtagggcagagcaagatggctaaatagaagcttaagtgattcttcccctcaacagaaacaccaaattttaacaactatgtataaaaagaaccatcacaggaaccaaaactcaggt

SEQ ID NO: 150787 - DNA, 553 bp, Homo sapiens
taccactgggattccttctggtgcctggtgttgacccaatgaggtgagcagcctccttcctcctccctagatgctgccctcctgaagcatcttccttctgggaagtccgggtggtgcacatgagtttaggtgttatttttcccgtgctttagatcaagcccagtcttcagctgtaaattgattgtgaagaaatggaggctcatagatccctacttgtgctamccttgtcagaaatagatgaggaatgtctgtgatgcggagggtgcaatgtgctgaaacttactttccccataagatgagatattcagagtaattcatttgaaatctcgataagggaacagtgcgtgtgtgtgtgtgtgtgtgtgtgtgtgtaagatagagacagagagagagacaaaatgctatggcaggaagttttcactcggccaagttttaacaacaaacaaggagcagtttgtggccaagcagtcagtccagggggaaaaacaaacaggcagagtgggggcttgggtgggggttgctgagaaagccaggaatgagtttatcatgctgc

SEQ ID NO: 150788 - DNA, 530 bp, Homo sapiens
agaaaatgcaaaaggttcctccaccccctcaacacaggggttggagcaatggcctaaagttgtcccagtacctgctcactcccttgggtggagaaagacggtgatgtacacgtggaaaacgccacccacccatgaagcccctctgagtgatttagaaagaggtccctcctcctccaggcacttttttyccaactgtcagaaaacaatcactgcaaatatggccgtgatgtgcacagtgtcctcatatgtggtgtaaccttttgcagtgcacaacatgcacaattgtgcatatcagccctgaaggcatataccaggtcagtcctctgcctggtgagtgggaaactaaatcccactgaccatgagccatccctccaaaccttcccccaggcacattcccagcaggggcatcaccaccttcctgtgttcccagcctcagtcctttggagtcaccccagactctctgggttcacatcccacctctagcgtttattaggactatgacctcggacaggtcacacagcctccctggg

SEQ ID NO: 150789 - DNA, 614 bp, Homo sapiens
ttacggcaggagtgaaatggtgagtcttttactaggactatagaaagaggattgctcttttgatttaaaaaggtgaacctggatgtttcgtaggccacactagagcctgagaattaaatctggccagagaaaagaggagccaaggtattgagagaaatggatgttgctggtctcagaatcgagttagacctaaatatacgaccacagaactttttacttgcccaaaacaaacaaacaaaaaatccccttttatttaaaatttataccggaatttctcacttttataatcaagagttctgatgcatatgggaaccagaactagtgaagactttgctgaattgcaraatgatgcctcatataaataaggttgcttctaattagtttcatgcataaatgtaaatctagtgcataaccagaagtgctgcacaaaaatacaaatctagtgttgtaaaaatttatatttattaagataagctaaaaatataaatttaatatgaattttcctgaattctaaatgctgcctattagctaacatatttaggaatactgtggagacttaaagtcatggtgtgaattttggggtgattgtggatcatattggctcaataaatacc

SEQ ID NO: 150790 - DNA, 571 bp, Homo sapiens
tgaattcttgttatatatatatgggctgtagtcatacaaatakagatgagactcagaactcaaatatgtgaaaaacaagcgaatcagtagtttctactctttggtttctgtattcctataaattgtaacttgtaatgactctcaaaattaaatgttgacagtagcatgccagataaattcaccaaaaatatctaacatctaaaaatatctaataaagagaaggctttgattaatctttgaggattaattaactagaaagttatcaatcattaaaatgatgtttactcagactagtaaccaagaacaattgatggcaagatcatgggaaatccttcttaatgtcataatggaaggtcaattacttggtgtactttttcttcaatcaactacggttctgatgaactattctttttcttcatcatcatgaaattaatgctatgactgccttatgtgggatatgacattgtacaagattacaagattacagcatcacctgagaacctggtgagattttgggttctagacgtgatgctgctgcaagttttgaaatctcaggcaggagatccttcat

SEQ ID NO: 150791 - DNA, 614 bp, Homo sapiens
gaaggctttgatttctgtctaaaacttcagttaattgtatttatatttatatactcatcctttacttctatcttaatttctagcatgactacaacaatggacacggattgaaatactaatgtttttctaatcatgtgaggcagaggaaaggatgccgtgtataatagcagagttattactcttatttcctcaacatttttttccaaaagttcaacgttcagtttatctgtgatgtaaaataatataatgccagacatattaaaaagtaaaatttgccaatgggagttgaaggaaaatcaccttctacttcaatatcatagatttcagaaggtaatttagcctaataacttgaaaaataattttgttttcaacctaattttgtacaaagaaaaatatttcatattaaaaaatgttgcatatttattcagttacttaaaaatattgtagtcagatgatatgatttttggactacgtctttgttaatgagactatgtagaagaatttttgaaatcctattmgacagttataagagtcacttagagtaaaatttatcctgatatggtacttcacttttcatcttatactgtacctcaaatagataaagaacaattatg

SEQ ID NO: 150792 - DNA, 570 bp, Homo sapiens
gtgtgtgtgtgtgtgtgtgtgtgtgtgtgtgtgtgtgtgtgtgtgtatgaagatatcatcaatgtagttttctcaaatgatcatttcctaaactttgttttaggatgtttaccactgatgtcatgattaaaaaattacctgtagtcagtaagataaagattctataatttcaataaaattgtatttatttatttttaaggctagtcaaatgaagcagtgggagaaaatctaactaaactatagttttatttaatttgcaccagactattttggtgggagaggrcaggagtgcaagggaaaggaagttgaaaagcacggttccccgcattccagggagactgtatcaatgctgttatacctgatgttaatacatttgctgtttttgaagcagttttaaacttatgaggtcattgttcagtgagctggaggtcttgacactatgcgcattaattgtctaaaaaggtaaagctcagggtgaactagagtagttgaagaaactaagaaagaggtagaacttgaactgggtttatgatgggtgagtagaattaagtgtgagaagaataaaagtca

SEQ ID NO: 150793 - DNA, 550 bp, Homo sapiens
cactgatatactttctgtatattaatttgcctaatctggatttttcatattaactgaataacacaatatgtgtctttttttactggattattttcactcagcccaaatatttttacatctacccacattgtattataaatccatattttttcctgtttatggctgaataatattccattgcagtagcataccacattttgtttgtccatacctcacttgctggatatataggttgtttttattttttagttagtattgacaatgctgctatgaacatttgtgtaaaagctttttgtggacatgtgwttttatttgtctttgatgtataccagtaagtggaattgctaggtcatatgaaaactttgtgtttaccattttaaggaactacaaaatgttttttaaattgcaacattttttattcctcctagcaataaaggagggcgcaatctatttttgaataatattctttaaattttccttctaacataaagatgacttaaatacaatattgtaattttaaggcacttaagcatataatgaaaccagtaac

SEQ ID NO: 150794 - DNA, 385 bp, Homo sapiens
caaatacctgaccagggtgtatggggataatattttttctcctaagacaataatgatgggtaatataagatacatcctaatatggaaacatcattacgtttatgaaataaaccctatttggtcatggtttactacacttgtaatatgtgcattctcttcttgaaaattttactaagaatttctatgtaaatatcataatargaattgggggtttgggttgtagctattttttccattgaaacgtgtaaggttttaatattgattatttttgtttaataagaacttagaaggtttttattttcatttttatatatgacatgcagtatgtgaagatttatataacttggacaaactgttgaatttatctcaacttgaaatttttggt

SEQ ID NO: 150795 - DNA, 649 bp, Homo sapiens
tattctactgtaaatggacacaccattcagtgaaatgaatgtttaaaaagggaaaaagcatattctttgaactaagctttctgaatacaatgtggaattggctttctcagggatatttaatgaatatgtaatattcatcaccattcacatctgtaaatatgtgcataaaagagaattaaattttcaattataatgttatactgagcaactcataactgaatttaataacatttatagttacaaagatatttatatgcatattatttgttttaatatttatttttcagttayaatagtttctcaacacccatacatatttacacatgtatgactcataaagaattataaacagctccccttcttttaattccaagaataaaggtatatgttgaaacataaaattgtaattgtttttggaatattaagtatactgtatcctcatcactcaactacatttattttgaaagtcattagtcatttacaatttcatatgtaaactgggtggctcgggtaaccaggagagtgttcatctccactgtttagccccttctcttctgtagacattcaatagtgtggcaaagaagtgaactcctgtaaggatatgtgtaccattttaattgcatatgcataaaaataattaaatacattt

SEQ ID NO: 150796 - DNA, 567 bp, Homo sapiens
ttatgtccttaaattttaaaaaatactttgtctatagttaaatttgtatttttctttgtcaccattatttaaaaaataagtgctatcattcattcagctgtatcttagttttatagatttttattttaccataaatgtaatacttttatataaatactaataaatcgataaagaagtcaagatagcatacttgttccctgccccctaattcttttgttgcttcttagtaaaatattttgtactttgtccattatataatgcaattaaatatttacataaattcatgttcccttgcttttctacaaagagatgatataatgttccattcaacatcttggattttgtggttgttttttgttattgtttttattttttactttgaaatayagcttggaagattagtcccagactgtatataaaagacatcataatttctacatgccactggaggattctacctgactaatgtaccataatttattgagctgggcatgattaatgaacatttgtaaatttgtttgatatgcctacagattttatgaaatctgatcaataggaaatatatga

SEQ ID NO: 150797 - DNA, 620 bp, Homo sapiens
tcattcactgtatttttaaataaactagttttaaatgtatttatagtaacttttttgtaaaagataaaaattttagtatttatttttagaataatttaccctttaaagtatgacataaaaacttaatttatatcatctattcaagtaatgttgaggtataccataaacactaaaaataggttaacagaggaaagtgtaagttaatatttttataatgaggctgttcttcctctccaagataaggagyaacctgggatccaccgacacccccaggtagaactagaaaagccacacaacagatcagactcatctctataaaaacatcatatagctgctgaggccacaagcatgataggcctttgttgagggtgaagtagagccaattgtcccatagaactgatgtttatagtgtcttttgaataagcatagaaattaacccttctagttttaaaagttacatttgtcttatctgagttactttctcaggtaagttaccaaccagaagccctcccagataatagcaaggaaactcaccagatcactgcctttggacaatgagatgtcagaaccctcacccatcatggctgccaaagtgatcatctgcttcctgttgaccaact

SEQ ID NO: 150798 - DNA, 421 bp, Homo sapiens
  misc_feature (1)...(421): n = A,T,C or G
tgctatataaccaagatactgattgatttctttactcctagaagtctgtgacattactgcaccacttaacgctccaaaatgaaaagtctttgccttgaaggtgaactgctgtttcaggtacatttagtagtacctatgagtgaatatttctttgaaatttgaaatatcatgcaacaaatagcmacccaaagggaaatattgtataacaagcttatgtgtaaaatataatgtgtatatatcaattatttaatactctaaataatcagtttacctttttcttatttctccttcttcattcgatatatttttatgacatcagattagctattgcttgcactaaacaaaagggaacagcattatattccattcaatattactattctctttgaaataatttannnnnnnnnnnnnnnnnnnnnnn

SEQ ID NO: 150799 - DNA, 473 bp, Homo sapiens
gagccacgctcatcaatgctcttagctagattttctggataacttgctgctgcttctatatcaacgcttgtagcttcattttgcacttacccatcctttccttaaactgcatgaaccaacctctgctagctgcaaacttttcttctgcagtttgctgacctttctcagccttcatagacttcaaaagagccttgatctggattaggcattggtttgaaggaatgttatgtctggtttgatttttctaaccaagccattaaaactttcaatatcagcaataagatggttttttctttgtgtgttaactgaagtagcacttttcattttcttcatgaagttttcctttgcattcacaacttggttagctgtttggtgcaagaggtctagcttacagcctattttggctttsaaaatgccttcctcccaaatcatttctagcatttgatttaaagtgagagtcctgcttcctttca

SEQ ID NO: 150800 - DNA, 447 bp, Homo sapiens
cctgaattccctaggcaagaagcaagtaacctccagagcacaggaagggtgcaggtgacttgccatgggtggctggtgaaaggggctcaaataatctacactctggcagtcaggctcaaaagcctaccaagggagatgacagaattgcccgtaacttaacttatgtttcaggaatgagagaggtggcatcagtacaaaatatacatatgtgtatggacacagataaagataaacatatagaacacacataggataataagaaacttttatttaaaaaaaattatgctagtaaatctgacaacttaaagcaacattctcacccaggagtgactttcctccccaccctctcttcgccactactgtccaaaatggcartagtgctggccaaggttgagaagccttgataatagatgaagttgataaatttcttgaataatacaagctgcc

SEQ ID NO: 150801 - DNA, 531 bp, Homo sapiens
tgaaaaataatgaaatggttccttttctcttgacctgtcttatgtgtccagcattttcttcagtgtttcattagatcatataacatttttaatatttgtttttttattttatggatacataatagttgtacgtatttatggggtacatgtgatactttgataccagcatacaatgtataatgatcaaagtgagtgactgggatattcatcactttaaatatttattatttctttacattaaggacattccaatttgactcatctagttattttgaaatatacaacaaattgttgataaccataatctccctattgtactaccaaaaactagaccctgtgtcttttgatgagtgtgatgataatattgacaataaatttgtgtgtatgtatatatacatatatatgtrtgtatgtatatatacatatatatgtatgtatgtatatatatttatcaatctagtctgagagtaactaggtgttgcatcatggcaaatacaccagttttgtgagtaatgactgaacaattgataa

SEQ ID NO: 150802 - DNA, 588 bp, Homo sapiens
atttttaaaaaccttaggtggactataggttaaaaatagaacctcatcagagacagattttgtggcttaaatgtgacaatgctcatgaactgtaagtttgtaatcccccacagagacatagcaaaagatatattacttattaaaaatcaagttgtatttttatagtttggcacttttgtttctacacttatccaattaatgcattcggtatattctacctccctaatttcattcatacttgcttctttctactttccactttcaatgttattattacagccacataatcatggagcgtcagcactggccaggtattagaacacaagtgcaatctctgtgtattcctatgataaaattgatgaacaaataaatgatataatttagccattgctacamagctaaataatagttagtttaaatttgattcttaggctcctaatttaatacagtcccttttgcttgcataaaaaatatctttcttgaattcccctcttgtcagttgtttcccttttaagcatttttctcccttgacatactggttagtcattcttaattgcagttttgatcatacaattaccttgctcatat

SEQ ID NO: 150803 - DNA, 536 bp, Homo sapiens
gttttaaaaatatatatgaaatacaacattcttacaatacgtacacgtgcgaggggtactcctgattttttatgaagttcactttttcttgtaatttgccttgctgtttctccatcctacttcacaaatgcagccgtttctccttattttggatttgtgactttttaggtgttatataactatagccttgtttataccacagtcactgatccccaccatacactttgagttgtctacgatgttgaataagttatgacagtagccaaacccttcccctacattcttaaggggaaagtgttcagtctcttatgattaagtgtgatgttagttgtgggattttatttttttaatattttttaactaacataaaattgtatgttttatcatgtacagcaagtatgtgtagattgtggaatgattaaatctagctagttaacaaatgcgttcgctgtcataggtatcctttttgtggtaagaacacttaacattcactgtctttgcattttcttaggtrccctttatcaggttagaagtag

SEQ ID NO: 150804 - DNA, 377 bp, Homo sapiens
gaaaatttaaaactacataagtgcctgtagtcccagctactcaggaggctgaggcaggaggaccccaggagtttgaaaccagcctaggcaacatagcaagaccacatctttaamaataaaataaaataacctatgtggctcctattacatttctatatttctgttggacaacacaaacatcatcactgtgacccagctctgcctgctgctagaggagtgcagtatccggaaacaagttaattaagctctctgaccctgagttcctcatctgtaaaatggggaattataacagtacccactcctccaggaatgcaatcaacttaaatgagatgacagtgtgcaaagcatttgctttgccttggtggcacccagcaagc

SEQ ID NO: 150805 - DNA, 377 bp, Homo sapiens
gaaaatttaaaactacataagtgcctgtagtcccagctactcaggaggctgaggcaggaggaccccaggagtttgaaaccagcctaggcaacatagcaagaccacatctttaacaataaaataaaataacctatgtggctcctattacatttctatatttctgttggacaacacaaacatcatcactgtgacccagctctgcctgctgctagaggagtgcagtatcyggaaacaagttaattaagctctctgaccctgagttcctcatctgtaaaatggggaattataacagtacccactcctccaggaatgcaatcaacttaaatgagatgacagtgtgcaaagcatttgctttgccttggtggcacccagcaagc

SEQ ID NO: 150806 - DNA, 436 bp, Homo sapiens
aataacctgaatgaaagattctaaacacctttgcagcactgcaagaaaacttcactcattccattcatttacaaataaaatgtgaattagaaaaacaaatgcagataggcagatacaaaagtccacatgtggttctttttcaaggatcattagcatatgtggaagtttaaaggatcattaatacatatgtgagagtttacctaaggtgatcrtgtgagcaagcttctgcaaacactgctcggaaagacttaaaatcttctgttgaaaatcttgctggatcaatcttttctatacaagtaaagaaagctactgccataggtgtcaatggattaaggttctgtgacgtttcaggtggagataaaggatcaatgtgaagcacagagattgaaaaagttcccacagctagtctaaaaataagttcaggccttgattcatc

SEQ ID NO: 150807 - DNA, 577 bp, Homo sapiens
tatttctgctaagtacaatgtttcctcctccatcctccaggccctagttcaatggaggatatctttgaagagctayacctgctgcagatcaacccatgggactggctgagtgtttgtttttataacagcactgcagatcgactttccctctgcccaactctgcttctttgaccctcttaaaggtatggttcattaaagcattccctaataatcttcaaactcagtcttctgcagaactaggctaatgaccgatggtgtcaggaaagggaagcggtctctaaaaatgggatttttgagataaactattcattggccagttggcaataagaatctcattactggagtagagggagtattcacagtctctggcatgagacatcagtgtcgttgttactacctcatcaacggtaaactgaaatgatataccagtaaaataaatgcactgaagtgtcaatatcttaggcatttgagagtttccagggaggtagtatttataagaaacataattgcttggattgtgtctcagggtgattaatgaatcaaagaaagatagcaaaaatctaaattaattcatcac

SEQ ID NO: 150808 - DNA, 583 bp, Homo sapiens
tgatagaatatacattaataccagaatattctcttggtaagtgaggagctagttattttgaagttcattggtgaaagagaaaagtaaaatcctaaaatctgcattagagatatttctctgatttttttaaaggaggaggtgggttattcttatattatatactaggtgaaatatatatatatttgtgcttatcatggatattttgtggttatataattaaaaatatgtaacttaagaaagggacacaggataaattcatagagaattattaatccacatttatctcattttctttgagacgcagttattcaatttgtcaataaaaataaaatccgaagtgtagctgaatttcagcaaagcatatggcaaaatttttacatttgtaagtattaattaaccactaatattatttakcaatttcccaaaagtttaattactctactcaacaactgattagtgaatttgtatattgttatttagatcttagcctagtgctcaccttctgagaaagtccttccataaccatccactcctcacttatctcacccactgtttgccacattacactatttaaatatttatt

SEQ ID NO: 150809 - DNA, 597 bp, Homo sapiens
attgcaggcagaatctttgttgtggagtgctcttgagatacatatctgtaaagaagtgagaaatgcaggattagacagagggggaagctgccaaacaataaggtgacaatggaggattctgctgattctataaacagctctggacttaaaatgagccttcacactgttccaagttgagttacaagagttcaactttggtatccccaccataggacaacaatggacctcgggatgcattcacacaatgggcataatcttgactatgcagtttcctgtggttgagggcaattcctaattgagtgatgaagctgtaaatggtyttcctcataaactgggaaatgggtttcttggaggccccgaagaggaaaactgacagagtatcacaataacagctacaatatcctagaaggtcccaatgatatactacactgtaattaacactgaaattctgggaactactttatcatttccagtcactatagctgcaaagctggaaagtaaacactgtacatcagatgattgttttcccatagaatacaacaggctgaagttcccttcattatacaaattaataaaattcaaactatataaaatata

SEQ ID NO: 150810 - DNA, 592 bp, Homo sapiens
ggtatttttcaaggactcaataatcattaactgtgatcatgatcttccccttacctactttcaataagtaaataatttacatttattaaacaaaagaaatttaatcttgcttttctgaaacaacacaattctatttcaattttctttacatagaaggagcatctcactgcagataaagatatatgtatattttttctccactcaaaattatgctgagactcaaaaacagaaatatctagtacgatatcaattcatatatcagttatgtttagagggagttgggctaaacatacagcattcatttaaaatgaaggcctcccatcatactttgctgatggtatttaagtattgaaagccaactttttctacctgcttactattatgtcatagtagcatgatttcccagacrgcagagactttgtctttttgtacatagctaggcatttgatgcttataacagtgacttctcaataattatgcattgccaggaaagataattactttaaaaatttatttaggaaattattcagcaaatagtaaataaatagtattagttggttgctattatttctgaatatcttcagtttccctc

SEQ ID NO: 150811 - DNA, 232 bp, Homo sapiens
ataaaaattcatttgtctatttattcagattaaacaactattaaggctgaatgtctcatgcctgtaaccccagcactttgagaggctgaggcgggcagaacacttgagcccaacagttaaagaccagcctgggcaacaaggcaaaaccctgtctctacaaaactcagccgagcatggtgacacaggtctatggtgacatagctctaytgtttcaactacttggatggctgaa

SEQ ID NO: 150812 - DNA, 493 bp, Homo sapiens
ttaatattattttagtctcactacagaaccaataatataagtagagaaacaatctctcctaaaaactatatgataccaaaataataagtttccaagaagaaaagctatatgctatgtgccgaacctttttgcaactaaaagttaccaggattccatgattactgcaaataatttgatccactgaagagttatacaggcataaatattatgaaagtcacactcacaggatttaaaactcaaagtattagtatttatccaaataaagcttaatcaaatttcatatttcctctattggagaaagcatttcctaatgtgattttcctgtcactacttattttccagttcattttttktcagctcctaccctgtcacggtacttatcaatctttgttagttaccaaagttaaacaaattttttcaatcaactagccatatatatgtttttctctgacccactttccgttaccaccataaaacaatgacagataaacca

SEQ ID NO: 150813 - DNA, 378 bp, Homo sapiens
cagaagccagcaaaacatagtaatcagaccagaaacaggaatccttgcaaaaactttgcagctgccagtggagaagagctcgagagagaycactgtgttactctggctaatactcttctggggaaggtgctgggtggtttccttagttgtagctatttgctctgccctacatataacaaggcccatgttcacctgccattttacctcccacagaaagaaccactggaaagatcactcctttaagagcttatccacattcagagagaagcttaagaaacactggggaggtgtggcaggctgctgggcagtattatctgatgtgaaaaatatatagaaagaaaactatcaatgcccttttactaccagaatgtgccaatg

SEQ ID NO: 150814 - DNA, 439 bp, Homo sapiens
tgaatatcttatttcataattctaaacagggatttagcacaatatgaaaactagattattcatgtaatcaaaataaaatacaatttttattctaattttaactcaraaattattatgcttatttaatttaacaattctactgaaagcttaatgagataaaaaggacagattataattacctaacattgctatggtaacttatatacaaatacctgttagtcaccaaaagtcaaaaagtaaccagcattgcaacttaagatggatcatacaacagaaattagtaccaagttaccttatcttataatattatgtgttattaaaatgaaattttaaaacaacaccaaaaattaaattggggctgtaagcgttgtgcagaaaagatttcatatagcaagcaagagactgccgtccttagaaaggcctgcatgcaaggctggcc

SEQ ID NO: 150815 - DNA, 439 bp, Homo sapiens
tgaatatcttatttcataattctaaacagggatttagcacaatatgaaaactagattattcatgtaatcaaaataaaatacaatttttattctaattttaactcaaaaattattatgcttatttaatttaacaattytactgaaagcttaatgagataaaaaggacagattataattacctaacattgctatggtaacttatatacaaatacctgttagtcaccaaaagtcaaaaagtaaccagcattgcaacttaagatggatcatacaacagaaattagtaccaagttaccttatcttataatattatgtgttattaaaatgaaattttaaaacaacaccaaaaattaaattggggctgtaagcgttgtgcagaaaagatttcatatagcaagcaagagactgccgtccttagaaaggcctgcatgcaaggctggcc

SEQ ID NO: 150816 - DNA, 439 bp, Homo sapiens
tgaatatcttatttcataattctaaacagggatttagcacaatatgaaaactagattattcatgtaatcaaaataaaatacaatttttattctaattttaactcaaaaattattatgcttatttaatttaacaattctactgaaagcttaatgagataaaaaggacagattataattacctaacattgctatggtaacttatatacaaatacctgttagtcaccaaaagtcaaaaagtaaccagcattgcaacttaagatggatcatacaacagaaattagtaccaagttaccttatcttataatattatgtgttattaaaatraaattttaaaacaacaccaaaaattaaattggggctgtaagcgttgtgcagaaaagatttcatatagcaagcaagagactgccgtccttagaaaggcctgcatgcaaggctggcc

SEQ ID NO: 150817 - DNA, 455 bp, Homo sapiens
gaacaagtcaaaaagtcaaaagaattgcatccaaactgtagaatgtgttatccaccactccccgcgaacagttggatttggtcattaagaatcagcaggacttttaamttggtgtctgtgtgcacatgcgtgcgcacatatgtatgtgtatatgtgcatgtgtgtatgtgtatgtgtataaactatgacagataaaaccattttgcttgtgtaagaatatgtaatataacttgtgcttctcatgaaggaattgcttttctgtcttctgtgctcagtagctatcctcaaaaaataatctcttatttgtatgggtgcatgctggttcagttttacagttcttattaccatttatttatggtaccagaaagggattgctgagttcctggttctaaagatagttactttcttagtgacacaaatcaatatgtaatacagttcacccttcaacagcaagg

SEQ ID NO: 150818 - DNA, 455 bp, Homo sapiens
gaacaagtcaaaaagtcaaaagaattgcatccaaactgtagaatgtgttatccaccactccccgcgaacagttggatttggtcattaagaatcagcaggacttttaaattggtgtctgtgtgcacatgcgtgcgcacatatgtatgtgtatatgtgcatgtgtgtatgtgtatgtgtataaactatgacagataaaaccattttgcttgtgtaagaatatgtaatataacttgtgcttctcatgaaggaattgcttttctgtcttctgtgctcagtagctatcctcaaaaaataatctcttatttgtatgggtgcatgctggttcagttttacagttcttattrccatttatttatggtaccagaaagggattgctgagttcctggttctaaagatagttactttcttagtgacacaaatcaatatgtaatacagttcacccttcaacagcaagg

SEQ ID NO: 150819 - DNA, 455 bp, Homo sapiens
gaacaagtcaaaaagtcaaaagaattgcatccaaactgtagaatgtgttatccaccactccccgcgaacagttggatttggtcattaagaatcagcaggacttttaaattggtgtctgtgtgcacatgcgtgcgcacatatgtatgtgtatatgtgcatgtgtgtatgtgtatgtgtataaactatgacagataaaaccattttgcttgtgtaagaatatgtaatataacttgtgcttctcatgaaggaattgcttttctgtcttctgtgctcagtagctatcctcaaaaaataatctcttatttgtatgggtgcatgctggttcagttttacagttcttattaccatttatttatggtaccagaaaggrattgctgagttcctggttctaaagatagttactttcttagtgacacaaatcaatatgtaatacagttcacccttcaacagcaagg

SEQ ID NO: 150820 - DNA, 571 bp, Homo sapiens
gctttcctagtctgatatattgtaatttatatcagctaggggtcagataagagctatctgcagactgaaaacaacaacaacaataatgatgatgatgataatactagtagtcataaactaaaagtccacactttaaaaattaataaaactggccaggtgcaggggctcatgcctgtaatcccagcactttgaggagccaaggagagcagatcacaaggtcaagagatcgagaccatcctggccaacatggtgaaatcccatctctactaaaaatacaaaaattagctgggcatggcggtgcgcgcctgtagtcccagctacttggaaggctgaggcaggagaatcgcttgagcctgagaggtggaggttgcagtgagccaagatcacaccactgtactccagcctggcaacagagccagactgcatctcaaaaaaaayttaataaagctaatacaaaaccctttagctaataaaagattacagtaccaaaaacatccaattataaataacaaacactctgtattataggagaagatgaatcctactatatactgttctttatgttactcag

SEQ ID NO: 150821 - DNA, 388 bp, Homo sapiens
ccctataaaatgaaaacatacwtttcatctgaatatatatataatatagttaatatttttcaagtaagttctcttttgttgtttttttttttctgaaacacaggcagttttaatttttagtttgctaaatcaaccttcagaatgtctgcttatgaggtcattcttaggaaggcttttgtcaacataaagtgtacctgcaaaataagcgtttgtgttttcttctggtactttactcatttgcatatgtaaaaatttcaatctgtattccatcaggaactttgtttgtgacataaaatttcattagttttcttcaaacagcagacttttttttattaataattcatcctttcctactcatcaatccttatgtatatcttacataatttca

SEQ ID NO: 150822 - DNA, 388 bp, Homo sapiens
ccctataaaatgaaaacatacttttcatytgaatatatatataatatagttaatatttttcaagtaagttctcttttgttgtttttttttttctgaaacacaggcagttttaatttttagtttgctaaatcaaccttcagaatgtctgcttatgaggtcattcttaggaaggcttttgtcaacataaagtgtacctgcaaaataagcgtttgtgttttcttctggtactttactcatttgcatatgtaaaaatttcaatctgtattccatcaggaactttgtttgtgacataaaatttcattagttttcttcaaacagcagacttttttttattaataattcatcctttcctactcatcaatccttatgtatatcttacataatttca

SEQ ID NO: 150823 - DNA, 568 bp, Homo sapiens
taccactcactattcaaacccctgctctcaaatttaggacacaaacatatttatatatttttttctttaagacactcactagtcaatattttaaactcaggaactaagcagatgtgaatagcaagagataaagtatatgtgctcctggttggccacatttcagaatcctatagaactgacacagaaaatgtttgtggacatgagagaagtggaggtttyttttagaactgggttcagtaaactttttctgtaaaggaccagataataaattttaggccttgaagacaagaaagcaaaatcaaaggtaccatgtagttgttgtttataacaagagaaaaaccaaattttgacaaaatttttgttgatgcaattcaaaatataataattcaatatagttttttgtaatatagatctacaatgagaagaaagacattctttttatgggaataatcttttgctcagttgaaattcaaagttagtgttattagattctccacagtagagagaggaaaaactaaagaaagtcttcccttaagaaaaatccatacaagacatgagttaagaacat

SEQ ID NO: 150824 - DNA, 285 bp, Homo sapiens
ttaagtttttaatccattttgattttatttatgtgtatggcgagagataggggtctatttttattcttctgcatatgtatatccagttttcccagcactaattatygaagagactatgtttccccaatatatgttattgacgtctttgttgaaaatgagttcactgtaggtatgtagatttgtttcttggttctctgttctgttccattggtgtatgtgtctgtttttatgccagtaccatgctgtttcagttactatacctctgtagtataatttgaagtcagg

SEQ ID NO: 150825 - DNA, 438 bp, Homo sapiens
ttgcttctttgcacttcaaaaagatctaaggtcattcactgattatgactttgccacttccggccctattgtccttacaaagggatttcgtgagtaaccttactgtaaagaagtcagcccaatgaaaaattcttgatatttgcatgtctattaaatttaacacgtttgctttttcatttgaacctttaattgaatatttttaattgtataatataaggtcatacttattgggacttgagagttcgtcttatgagagttgaaatgctttttgtttacttccctggattatgcagtaragtaaacgagggtcaatcagaagctgacactgtgttggggaacagcctagtcaagagatgttcacatttctgtgaaattttgttgatctacaaccaaaatagcaaaaagcattaatgcattcttaacaccttttagtcagtt

SEQ ID NO: 150826 - DNA, 584 bp, Homo sapiens
gtgttcccggggtggcctcaaactccgaggtttaagtgatcctcccatcttagcctcctaagtaactgggaccagaggtgttccccaatgtgccgggctaactggttttaattctacagagcactctttaaatcactgtttcctctctaaacatcttcagtttcatattgtacttcactgtcttgtaaactacttttctgtgggagcagctacagtgaataacattgtggtatacatagtggtatacatggttgtgatatacattgttgtgttgtggtaacattgtggtatctttgccgccttgtatttaaaaaatcctggcttacactaagggagccttggaaactcccaatactttgggaggccgaggtagatgggtcacctaaggtcaggagctcaaaacccaacatggcaaaacaccatcactgcttaaaaaaagtaataaaaaattagcccagtgtaatgacacacacctgtagtcycagctctcctggaagctgaggcaggagaatcgcttgaacccaggaggtggaggttacagtgagccgagatagcgccactgcactccagcctgagcaacagag

SEQ ID NO: 150827 - DNA, 589 bp, Homo sapiens
tgctaatgaaacacttcttcaagttccccaagtgggaacaggtccatcattcccttagtcaaaactttggacacaggctacgtcatacaagtaagcaaacagtaagagaaaaacaaaatgtggccaggcgcggtggctcacgcctgtaatcccagcactttgggaggccgaggcaggcggatcacgaggccaggagatcaagaccatcctggctaacatggcgaaaccctgtctctaccaaaaatacaaaaattagccaggcgtggtggcgggcacctgtaatctcagctactcgagaggctgaggcaggagaatctcttgaacctgggaggtggagattgcagtgagccgaggtcgtgccatygcactccagcctggacatcaaagtgagactcaggccaaaaaaaaaaaaaaaaaaaaccttgacgtgtcaatgtttgtgtctggcctaggagaatgaggatgacagcttcacttgccttttgaagaagaaacattacaaaaccttaatctgaagtataaagtcaaaagatacggctctttctcacacttgcaagacttacaaatacagcctcaaacattatgacac

SEQ ID NO: 150828 - DNA, 589 bp, Homo sapiens
tgctaatgaaacacttcttcaagttccccaagtgggaacaggtccatcattcccttagtcaaaactttggacacaggctacgtcatacaagtaagcaaacagtaagagaaaaacaaaatgtggccaggcgcggtggctcacgcctgtaatcccagcactttgggaggccgaggcaggcggatcacgaggccaggagatcaagaccatcctggctaacatggcgaaaccctgtctctaccaaaaatacaaaaattagccaggcgtggtggcgggcacctgtaatctcagctactcgagaggctgaggcaggagaatctcttgaacctgggaggtggagattgcagtgagccgaggtcgtgccatcgcactccagcctggacatcaaagtgagamtcaggccaaaaaaaaaaaaaaaaaaaaccttgacgtgtcaatgtttgtgtctggcctaggagaatgaggatgacagcttcacttgccttttgaagaagaaacattacaaaaccttaatctgaagtataaagtcaaaagatacggctctttctcacacttgcaagacttacaaatacagcctcaaacattatgacac

SEQ ID NO: 150829 - DNA, 589 bp, Homo sapiens
tgctaatgaaacacttcttcaagttccccaagtgggaacaggtccatcattcccttagtcaaaactttggacacaggctacgtcatacaagtaagcaaacagtaagagaaaaacaaaatgtggccaggcgcggtggctcacgcctgtaatcccagcactttgggaggccgaggcaggcggatcacgaggccaggagatcaagaccatcctggctaacatggcgaaaccctgtctctaccaaaaatacaaaaattagccaggcgtggtggcgggcacctgtaatctcagctactcgagaggctgaggcaggagaatctcttgaacctgggaggtggagattgcagtgagccgaggtcgtgccatcgcactccagcctggacatcaaagtgagactcaggccaaaaaaaaaaaaaaaaaaaaccttgacgtgtcaatgtttgtgtctggcctaggagaatgaggatgacagcttcacttgccttttgaagaagaaacattacaaaaccttaayctgaagtataaagtcaaaagatacggctctttctcacacttgcaagacttacaaatacagcctcaaacattatgacac

SEQ ID NO: 150830 - DNA, 565 bp, Homo sapiens
actatgggggatgggatggttatcacatgatacattatagtcaatctgcactgagatgttaaatgattgatacattttatatcattataatttacaaattatcttcctacctcctgtgtctaatacaatcccagacagatttgaagctctttgagggaagggccaagcttcatacttatttataaccacgatagcatttagtagaatccaacacatcactgattcccaatcaaaatgtatggaatgagtggaaaacagtaagatgtgctacgtggttgtcagagattctggtttagggagccttgatttagttacttttcagggtaattcctttyaagcagcttggttattagaacttccttgggagagttactgtgtttattttgcgctcatgtgcttagttcaagacagagtccatagttcaaatcattgaaaatgacccattaaaattttccttttttttttctaataaacatggaagaagagccatttatctattaggtgctatggatcgagcaactgaatggcaaaagtaaaaatccctaaacaaggtttagaacaaaac

SEQ ID NO: 150831 - DNA, 376 bp, Homo sapiens
ttcaaaccttctacctcctaatccaatgctcttttccaccatatggaataaccacctagattttgtacgcaagtaaagttgttagttcttttctgggaccacattctgctccctggcttttttttttttttttttttttttttttttgacagagtctcacttcacccaggctggagtgcagtggcatgatcttggctcactgcaacctccacctcccaggttcaagcgattctcatgcctcarcttcctgagtagctgggattatgggcatttgccaccatgcctggctaattgctttgtatttttagtagagatgaggtttcgccatgttggccaggctggtcttgaactcctgacgtcaagtgatccacctgcc

SEQ ID NO: 150832 - DNA, 598 bp, Homo sapiens
ttccttccttcctggtgaattgcaagggctgctgtgccggcaccttcctgttatagtctctgtcatacmcacaagcactcagacattctcctggtgtttccctcttccttgggcacctgtgtccataacggaggatggtgatagctgggagactcccgcttggatgtcagtggaggccatggggccccttccaccacaggtctcaggattaaggagctgcagttttcatcgcaacgagtgcccctttccctgcttatagcttggaggacgctagtcctgggctctgggagggatatagatagatacctgtgtccctctgccctctcccttctgctaggaccccggcctgctcagtttgccaagggtggcttgttttccgtctggagtgtcaagcctgcattgagagggaaggcgtggggctggaccttccagcattgtgtatgtaggagtgggggtggtgggcagggtgagtaggacctttgtctgactaggaccaatagttttgaaatgacttgaaaaaaatttgatcttggggaatttccagcatgagtaaaacctagagacttctcagagttttgagaaagccaccccctgtcaa

SEQ ID NO: 150833 - DNA, 615 bp, Homo sapiens
agccacattgctgccatggcaacagaggccgaggccgagtttagcggcagtccaggcgtgcacctgtgggaagggctggcggggggcaggtgggaggcaagggggccggcgagggggttggtcagtgtgttgttgacctgccctaagacgggaggcgggttagagacaagcgtctcggacctgcgggggcagggtttttgccctggttctcctggaggcattgggctcagggtacaaatagtaacccaaggaggcagagcaggtgttcagggacctgaacgggggccaaccaggggagagcaasgaggagaagactctcgctcccatctctgccttcagctctcaaaccacagcagggctcagagccccgcccggggggactcagctctcaccccactgtgagcagctgcaggaagatgctgcggaatcccggtgtggggccagggtctttgccgctgcctgtccccgcgccacctccctctttgctccctgtccctgtgccctgtccttgtcgcgtgaccaccatgactggtttccgtgtccgtcgattttccgattcctttggtgctggcaggtgccttctctcgggagacagatcacgggcgtcacgcacag

SEQ ID NO: 150834 - DNA, 426 bp, Homo sapiens
agaaaaatgttggccacacgtggtggctcatgcctgtaatcccagcactttgggaggctgaggcaggcagatcacgaggtcaggagttcgagaccaggtgaaattgatctctactaaaaaawtaaaaattagctgagcatggtggcgggtgcctgtaatcccagctacctgggaagctgaggcaggggaatcgcttgaacccaggaggtggaggttgcagtgagctgacatcgtgccactgcactccagcctgggcgacagagtgagattcggtctctttaaaaaaaaaaaagttgttacaacggacgggggtgctacttgcatctcgtgggtagaggccagggatactgctcaacgtcttagaatgcacaaaacagacccaatcccgacaaagattcgtctggtcgaaatgtcagtagtgccaac

SEQ ID NO: 150835 - DNA, 426 bp, Homo sapiens
agaaaaatgttggccacacgtggtggctcatgcctgtaatcccagcactttgggaggctgaggcaggcagatcacgaggtcaggagttcgagaccaggtgaaattgatctctactaaaaaaawaaaaattagctgagcatggtggcgggtgcctgtaatcccagctacctgggaagctgaggcaggggaatcgcttgaacccaggaggtggaggttgcagtgagctgacatcgtgccactgcactccagcctgggcgacagagtgagattcggtctctttaaaaaaaaaaaagttgttacaacggacgggggtgctacttgcatctcgtgggtagaggccagggatactgctcaacgtcttagaatgcacaaaacagacccaatcccgacaaagattcgtctggtcgaaatgtcagtagtgccaac

SEQ ID NO: 150836 - DNA, 426 bp, Homo sapiens
agaaaaatgttggccacacgtggtggctcatgcctgtaatcccagcactttgggaggctgaggcaggcagatcacgaggtcaggagttcgagaccaggtgaaattgatctctactaaaaaaataaaaattagctgagcatggtggcgggtgcctgtaatcccagctacctgggaagctgaggcaggggaatcgcttgaacccaggaggtggaggttgcagtgagctgacatcgtgccactgcactccagcctgggcgacagagtgagattcrgtctctttaaaaaaaaaaaagttgttacaacggacgggggtgctacttgcatctcgtgggtagaggccagggatactgctcaacgtcttagaatgcacaaaacagacccaatcccgacaaagattcgtctggtcgaaatgtcagtagtgccaac

SEQ ID NO: 150837 - DNA, 575 bp, Homo sapiens
acctggtttctcttcatttttttgcttcttttctttcttttcttttctttttctttctttctttcttttttttgagaccgtgtctctctctgtckcccaggctggagtgcagtggtacgatctcagctcactgtgacctctgcctcttaggttcaagcgatactcctgcctcagcctcctgagtagctgggattacaggtgcccgccaccacgcctggctcattttgtctttttaataaagacagggtttcactatcttgacgaggctggtcttgaactcctgacctcaagcgatccgcctgcctcagcctctcagagtgctgggattacaggcgtgagccaccatgcctggcctctcttcattttccttctaggacaataattgtctgtcagttgttgatttgatgacatctgtgtctttgattgtttgcttgtttgtgtgagagagctcttgctgtgttgcccaggctagagtgcagtggcacagtcagggctcactgcagctttgacctgggcccaggcagtcctcccacctcagcctcccgagtagctgggaatgcaggtgtgcaccacca

SEQ ID NO: 150838 - DNA, 563 bp, Homo sapiens
gaagtgctacctcatcctaggcaggctggagagcgcctcccaagaatgacatcacaggggaggggaggaggaagggcatgcacagaggtgcagaggcagggagcagggaaccctctgcaaagcccaggggggtggagggagaggaagggcccagctgaggcatgggagccaggcatgccaggcattgctaccctgggactttggattttatccttcagaccaggcactttttaaaatttttttaaattttttgagacagtctcactcttgtcacccagactggaatgcaatggcacgatctcggctcactgcatctgcctcctgggctcaagcaattytcctgcctcagcctcccgagtagctgggattataggcatctgccaccacgcttgagtaatttttgtattcttagtggagacaaggttgcaccatattggccaggctggtctcaaactccagacctcaggtgatctgcctgcctcagcctcccaaagtactgggattacaggcgtgagccactgcgcccagtgctttagactgtttttgttgtgtttttttttttt

SEQ ID NO: 150839 - DNA, 540 bp, Homo sapiens
cagagtagccaagtctgaatctctgggggaggagccgggaatctgcattctagcaatcactcgcacagccctttatgcacctgtctgaaaaccactgccttatgcagagagctggatcagtgtgctgtgaaacacaggttgatttctgtgttctctgcatctgacttctgagggatctggttagaatactaagaaacataaatggtgggctccatggatccgtcctgccctgcatgcctgggaaagttctcccacagcacaggctgtggcctcccacagagccgtctcatctgaacattagcctcacaggctgcttgggtatggggagaacttgctagaatcctcctggaacatgtgacctgttgtccaggatccatagctacggactcygcatcagctgtgggagccgctcagtgtgaaccaggctcaaagaacactgcgtagagagctgcccacgtttgtttacgcacggtttgttgtgtttccagaatgaaaggaacaggacatacagggtggacaaaaccgacaggggcagctatg

SEQ ID NO: 150840 - DNA, 447 bp, Homo sapiens
ttaaagaactttaacaagataaagttctcaatgaaaactttagtgtcatgacagaattttaaaagcacaaagctggaggagttgctgttgcttatggtgcagcaaaagccccactctgtgtactctgaaactttagttcagaggatgtagcaggagttttagaaaagtaaaaggtgagtatgtgtggtcaaatacgttagatcatgcwgaataacaaggataaataggcttctttgcttgggtcctccgagagcatcttccccccatatttcacaaacagcctgggagaagctgcccgcatgacctcggagaacctcttagaatgaaggttgtatttccttcttatttgcacgtggactggtgcaggctgttcctgtggtactcactgcagtgcccagcatgccagctgtcatgtcatgtcatgtcctcatgcgattagaagaattc

SEQ ID NO: 150841 - DNA, 499 bp, Homo sapiens
attaactaaagtaggcaatagacttgagtctaaaatgtaaaacaaaactcccggaagataacataggagaatacctagatgaccttgggtatggtgatgactttttagatacaacagctaaggctcagtccatgaaagaaataattgataactggatttcagtaaaataaaacatttttgtgcagcaaaagacaacatcaagagaatgagaagccaaacaactagattaaaaaatgagtgaaagactttaatagaaatcttactaaagaggaggtacagctggaaagtaagcatgtgaaaagatgccccacatcattgtcattagggaactgcaaattgaaacaatgagataccaccacacaccaaaacccagaactctgacaacactaaatyctggtgaggacatggagcagcaagaactctcattcaatgctgatggggatgcaaaatgtacagtcgctttggaaggcagtttatcagtttcttacaaaactaaaca

SEQ ID NO: 150842 - DNA, 403 bp, Homo sapiens
acaagaaattaaccacagccaaataaagcatgccatgtctagtagcttaaatctttgccccccggaatcaactggctttggcaggtcttactgagctgcaaaagcaagttacacaacctccctgggttccccgtctgtatgatgtggatcatgaccagacccatttcatggagtggcacagaagatttactgatctcatcccggcmcagcttttggtttggtgcttggtgcatggtgactcagagtgagtgaacatctcttgtgagtgcttttctataaagttgttataaggccctggcagggcgtgtggggttatcttgtgcttgcaaacaccacagtgctgttgtcaaaactgagaattggaaaggagcccaagaccacagagcgcttgggatgggaattc

SEQ ID NO: 150843 - DNA, 421 bp, Homo sapiens
gaattctgcctgctatggtgtttctattttataaccatacaagacaagaaattaaccacagccaaataaagcatgccatgtctagtagcttaaatctttgccccccggaatcaactggctttggcaggtcttactgagctgcaaaagcaagttacacaacctccctgggttccccgtctgtatgatgtggatcatgaccagacccatttcatggagtggcacagaagatttactgatctcatcccggcacagcttttggtttggtgcttggtgcatggtgactcagagtgagtgarcatctcttgtgagtgcttttctataaagttgttataaggccctggcagggcgtgtggggttatcttgtgcttgcaaacaccacagtgctgttgtcaaaactgagaattggaaaggagcccaagac

SEQ ID NO: 150844 - DNA, 510 bp, Homo sapiens
ttgatacggtttggttctgtgttcccacctaaatctcgtgtcaaattgtcatccccgcatgttgaagggagggcctggcgtgaggtgattgaatcttgggggcaaacttcccccttgctgttctcatgataacagttctcatgagatctggttgtttgaaagtgtgtagtacttccctcttctctctctctctctctctctctctctcwctctcactctctctctctctttctctctctctctctcctgttctgcaatagtatgacatgttagcttcccctttgcctttcgccatgactgtaagtttcctgaggcctcccagccatgcttcctgtacatcctgcagaactgtgagtccaataaaccacttttctttataaattactcagtctcaggtagttccttatagcagtgtgagaacagaccaatacaatgatcatacctacaaattttctacctaggtttccttagctctgcccatattcttagactgattctccagccttgcta

SEQ ID NO: 150845 - DNA, 513 bp, Homo sapiens
ttgatacggtttggttctgtgttcccacctaaatctcgtgtcaaattgtcatccccgcatgttgaagggagggcctggcgtgaggtgattgaatcttgggggcaaacttcccccttgctgttctcatgataacagttctcatgagatctggttgtttgaaagtgtgtagtacttccctcttctctctctctctctctctctctctctcactctcactctctctctctctttctctctctctctctcctgytctgcaatagtatgacatgttagcttcccctttgcctttcgccatgactgtaagtttcctgaggcctcccagccatgcttcctgtacatcctgcagaactgtgagtccaataaaccacttttctttataaattactcagtctcaggtagttccttatagcagtgtgagaacagaccaatacaatgatcatacctacaaattttctacctaggtttccttagctctgcccatattcttagactgattctccagccttgctatga

SEQ ID NO: 150846 - DNA, 457 bp, Homo sapiens
ttgatacggtttggttctgtgttcccacctaaatctcgtgtcaaattgtcatccccgcatgttgaagggagggcctggcgtgaggtgattgaatcttgggggcaaacttcccccttgctgttctcatgataacagttctcatgagatctggttgtttgaaagtgtgtagtacttccctcttctctctctctctctctctctctctctcactctcactctctctctctctttctctctctctctctcctgttctgcaatagtatgacatgttagcttcccctttgcctttcgccatgactgtaagtttcctgaggcctcccagccatgcttcctgtacatcctgcagaactgtgagtccaataaaccacttttctttataaattactcagtctcaggtakttccttatagcagtgtgagaacagaccaatacaatgatcatacctacaaattttctac

SEQ ID NO: 150847 - DNA, 571 bp, Homo sapiens
aataacaagatattgggtgaaaggcttttcaattgtgaaacaaaagtatcctatgctcttaaatcttccagactttttccatgaaagagagtttagtacttttgtgaaaattaaaccaatagtgtatgattagaaatagcagacagaggtacaaagataatgawaatagtgtcactgagagagattttagtgtctgtgtcttcaggcagatgtgtttttatgtgagattaaaatatgtgtaacatttatgtgacagaaactttaaagcaatttcatttaacttttgtgttaacgtgatagacaattatacattatcattactgtcatacagattaggaagaaacagttctataatattaaataaacttcatgacagctgggatccaaattattgcatctgcatatcactcatatagtaagtggaaatcaagacagttttactttctcttctctctagtgttggtggaaaatattagcgttatgaagagttttcatagggatctccaaaataaggcctatattggagaccgttctacatacacttgaaaattatatgtattgtggtgctgtt

SEQ ID NO: 150848 - DNA, 610 bp, Homo sapiens
tttggcagtgtctagattttatgatgatgtgtaaataaatcccacggcagagagaagtaggcactcattctgatcccaaaataaatgctttctgtatgttattatacaatctccccaaaggtgaaactactccactgttacgcagatggagagaaaattctccacttgtgactcaagggaagtctgcttaatttggtttctcaratatcatgtttcaacagcatttagaaaaaatgaatattatatttatgtaatgtgagtagaaaacatgcctccttttaggattactatatgaaagtattcctttttgtcacaaaataaaaatattctctacccatatacaacggaacatatatatgtatatgaaatgtgaataattttttttcaagttacttcaaatatgtttagagagaagaaacatatctaagaccaaaacttttatgagtgcaccttcacctcatgtttcctaatggggatatatatatttttccctagtttatatattatggcattcttttttaccctaccctgggaaaatgctatgttgctcagtttttgtttctctaagtaaaatacattcattgtactgattttcatctttttaaacatg

SEQ ID NO: 150849 - DNA, 545 bp, Homo sapiens
cctattcctagatcatagtgataagaaggtggggttagtcgatcagttacccctatctgagggtgccaactccctgccacgcactactcttggggcgggtcatcactcatgtggtgttcttggagcaccttttgctccagtgtaggcaccacagttttctgtgcagaagcaacattgccctgatgcactcttgtgtttcagaaggaaaaataccagccagggatgcagagggctgggtctggttccacctctaccacctaccagatgtgtgacttcagataagctgattaacctctctgagcttctgcctctcctttcaggagttctgagagtgtcctcatctctgcttgtgctccttttgagtgttccttaatttgcacttggtcaaagtttgtcagggcagagctatttacagttgtccaggaagcrgaactttccgtgaaagttctggagacttccattcatccctcaaaataattcgcataaataaatatcaggctcagatgcaaagtttctttttataatagagaggagacatttgagaa

SEQ ID NO: 150850 - DNA, 545 bp, Homo sapiens
cctattcctagatcatagtgataagaaggtggggttagtcgatcagttacccctatctgagggtgccaactccctgccacgcactactcttggggcgggtcatcactcatgtggtgttcttggagcaccttttgctccagtgtaggcaccacagttttctgtgcagaagcaacattgccctgatgcactcttgtgtttcagaaggaaaaataccagccagggatgcagagggctgggtctggttccacctctaccacctaccagatgtgtgacttcagataagctgattaacctctctgagcttctgcctctcctttcaggagttctgagagtgtcctcatctctgcttgtgctccttttgagtgttccttaatttgcacttggtcaaagtttgtcagggcagagctatttacagttgtccaggaagcagaactttccgtgaaagttctggagacttccattcatcccwcaaaataattcgcataaataaatatcaggctcagatgcaaagtttctttttataatagagaggagacatttgagaa

SEQ ID NO: 150851 - DNA, 517 bp, Homo sapiens
gtatgaaaacatgtttcaatatagctgaagctgaattatttcttcttttcttttagcaagaaattttggaattgcttagactcaccaactctagcatcgcctaggggagaaggggctgctttcccagcctattttattggtcttgataggataaggcacagccaaggaataagacacgtgaagatgtagtgctgctgttactacactcaccctgtaatgtgatgcttcctstgataaagattaaacaaaccatctttttcttcgaagagactgtcctgtatgtttataaacatgtgggctttctgagaaactgaaacctttaaaaaggctgaaattaaataatttatcatgctgaatgggggaaaaaaaacctgtttctagtaaaagagaactgaagggaactaaaagggtacagaagtagagattaattccttacaaaagttattttgatgtagcacacaatgataatgataggcagaaaagttcagattttgatagatctattaatatcctatca

SEQ ID NO: 150852 - DNA, 517 bp, Homo sapiens
gtatgaaaacatgtttcaatatagctgaagctgaattatttcttcttttcttttagcaagaaattttggaattgcttagactcaccaactctagcatcgcctaggggagaaggggctgctttcccagcctattttattggtcttgataggataaggcacagccaaggaataagacacgtgaagatgtagtgctgctgttactacactcaccctgtaatgtgatgcttcctctgataaagattaaacaaaccatctttttcttygaagagactgtcctgtatgtttataaacatgtgggctttctgagaaactgaaacctttaaaaaggctgaaattaaataatttatcatgctgaatgggggaaaaaaaacctgtttctagtaaaagagaactgaagggaactaaaagggtacagaagtagagattaattccttacaaaagttattttgatgtagcacacaatgataatgataggcagaaaagttcagattttgatagatctattaatatcctatca

SEQ ID NO: 150853 - DNA, 446 bp, Homo sapiens
gagtaaatggaaaaactcagaacactgggccaggtatatatgggatgaaatctaaaacacaaccattaaaagacccaaaaatctatgcaaagggaaaccaatctttaaagcgttgcttaacattgatcaaactgtgatttaactctttgaaaatgatccagggaagtgaagaaaggsaccaaacctaccttgagagggtttacatttgttctgtgatttactggacggcttgcctggagtgcaggttgcgggaggattcgacagcttctcttccattttggcttccttcacatactggcacgatttccccaacagcacgatgctattaagtactttcagggatatcaacctaaaaacagaaacaaaacaaaccacatccgttggaattcatctaaatccctgtgaatgccatctactaccacggctaaggagaaggtgggggggca

SEQ ID NO: 150854 - DNA, 575 bp, Homo sapiens
atactattccttcattgatatactaacacgttgttctttgattcaaaatatgtatataaagaaacacaattggatatatacttaaaagccctttgtctcaaataaaattgctctgactgagatcactcaactaagtagatgccatctaatacgaaaagctctaagtatagttttctactttaattagttatcaaaattattttcataattaacacaaattaatactaccctacttttagctcgtatcattttctttaatttrtaaacatgacttacagtctttaaacacaaaagcccatgactgttgatgatgtgtgactttcagtatatgctgagctgtgctactcttctgagtgggggctggtggctcacgtttgttccctgctgcccaagtggagacagtcacaccaaggccaggagctcacaagtgttcaaaacgtctcctcttctcagtgtttgaatgagaaatatgtttaagtgatcaagatccaattcttggcagatataataggtcttccattttcagtcttgtagggataagggcaggaaattatcttgatattcaggtagccctt

SEQ ID NO: 150855 - DNA, 500 bp, Homo sapiens
ggtttagctccttttactctaacctcagaagtaaggagtgattcttctgctcatattaattatgaaaaaaatatttcaactgaagtcacagaggtctaacatttgtaatacaaaagctgtcctataaaccagtacaagaaagatagggagtgttcatatgaaatataaataactgttaaatatgtggaaagatgtttagtttcctaatgatagaaattaacggtgaaactacactgtgtacgattttccatcagtgagactggcaaagatccaaaagttgatcaaacaytgtatcagtgccctgggctacaggctttctcatgacattgctagttgaggtataaactgtacccagtacagtgggcagttcagctgtttctatcaaaatttcaagtgaatataaccttggaattccaatttcaggaatttatcctacagatacactttcatatatgtgacatggcatgtagattgcatcatggctcataattgcaaaagac

SEQ ID NO: 150856 - DNA, 383 bp, Homo sapiens
tgttttctgtcctcatgaattagtactaggcaggaggataaaagcaataaggagatcaaagsgtaaacaaattgaactcatattatcaaagattaccatatagaaatctgtgtggagatgatacttgaattgtgatcagggttattttgcctgagttttttataatgcaaaatgggagcagcggaggagaaacagcatcagagtctttggaatagtacaagaattctcgtttgttgcataaatctcatgatatcctttgttttggggaatacagcaagtggagagactcataaccgtttttaaagtcagattaactgtgtctaaatattgaaaagaaaaatagcttctaaatagaaatgttggaagaagttatgaaaaatctg

SEQ ID NO: 150857 - DNA, 383 bp, Homo sapiens
tgttttctgtcctcatgaattagtactaggcaggaggataaaagcaataaggagatcaaagcgtaaacaaattgaactcatattatcaaagattaccatatagaaatctgtgtggagatgatacttgaattgtgatcagggttattttgcctgagttttttataatgcaaaatgggagcagcggaggagaaacagcatcagagtctttggaatagtacaagaattctcgtttgttgcrtaaatctcatgatatcctttgttttggggaatacagcaagtggagagactcataaccgtttttaaagtcagattaactgtgtctaaatattgaaaagaaaaatagcttctaaatagaaatgttggaagaagttatgaaaaatctg

SEQ ID NO: 150858 - DNA, 388 bp, Homo sapiens
ttagttagttgacgtggaagttaatttctacattcagttttattgtcagctatcttcattttaaaataattttccttactttaaattatgtgtcttgaattttatatactaaaattatttacttaaaatcttttctttactaaaactgaatacaaaaacacatacattattaaaatattaacataggtttaactccttgttccaatttaaagtactgtcatttattaacaaaattatactgaacattgtttaartatatctttgtgaatgagggttataacattggcattaacaatattaatatgtttttgtctaatgacatcttcaaagagctctgacacctttaaaattttttgactctgggataaattacataataacgatccat

SEQ ID NO: 150859 - DNA, 601 bp, Homo sapiens
aatgatgccctgataattttttgtcataaagctgtatttttaaattaattttaaggttacaagacttcatggtctctagttatagaaaatgtttgattcatgaatattattaatttatcctcagttttaatactatcwccctgatctcttatttctgggagatctagcaaatataaaacagatgtttttatcaccttttgtgaaatatctccccattctaacatattcctaccataagcattagaaagtatgtcttctctacttgttttctgtgataagtccactggcctagagttttctgttttattttttgcatcttcatttatggtaagtaatacatgctaccttaagcagtcttttaacaacttccatatctccttcttttttatcattaatatccttgttattacaatattattatacacctccaggccgctcaagaacaatcagagttcttattcatcttgaaactccagtacttgaagccagttacatgttcatatctttttgttagatgtaagtttttctgttgcaagaaattttcattttgtttcaagattacagataggtgctaaagtgtgtgctacatttaacaatgagc

SEQ ID NO: 150860 - DNA, 397 bp, Homo sapiens
cacattgtcaggcaccaggaatcctgggatgaaaagaaaagcagtccgtttcaggaacttactatgtattaaggtgcagaaatagaaaaaaggaataaattatagaacaatgtcagaagcttaatgatcaaagaatgtatttggtacagagatcacaggacgaaggagctctgaaatttatttgcagaggtcaaggatggcttctctagagaaatctttttgatttrtttttgaggaataattgcttcatctcatgaacatggaagaaatatttattccaattagaatgaacattgaagaataaatgctagaacagaaattcgactttaatttattgtaccaccatatcaataagtgaagcacaagttattggaaaacacacacacacacacacaca

SEQ ID NO: 150861 - DNA, 530 bp, Homo sapiens
accaattaatataggtacaggctatctgaaatgtctaattgttagcaggctttattctagaagctgcagttttaagtagtataatctttcaatgttcatctctatctcccttttgaaaaataattcctttaaaaattcaaccatacataactctttcttcattgaaatttccctgcctttartttataatatgcctataaaatagcagttaagaattttatatgtgataagtctacaaccggccaagacaccaatacctgaactgatcataccaaaaaaatgatttgttttttcccctaataagtggttttgttctctttataacaccaaatcaaagataatgactttttaatagtatctttcatgtgtcacccctcatatctacccacacttttcaaggtgttcttcaagagttcttgatcctgtcaacattttcaaacaaggaagcattctccttctatccttctgataattatcagcactgaggtttaaattatttttccatacccaattttgttgtatttcctaaa

SEQ ID NO: 150862 - DNA, 622 bp, Homo sapiens
tttgtaataacaaagcaccaaatatgttgatcaaattatgttcaatgcaatcaaacatttggcacagactataaggtatcactcattctacttcaaaatcaaaatgacactttatttaatgaaagagcactgaaagaaaagtttctctctttttttttttttttttttttttttttgagacagagtcttgcactgtcacccgggctggagtgcagtggcatgatctcagttygctgccacctctgcctcctggattcaaatgattctcctgcctcagcctccctagtagctgggattacaggggcctgccaccacgcccagctaattttttgtatctttagtagagttggggtttcaccatgttggccaggctgttctcgaactcctgatctcgtgattcactcgccttggcctcccaaagtgctgggattacaggcttgagccactgtgccccggatgtttttctcgttttttaggtagaaacaaagggacacagtatttggagctagagaaggttaaattactgactgaaatccatgaactggaaaactgcccaaaaaaaataattaaccaaatttgtgtattctgtatgacaaatttgcaagctgagttttcaggtaat

SEQ ID NO: 150863 - DNA, 588 bp, Homo sapiens
gccagataccttaaatcatctctctcaagttcaaagttccatacatccctatggcaggggaaaaatgctgtcactctctttgctaaagcaaatcaagagtgacctttgctctagttcccaataagttcctcaaccccatccaagaccatcccaacctggagttcattgtctatatcactatcagcattttggtcaaatacattcaacaagtctctagggagtttccaatttttcctcatctgtcttcttctgagactttcaaacctttccaacttctgcccattacccatttccaaagtcacttccacatttttaggtatctttaaagcaatacacaacttctgataccatttttttttttggtattagtttgttttcacattgctataaaaaacaacttgagactggataatttacgaaaaaaaaaaaaaaaggtttacttgactcacattctgcatggctggggaggcttccggacacttacaatcatggcagaaggtgaggggaaacaaggccattcttcacatggtagcaggagagagagagtgtgtgasggaagaaatgccacacttcaaaaccaccaggtct

SEQ ID NO: 150864 - DNA, 398 bp, Homo sapiens
tatgactcagctattaaatatattgtgagcatayttgaatttcatctctagccctcttgtgcccctttcttgctaatgccttaaggaggtattcagggtttaaaaggcagttgtcataactgtcagaacatagaaggagaccatttacatattggattaaggtagtctcctgggaattttatgttttccaaattgacatttagggtgtccgaaaaatgaaaaatatgttggtgtctcagcagatccttagggtatagcagtccaggtacactgttggttttcccaggtgcaggcaaacaagttttgggatttcttataaaaggggatactaaaaatggcagaacgcaaatcaatggccatgaaaaattgggtattggaagtgatagcagacaggatag

SEQ ID NO: 150865 - DNA, 569 bp, Homo sapiens
aatttgcatatattttgacctccagaataatggctggcaactgtttatgtctacatcatagcagaactcaggcttctctcctccttctagtctaatggtctcccattaactttataaatgggggttgagcttcggggaagggccattatcatttaaactataaactaaatgctcccacagctagcccagcctaagcccaagaataattaaagcaggttgaaggctaaagacacaacgagtaatgctaggtcagatctcccccatagctgtaattttcccaccgctgtactttttgcaaaggcggtttcaaaaacgaacagcttcaccatcattgtagccataaaaactagaaaagtagcaggaaccagaggggaataatgtgtttcaatctcccccaaaagttaccaaaccmaaaaatattcattatttgacctgtcttgcagctttatggaaaaaagcccaggcatgggtttgacctgactcagagcttactcaatatgaacagcctttgcctaaaacccttatcagaaacaatcagagccaatcatttatgccactcatttattatt

SEQ ID NO: 150866 - DNA, 471 bp, Homo sapiens
tggtgttgagcctgtgggtgcacagaagtcaggaattgaggtttgggaacctctgcctagatttcagaggatgtatggaattgcctggatctccaggtagaagtttgctacagaggcagagccctcatggagaacctctcttagggcaatgtggaagggaaatgtggagttgaagaayccacacagagtctgcagcagggcattgcctagtgaagatgtgagaagggggctaccatctttcctaccccagaatggcagatccaccaacagcttgcaccatgcacctggaaaagctgcagacactcaacaccagcctttgaaagcatccaggggggttgctgtaccctgcaaagccacagaggcagagctgcccaaggccatgggagcccacctcttccatcagcatgacttagatgtaagacatggaatcaaaggcgatcatttggtaactttaaggtttaatgactgcac

SEQ ID NO: 150867 - DNA, 471 bp, Homo sapiens
tggtgttgagcctgtgggtgcacagaagtcaggaattgaggtttgggaacctctgcctagatttcagaggatgtatggaattgcctggatctccaggtagaagtttgctacagaggcagagccctcatggagaacctctcttagggcaatgtggaagggaaatgtggagttgaagaacccacacagagtctgcagcagggcattgcctagtgaagatgtgagaagggggctaccatctttcctaccccagaatggcagatccaccaacagcttgcaccatgcacctggaaaagctgcagacactcaacaccagcctttgaaagcatccaggggggktgctgtaccctgcaaagccacagaggcagagctgcccaaggccatgggagcccacctcttccatcagcatgacttagatgtaagacatggaatcaaaggcgatcatttggtaactttaaggtttaatgactgcac

SEQ ID NO: 150868 - DNA, 485 bp, Homo sapiens
tatatgtacaaatcattatacagtttcaatgtatgaagtatatttacccattagtagttaatgagctaacccttgatctaattcatgatgcaagcacatattttaaaaggagtataaatattttaaatttatatatttttatgtgttgttatgtataacaaaaagaacttcagtagatattaacttttaacaatgatgttcttagataaaaggtatraagtttcaagaaagcagctgactttatctgaactgtatctcaattacagtcagtatattgatattatattcataaataatacatataatatatcaatatacatattcatatcaggctttacctttgcatcttgaccttagaaaaggttccgttggactgaaatgaaaccaagagaatgttaagggttcttgaattatagagattaatatactataggttgggaccgcccagggcttcaaataattctcatgtggtacatatcatcaag

SEQ ID NO: 150869 - DNA, 578 bp, Homo sapiens
ctctgaggaggaagtcagaagcacatgtaaagcaacctggagcttgcaattggcatctgaaaggaggggacagtcttgggaactgagccttcaacttgtagaatctgacactatttccaggtagacagtgtcagaattgaactgaattagaggacacctagctgatgtctgcacagaattgctttcttgcttgtttggtgtctggggacaaacaaacaccacacatttggtcacataattctgtgtttgttggtgtgacagaagaggaaggtcagtttgtgttttttccactcagggaaggtgaagctccttctcagctccagcccattgcagttgtggaaaaactacctcagttgccagatcttcccatttctaagagaagcccacattttctactgatatttggaattgccttgtttttagatattgacaataaattttttaaatttacaaccaaagctcagaaaattacccagttccaagctatattaggccacagccctctggtatttgcctgcaaaatagatcttaggagagaaggatrcaaaattgaagctagtaccagaagaggttcagga

SEQ ID NO: 150870 - DNA, 570 bp, Homo sapiens
agccctctggtatttgcctgcaaaatagatcttaggagagaaggatacaaaattgaagctagtaccagaagaggttcaggaggagtaaggtgtgaactgggtgtactgccttggcaaggtggcctgtgattcctggccccaccagtgcctgtttctgggttgtcaggaaggaccttatttcagatcctagtttctaagctcctctcctacccaaggtrggtcccaaggcagccctccactgtctggctttagataagaccctatagcaacaagccaatggatgaccctctcagacctattgttatctgtatgtgatcttcaaggctgtggtagagaattcccttgtaaatagaatgcaaaagcaagtgggaaaattttcttttttctgtgtcaatcaatagtgaccattagccttctccccatcccacaaaatgcctcttccttgcaagaacaagatactgtagcctggaactttgtttgatggagatgaggtacgtactgaggtgccctagaataaagaaaagtggaaatctctctggatgagatcctcatgctagactgtagcccaag

SEQ ID NO: 150871 - DNA, 581 bp, Homo sapiens
tggtttgtttttaagaaaaagatatttaataacacaattatatcccaattcttgtaacaaatgtccaaaagtcaatggaaattaatttttctgtcctctgtacccttcataccatttttttaraaaatgactttatcagagaatagaaaaacaacagggtcaaaataaaaacaaaagataattctttgaagaattcaacaaagtgacaaatctttagctaaacaaactaaaaaaagaagagaagatacaaataaataaaatcagaaattaaagtgggaacatttctacttacctaacagaaataaaaatgattacaagaaaatagtgtggacaattgtaggccaccaaattaaataggctggatgaaatggacaaattgctaaaaacacagaatctaccaaaactgactcagaaaaaattaaaattctgaacatatctgtaacaactaaagagattgaattagtaatcaaagttgttttcttttcaacaaagaaaagtccaggattaaatggccacaatggtgaattctaccaagcatttaaagagcattgacatcagttcctttcaaactttttccaaaa

SEQ ID NO: 150872 - DNA, 617 bp, Homo sapiens
gctatagacaaatatttctacagtagtattcaaatgaaaaaaataaagtggaatatttgtaaccttttagaatactttgttaatgtttttaatcatgtaaatgactttgtcaccttcatacactatcctatatatattgcataatggtggccttggattttatgtttatggatgtccatctttatctaccactccagatttttacagccatcttcgacatgaacacggatgtaatcatactctcacaattcatgtactacaggttaaagaatcagaagaaaaaaatgtaagattgataatagttcactcaaatacttctgtctgtaatagaacattttctcatttaaaaactgatagagcattttcgagttatttttaatgagtaaggcrtattttgataagacataacatttctctcaaccatctaagtgagtcctttgagaattttcagatgtggcatatttaaattccatgttattaccttttttattaattggtatgtgtcattggacacattaacacatctatgttattggaaaataaacagaaatgattaatcagaaaaaggaaagagagattggcaggaatagtcaaatgcttttagaggttcctgcagg

SEQ ID NO: 150873 - DNA, 552 bp, Homo sapiens
ttacattaataaacatctacattaaaaaagtaaaaatacttcaaataatcaactttatgatgcacctcaaggaactagaaaaacaagaacaaatcaaacccagaaatagtagtaggaaagaaataacataaatcagaacagacataactgaagttgatatttttaaaagtacaaacaatgaaatgaaagttggttttttaaaaagataagcagaattgacaaacttttagctaaactaaataaaaacacatagggaagacccaaatgaacaaattcagaaattaaaaaagatacctaacaactgagaccacaaggataattagcgactattatgaacaactatccacccacaaattggaaaacctggaagaaattgataactttttgaatrtatataatctaacaagattgaaccataaagaaatagaaatccccaacaaaccaataatgggtaatgagatcaaaacaataacaaaaagtctccaattaaataaaagcccaggacatgataatttcactgctgaattctaccaaacattgaaagaatgaata

SEQ ID NO: 150874 - DNA, 575 bp, Homo sapiens
ataagtggcacccaaattggaaagaaagaagtcaaattagccttgtttgcacacgacatgatctcacatctcgaaaaacctaaagactacaccacaaaactgttagaactgataaatgaattagctaaagttgcaaatccaaaataaacatacaaaaatcagtagcatttatatatgccaatgccaagtaatctgaaaataatgtttaaaaaaaatcccatttacagtagctacaaagaatataaaatacctaggaatcaatttaaccaaagatgtgaaagatctatttaaaaaacacataaaacactgattaaataaagtgaagaggacaaacgcacaaaaagaaaagagattacatgctcatggattggaagaattcatattgttaaaatgaaactataaaacactgataaagtgacgaagacacacacacaaaagaaaagagattgcatgttcatggattagaagaattaatattgttaaaatgaaaatactgacccaagcaatttacagrttctatgcaatctttatcaaaatgccaataacattcttcacagaaatagaaaaaaaaactt

SEQ ID NO: 150875 - DNA, 556 bp, Homo sapiens
agtttttcattccttaccttcttccctccctctttctctagtctccagtgtctattgttcccatccttacgtctatttgtacaaatgcttagcccccacttataagtgaaaaaagtatcatatttagtttctgtttctgctttagttcacttaggataaatggcctctagttgcatccatgttgctgcaaaggacatgactttgtttttatggctgtgcagtatgccatggtgcatatgtaccatattttctttatccattccagtgttaatgaccacctaggttgattccatgtctttgytattgtgaatagtgctgcaatgaacataaaactgcatatgtctttctggtagaataatttattttcctttgagtatatacccagtaatggaattgctgggtcaagtggtagttccttgttctttgagaaatcttcacactggtttccacagtggctgaactaatttacattcccaccaactgggtataagctttcccttttctctgcatctacagcctcaccaacatctgctgttttttgactttttaacaaaag

SEQ ID NO: 150876 - DNA, 522 bp, Homo sapiens
gaacagggagttttcagaagagaattcagagagcactgctctgcagttttggcaatgagcttttataggctgaacacagaagtaaagcacagagatagcttgattggttgcagttgccttatttggatgtgctctggtcagttggctgcctgtgattggccgaagcttgacttcttgtgattggctgagacctgggtatctgttacaaaacgtatactcctaagttaggttgtagtttgttatttggaactcaatgtacagaggcagcctcmggccaatggctttctgcgtattttatttaacatgtgttaaccccatttcaacagtaaaaaacttagctcccatcatccaccatccatttatttatttgtttaattttagtagacatgtacagagttttcataattgtgaagtcacacacctgttaagaaataactttatcaactagagtacaataattacctagcttaatagtttgtcattagtcttaaagtcattccaaagttatttttttagatacat

SEQ ID NO: 150877 - DNA, 483 bp, Homo sapiens
aggtttagggggtaccatatgattggacaacaattaacaaacagacgggttttgtgatatttaccacttttaagagtacaaagttatttctcatttttaattktaattttagttttttggtttttattttaattcccttgatagcatataagaaggttgggaacttcatcatctgtttattggccgttcgggtttattagccatgagaatttcagcattgaggaattcatattattgccaatttttctattgcattggctacattttcttaattgccattcattctagattctggatacatatcaattaacaatttgtatctataaattatcaatgtcatctcctagtttgtgtttcatctttttattttgtgtaacatacattttgtcttagagactatgtttttaattttaaatatttaaaggtttaaatttacttataatttataatttttgcttatttaaaatagatttccttaccgct

SEQ ID NO: 150878 - DNA, 458 bp, Homo sapiens
ctgtgcatctggaaggtgactgcgtcccatccctgggcaccccggtcacccgcgtctcccctgtcccccacgggcagggcgagtgcctccgggttcctcactgctggctgacaccctggagtgctcacggagcaggatgggctcgcagagcagaacaaagcagcagaactccaatgtcygctgctgctcagcaggacgacaactcacatcttcattaacagtgaggagccagcaccgaccaggaaatcgtctggttagaacagaaaaggtaaacaggcaagatctatgtttttgttgcatgaggcctggtaagactgtgaatgggcaaaacgaccgattttcttatttctcaaatagagaagatagtaatgctgttgtaagggtcaaatgcgatgatttgtgtaaaatgctttgcacagtgcctggcatacaggggcctcataaatgtgggctgtttc

SEQ ID NO: 150879 - DNA, 458 bp, Homo sapiens
ctgtgcatctggaaggtgactgcgtcccatccctgggcaccccggtcacccgcgtctcccctgtcccccacgggcagggcgagtgcctccgggttcctcactgctggctgacaccctggagtgctcacggagcaggatgggctcgcagagcagaacaaagcagcagaactccaatgtccgctgctgctcagcaggacgacaactcacatcttcattaacagtgaggagccagcaccgaccaggaaatcgtctggttagaacagaaaaggtaaacaggcaagatctatgtttttgttgcatgaggcctggtaagactgtgaatgggcaaaacgaccgattttcttatttctyaaatagagaagatagtaatgctgttgtaagggtcaaatgcgatgatttgtgtaaaatgctttgcacagtgcctggcatacaggggcctcataaatgtgggctgtttc

SEQ ID NO: 150880 - DNA, 201 bp, Homo sapiens
gacattgtcttctcttcagggtcagaagaaattaattaccaaaggggaagggaggaaaccaacactatgctttttaattgcttttccctcagaacaatagrgtttttcactctatagttttcatgaaagccctcttcaccccagcccatccctactctcccacaatcccagaaataaccattgttaacagttggtatatat

SEQ ID NO: 150881 - DNA, 201 bp, Homo sapiens
gacattgtcttctcttcagggtcagaagaaattaattaccaaaggggaagggaggaaaccaacactatgctttttaattgcttttccctcagaacaatagggtttttcactctatagttttcatgaaagccctcttcaccccagccsatccctactctcccacaatcccagaaataaccattgttaacagttggtatatat

SEQ ID NO: 150882 - DNA, 499 bp, Homo sapiens
caaataaatacctgagaggatacaactctgtgggtttggcagataaaatgccactattatgcttcctttaaaaacgttcatggaaggggaggcttttttggtgtgtgaggagatgatattgtgaaatatcaagatcacttacctcccagggacaaacacacgccttcttccctacgacactaccctgactgagggtacaagaagtggcctctgttttcccaaagtaggrttgccagatttagcaaataaaaccagaggatgcctagttaaatttgaaaataacagataaacaacagtttcagtatgtcccaagtaatgcatggacgatacttaaacgtttattgttttcctgagactgagcgccctgtattttctctggcacctctaccccaaaggagagtgaaaccaaaaagaccaaaatatccgaaggaccaaatgcttggcttccaagtttaagaattgtggtctagtgtaaaacaggaagtaggggaaagaattc

SEQ ID NO: 150883 - DNA, 472 bp, Homo sapiens
aagacatgaacatacatgaaagacacagaaggccgggcacggtggagaaaggagcgggcagctgggcttcctgggtcgagtaggggctcagaaagctgtgaaactcactcatttcctgcttcaggacttccttcggtcctggatgaataatattgaagatatatgcttaaaatattcctaacgcccagatttgtacatgtgttttcttccccaagaaagctataaacagcgaaaattttgctgtaagtttccctgtgtcctttctccctctctcctttccctctcccccaaaactaaagtaaaacaaacgttaattgcctgtttttctgtgaccagcggaccttatctctactcccaattccaattccttgtaaacatactttgtaaaatcctgtgagatcctgactcctttgccatgccgctgcaaggtcataaaayagataaaacctaagttgcaattttgattttcctc

SEQ ID NO: 150884 - DNA, 541 bp, Homo sapiens
aggagcagacaggccacaaacaaggacaccatcaaatgaggaagatgctgtcggagagtgatgaggactgtgaagccgagaaactgggtgaaggagagagacgagcgggggctacttaagattctggctgtaggaggcctctctggagaggcagcatttgtgctcagacctgaatgaagaggaggcagccacgtgaagatctcggatagaacattccagaagagggaaggggaaaacaagggcagagtggctccctgcagagagaaggcaagcagtgtgagttggagaccaygtctcacctctttctacctcccctctctcctctccacgctgccggatgagccttgtcagtccaccatgttggtctgactcacagccctgttgggtgatgcctctcatttggttgttcttcccgatctctttggttcacatggctgaagggtgttctgttttgtttttttctaatttcttatgatgtctagtagcttttaaatcaagtttggaaatcaaaatacagtgaagttgtagttctacaaaatga

SEQ ID NO: 150885 - DNA, 541 bp, Homo sapiens
aggagcagacaggccacaaacaaggacaccatcaaatgaggaagatgctgtcggagagtgatgaggactgtgaagccgagaaactgggtgaaggagagagacgagcgggggctacttaagattctggctgtaggaggcctctctggagaggcagcatttgtgctcagacctgaatgaagaggaggcagccacgtgaagatctcggatagaacattccagaagagggaaggggaaaacaagggcagagtggctccctgcagagagaaggcaagcagtgtgagttggagaccacgtctcacctctttctacctcccctctctcctctccacgctgccggatgagccttgtcagtccaccatgttggtctgactcacagccctrttgggtgatgcctctcatttggttgttcttcccgatctctttggttcacatggctgaagggtgttctgttttgtttttttctaatttcttatgatgtctagtagcttttaaatcaagtttggaaatcaaaatacagtgaagttgtagttctacaaaatga

SEQ ID NO: 150886 - DNA, 566 bp, Homo sapiens
agatcttcccagcatgagtgaaatggatggatcatgctgcgtcagccaggcatggtcaggctgggactcaaaccgtgtcttcttcttagattcgtggcctaccaytatgaaagctgggaccttgttgtataataatgtggcttccacacatgggtggcataaaacaatgtcaatttattatcttgccattcttcagtttggaagttcaacattggtctcactgggatgaaatgaagtcatcatcagggccaattcctttggtggctctcaggaagaatccatttccttgtgcatttacagcttctggaggctgcccacattccttgccttgtggccccttcttccaccttcaaagtgaattatgtggcatctttctgactctacttccagtgtcacagctttctccagctcactctttttactcccctgccccatgtgaatacactgagcccacttggataaatcaggatgattttctcatctcaaggttattgtttggtcatgttcccacccacatctcatcttgaattcccatgtgtggtggaggggacctggtgggaggtaat

SEQ ID NO: 150887 - DNA, 667 bp, Homo sapiens
ctttgcatctctttaacctcctgtgagtctcggctttttcctccatagcctggagacaggtgcacatctattgaaagcagcagtagcttttggcaatgcccttcgccaagcctacacatgtggttcagcattacagtgggygtctacttggcactcattgtttttagctttggggtcacagctgaaactctgagatgacaaaaagtctcattttaatgacctgtttcacttccctttggttcactgggatacaaagagatgaatttttcccaatatatttttagaggcatatttatcataagagcaggccagcagcctctctgagtgctgaggccctaatagggacttgcagttattgtatacctacacccccacaaggcccccaaagatgcagagtggaccttttggtccctctcctccctttgtctaaggacatcagatagtgatcataaatattcatcccatctatttcctgatgctgggaagggaaaatattgcaaacaccacgagcacttgttgaagacacacatacgccaggcactgtacccagaactgactctacagtggtgatggacaggtcctgcccacgtggatcccccagtctagcagactggacaacaggatggtggcctggagaagagggtgaacataaactggtggacaaagg

SEQ ID NO: 150888 - DNA, 364 bp, Homo sapiens
tcctcccctaaacagccatgcgaccttgaggaagtcactttgcccttccaggcttcaggcttcctcttcctcctctaactgaagaaattcgacaagactttctctgagggttgttttttcccctcaacctgtaggaggcaccatggccccgcagctcccagcctcacaaagcctgttttgacattggaggaagcagccctgttgcagtccacggtccactccgaaatccattttccccactcagcataacactgaaatgagactgacttggtgtgtttgtttacaccccttgggaagttatttcccctttcacttaattacctgatatccagacaktgctgtgcaaaattcgcctcaaatacat

SEQ ID NO: 150889 - DNA, 428 bp, Homo sapiens
ggagggctgcccatgattaaaatagaggggagcagggattgggtaatatactgaaatagacattcaagagagggctataccccgatcttttttttttttttttaagacagtcycactctgttgcccaggctggagtgcagtggcatgatcatggctcactgcagtcctgacctcccggggctcaggtgatcctcctacctcagcctcccaagaagctacgactacaagtgtgcaccaccatgcccggctaaatttttttaaattttttgtagaggcagggtttcaccgtgttgtccaggctggtcttgaattcctgagttcaagcgatctgtccaccttggcctcccaaagtgctgggattacaggtgtgagccaccatgcccagtccagccctaaactaatcttatccagagctggcatagtgcagt

SEQ ID NO: 150890 - DNA, 428 bp, Homo sapiens
ggagggctgcccatgattaaaatagaggggagcagggattgggtaatatactgaaatagacattcaagagagggctataccccgatcttttttttttttttttaagacagtctcactctrttgcccaggctggagtgcagtggcatgatcatggctcactgcagtcctgacctcccggggctcaggtgatcctcctacctcagcctcccaagaagctacgactacaagtgtgcaccaccatgcccggctaaatttttttaaattttttgtagaggcagggtttcaccgtgttgtccaggctggtcttgaattcctgagttcaagcgatctgtccaccttggcctcccaaagtgctgggattacaggtgtgagccaccatgcccagtccagccctaaactaatcttatccagagctggcatagtgcagt

SEQ ID NO: 150891 - DNA, 377 bp, Homo sapiens
gggtaatatactgaaatagacattcaagagagggctataccccgatcttttttttttttttttaagacagtctcactctgttgcccaggctggagtgcagtggcatgatcatggctcactgcagtcctgacctcccggggctcaggtgatcctcctacctcagcctcccaagaagctacgactacaagtgtgcaccaccatgcccggctaaatttttttaaattttttgtaraggcagggtttcaccgtgttgtccaggctggtcttgaattcctgagttcaagcgatctgtccaccttggcctcccaaagtgctgggattacaggtgtgagccaccatgcccagtccagccctaaactaatcttatccagagctgg

SEQ ID NO: 150892 - DNA, 675 bp, Homo sapiens
actggtataggaaggcaaaaaccatcactcagagagaaaaggattgtccaggagttctctggatctttctggaytactttcagaccagtcacttgggtcacagtggccttccccctctctcagcacagtatccaagagaagagctcaccagagtagttcgcaatgcagatgaaatagccgagtacatacaacaagaaatgcaactaattatagaaaatcctccaattaatatcccccatgggtatctggcaattctcagtgaagctaaatgggttccaggtgttccaggcaacacaaagattattaaaaactttactttggagcaaatagtgacctatgtggcagacacctgcaggtgcttctttgaaaggggctattctccaaaggatgttgctgtgcttgtcagcaccgtgacagaagtggagcagtatcagtctaagctcttgaaagcaatgaggaagaaaatggtggtgcagctcagtgatgcatgtgatatgttgggtgtgcacattgtgttggacagtgtccggcgattctcaggcctggaaaggagcatagtgtttgggatccatccaaggacagctgacccagctatcttacccaatattctgatctgtctggcttccagggcaaaacagcacctatatatttttctgtgaagtgactattaggaag

SEQ ID NO: 150893 - DNA, 443 bp, Homo sapiens
aaaaccaagcaccctcatgccctgctggtttattatctagaaggcgggaaggatgagagcagtgctgtcctgaactaaatgcaaagtgacmtcctaggagggcaaagagtgttgcatgatttttgtttcccaggaggtagctcttacaacttctgtcccaccctgtgggcagttcctactaacctgctgttctgacataactctaaggagatctgaatgccgtctcctttcccattaaagatagccaacaacaaagcctaaatagtgagttcaggtctgatagaatttcccctatagtcaaaagtataaaggatttcagtggaaacatctaacctgtaaacctagacccaaggtttaagggaggccagtaagttttaggccctagggatttggtaagctcaatccccagctcattttttaagggttttgtcccagatgtatgc

SEQ ID NO: 150894 - DNA, 397 bp, Homo sapiens
tcagaacttactagttctgtgatcttgggtaaggtattattattcatttgcttatttatttacttatttatttatttttagagatagagtcttgtggtgttatccaggctggagtgtagtggtatgatcatggctcactgtaaccttgaactcctgggcctaggcaatctttccaccttagtctcccaagtagctggactacaagtgtgtgccaccacgctctgctaatttagaaaaaaaaattatagagacagrgtctctctatattgcccaggctgatctcaaactcctggcttcaagcagtccttcagctttggcctcctaaggtgctgggatcgcaggcatgagccatcgaaactggccctaagtatttatcttttaagtcatagcctcctca

SEQ ID NO: 150895 - DNA, 459 bp, Homo sapiens
cccctcacatctcattggctagagttaacttgcacrtccacctccaactgcaaagagaatgggattcgcatgttggttactcctgagttggggtgggtcaccttctctgagtacttggctgtcatttggaccgacgtggcagtctgctgcagggaaagagaagggaagtgggtgttgggtgatcaatcaacagctgtgctctggttatccactgctgtgtaacagccaagacaaagttgatgaaaacaaaagccccggtcaattccatgtgaatgtctgaatgtaactttacagtctatgtatttaaaaccatgtttatttcttgttcctcaaaaccagctctcccctgtgttggggaacagctccaccaccgcatcatggtgaccttgcatgtatccacttaggcagagtcttggcagaacgcctcatggtcttcctggatgtgggaggctgggaagc

SEQ ID NO: 150896 - DNA, 197 bp, Homo sapiens
aactttgtatgttctcatttatgcaygctaaaaattaaaacagttgaactcatgagatattgagagtacaaaaatggttgccagaacttggatggagctggacactattatcctaagtgaagaaactcaggaatggaaaccaaacattgtatgttctcactcataagtggaagctaagctatgaggttgcaaaggca

SEQ ID NO: 150897 - DNA, 574 bp, Homo sapiens
aagaaaactcttccggccttccatgccctggaggtccccgtgatccagcccctgcctccctctctggccccatcctctgcctcctctgctttcactcactggcctgctccctcttccccagcacatacctgctgtgtaatatgtgagtgaatgagccagagacaggcagagagagagcctgtggaggagggaacrgccgatgtacggaatgaggcagataaacacaggaagacagagaccaggggaagtggaaacagatggcagagaggccagggaattctctcgtgatttggggaaccccactttctccagggtcccaccccttgtctttgttagaattgggcctgggacaggctgctagtggggttggggctgatggaggtgtgggagccgggagctgggttcaggactgagttctggaccaggctggagatgggccggggtaggaactgggaattcgtcccttcccaggagttggctctcctgggctccgcatttttgtgattgggggtggggaggggggctgtctaggagggttggtgtttcccctttctctcacatcttttttgcttcc

SEQ ID NO: 150898 - DNA, 574 bp, Homo sapiens
aagaaaactcttccggccttccatgccctggaggtccccgtgatccagcccctgcctccctctctggccccatcctctgcctcctctgctttcactcactggcctgctccctcttccccagcacatacctgctgtgtaatatgtgagtgaatgagccagagacaggcagagagagagcctgtggaggagggaacagccgawgtacggaatgaggcagataaacacaggaagacagagaccaggggaagtggaaacagatggcagagaggccagggaattctctcgtgatttggggaaccccactttctccagggtcccaccccttgtctttgttagaattgggcctgggacaggctgctagtggggttggggctgatggaggtgtgggagccgggagctgggttcaggactgagttctggaccaggctggagatgggccggggtaggaactgggaattcgtcccttcccaggagttggctctcctgggctccgcatttttgtgattgggggtggggaggggggctgtctaggagggttggtgtttcccctttctctcacatcttttttgcttcc

SEQ ID NO: 150899 - DNA, 574 bp, Homo sapiens
aagaaaactcttccggccttccatgccctggaggtccccgtgatccagcccctgcctccctctctggccccatcctctgcctcctctgctttcactcactggcctgctccctcttccccagcacatacctgctgtgtaatatgtgagtgaatgagccagagacaggcagagagagagcctgtggaggagggaacagccgatgtacggaatgaggcagataaacacaggaagacagagaccaggggaagtggaaacagatggcagagaggccagggaattctctcgtgatttggggaaccccactttctccagggtcccacccsttgtctttgttagaattgggcctgggacaggctgctagtggggttggggctgatggaggtgtgggagccgggagctgggttcaggactgagttctggaccaggctggagatgggccggggtaggaactgggaattcgtcccttcccaggagttggctctcctgggctccgcatttttgtgattgggggtggggaggggggctgtctaggagggttggtgtttcccctttctctcacatcttttttgcttcc

SEQ ID NO: 150900 - DNA, 574 bp, Homo sapiens
aagaaaactcttccggccttccatgccctggaggtccccgtgatccagcccctgcctccctctctggccccatcctctgcctcctctgctttcactcactggcctgctccctcttccccagcacatacctgctgtgtaatatgtgagtgaatgagccagagacaggcagagagagagcctgtggaggagggaacagccgatgtacggaatgaggcagataaacacaggaagacagagaccaggggaagtggaaacagatggcagagaggccagggaattctctcgtgatttggggaaccccactttctccagggtcccacccctygtctttgttagaattgggcctgggacaggctgctagtggggttggggctgatggaggtgtgggagccgggagctgggttcaggactgagttctggaccaggctggagatgggccggggtaggaactgggaattcgtcccttcccaggagttggctctcctgggctccgcatttttgtgattgggggtggggaggggggctgtctaggagggttggtgtttcccctttctctcacatcttttttgcttcc

SEQ ID NO: 150901 - DNA, 579 bp, Homo sapiens
tgataggaaccattatgttgagcccaaaatggaagtaataataaatgcctcctggaggctgtgggtgtgggggattctgtatctggattccgtatcactccaactggaggctgtgggtgtgggggattctgtatctggattccgtatcactccaagtggaggctggcaggtttttctgcaagatggtccagaatmtaaaatgtcccattaatctggtcacttgggtttggctctgctgtatccatctatagtggtagagacccaccagggctcaagtggagtccatcatcctcccacgggggcctgttcttagcactgagttgatcgctccatgggggagagatcagacattccttatcagagatgatgtgaccttttctgactctgcccagtctctatgaatgttatggcctagggaagaatcatgaaactctttagcttgattagatggtaaacagtgttaacccatcctttactacagaggcatatgggtttgaatgttacctggggttctctctattgagttgagccccttcttcctttagtgggttttggacatcttctggcaagtgtccagat

SEQ ID NO: 150902 - DNA, 505 bp, Homo sapiens
aagaccagcctgggcaacacagtaagacccccatcactacagaaaattaaaaaattagttggatgggtggcatgcacctacaatcccagctacttaggatgctgaggcaggagaatcgcttgagcccagaaaattggggctgcagtgagctatgatttcctcactgcactccagattaggcgacrgagtgagaacctgtctcaaaaacaaacaaacaaacaaacagaagttcaacacacagatctctctgcgataaagtcaaggtgttcccagggctctctgttccttcctggaggttctaagggataatccgtttcccggccttttccaacttctagaggccatccacattccttcctccatcttcactgccagcagtggtggattgagttctcccatcacataattctagtctcctcttctgcctctctcttttacttttaaaaacctttgtgattatattgcatccactgagataatcaaggaaaatctccctattttaaga

SEQ ID NO: 150903 - DNA, 497 bp, Homo sapiens
accccagcactttgggaggttgaggcagagaatcacttgaggtcaggagttcaagaccagcctggtcaacatggtaaaacccatctatactaaaaatacaaaaattagccatgtgtggtggcacgtgcctgtagtctcagctactcgggacgctgaggcaggagaattgcttgaacccgggaggaggaggttacagtgagccattattgtgccactgcactccagcccagggaacagaactagattccatctcaaaaaaggaaaaaaaaatagaagattagatacgatgagtattccttaaagtcaagtgctttattgaaaccagtttaggctggaaaaagtagcaaatatccagatgacagtatatcatattaaattacaagcaactatttcatgtaarttagtagatatggtcagatattaacaaagaaaaataagagtttcagtttaaagcatatttgatcttcttataatttataccttgaacaccaaattaa

SEQ ID NO: 150904 - DNA, 534 bp, Homo sapiens
ccctttttctaatactgtatcctccattaggactggaaatgctgcttcggggctgaaagctaagaaaaatgccgggcacgcaacacgcactttgatggttttttgtttttgttttgtaatctatgggggcagttaggactaaaagtaggtgaatattgagagttgaaccccagattctcttccttagaaagcagtgttgtggccaggcacggtggctcacgcctgtaatcccagsactttgggaggtcaaggcgggtggatcacgaggtcaggagatcgagaccatcctggctaacacggtgaaaccccgtctctactaaaaatacaaaaaaaaattagctgggcgtggtggcgggtgcctgtagtcccagctactcaggaggctgaggcaggagaatcacctgaacccaggaagcagaggttgcagtgagcaaggatcgcaccactgcactccagcctgggcgacagagtgagactctgtctcaacaacaacaacgatgacaacaacaacgacgaccacaacaaaaagcaatg

SEQ ID NO: 150905 - DNA, 534 bp, Homo sapiens
ccctttttctaatactgtatcctccattaggactggaaatgctgcttcggggctgaaagctaagaaaaatgccgggcacgcaacacgcactttgatggttttttgtttttgttttgtaatctatgggggcagttaggactaaaagtaggtgaatattgagagttgaaccccagattctcttccttagaaagcagtgttgtggccaggcacggtggctcacgcctgtaatcccaggactttgggaggtcaaggcgggtggatcacgaggtcaggagatcgagaccatcctggctaasacggtgaaaccccgtctctactaaaaatacaaaaaaaaattagctgggcgtggtggcgggtgcctgtagtcccagctactcaggaggctgaggcaggagaatcacctgaacccaggaagcagaggttgcagtgagcaaggatcgcaccactgcactccagcctgggcgacagagtgagactctgtctcaacaacaacaacgatgacaacaacaacgacgaccacaacaaaaagcaatg

SEQ ID NO: 150906 - DNA, 534 bp, Homo sapiens
ccctttttctaatactgtatcctccattaggactggaaatgctgcttcggggctgaaagctaagaaaaatgccgggcacgcaacacgcactttgatggttttttgtttttgttttgtaatctatgggggcagttaggactaaaagtaggtgaatattgagagttgaaccccagattctcttccttagaaagcagtgttgtggccaggcacggtggctcacgcctgtaatcccaggactttgggaggtcaaggcgggtggatcacgaggtcaggagatcgagaccatcctggctaacayggtgaaaccccgtctctactaaaaatacaaaaaaaaattagctgggcgtggtggcgggtgcctgtagtcccagctactcaggaggctgaggcaggagaatcacctgaacccaggaagcagaggttgcagtgagcaaggatcgcaccactgcactccagcctgggcgacagagtgagactctgtctcaacaacaacaacgatgacaacaacaacgacgaccacaacaaaaagcaatg

SEQ ID NO: 150907 - DNA, 408 bp, Homo sapiens
atcctgtcctctttaggagtgagagtgagccctggaatagacagggatctttccacatagaattatttttgttgttgtgggtcaacagcattgaaatcaatgccccaggaagcccagcaagctcaaatgtggctctcccagatggaaagctagtaggtagggtggtgacgagaagccgtaccccagctcggaagttgggcagtcacatcatgtacttggagtgattgccaggccaaattggaaaccagacataagaaattggctccacggtttagcagctttgccagacacaaagaagaaattatccagagatgaaattcccctgctggcggtgactactgtccaaacttcttcctcattccccataggcttctggattttttaayggatgtcccaaatttataacaa

SEQ ID NO: 150908 - DNA, 607 bp, Homo sapiens
tggaccactggcttttgaaggcattcggtgggtcctgccacgccgccttccagcattccagaaaggtggtcccagtgaacaactcaccagggcggggccccactccacggcaccccagcaaggccagcattcgagaccagcctgaccaacatggtgaaaccccgtgtctactaaaaatgcaaaaattagccgggcatggtggcgggtgcctacaatctcagctgctcaggagactgaggcaggagaattgctggaacctgggaggtggaggctgcagtgagccgagatcactccattgcactccagcccaggtgacaacagtgagactgcatctcaaaaaaaaaaaaaattagaataatcttgtacatgttattaactttaattttgcatgtaactttyttaaaatgattaaacttttctcagcatattctcatcattaaatatgtatttaaaacattattttaaggttagatagtattttatcatataaataattcatatttactagtcccctgttgttgaacatatatgtattattgaacctttatgttctttccagtctttcaatattcaaatacttttttcaactctttcttattacttactt

SEQ ID NO: 150909 - DNA, 225 bp, Homo sapiens
tcagccagattgcccttcagaaatattataccaatttgttccagcagtcatgagaacacrcacttctctgagctcttgccagcacttgatattatattgttattgccttccaatctgttaatcatttctttttccttctttttaccctttttgcttggaaatatcttccctagcccaagatcaaataaacgataacttttctcatttaaaaaaataattatttaa

SEQ ID NO: 150910 - DNA, 225 bp, Homo sapiens
tcagccagattgcccttcagaaatattataccaatttgttccagcagtcatgagaacacacacttcyctgagctcttgccagcacttgatattatattgttattgccttccaatctgttaatcatttctttttccttctttttaccctttttgcttggaaatatcttccctagcccaagatcaaataaacgataacttttctcatttaaaaaaataattatttaa

SEQ ID NO: 150911 - DNA, 529 bp, Homo sapiens
tcctggcaatatgtgatagcttttcttatgtccttcatgttgcactcactaaaaagcattgccttttaagttgaatgagggagaaactggttaactcttaaatcataggttatatattagagagaaaattacttttattagagtcaagaaagtaaggtggtacctcattataaagaagctaaatacgtgtatgtatgtatgcatatgtgaataatgggttgagatagagaagattttgagaggatagggcagactgctatcaatgactaacattgtctttcaagaatagtcatgaatcatttaacaatggggatatgttctgagaaatgtgttgctaagctattccatcattgcatggacagtatagaggcacttaacacaaacytagatggtttagcctactaagcacttaggctatatggatatagcctaagctatcacatattgtagctcctaggctacaaacctatacagtatgttactatactgaatactgtaggcagttataacacaatggaaagtgttagtg

SEQ ID NO: 150912 - DNA, 529 bp, Homo sapiens
tcctggcaatatgtgatagcttttcttatgtccttcatgttgcactcactaaaaagcattgccttttaagttgaatgagggagaaactggttaactcttaaatcataggttatatattagagagaaaattacttttattagagtcaagaaagtaaggtggtacctcattataaagaagctaaatacgtgtatgtatgtatgcatatgtgaataatgggttgagatagagaagattttgagaggatagggcagactgctatcaatgactaacattgtctttcaagaatagtcatgaatcatttaacaatggggatatgttctgagaaatgtgttgctaagctattccatcattgcatggacagtatagaggcacttaacacaaacctagatggtttagcctactaagcacttaggctatatggatatagcytaagctatcacatattgtagctcctaggctacaaacctatacagtatgttactatactgaatactgtaggcagttataacacaatggaaagtgttagtg

SEQ ID NO: 150913 - DNA, 523 bp, Homo sapiens
gaattcagattttaaaaagtcttcactctctgaagatgatcatttgtccttaaggacaaaaatgaactgaagtttcacatgagctatttccattccagaatatctgggattctactttaagcactacataaactgactttatcctcagattagctgaatgattttgtgctgtttcaggatgtttgcactgaagaaaaacagaaagcttatctgaaatttataaaactttttgttytgctacatagaaaacagaaggtatttaaataataagcagtgatatgcttagcgagcacagctatactgattttgattagaatagtcatcaaagtagcttagggacagttaatataaaagattagaggagcaaggtctagaccatctacttctgctaaaataatttaaaaagaggtccataggccctaactatatgagcccagcttttgtaatctgacaaaaaaaatgaggagcagcctcgtgtatatcaatgtacaaaatattccttaggtcccttccattggtggtg

SEQ ID NO: 150914 - DNA, 549 bp, Homo sapiens
tcagatcagcaatcagagatgtactttgagtagtaatggcagtcactgtcattctcagtgactcactggaagaatgatcctttgtcagaggagcgctaacaggctgttttacacttagaacagcaagggatgggcattacccatttccctcaaccacctgtgtgagccaygccctcacttgctgtgtagtgcacacagatctgcccagaagaacacggcagagccaccagatgggcacccgggccagatccagcacttctgagggactggggcggctctggggagggctctgctgccactcagggtaaccagtagggtgccaggggcagctgcattcctttttgttaattaacaacaggacttcactgcccatccctaagggcttctttttcccatgctgatgtaagaggcctgggaaagcactgaaggccaagtcagtccagagccgaaatactgttgggatttgctgtcagcccagggtccccagaggcacacaccctcagcctgctgaaccctgcaaagcagacacaggccattcccacaaacatg

SEQ ID NO: 150915 - DNA, 500 bp, Homo sapiens
ttacatacaaaattttgcccactgtctgggtttccaaaaaataaataaataaaacatttaggtttgtttgcccagtgtaatagttttatgtgaaaactagtctgaacaaaccaaaattaataagaatcaaagatttagagtgttcaggcctggcacagtggctcacccctgtaattccagctgctcaggaggctgaggcaggagaatcacttgagtccaggaggcagaggttgcagtgagccgagatcgcaccactgcactgcagcctgggtgacagagtgagactctgtctcaaaaaaaaaaaaaaaaaaaaaaaargaaagggaaagaaaaaaagatttagagtgttctaaccaagttgcattattgctagctcccattctataccctaaagctaggcatctaaatactcccctctgcaactagagaaattccctaaaaattgattctttaacttatgccctaggtgagttaatttttaaaaggcagtagctggccag

SEQ ID NO: 150916 - DNA, 500 bp, Homo sapiens
ttacatacaaaattttgcccactgtctgggtttccaaaaaataaataaataaaacatttaggtttgtttgcccagtgtaatagttttatgtgaaaactagtctgaacaaaccaaaattaataagaatcaaagatttagagtgttcaggcctggcacagtggctcacccctgtaattccagctgctcaggaggctgaggcaggagaatcacttgagtccaggaggcagaggttgcagtgagccgagatcgcaccactgcactgcagcctgggtgacagagtgagactctgtctcaaaaaaaaaaaaaaaaaaaaaaaaggaaarggaaagaaaaaaagatttagagtgttctaaccaagttgcattattgctagctcccattctataccctaaagctaggcatctaaatactcccctctgcaactagagaaattccctaaaaattgattctttaacttatgccctaggtgagttaatttttaaaaggcagtagctggccag

SEQ ID NO: 150917 - DNA, 590 bp, Homo sapiens
acccttgttcacatgtttatctgccgaccttccctccactattgtcctatgaccctgccaaattcccctctctgagaaacacccaagaatgatcaataaatactaaaataaaataaaataaaataaaataaaataaaaaatttaaaaaaagttacattgggaacactgacaaagatccttggcttgagcaaaatttagtcaggtttctgaaccttctyctaggcacatctgtgcacttgcttgtaaagcctaattttagcaagaagccctccatcctccagatctggttgccccaggtgatgtctgatcaccccagcctgccttcagcatgaatcctgttggttcattttagacagaattctccctaccccaaatgtttcctcttagtaattttccatccacttattcccaccctactccttggctgtacattctcagttgtccatgctgtattcagaactgagttctaaatccatttcttttcctctattgcaatagtcctgaataatatctgcttttactgctgtaactaccatctagttctggtttttctttgacaacacaagcctaaacctttactcctgacatta

SEQ ID NO: 150918 - DNA, 524 bp, Homo sapiens
gtttgtttgtttgtttctttgtttttgggatggactcttgctctgttgcccaggctgaagtgcaatgggcgatctcagctcactgcaacctctgcctcctgggttcaagcgattctcctgtctcagcctcccaagtagctgggattacaggtgcccgccaccacaccaagctaaattttgtatttttagtagagatggggttttgccatgttggccagactggtctcaaactcctgacctcaagtgatctgcccgcctcagcctcccaaagtgctgggattacaggtgtgagccaccrcgcccgtccgaggcaagacctttaagaggtgattaggtcaagagggctccacctcatgaatggattaatggcattattgcaggagtgggttacttattgcgagagttggctcctaataaaaataatccgtttgcctgatttcctctctctgtcttctgccttccaccctcttccatgtgatgaccttcaccagatgatggctccatgcttttggacttcccagcct

SEQ ID NO: 150919 - DNA, 524 bp, Homo sapiens
gtttgtttgtttgtttctttgtttttgggatggactcttgctctgttgcccaggctgaagtgcaatgggcgatctcagctcactgcaacctctgcctcctgggttcaagcgattctcctgtctcagcctcccaagtagctgggattacaggtgcccgccaccacaccaagctaaattttgtatttttagtagagatggggttttgccatgttggccagactggtctcaaactcctgacctcaagtgatctgcccgcctcagcctcccaaagtgctgggattacaggtgtgagccaccgcgccygtccgaggcaagacctttaagaggtgattaggtcaagagggctccacctcatgaatggattaatggcattattgcaggagtgggttacttattgcgagagttggctcctaataaaaataatccgtttgcctgatttcctctctctgtcttctgccttccaccctcttccatgtgatgaccttcaccagatgatggctccatgcttttggacttcccagcct

SEQ ID NO: 150920 - DNA, 419 bp, Homo sapiens
ctatggcaaatatgaagctgcataaaatctgcttcctgacccagagagcttggaggttgttgtgattatgattatyttatattatgctcatactacttaaaactcatttgttctttcttagttattataatttcttaggacttttagatcacagattattgtcccattactttgtaatatatgttttgcttttaagaaaaaaagttcagctgctttattttttgtatcaaaatacacaattttagcatttggaacgtgagagaggatgagaaaagagagacttagaagatataattagtatcaattagggcaaaatatatatgtatcactatagcaacatgttatatcatttaaaagcatatactgtggagctaagtagataacggattcaaataacaactcttttctttattgtctgt

SEQ ID NO: 150921 - DNA, 300 bp, Homo sapiens
catgattgtaagtttcctgaggcctccccagccatgctgaactgcgagtcaattaaatctctttcttttataaattacccaggctcaggttatgtctttgttagcattgtgagaacagactaatacatcttctttttaatttactcytttgatctgttccattccagccactcattacctttgtcatgtccatgaccataccatcaccaaaaacctacattctctgcctgctacctcctttcatcccagctcccttggggcagtatttccaatccacctcatcaagacttccaatacact

SEQ ID NO: 150922 - DNA, 563 bp, Homo sapiens
actgttgtgtagagcaaaggattcaggataaagagtggaagcagcatggccagtgaagaggctactccaaaagtccagataagagatgctagcatcttggacaaggataatagccctgaggtggtgaaaggtggtccaattcagggtacatttgggaggcagagccagtaggattccctgatggattaggcatggaggcaaaagggatctcaaggtttggggcctgagtcacttgaaaaatgaaactgccatttatgagatgggaaaggtaggaggagaggcagacggggagagcaagmgagtggacatcaggatttctgctttgaaggcatcaagtctgagtgtttattaagtagacatgggcaaggcagcgtcatccactgctgctctcttttgcttacctccttgtggcttgtgagggcctgcttattaggttcctgtggaccctccaacttatttcctgcttctctccttctcagccctgcctcctgctatgcaagccttcagcctcttgaacaggttacacacctttttgcctggtagcccttccatcctccaggttg

SEQ ID NO: 150923 - DNA, 547 bp, Homo sapiens
aaggattcaggataaagagtggaagcagcatggccagtgaagaggctactccaaaagtccagataagagatgctagcatcttggacaaggataatagccctgaggtggtgaaaggtggtccaattcagggtacatttgggaggcagagccagtaggattccctgatggattaggcatggaggcaaaagggatctcaaggtttggggcctgagtcacttgaaaaatgaaactgccatttatgagatgggaaaggtaggaggagaggcagacggggagagcaagagagtrgacatcaggatttctgctttgaaggcatcaagtctgagtgtttattaagtagacatgggcaaggcagcgtcatccactgctgctctcttttgcttacctccttgtggcttgtgagggcctgcttattaggttcctgtggaccctccaacttatttcctgcttctctccttctcagccctgcctcctgctatgcaagccttcagcctcttgaacaggttacacacctttttgcctggtagcccttccatcctccaggttg

SEQ ID NO: 150924 - DNA, 563 bp, Homo sapiens
actgttgtgtagagcaaaggattcaggataaagagtggaagcagcatggccagtgaagaggctactccaaaagtccagataagagatgctagcatcttggacaaggataatagccctgaggtggtgaaaggtggtccaattcagggtacatttgggaggcagagccagtaggattccctgatggattaggcatggaggcaaaagggatctcaaggtttggggcctgagtcacttgaaaaatgaaactgccatttatgagatgggaaaggtaggaggagaggcagacggggagagcaagagagtggacatcaggatttctgctttgaaggcatcaagtctgagtgtttattaagtagacatgggcaaggcagcgtcatccactgctgctctctttygcttacctccttgtggcttgtgagggcctgcttattaggttcctgtggaccctccaacttatttcctgcttctctccttctcagccctgcctcctgctatgcaagccttcagcctcttgaacaggttacacacctttttgcctggtagcccttccatcctccaggttg

SEQ ID NO: 150925 - DNA, 563 bp, Homo sapiens
actgttgtgtagagcaaaggattcaggataaagagtggaagcagcatggccagtgaagaggctactccaaaagtccagataagagatgctagcatcttggacaaggataatagccctgaggtggtgaaaggtggtccaattcagggtacatttgggaggcagagccagtaggattccctgatggattaggcatggaggcaaaagggatctcaaggtttggggcctgagtcacttgaaaaatgaaactgccatttatgagatgggaaaggtaggaggagaggcagacggggagagcaagagagtggacatcaggatttctgctttgaaggcatcaagtctgagtgtttattaagtagacatgggcaaggcagcgtcatccactgctgctctcttttgcttacctccttgtggcttgtgagggcctgcttattaggttcctgtggaccctccaacttatttcctgcttctctccttctcagccctgcctcctgctaygcaagccttcagcctcttgaacaggttacacacctttttgcctggtagcccttccatcctccaggttg

SEQ ID NO: 150926 - DNA, 434 bp, Homo sapiens
tttttgtgttttgaaaatattagaaataatatatccctcatggtaaaaccttcacatctgaaggatgaaagacaacagatcaaagcatctcatcctctttctctctttttattagcatttcccagcaattaattttcttgcatgttctagaaattttctatgtatgtataaatatatccattttctgttatatataaccagattatgttacatcatattgtgacttcctttttatcactttgtatcctaatgtatgtttaacatcattctgtatcagaacrtgcagttcaactttgtgtttttaaagagctgcatgctattccatagtatagatgcaccataatttattctaaccagtcccctatggaaggagattaagattatttccatttttttctattacaaataatgctgcaatgagcatccttgtacat

SEQ ID NO: 150927 - DNA, 622 bp, Homo sapiens
aatgagatagcatgtgtaaaataaaatgaaattgatgctaagaggaaactgctgagaaccggattacctcaatataaagagatggtttctgaagccaatcatcctgggagtgtatcccaacactgacacttactgtgtgaacttgaggaagttccctgacctctctgtgcttcagtakccccatctggaataaggagataattatagtacacctgcctcatagaattgttgtgatgattaggtgagatgatgcacataaaggtgctaacagcagcgcttggcccgtagagctcacttgaaagggttattataaacattggattgttatgaggaataaatgaaatggtttataatgaaaacatgcatagacagtaaaataccgtacaatcactcgattaagattcaatgagctgatgaggacataacaatgctccgacaaagctcctaccttctgctactgctgatggtagctagaattggaggtgagagagcagggagtcacctgggacagtgagggagtggatgcgagaattcagcttccaggagatggccacatagccttccttctgcctacaataatcttcaaagaatgctttattgtttgctaagcactttcaaaaac

SEQ ID NO: 150928 - DNA, 442 bp, Homo sapiens
atctgtactttaacaagatccctggtagaagcaaacccaaatcctttggagaggaactcactttcattacgggcctcaaattactgctggtagtaatctctctaatgcaatttctggtcaatacaaaagataacaaagcacagaagaaaattaggcaagagagtcagcaaaaacaacagacaacagaaacagatgtacagggtctctggagactggaattatcaaatgcagtttctcaattaataaattatattcacaatagctatgtgtgaaagggaacataaaaagtaaaaaagttctcttcagtgaatagcaatctattaaaaaattataatggatttgaaaaagaaattctagacatgaagtgtttagcacattggggtagtgagttccctgtcaytgaaggtacatgaacaaggccagacaactgagtaacagaata

SEQ ID NO: 150929 - DNA, 541 bp, Homo sapiens
tccatttcaaatccaaggctctgtgagtctttggcagactggagggcagacatggtgtccagctgcctccgcacctagctcctctgcctttctggtccagctgcccagcattcatgaaatgattgggccaaaactgtgctgctttcaaagatgtagatttttattccttggtggtatgaggtttcagaccagcaggactttaactctccttggtcgaggcaactattgaagcatttctgcagagtggtccagctgctgatatacctaggtgagggccacagatggtggctgcattaggcmattcttgcattgctataaaagaataccagagactgggtaatttataaggaaaagtggtttattggggctcatagctatgcgggctgtacaggcggcatggcacccgcatctgcttctggtgagggcttccggaaattcccaatcatggcagaaggtgaaggaggagaaggcatatcagatggcgagagtgggagcaagagacagagggaaaggtgccacagtcttttaaacaactagatct

SEQ ID NO: 150930 - DNA, 541 bp, Homo sapiens
tccatttcaaatccaaggctctgtgagtctttggcagactggagggcagacatggtgtccagctgcctccgcacctagctcctctgcctttctggtccagctgcccagcattcatgaaatgattgggccaaaactgtgctgctttcaaagatgtagatttttattccttggtggtatgaggtttcagaccagcaggactttaactctccttggtcgaggcaactattgaagcatttctgcagagtggtccagctgctgatatacctaggtgagggccacagatggtggctgcattaggccattcttgcattgctataaaagaataccagagactgggtaatttataaggaaaagtggtttattggggctcatagctatgcgggctgtacaggcggcatggcacccgcatctgcttctggtgagggcttccggaaattcccaatcatggcagaargtgaaggaggagaaggcatatcagatggcgagagtgggagcaagagacagagggaaaggtgccacagtcttttaaacaactagatct

SEQ ID NO: 150931 - DNA, 313 bp, Homo sapiens
gagtgctaaccagcatggctttgcagagagaagggaatttgggacatgtctcagggagtcattcatccaacattaagacagtgttaacagggaaattgtgtgtgtgygcaaccagacatcacctgccttccctgcagggagcttcgacagctgagaaaatgtttataaagcattttgagctctcactggggtggtactgtagaaaggcaaatctttgatatgactttctcacgtctgtcaactcttattattaagcagaggttgcccctgcctttctcaaagttccaatcatggaaactaattattaggagtt

SEQ ID NO: 150932 - DNA, 494 bp, Homo sapiens
tttctttgtttctatctgctattttcctgccacaagcccctccaggctcactaattattacagttggaaacacagctaactttgccagatgacggttstactggaccattgccatccactcaggatgcaactgccctggcccttatttcaattgatgtcaagtgtccctctgcaaccttcttgtgcttgccttttgtgatccatccttcccaaagaagtagatctcagctccacacgcccatgcaataaaaacaagtgaagccgccataaaaacacatacggcatttttcttctgaggaaaagccagcctgttgcaattgtaagcaatatgcattcaaactatcacttccacccccttcacctcaaagaaggcaagtcaccctactctttcatacccttgatcttcccatactgtggacagactaaagatatttcactacatattgaaaaattaatttgatttcaagagagactgatagcaaaattcaatccag

SEQ ID NO: 150933 - DNA, 501 bp, Homo sapiens
aaacttgcagagtccaaacaagaggttaatgatataaatccattacccaattcaacctataactatataaaatctgcaagaacctcagatatacacaatgtgagttgcttggctctgcccaattttggctgaaactgtaggccattgaccaaagtggatctgggaatcaatttgtacaaagtaaataatgtacaacaaaacacataaaagaagtacacataggtcagccagtgcctgtgtgaggatgacgataatgattgtgggggagatgaaaatcaagagatagaaagaggaagaggaggaggagaaatttttttttaaagtggttggtattgatgcgcctcagacccctcaagcatgttcagagactgaacacaattattgaagagtaaaaayagagataataagcctccaaaacaggaagataaatccaggtccaagtttaagctgaccctagaagaaagagtgtaggtgaaaataaaatttgtcatgaagcaacac

SEQ ID NO: 150934 - DNA, 484 bp, Homo sapiens
cattccacgcatttcgtgctaaaggattcatttctacagtgatgcctgaaagaaacccacctgccgctggttaggcagcaagaagcagtctamaaccagaaacacccgtttggatcctatccctttccctcctgagctatgtgatgctggccaagtgaggggacctctctgaacctcagttatccaactttacaatagagatgaaaaaaaatctaacaggttctgataaccagaactaatgtgagtacctcagtgccttccagctttccattcgcaggcacgagcagtgaacaccaaccctgcctgcagtagctcagcagccactgcaaatgatcacatcaattgcattgtaaatcatgggccaaaacacattctttgtcatgagttatgaagcaaaaagtcatggaaaggaactttgctcaaaaattccaattccccatggaaaagggtggcccaaactgaaagagtggccccaaaattccaa

SEQ ID NO: 150935 - DNA, 484 bp, Homo sapiens
cattccacgcatttcgtgctaaaggattcatttctacagtgatgcctgaaagaaacccacctgccgctggttaggcagcaagaagcagtctaaaaccagaaacacccgtttggatcctatccctttccctcctgagctatgtgatgctggccaagtgaggggacctctctgaacctcagttatccaactttacaatagagatgaaaaaaaatctaacaggttctgataaccagaactaatgtgagtacctyagtgccttccagctttccattcgcaggcacgagcagtgaacaccaaccctgcctgcagtagctcagcagccactgcaaatgatcacatcaattgcattgtaaatcatgggccaaaacacattctttgtcatgagttatgaagcaaaaagtcatggaaaggaactttgctcaaaaattccaattccccatggaaaagggtggcccaaactgaaagagtggccccaaaattccaa

SEQ ID NO: 150936 - DNA, 550 bp, Homo sapiens
attcgttggcctcatgacctccttyctccatctacaaagccacaaatggggagttgacgccctcttacactctgtatcttttctttttctccttttgtgtcttctctgcaactcatgcttgtgccttcctctttctttttaaagactcatatgattagattgggcacacccagataatccagggtaatcttcccatcacggagtctctaactttagttacatctgtaaagtcccttcagtcatgtgaggtgacctcttgttaggtctaggaattaggatgtggacatacttgaaggaagcattattctggctaacatccctagtttatctttctgttatttatttcttatttaattccattatgtgactaatcttttaaaatatattgagatttgttttatgaccccaaatatggtcaattttgataaatgttctgtgtgcacttcaaaaggctgtgtattctgttggtggtgggtgtggggttttataaatgttaatcaagtgaatttggtttacgtatcttactgatttttggtctatggtggtacct

SEQ ID NO: 150937 - DNA, 535 bp, Homo sapiens
acctcctttctccatctacaaagccasaaatggggagttgacgccctcttacactctgtatcttttctttttctccttttgtgtcttctctgcaactcatgcttgtgccttcctctttctttttaaagactcatatgattagattgggcacacccagataatccagggtaatcttcccatcacggagtctctaactttagttacatctgtaaagtcccttcagtcatgtgaggtgacctcttgttaggtctaggaattaggatgtggacatacttgaaggaagcattattctggctaacatccctagtttatctttctgttatttatttcttatttaattccattatgtgactaatcttttaaaatatattgagatttgttttatgaccccaaatatggtcaattttgataaatgttctgtgtgcacttcaaaaggctgtgtattctgttggtggtgggtgtggggttttataaatgttaatcaagtgaatttggtttacgtatcttactgatttttggtctatggtggtacctt

SEQ ID NO: 150938 - DNA, 535 bp, Homo sapiens
acctcctttctccatctacaaagccacaaatggkgagttgacgccctcttacactctgtatcttttctttttctccttttgtgtcttctctgcaactcatgcttgtgccttcctctttctttttaaagactcatatgattagattgggcacacccagataatccagggtaatcttcccatcacggagtctctaactttagttacatctgtaaagtcccttcagtcatgtgaggtgacctcttgttaggtctaggaattaggatgtggacatacttgaaggaagcattattctggctaacatccctagtttatctttctgttatttatttcttatttaattccattatgtgactaatcttttaaaatatattgagatttgttttatgaccccaaatatggtcaattttgataaatgttctgtgtgcacttcaaaaggctgtgtattctgttggtggtgggtgtggggttttataaatgttaatcaagtgaatttggtttacgtatcttactgatttttggtctatggtggtacctt

SEQ ID NO: 150939 - DNA, 550 bp, Homo sapiens
attcgttggcctcatgacctcctttctccatctacaaagccacaaatggggagttgacgccctcttacactytgtatcttttctttttctccttttgtgtcttctctgcaactcatgcttgtgccttcctctttctttttaaagactcatatgattagattgggcacacccagataatccagggtaatcttcccatcacggagtctctaactttagttacatctgtaaagtcccttcagtcatgtgaggtgacctcttgttaggtctaggaattaggatgtggacatacttgaaggaagcattattctggctaacatccctagtttatctttctgttatttatttcttatttaattccattatgtgactaatcttttaaaatatattgagatttgttttatgaccccaaatatggtcaattttgataaatgttctgtgtgcacttcaaaaggctgtgtattctgttggtggtgggtgtggggttttataaatgttaatcaagtgaatttggtttacgtatcttactgatttttggtctatggtggtacct

SEQ ID NO: 150940 - DNA, 550 bp, Homo sapiens
attcgttggcctcatgacctcctttctccatctacaaagccacaaatggggagttgacgccctcttacactctgtatcttttctttttctccttttgtktcttctctgcaactcatgcttgtgccttcctctttctttttaaagactcatatgattagattgggcacacccagataatccagggtaatcttcccatcacggagtctctaactttagttacatctgtaaagtcccttcagtcatgtgaggtgacctcttgttaggtctaggaattaggatgtggacatacttgaaggaagcattattctggctaacatccctagtttatctttctgttatttatttcttatttaattccattatgtgactaatcttttaaaatatattgagatttgttttatgaccccaaatatggtcaattttgataaatgttctgtgtgcacttcaaaaggctgtgtattctgttggtggtgggtgtggggttttataaatgttaatcaagtgaatttggtttacgtatcttactgatttttggtctatggtggtacct

SEQ ID NO: 150941 - DNA, 521 bp, Homo sapiens
cgttggcctcatgacctcctttctccatctacaaagccacaaatggggagttgacgccctcttacactctgtatcttttctttttctccttttgtgtcttctctgcaactcatgcttgtgccttcctcttyctttttaaagactcatatgattagattgggcacacccagataatccagggtaatcttcccatcacggagtctctaactttagttacatctgtaaagtcccttcagtcatgtgaggtgacctcttgttaggtctaggaattaggatgtggacatacttgaaggaagcattattctggctaacatccctagtttatctttctgttatttatttcttatttaattccattatgtgactaatcttttaaaatatattgagatttgttttatgaccccaaatatggtcaattttgataaatgttctgtgtgcacttcaaaaggctgtgtattctgttggtggtgggtgtggggttttataaatgttaatcaagtgaatttggtttacgtatctta

SEQ ID NO: 150942 - DNA, 604 bp, Homo sapiens
agttttaatgatggaagtaatacgtgcatgttaaaaacaatgcatatagaagggctgtataacaatagcccctgttctaccttgcttcacccctacacttctccctagagaaaacaacttttaagtttttcaacttttttttttttttcctggtggttaccttcgtgtctgtaaatgtgcattgctatccatcgggttttctgggaaaaaaagatggagatttgggcaggtggctctctgaggaagcacaggagcatcatctgtaagggagagaggggcagcatctggcagagagaggtgaactgcgatgagacatatcaggagcctcagccagagccatggggagttcttagcctgggatcaccttcccaagttatcctgagttatcctgaattgagcaaaggggccatgaaaaatacaggtattatgaattgaggggctgcgaagttgggtgaggsggctgcgaagttgggtgaggcagctgcttctgctgaaggcaatgtctttgaaagagctcaactgtgagtcctctgagtacaagaatcccagcagttgggggagggagcagccctggagtgatgacctgggtgcagccacagcatcc

SEQ ID NO: 150943 - DNA, 604 bp, Homo sapiens
agttttaatgatggaagtaatacgtgcatgttaaaaacaatgcatatagaagggctgtataacaatagcccctgttctaccttgcttcacccctacacttctccctagagaaaacaacttttaagtttttcaacttttttttttttttcctggtggttaccttcgtgtctgtaaatgtgcattgctatccatcgggttttctgggaaaaaaagatggagatttgggcaggtggctctctgaggaagcacaggagcatcatctgtaagggagagaggggcagcatctggcagagagaggtgaactgcgatgagacatatcaggagcctcagccagagccatggggagttcttagcctgggatcaccttcccaagttatcctgagttatcctgaattgagcaaaggggccatgaaaaatacaggtattatgaattgaggggctgcgaagttgggtgagggrgctgcgaagttgggtgaggcagctgcttctgctgaaggcaatgtctttgaaagagctcaactgtgagtcctctgagtacaagaatcccagcagttgggggagggagcagccctggagtgatgacctgggtgcagccacagcatcc

SEQ ID NO: 150944 - DNA, 577 bp, Homo sapiens
gtctttgggttccagatcaccaaaggtcagattgtcatcaatggattatgaaaggcttgttttagctataaaaatatgccttggtatcaaagtttataagaatgggtgatacatgaggttttactgttattgtattggctttcctgcatgtactgctttgatccaaccagagaacactgttacaagaacatatttacatcccattgaaatggtaactgaatgaaatacatgtgtaaatggtccatcagatagcagaattatatgacttgaagttttgattatcttcccaagatgatgggtttgaaaaaccaaacaggggtcacaaaccaccttagcaattctagaacaatcaccaaaccaatattttttccatgacttgtattattttktctactccatgatgagtgatgaagtatagaacttttaataatggaaactttaagaactcaagaccaggcaactgttcaggttcttcatgagcctacacttaatactggatttatatcctcttaaataccaacttcgattgtccaattcaggtgcattcgactgcttactattaataaataagttatca

SEQ ID NO: 150945 - DNA, 577 bp, Homo sapiens
gtctttgggttccagatcaccaaaggtcagattgtcatcaatggattatgaaaggcttgttttagctataaaaatatgccttggtatcaaagtttataagaatgggtgatacatgaggttttactgttattgtattggctttcctgcatgtactgctttgatccaaccagagaacactgttacaagaacatatttacatcccattgaaatggtaactgaatgaaatacatgtgtaaatggtccatcagatagcagaattatatgacttgaagttttgattatcttcccaagatgatgggtttgaaaaaccaaacaggggtcacaaaccaccttagcaattctagaacaatcaccaaaccaatattttttccatgacttgtattattttttctactccatgatgagtgatgaagtrtagaacttttaataatggaaactttaagaactcaagaccaggcaactgttcaggttcttcatgagcctacacttaatactggatttatatcctcttaaataccaacttcgattgtccaattcaggtgcattcgactgcttactattaataaataagttatca

SEQ ID NO: 150946 - DNA, 487 bp, Homo sapiens
acgtggatatggaagattctgtcaggtgaatatggatctgaagtgtggagagctctatcaggacaggaatcgggctctgtcctgtttacctctgtattcctggcactgttcacatacccagggtagcaggtgtccattaaatatttatygctaaatgcatctcttggaataagacctggtaaagagtactaattatgaatttggctagctttactttctttaatcttgttttaagaaaaccagttacaggttggaccaattaggaaatgcataaattagatataaccatttgctttagaaaagattattggacttgaacaaaattgcaattgaaattgctttaaattacttaaataattcaaggacacttaaaatgtaactctatttacagactatcaatttatatgcaattttttgttaaaaaaatgattatggaaactagataacccgtatgtatagtaaggcataataaccctttaaaaatttc

SEQ ID NO: 150947 - DNA, 427 bp, Homo sapiens
tgtcctaatgtacattataattcactttaacaaagaatgtaactctaaattaagatactgtctctttttctactttaatgaagtttgagagaaaagggaattttgctttaacttaaaaaaaaaaaaaacaggcagggcacctgtaatcccagcactttggaaggctgaggtgggcagatcacgaggtcaggagatcaagaccatcctgactaacacgatgaaaccccgtctgtactaaaatacagaaaaaaatagctgggcgtggtgctactcgggaggctgaggcaggagaatggcatgaacccgggaggtggagcttgcagtgagccgagatcatgctactgcactccagcctggacgacagagtgagactccttcccccccmgcaaaaaaaaaaaacctagattttattgatggattaagtata

SEQ ID NO: 150948 - DNA, 416 bp, Homo sapiens
aaaatagcatcttgtagagatatttgcattctcatgttcaccacagctttattgacaatagctgagacagagaaacaacctaggtgtacatcaacagatgaatggattaaaaattatagggggatgtatgtgtatgtatatgtatatacatatatgaatattattcagcctaaaatcgagatcctgacatttgtgacaatatgaatggatctgtattacattatgctaagtaaaataggccaggcacagaaagaaaaaatgtgcatgatctcacctttatgtgaaatctaaaaacaaaactggcaaatatacataaacrgagaatagtcagtggttaccaggggtggagaggtggagagaaaataaggagatgtaagtcacatgatactaagttatagttatgcaagaccaataag

SEQ ID NO: 150949 - DNA, 612 bp, Homo sapiens
ccaaaattaatggtagacaagaagtcacagatccaggaaactcagaatatcaggcaggataaataagaaataaaacacaccaaggcatatgacattcaaactgcagaaagccaaagagaaagagaaaatatggtggtgatggttgtacaactctattaatttactagatatcactgaattgtctaattaaaatgagtgcatttatgttatgtaaattctacttcaataaagctgcttaacaaatgagtcagtgactccgagaagcattaaaagtaagtgctggtatcaggtagaaaaacatttatctacatcaaagaatcattcatatttttcctaagcaatcaagactcccaagaggtaagttaaaaacagaggccaagtccttgcgaggttctgggacaggtggcttactgagtagaaattcttgacatcactatgcgttttctatttggtaacttctttcatctgcatgaggcaatgtgaataaatcagcactgtatctgttgcrttcaacagcccaactttgaatctgagtgtgtctcaaccatggattttctctcattttcaatttgcatgtgcatttaacatttacttttctacctgactgacaaa

SEQ ID NO: 150950 - DNA, 601 bp, Homo sapiens
cttgtgagcaactcctcacattcacattttcacatgagggtgggagggtaagtattttggtttaatgagttctacctctctctgagctcagtggacagcaattttgccgcatttagagagctgtgtctaacttggttcacatataatctgaagtctgtcctgggtagccagtaagcaaatcagccatgaagacttttgtctgacaaattcaaatgaacaaacaacaacaatacaacacttggtgacaggagctggcatacatgaatctgatttatttaattctccgtatacctattagcctctgagcttttagaaataatcactcaggcagtgcgtatcacttttattttgcctgagaactcgcaagcaatactgaggaaaaatccaacagggcagagcctcyaaaaatgtcactgaactctaacacagcagggaagggatttccttatttcatgttattgtttctttgctattttgtttttatgagaatatacaacagtacaaaatagtacaaaataacaaaaatagttaagagtcaccaccatttcaggagttgcttatttgtcttcatctgtggtcaagcttctgaaaaatggccaga

SEQ ID NO: 150951 - DNA, 503 bp, Homo sapiens
tagagatatttctatacatataatgtatattgatcagatcaaagtaattagcatattcattagcacgcacaaacatttgtcatttgttttgttgggaatgttcagtgtcttccttctagctatttgaaactatgaaatattgttagtgtcatcctacagtgctatagaacactagaatttattcctcctatatagtcgtaattttgtatcctttaacaaatctctctctatccctccctccccagcctctagtatcctctcccacctaacatcttacttgttggaggatgccactactaaatactatgaaatctgatttcattccaaatgactgctcttgttttagrtagtctttttcctttttctttctccagatactgtcatttttccttcacgatttttaaaaggaaaatgcatattttcattgtgcctcttgggagtttgtataaattactcagtcttttataaattactcagccttttatggagtgtaactttatata

SEQ ID NO: 150952 - DNA, 616 bp, Homo sapiens
tttttccacacatatataatcatttttttcaaaatgggctcatgccgtacaaattattttgtaatttgcttttctcactcaacaatatgttgtgaacatctttccacatcaataaatatttgtctgcatcatcatttaacagctgcatgattttccactatatgcattcatgtaccaagccctagtggtggacagtatgacagtatgttctctctctctctttttttttttttagagacaaagtctcactttgccacccagggccagagtgcagtggcaccatcatagcccactgcagcctcagacttctgagctcaagcaatcctcctgccacagcctgccraggagctgggactacaggcacatgacagtgtgcccagataattttttttttcagagaccaagtcttgttatgttgcccaggctggtcttgaactcctggcctcaagtgatcctctggcctcagcctcccaaagtgctaggattacagatgtgagccgctgtgactgtcctctctctgttctaaaccacactctgatttgcatctgctgcaggcagacacagcaaacagagaagggtaggccctcagcccgtccagcctccacccaaacccccc

SEQ ID NO: 150953 - DNA, 544 bp, Homo sapiens
ttccattgaggaattcaattttccatagaggaaactgagttagtttaaaatgtatcttcacaggcatgaaaaacctataccaaattccaccagaaacttacaggcaattgaaaaagatgattctactttacacaaaccgtccctataaaaaagagaaaacatattgggtctattttacgatatcaaaaataacacaaagaaaattacaagtcrggccaagcgcggtggctcacgcctgtaatcccagcaccagcactttgggaggccaaggcagtagatcacctgaggtcatgagtatgagaccagcctgaccgacatggtgaaaccccatctctactaaaaatacaaaaaatagccgggcatggtggcaggcacctgtagtcccagctactcaggagactgaggcaggagaatcgcttggaccggggactcggaggttgcagtgagctgagaccacgccattgcactccaggctgctgggcaacaagagcaaaactccatctcaaaaaagaaaaaaaaaaaattacaagtcaatctgtttcgt

SEQ ID NO: 150954 - DNA, 600 bp, Homo sapiens
catgtcaccagggcgatcttaagtcacaatcccgcccaaggtccccttcccgccccgccccgctggaacacccctcccctccccttagtgaggaaggatttgggccgcagacctgggtggtctcaggactccagcggcctgttggggtgaagtggggtggggtcggggcgyggcacagcttcccaaggaagtcacaggacctcgcctcgggatattcagaagtgctagtccagttctggcagcctgaactcttcctcctccaaggtgaaatccgagaatactcttccttccagggagagcgactgacctgcaaaatgggtgccagttaaggtggcagggaggacgcacattacaatcatttattccaaaatgttgccattttcgctaaactttcggtatcttttgttgcatgtttgataattaattcaccaccctattaggtaggggctgccagggaatgagcgaggactccaaattttctgtaggaggggtgttgggggtaggcaagtcggtctgggagagaaggttttaatccgagtgaagagccctttgcacaagcctgggaggaggctgaactgtcatcctgccttgactcaacac

SEQ ID NO: 150955 - DNA, 463 bp, Homo sapiens
gggattctcagcttcgagttctgtccacagatatgtggtttgagtctaatcagtcatttttgagaggctgcttttccgtaaaatcaggggctacttttggattcttgggtccagtgtactgktctccttagctgtaaaccactcccctccctcaacatggtcctggtcatcagtttctaagatcactgatgaggctagagtgagaatgaagccttagttcctcaatgcacctggattctatagaccatgaatacatgctagaatcaccttggtaggtttttaaactaccagtgtctggattattctccccaagagattctgattcacttggcttggtgtgcctcccaggtgttggtattttttaaaagctacccaggcgagtccaatgtgcatccaaagttgagaatcgctttagtagagtgtcagagctgggagagactttggaaagcacccagtttaaggt

SEQ ID NO: 150956 - DNA, 370 bp, Homo sapiens
ctgagggagggtcctgggaagaggccttcttctgttctcctgtacagcagaggtgttggcatgtgcacgtgtgtgtctgcatgtgtgtgcatctgtgaacatctgtctgtggctctcgttctgagcacctgtgtgtctctgcttctgccttgttctgtcttggcacctctgggtgtctgtatgtctttttctaatcctggctytcttcttgtgcttctctgggcctcgtcttttcatctttgtgttttttgcttactgtattgtaatatccatttccatgctggaattctcctaccagaccatggactctgtgagggcaaagactgtcttttatcttcccatgtgtgcacatagtaggagcctagtacat

SEQ ID NO: 150957 - DNA, 528 bp, Homo sapiens
agacctcaaaccaggcttctcaatggaatcacctgggatctttttagaaatctactttcttgcccctcaaatccaaaattcagtctgtctcacacacacacatactgatcagaatctccaggcttgggctcagaactaatgttttttaaagctgcccaagtgactctgatatgtggacaatttgggatatcctggcttaggatatgatcaagatgataaatatttaatgtacatttgaaaataattgatatcagattgtaggatataaatgttaaacattcaattataatttaaatattgtttatacaagcctgtgttcatasccatgttccactcccatgtctgcttaaccacatgggggaatattggagttgagggtgtggaagggtgcgtgtctcagtggggcttgaaattgggactggaaggagagcttggcccagatcagagacatgaagcaaccaaaagggaaagagagaaggccgggcatgatctgcaaagctatagaaagagctggttactacatccact

SEQ ID NO: 150958 - DNA, 528 bp, Homo sapiens
tgggatctttttagaaatctactttcttgcccctcaaatccaaaattcagtctgtctcacacacacacatactgatcagaatctccaggcttgggctcagaactaatgttttttaaagctgcccaagtgactctgatatgtggacaatttgggatatcctggcttaggatatgatcaagatgataaatatttaatgtacatttgaaaataattgatatcagattgtaggatataaatgttaaacattcaattataatttaaatattgtttatacaagcctgtgttcatacccatgttccactcccatgtctgcttaaccacatgggggaatattggagttgagggtgwggaagggtgcgtgtctcagtggggcttgaaattgggactggaaggagagcttggcccagatcagagacatgaagcaaccaaaagggaaagagagaaggccgggcatgatctgcaaagctatagaaagagctggttactacatccacttcctttggccagaactccacctccacggagtcc

SEQ ID NO: 150959 - DNA, 455 bp, Homo sapiens
gaattctgtcctcggctctcggggtcttttgttttgggattgtaaatgttatagatctcccatgatggaaggccatgaggtcagggggtgctgggctgcccagtggcggtggcaggcagtgagaggagcttgtgggcctggctggatctygctagtctgggacaggcccccaggagccttcacagcagcctctattggcttggctccctggggatggggtgggagggagaggggagttttcctgccatctaaagctttcttctgtgagaagctgccctgtgccaaatggtatagattcagccatgcccaggatggggactggctggaggggatatagactctactcagtctgatgggggagatagcattatcctcagggattagctagtctgatgggggagacagtgttatccttgggtaataaccggtctgatgaaggagtcatagctctggct

SEQ ID NO: 150960 - DNA, 440 bp, Homo sapiens
actctgaatctatcttgttcacggctgcatcttgcaccaagcmtagcacaaggcacatagttcctcaataaatactcactgagtgacagacttctaaagccctgctctatgccagggttctgagattctgcaacttggtattgtccaggcagacatttgggggactacccagggacaggcagaaggaactgcttcactaccaacattgaagagtggcagactttcacataaatgacattatttaatcctcgtaacagccctgtggcctgcacttccccatcaccatttcacagatgaggaaactgaggctagaaggttaagtgacctgatcaagctcacacccaggtccttggcttcaaatccagtgctctttctgctgcccccaaatgctttcatttgctcttagaataaaccccaagacttctgtggcctgtgagact

SEQ ID NO: 150961 - DNA, 455 bp, Homo sapiens
aatcatcttattttgtaaatcaaatttgtctaaattatatgaagctactgttgaaaaatatggtgtgtttcctactgaaatacattatcttttaaaagaaaggataatggcatgcatgtagggtacctttaaaaagaggattcactgcataacagcaccttggttttagcacaaggatcaacaaatyggtgcttgtggagcaaatccagcccactgcctgttttcataaggaaatttccttgaaatgcagccacacttatgccctttataattcacaaggcctaaaatatttactaactggctctttacaaaaagagctgtccaattcttggttcagtagagctaagatcctctgttgtattttagtaagttttacccagtatattgaaaagctgacacggaacatgaatccccatgtgcaatcccttggcaatattcagattaatttgaggatc

SEQ ID NO: 150962 - DNA, 253 bp, Homo sapiens
tacatttttatatctcttcttagtcattgcttcctttctactgtattcccatcttattgttagacacaactcatctttaagtcggtaaaaggaaaaagccctcaagctcatcacatttcctttagcrattttcttgacgcctctcctggttctgaaggtcacatgatatatggctacatgagtttcacaatccatacgccacttggaagactgacagagagacttaggtcaattaagaaacaaagattatgag

SEQ ID NO: 150963 - DNA, 253 bp, Homo sapiens
tacatttttatatctcttcttagtcattgcttcctttctactgtattcccatcttattgttagacacaactcatctttaagtcggtaaaaggaaaaagccctcaagctcatcacatttcctttagcaattttcttgaygcctctcctggttctgaaggtcacatgatatatggctacatgagtttcacaatccatacgccacttggaagactgacagagagacttaggtcaattaagaaacaaagattatgag

SEQ ID NO: 150964 - DNA, 544 bp, Homo sapiens
caattctataatacataaagtcatagaaaygataggaagtcacttaatatttgcttttggaaggtgtttttttgtttttgtttttgttttttgagacggagtcttcctctattgcccgggttggagtgcagtggcgcaatctcggctcactgcaacctccaccttctgggttccagcgattctcctgcttcagcctcctgagtagctgggactacaggcattcaccaccatgcctggctagttttttttgtatttttagtagagatggggtttcaccatattggccaggctggtctcgaactactgacctcgtgatccacccacctcggcctcctaaagtgctgagattgcaggtgtgggaaggtgtcttttaaattatagtgcatatagttataactaacagctgtgaattcagagctgtaaaaataaagcaaagaaaccacattgtgtttgagtcagcaatctttaggtctctactaagttatcctaaatataatcctatgttagtccctaaacatacttagtccctatattctaaatataa

SEQ ID NO: 150965 - DNA, 544 bp, Homo sapiens
caattctataatacataaagtcatagaaacgataggaagtcacttaatatttgcttttggaaggtgttttttygtttttgtttttgttttttgagacggagtcttcctctattgcccgggttggagtgcagtggcgcaatctcggctcactgcaacctccaccttctgggttccagcgattctcctgcttcagcctcctgagtagctgggactacaggcattcaccaccatgcctggctagttttttttgtatttttagtagagatggggtttcaccatattggccaggctggtctcgaactactgacctcgtgatccacccacctcggcctcctaaagtgctgagattgcaggtgtgggaaggtgtcttttaaattatagtgcatatagttataactaacagctgtgaattcagagctgtaaaaataaagcaaagaaaccacattgtgtttgagtcagcaatctttaggtctctactaagttatcctaaatataatcctatgttagtccctaaacatacttagtccctatattctaaatataa

SEQ ID NO: 150966 - DNA, 544 bp, Homo sapiens
caattctataatacataaagtcatagaaacgataggaagtcacttaatatttgcttttggaaggtgtttttttgtttttgtttttgttttttgagacggagtcttcctctattgcccgggttggagtgcagtggcgcaatctcggctcactgcaacctccaccttctgggttccagcgattctcctgcttcagcctcctgagtagctgggactacaggcrttcaccaccatgcctggctagttttttttgtatttttagtagagatggggtttcaccatattggccaggctggtctcgaactactgacctcgtgatccacccacctcggcctcctaaagtgctgagattgcaggtgtgggaaggtgtcttttaaattatagtgcatatagttataactaacagctgtgaattcagagctgtaaaaataaagcaaagaaaccacattgtgtttgagtcagcaatctttaggtctctactaagttatcctaaatataatcctatgttagtccctaaacatacttagtccctatattctaaatataa

SEQ ID NO: 150967 - DNA, 544 bp, Homo sapiens
caattctataatacataaagtcatagaaacgataggaagtcacttaatatttgcttttggaaggtgtttttttgtttttgtttttgttttttgagacggagtcttcctctattgcccgggttggagtgcagtggcgcaatctcggctcactgcaacctccaccttctgggttccagcgattctcctgcttcagcctcctgagtagctgggactacaggcattcaccaccatgcctggctagttttttttgtatttttagtagagatggggtttcaccatattggccaggctggtctcgaactactgacctcgtgatccacccacctcggcctcctaaagtgctgagattrcaggtgtgggaaggtgtcttttaaattatagtgcatatagttataactaacagctgtgaattcagagctgtaaaaataaagcaaagaaaccacattgtgtttgagtcagcaatctttaggtctctactaagttatcctaaatataatcctatgttagtccctaaacatacttagtccctatattctaaatataa

SEQ ID NO: 150968 - DNA, 585 bp, Homo sapiens
aaatttactcaggggcatagctgctgggcagcaaagatttcatatagcaggcatgagacacccatccttagaaaggcttgcttgcaaggctagtccttggctggtgtttgggaccttgaatttgggagggttccccagcattccctaacttagaagaagggagtggctcactgtgcctaaactgtttgtgcaaatgtggtttactatgaacarttaatttcctcctgggagtctagagttttgttacatgtgagggagaggagaggttgcctatgtgactagcctccatcgaaaacatgggtgctgagcctctaatgaaactctggtaaggtagacaacattgcacatgtgtcgtcaaaatttgaggctgggggaattaagcatatcctgctagctacacaggagatgactcctgtagcttgtgcctggcttcctccagactttgacacatgcaccttttcctttctcaaatgttgctttgtgtctttttgctgtattaaatgtaataaatcaaagccccaagtatgactatctgctgagtcctgtgagtccttctcagtgaattaccaaacctcagtgaagggg

SEQ ID NO: 150969 - DNA, 585 bp, Homo sapiens
aaatttactcaggggcatagctgctgggcagcaaagatttcatatagcaggcatgagacacccatccttagaaaggcttgcttgcaaggctagtccttggctggtgtttgggaccttgaatttgggagggttccccagcattccctaacttagaagaagggagtggctcactgtgcctaaactgtttgtgcaaatgtggtttactatgaacagttaatttcctcctgggagtctagagttttgttacatgtgagggagaggagaggttgcctatgtgactagcctccatcgaaaacatgggtgctgagcctctaatgaaactctggtaaggtagacaacattgcacatgtgtcrtcaaaatttgaggctgggggaattaagcatatcctgctagctacacaggagatgactcctgtagcttgtgcctggcttcctccagactttgacacatgcaccttttcctttctcaaatgttgctttgtgtctttttgctgtattaaatgtaataaatcaaagccccaagtatgactatctgctgagtcctgtgagtccttctcagtgaattaccaaacctcagtgaagggg

SEQ ID NO: 150970 - DNA, 700 bp, Homo sapiens
ggtgtattcttccacatttgaacatcagaagtactgatcacataaacagcgaaccccacaactctatgattgttctttagaagacagtgccactgaaggcttttaaaagcttaactcactttactttttagtaatcttactggttagaattgatactccctccttgaaattctcacctttgtaaatttttgcaacatcactttatgattcctctcctctttttctttagccrcggctcaggcttctttcctaattcctctgggaaatgctgatattcccagggttctgtcactggccctctgctcattctatacctttcccatcatggacaagctcactcagatctacaactttgcctcagttattccaagtctgcaactccaacctcagagctccatctccagccataaaaatttatccaattacctactgaaaatatcccacatggacatttcagtaaactcagcaatgcagagaaaactgttagtcgtgactgctgacctgctgctctcctctatacacctgaaaactgcctactccctcgtgtccaggttaaatgctagggcacaagccagaaacctgagaatcatctgagatttctccctatcccctatctttttacattcaacaatcactaaatcatattaactgtacctcttttctgcatctgctttatatttccactgtgacacgtttattt

SEQ ID NO: 150971 - DNA, 700 bp, Homo sapiens
ggtgtattcttccacatttgaacatcagaagtactgatcacataaacagcgaaccccacaactctatgattgttctttagaagacagtgccactgaaggcttttaaaagcttaactcactttactttttagtaatcttactggttagaattgatactccctccttgaaattctcacctttgtaaatttttgcaacatcactttatgattcctctcctctttttctttagccacggctcaggcttctttcctaattcctctgggaaatgctgatattcccagggttctgtcactggccctctgctcattctatacctttcccatcatggacaagctcactcagatctacaactttgcctcagttattccaagtctgcaactccaacctcagagytccatctccagccataaaaatttatccaattacctactgaaaatatcccacatggacatttcagtaaactcagcaatgcagagaaaactgttagtcgtgactgctgacctgctgctctcctctatacacctgaaaactgcctactccctcgtgtccaggttaaatgctagggcacaagccagaaacctgagaatcatctgagatttctccctatcccctatctttttacattcaacaatcactaaatcatattaactgtacctcttttctgcatctgctttatatttccactgtgacacgtttattt

SEQ ID NO: 150972 - DNA, 700 bp, Homo sapiens
ggtgtattcttccacatttgaacatcagaagtactgatcacataaacagcgaaccccacaactctatgattgttctttagaagacagtgccactgaaggcttttaaaagcttaactcactttactttttagtaatcttactggttagaattgatactccctccttgaaattctcacctttgtaaatttttgcaacatcactttatgattcctctcctctttttctttagccacggctcaggcttctttcctaattcctctgggaaatgctgatattcccagggttctgtcactggccctctgctcattctatacctttcccatcatggacaagctcactcagatctacaactttgcctcagttattccaagtctgcaactccaacctcagagctccatctccagccataaaaatttwtccaattacctactgaaaatatcccacatggacatttcagtaaactcagcaatgcagagaaaactgttagtcgtgactgctgacctgctgctctcctctatacacctgaaaactgcctactccctcgtgtccaggttaaatgctagggcacaagccagaaacctgagaatcatctgagatttctccctatcccctatctttttacattcaacaatcactaaatcatattaactgtacctcttttctgcatctgctttatatttccactgtgacacgtttattt

SEQ ID NO: 150973 - DNA, 700 bp, Homo sapiens
ggtgtattcttccacatttgaacatcagaagtactgatcacataaacagcgaaccccacaactctatgattgttctttagaagacagtgccactgaaggcttttaaaagcttaactcactttactttttagtaatcttactggttagaattgatactccctccttgaaattctcacctttgtaaatttttgcaacatcactttatgattcctctcctctttttctttagccacggctcaggcttctttcctaattcctctgggaaatgctgatattcccagggttctgtcactggccctctgctcattctatacctttcccatcatggacaagctcactcagatctacaactttgcctcagttattccaagtctgcaactccaacctcagagctccatctccagccataaaaatttatccaattacctactgaaaatatcccacatggacatttcagtaaactcagcaatgcagagaaaactgttagtcgtgactgctgacctgctgctctcctctatacacctgaaaactgcctactccctcgtgtccaggttaaatgytagggcacaagccagaaacctgagaatcatctgagatttctccctatcccctatctttttacattcaacaatcactaaatcatattaactgtacctcttttctgcatctgctttatatttccactgtgacacgtttattt

SEQ ID NO: 150974 - DNA, 539 bp, Homo sapiens
cgaatgaggtatatttacttcattagaacaagatgtgtttttctacctgctggttaattgctatgttaacagtaattttgttagaacaagatatgcagttaccattagccaaaagattatcataataaatattcaaatagcccaactctaggctcaacaaattataatgaaagtataaaaatgtttcacaataacaaaaaatgcttctgtgcttccaagatgtkatgcctaatgcattggacaatctgaactgtaagaggacacctttaatttagtacatattaatcaaagaacttctctaagttaggttttgcacgttatgggagacaaacatgaaatagacatagttttggtctttgaggtgctcataatagaatagagctttctctatttaatttctgtgtttttttcaacagaattttcaaggaaatcatttattcatttgtccacttcacaaataattatcaaatgtcttttagtactaagcattttttttctaatgttacagaatacagacatttaaaaatactgttggggcc

SEQ ID NO: 150975 - DNA, 539 bp, Homo sapiens
cgaatgaggtatatttacttcattagaacaagatgtgtttttctacctgctggttaattgctatgttaacagtaattttgttagaacaagatatgcagttaccattagccaaaagattatcataataaatattcaaatagcccaactctaggctcaacaaattataatgaaagtataaaaatgtttcacaataacaaaaaatgcttctgtgcttccaagatgttatgcctaatgcattggacaatctgaactgtaagaggacacctttaatttagtacatattaatcaaagaacttctctaagttaggttttgcacgttatgggagacaaacatgaaatagacatagttttggtctttgaggtgctcataatagaatagagctttctctatttaatttctgtgttttttycaacagaattttcaaggaaatcatttattcatttgtccacttcacaaataattatcaaatgtcttttagtactaagcattttttttctaatgttacagaatacagacatttaaaaatactgttggggcc

SEQ ID NO: 150976 - DNA, 539 bp, Homo sapiens
cgaatgaggtatatttacttcattagaacaagatgtgtttttctacctgctggttaattgctatgttaacagtaattttgttagaacaagatatgcagttaccattagccaaaagattatcataataaatattcaaatagcccaactctaggctcaacaaattataatgaaagtataaaaatgtttcacaataacaaaaaatgcttctgtgcttccaagatgttatgcctaatgcattggacaatctgaactgtaagaggacacctttaatttagtacatattaatcaaagaacttctctaagttaggttttgcacgttatgggagacaaacatgaaatagacatagttttggtctttgaggtgctcataatagaatagagctttctctatttaatttctgtgtttttttcaacagaattttcaaggaaatcatttattcatttgtccacttmacaaataattatcaaatgtcttttagtactaagcattttttttctaatgttacagaatacagacatttaaaaatactgttggggcc

SEQ ID NO: 150977 - DNA, 539 bp, Homo sapiens
cgaatgaggtatatttacttcattagaacaagatgtgtttttctacctgctggttaattgctatgttaacagtaattttgttagaacaagatatgcagttaccattagccaaaagattatcataataaatattcaaatagcccaactctaggctcaacaaattataatgaaagtataaaaatgtttcacaataacaaaaaatgcttctgtgcttccaagatgttatgcctaatgcattggacaatctgaactgtaagaggacacctttaatttagtacatattaatcaaagaacttctctaagttaggttttgcacgttatgggagacaaacatgaaatagacatagttttggtctttgaggtgctcataatagaatagagctttctctatttaatttctgtgtttttttcaacagaattttcaaggaaatcatttattcatttgtccacttcacaaataattatcaaatgtcttttagtactaagcwttttttttctaatgttacagaatacagacatttaaaaatactgttggggcc

SEQ ID NO: 150978 - DNA, 390 bp, Homo sapiens
cgggttttccctgacactgaagcaaactctaggcaccaggtcaccaaaaaaacagaaagatgtagccaccacattttcttccagtctgtggcccatgccttggaaagctgttgatctgtggtgatcctgcccaagctgccatgccccttccttgaaattaaaggaaaggagygggcatgggctggaaactgcacacttgttaccctaacactactctgttctgctgagaggggagctgtgaactcctggcttccttccatttagcccaaattaatggcagcaatctcctattttggtgctattgaggtctttgtgtttacttcagtccttttggtttttagccagtttttaggccaccattattccagaagtcaaatattttatggcttt

SEQ ID NO: 150979 - DNA, 401 bp, Homo sapiens
ggttttccctgacactgaagcaaactctaggcaccaggtcaccaaaaaaacagaaagatgtagccaccacattttcttccagtctgtggcccatgccttggaaagctgttgatctgtggtgatcctgcccaagctgccatgccccttccttgaaattaaaggaaaggagcgggcatgggctggaaactgcacacttgttwccctaacactactctgttctgctgagaggggagctgtgaactcctggcttccttccatttagcccaaattaatggcagcaatctcctattttggtgctattgaggtctttgtgtttacttcagtccttttggtttttagccagtttttaggccaccattattccagaagtcaaatattttatggcttttaatatgtaatgc

SEQ ID NO: 150980 - DNA, 444 bp, Homo sapiens
atgtgtaacatttctatacactaataatcaactagcataaaaagacatcaagaaggccgtcccactattctagctacaaaataataaaatggctcagaataaagttaaccagagagattttgtaaagagctttacaaaaaaaaaaaaaaaaaactacaaaacaccgacaaaagaaattgtagaggacacaaacatggaaagatattgcatgctcacggactggaagaatattggttaaatgaccttattactgaaagcagtctacagactgaacgcaagctctattaaataccaattttgatgtttttaggggaagacaagatggtcaccacatgcagccaggaratgcctctctgcgagagagaaaccaaaatatcaagtaaattatcacacttggagtaggtctttggagagaaaacactgaaatttgataggtaatgcagg

SEQ ID NO: 150981 - DNA, 425 bp, Homo sapiens
aaattcagagaacctctacaaccatccccaagatacacagcccatcagactttccaaggtcaacacgaaaggaaaaatctcacaggcagctataacagctgcatcaggtgaaaagctgacctctttccggcaaaaccttataagccagaaagtggggcctgttgtcagcatccttaaagaaatttcagccaagaacttcataccactccaatctaagcctcatcagtgacagagaaatacaatcttttccagacaaacactaaagaaattcrttaccgctagaccagacttacaagagattcttaaggagttctaaatatggaaaagaaagaacaatacccactaccacaaaaacacacctaagtacatagcccacagaccctattacacaactacacaatcgagagtacaaagcaaacagctaa

SEQ ID NO: 150982 - DNA, 425 bp, Homo sapiens
aaattcagagaacctctacaaccatccccaagatacacagcccatcagactttccaaggtcaacacgaaaggaaaaatctcacaggcagctataacagctgcatcaggtgaaaagctgacctctttccggcaaaaccttataagccagaaagtggggcctgttgtcagcatccttaaagaaatttcagccaagaacttcataccactccaatctaagcctcatcagtgacagagaaatacaatcttttccagacaaacactaaagaaattcattaccgctagaccagacttacaagagattcttaaggagttctaaatatggaaaagaaagaacaatacccactaccacaaaaacacacytaagtacatagcccacagaccctattacacaactacacaatcgagagtacaaagcaaacagctaa

SEQ ID NO: 150983 - DNA, 482 bp, Homo sapiens
gggttgttattcttagataaaacagactttaaaccaacaacagccaaaaaaggatgaagaagggcattacacaatgataaaggaytcacttcgccaagaagacatccctatcctaaatacatacccacccaacactggagcacccacattcaaaaacaaccaagtacttccagacctaccaaaagactcagtcacacaataacagtggggatcttcaacatttcattgatagtgttaaggcaaatcattgagacaaaaaactaacaaagaaattctgggcttaaatttaacacttgactaattggacctaacagacatctacagaatactccacccaacaactacagaatacacttttttctcatctgcacaaagaacatactccaagatcaacaacatgtttgaccataaagcaagtcatgataaatttttaaaaaatgaaatcacacaacaccattctcttggactacagtgcaataaaa

SEQ ID NO: 150984 - DNA, 496 bp, Homo sapiens
ggttgttattcttagataaaacagactttaaaccaacaacagccaaaaaaggatgaagaagggcattacacaatgataaaggactcacttckccaagaagacatccctatcctaaatacatacccacccaacactggagcacccacattcaaaaacaaccaagtacttccagacctaccaaaagactcagtcacacaataacagtggggatcttcaacatttcattgatagtgttaaggcaaatcattgagacaaaaaactaacaaagaaattctgggcttaaatttaacacttgactaattggacctaacagacatctacagaatactccacccaacaactacagaatacacttttttctcatctgcacaaagaacatactccaagatcaacaacatgtttgaccataaagcaagtcatgataaatttttaaaaaatgaaatcacacaacaccattctcttggactacagtgcaataaaaatagaaatgaatacc

SEQ ID NO: 150985 - DNA, 481 bp, Homo sapiens
caaaaagcaaggggttgttattcttagataaaacagactttaaaccaacaacagccaaaaaaggatgaagaagggcattacacaatgataaaggactcacttcgccaagaagacatccctatcctaaatacatacccacccaacactggagcacccacattcaaaaacaaccaagtacttccagacctaccaaaagactcagtcacacaataacagtggggatcttcaacatytcattgatagtgttaaggcaaatcattgagacaaaaaactaacaaagaaattctgggcttaaatttaacacttgactaattggacctaacagacatctacagaatactccacccaacaactacagaatacacttttttctcatctgcacaaagaacatactccaagatcaacaacatgtttgaccataaagcaagtcatgataaatttttaaaaaatgaaatcacacaacaccattctcttggactac

SEQ ID NO: 150986 - DNA, 482 bp, Homo sapiens
gggttgttattcttagataaaacagactttaaaccaacaacagccaaaaaaggatgaagaagggcattacacaatgataaaggactcacttcgccaagaagacatccctatcctaaatacatacccacccaacactggagcacccacattcaaaaacaaccaagtacttccagacctaccaaaagactcagtcacacaataacagtggggatcttcaacatttcattgatagtgttaaggcaaatcattgagacaaaaaactaacaaagaamttctgggcttaaatttaacacttgactaattggacctaacagacatctacagaatactccacccaacaactacagaatacacttttttctcatctgcacaaagaacatactccaagatcaacaacatgtttgaccataaagcaagtcatgataaatttttaaaaaatgaaatcacacaacaccattctcttggactacagtgcaataaaa

SEQ ID NO: 150987 - DNA, 427 bp, Homo sapiens
ggcaaatcattgagacaaaaaactaacaaagaaattctgggcttaaatttaacacttgactaattggacctaacagacatctacagaatactccaccmaacaactacagaatacacttttttctcatctgcacaaagaacatactccaagatcaacaacatgtttgaccataaagcaagtcatgataaatttttaaaaaatgaaatcacacaacaccattctcttggactacagtgcaataaaaatagaaatgaataccaagaagatctctgaaaaccacacaatcacatggaaatcaaacaactggctcctaaatgactttgggaaaagaaagaatttcaggcagaaatcaaacaatgatttgtaataagcaaaaagaaacatcataccaaaacttctgggatacagcaaaagcagcataagagga

SEQ ID NO: 150988 - DNA, 427 bp, Homo sapiens
ggcaaatcattgagacaaaaaactaacaaagaaattctgggcttaaatttaacacttgactaattggacctaacagacatctacagaatactccacccaacaactacagaatacacttttttctcatctgcacaaagaacatactccaagatcaacaacatgtttgaccataaagcaagtcatgataaatttttaaaaaatgaaatcacacaacaccattctcttggacyacagtgcaataaaaatagaaatgaataccaagaagatctctgaaaaccacacaatcacatggaaatcaaacaactggctcctaaatgactttgggaaaagaaagaatttcaggcagaaatcaaacaatgatttgtaataagcaaaaagaaacatcataccaaaacttctgggatacagcaaaagcagcataagagga

SEQ ID NO: 150989 - DNA, 427 bp, Homo sapiens
ggcaaatcattgagacaaaaaactaacaaagaaattctgggcttaaatttaacacttgactaattggacctaacagacatctacagaatactccacccaacaactacagaatacacttttttctcatctgcacaaagaacatactccaagatcaacaacatgtttgaccataaagcaagtcatgataaatttttaaaaaatgaaatcacacaacaccattctcttggactacagtgcaataaaaatagaaatgaataccaagaagatctctgaaaaccacacaatyacatggaaatcaaacaactggctcctaaatgactttgggaaaagaaagaatttcaggcagaaatcaaacaatgatttgtaataagcaaaaagaaacatcataccaaaacttctgggatacagcaaaagcagcataagagga

SEQ ID NO: 150990 - DNA, 420 bp, Homo sapiens
aatgaattctagtgttctgttgcattgtagggtgaatatggttaactaatatttttttttttttgagacrgagtcttgctctgtcacccaggcttggcgtgcagtggtgcaatctcagctcactgcaatctccgcctccggggttcaagccattctcctgcctcagcctcccaaacagctgggattacaggtgtgtgccactacacctggcttggctagctaatatttaaaaagctagaggagaggattttgaaagttcacaacacaaagaaatggtaaatgtttgaggtgatggaatatattaattagcctgatttgaccattatacattgtttacacatatcaaaatatcactgtgtataccataaatatgtacaattatacaggtccacaaaaaatcaaaggaagccaggtgtggtg

SEQ ID NO: 150991 - DNA, 420 bp, Homo sapiens
aatgaattctagtgttctgttgcattgtagggtgaatatggttaactaatatttttttttttttgagacagagtcttgctctgtcacccaggcttggcgtgcagtggtgcaatctcagctcactgcaatctccgcctcsggggttcaagccattctcctgcctcagcctcccaaacagctgggattacaggtgtgtgccactacacctggcttggctagctaatatttaaaaagctagaggagaggattttgaaagttcacaacacaaagaaatggtaaatgtttgaggtgatggaatatattaattagcctgatttgaccattatacattgtttacacatatcaaaatatcactgtgtataccataaatatgtacaattatacaggtccacaaaaaatcaaaggaagccaggtgtggtg

SEQ ID NO: 150992 - DNA, 420 bp, Homo sapiens
aatgaattctagtgttctgttgcattgtagggtgaatatggttaactaatatttttttttttttgagacagagtcttgctctgtcacccaggcttggcgtgcagtggtgcaatctcagctcactgcaatctccgcctccggggttcaagccattctcctgcctcagcctcccaaacagctgggattacaggtgtgtgccactacacctggyttggctagctaatatttaaaaagctagaggagaggattttgaaagttcacaacacaaagaaatggtaaatgtttgaggtgatggaatatattaattagcctgatttgaccattatacattgtttacacatatcaaaatatcactgtgtataccataaatatgtacaattatacaggtccacaaaaaatcaaaggaagccaggtgtggtg

SEQ ID NO: 150993 - DNA, 410 bp, Homo sapiens
atgaattctagtgttctgttgcattgtagggtgaatatggttaactaatatttttttttttttgagacagagtcttgctctgtcacccaggcttggcgtgcagtggtgcaatctcagctcactgcaatctccgcctccggggttcaagccattctcctgcctcagcctcccaaacagctgggattacaggtgtgtgccactacacctggcttggctagctaatatttaaaaagctagaggagaggattttgaaagttcacaacacaaagaaatggtaaatgtttgaggtgatggaatatattaattagcctgatttgaccattatrcattgtttacacatatcaaaatatcactgtgtataccataaatatgtacaattatacaggtccacaaaaaatcaaaggaagcca

SEQ ID NO: 150994 - DNA, 410 bp, Homo sapiens
atgaattctagtgttctgttgcattgtagggtgaatatggttaactaatatttttttttttttgagacagagtcttgctctgtcacccaggcttggcgtgcagtggtgcaatctcagctcactgcaatctccgcctccggggttcaagccattctcctgcctcagcctcccaaacagctgggattacaggtgtgtgccactacacctggcttggctagctaatatttaaaaagctagaggagaggattttgaaagttcacaacacaaagaaatggtaaatgtttgaggtgatggaatatattaattagcctgatttgaccattatacattgtttacacatatcaaaatatcactgtgtataccataaatatgtwcaattatacaggtccacaaaaaatcaaaggaagcca

SEQ ID NO: 150995 - DNA, 475 bp, Homo sapiens
ggcaggaagaattcttgagacatggaggtcaaggccggcctgggtaacataataagacaccatgtctaaaaaaaaaatacatcaataaaaataaaagcaaaatcattcatcctatatatagactataggtgaaacttagtgacttgcttctaatgaacagaaagtgttaaaagtgataaccatgtggcttcgaacattaagttagaagaggctctctaccgcagactgctcacccttggaccccagcccccatgttgtgaggaagcttaggccacaaagagagsctaggagttccaatgtagatatttgggcaacctgccccagctaaagttccaaccaatagccaccatcagcaacagacatcttagtgaacaaaccttcagatgattccagtccctcagcctttgatttatcccaagtgaagctgaagggagcagaggcaagctgtcccagccaaggttttcccaagccacag

SEQ ID NO: 150996 - DNA, 475 bp, Homo sapiens
ggcaggaagaattcttgagacatggaggtcaaggccggcctgggtaacataataagacaccatgtctaaaaaaaaaatacatcaataaaaataaaagcaaaatcattcatcctatatatagactataggtgaaacttagtgacttgcttctaatgaacagaaagtgttaaaagtgataaccatgtggcttcgaacattaagttagaagaggctctctaccgcagactgctcacccttggaccccagcccccatgttgtgaggaagcttaggccacaaagagagcctaggagttccaatgyagatatttgggcaacctgccccagctaaagttccaaccaatagccaccatcagcaacagacatcttagtgaacaaaccttcagatgattccagtccctcagcctttgatttatcccaagtgaagctgaagggagcagaggcaagctgtcccagccaaggttttcccaagccacag

SEQ ID NO: 150997 - DNA, 548 bp, Homo sapiens
accacacattgtgtgatccaattgatacgtggtgtccagaatgggctaatctatggaaacaaaatagattgctgattcttktcagggtcatgaaaatgtcctacaattgatgatggtgatggttatgcaactctgtgaatatattaagagaccatgaattgtacacgttcaatgggtaaactgtatggtatgagaattctctctcagtaaacttgtttttaaaaattcagtggtagaatctagatatatctcttaattctctactttggatgtacatactatacatgatttgtaaaaaagcacaatatatttaaaatgaaaggaaaataaaggaagtacctaacatttcaagtagtttgtaaattaaaacatttgcattttggagaacagtactatggcctttctgtaccagttatcctgaaattcatgaaataaatatacacagattctgtacccattcacaaaagtaaagataagaaataagacaattttctggaacattctattaaacattatcctataatttaatctggcttgcctcaccatgg

SEQ ID NO: 150998 - DNA, 548 bp, Homo sapiens
accacacattgtgtgatccaattgatacgtggtgtccagaatgggctaatctatggaaacaaaatagattgctgattcttttcagggtcatgaaaatgtcctacaattgatgatggtgatggttatgcaactctgtgaatatattaagagaccatgaattgtacacgttcaatgggtaaactgtatggtatgagaattctctctcagtaaacttgtttttaaaaattcagtggtagaatctagatatatctcttaattctctactttggatgtacatactrtacatgatttgtaaaaaagcacaatatatttaaaatgaaaggaaaataaaggaagtacctaacatttcaagtagtttgtaaattaaaacatttgcattttggagaacagtactatggcctttctgtaccagttatcctgaaattcatgaaataaatatacacagattctgtacccattcacaaaagtaaagataagaaataagacaattttctggaacattctattaaacattatcctataatttaatctggcttgcctcaccatgg

SEQ ID NO: 150999 - DNA, 548 bp, Homo sapiens
accacacattgtgtgatccaattgatacgtggtgtccagaatgggctaatctatggaaacaaaatagattgctgattcttttcagggtcatgaaaatgtcctacaattgatgatggtgatggttatgcaactctgtgaatatattaagagaccatgaattgtacacgttcaatgggtaaactgtatggtatgagaattctctctcagtaaacttgtttttaaaaattcagtggtagaatctagatatatctcttaattctctactttggatgtacatactatacatgatttgtaaaaaagcacaatatatttaaaatgaaaggaaaataaaggaagtamctaacatttcaagtagtttgtaaattaaaacatttgcattttggagaacagtactatggcctttctgtaccagttatcctgaaattcatgaaataaatatacacagattctgtacccattcacaaaagtaaagataagaaataagacaattttctggaacattctattaaacattatcctataatttaatctggcttgcctcaccatgg

SEQ ID NO: 151000 - DNA, 554 bp, Homo sapiens
acttttatccctcaagaatcactcaaatcttaattgcatacatgacagctaaatctgtcaaagaggaaaaacagttcttaactacgagaagatacagcattgtgaaataaaatttctttcaaaacatttaactagtgtccttatagtttcaaagctatttagcctgtattttaacataaaaaatgtgtaaatgaacagctatattagtrattaaactcaacttatcctccactctaaaaacacagactgagcatctattagatgacaaggtttacagtaaataattttatctataaatgtcatagttcattcttaagaggaaataacagttttggtttattttaaacctaaatgatatacatgaaggcaaaaaattataagtaataccgatgaaacataaagttagaaaaatgaagtttacaccaaagattaatttaccagatccaagttatttcttactgtcctcaattccttaacaagtcttctcagattccatttaagttgttgctttgtttcaaccactttcccacactcctcttcttttattcttaact

SEQ ID NO: 151001 - DNA, 402 bp, Homo sapiens
tggacttctatatggccatttagattgcaaagaatatacatttatttattagaagagttcacagttaataatttgttttattatttccaagaatttcatatyccacaagaccaaaaaggtttctcccccattaatctgcagaaggtaagtcagcagttacaaaaattctgatatattgtctttagtataaatatttctttagaactagaacatcatacctcaaatcgtacagctctttctcccattcaattttttgaagttctaactgtaattttgtcttttttgtttcagatagctcattttgtagtacactgaccatattttccatttgtttaagttttactgtaagttggtcacagtgattattcttaagtttcagtaagtgttcacacaaacaaaatg

SEQ ID NO: 151002 - DNA, 386 bp, Homo sapiens
attggaaacaattttaagtccattaaatttaccacccttatattttaattttctttataaatyaccaatgaactatgtaattcctttgatccattttatcataagtaaaactatcatgattattagtaaaagaataaatagtgagtaaccacaatattgagcttttctctctaaatggaaaactattaatacaaagaatgtagcttattacaaagagccaaaaaatccaaaaacgcatataatttccaggcaaaagtgttagaatgaacccatgtgaaacctttctttttctttttttttttttcttacctgagaatcaatctaatgtttaaaacaatacaccgaagggtaaacttcagttgctcatttaataaatatttattgag

SEQ ID NO: 151003 - DNA, 386 bp, Homo sapiens
attggaaacaattttaagtccattaaatttaccacccttatattttaattttctttataaattaccaatgaactatgtaattcctttgatccattttatcataagtaaaactatcatgattattagtaaaagaataaatagtgagtaacsacaatattgagcttttctctctaaatggaaaactattaatacaaagaatgtagcttattacaaagagccaaaaaatccaaaaacgcatataatttccaggcaaaagtgttagaatgaacccatgtgaaacctttctttttctttttttttttttcttacctgagaatcaatctaatgtttaaaacaatacaccgaagggtaaacttcagttgctcatttaataaatatttattgag

SEQ ID NO: 151004 - DNA, 566 bp, Homo sapiens
ggtgggttggaaatggaagatatgactggcttctggatatattcttcaggtactcctgacaagatctgctgacagattagatgtgaggtgtcagagagagaggggagtcaatgaygacaccttagtttctagcagagcaactgcaagagttgccattaatgcaagtaggaaagaccatgtgaggggtaggtatgagaaagaatatcggtaccccaatcttggacctggtaagtttgtgatacccaacagttcgtgaccaatcaaacagagatgtcaagtaggcaggttggtatagaagtctggaattaaggagagagatctaggctggagacacgcatttggaaatcattagcacacacaaggtagtaaaagtcatgagaaagaagattgaggactgagtcctgggacatatcagtcctgggacatatcaatgtgtaaaaggtgggatatgagaagaaagcaaaacagactatgacagatggactggaaaggcaggaagaaaagccaggtgagtgagtgagatcctgaaagccaagtgaagacactgttatggaggagagagtttt

SEQ ID NO: 151005 - DNA, 566 bp, Homo sapiens
ggtgggttggaaatggaagatatgactggcttctggatatattcttcaggtactcctgacaagatctgctgacagattagatgtgaggtgtcagagagagaggggagtcaatgatracaccttagtttctagcagagcaactgcaagagttgccattaatgcaagtaggaaagaccatgtgaggggtaggtatgagaaagaatatcggtaccccaatcttggacctggtaagtttgtgatacccaacagttcgtgaccaatcaaacagagatgtcaagtaggcaggttggtatagaagtctggaattaaggagagagatctaggctggagacacgcatttggaaatcattagcacacacaaggtagtaaaagtcatgagaaagaagattgaggactgagtcctgggacatatcagtcctgggacatatcaatgtgtaaaaggtgggatatgagaagaaagcaaaacagactatgacagatggactggaaaggcaggaagaaaagccaggtgagtgagtgagatcctgaaagccaagtgaagacactgttatggaggagagagtttt

SEQ ID NO: 151006 - DNA, 573 bp, Homo sapiens
tggtgggttggaaatggaagatatgactggcttctggatatattcttcaggtactcctgacaagatctgctgacagattagatgtgaggtgtcagagagagaggggagtcaatgatgacaccttagtttctagcagagcaactgcaagagttgccattaatgcaagtaggaaagaccatgtgaggggtaggtatgagaaagaatatcggtaccccaatcttggacctggtaagtttgtgatacccaacagttygtgaccaatcaaacagagatgtcaagtaggcaggttggtatagaagtctggaattaaggagagagatctaggctggagacacgcatttggaaatcattagcacacacaaggtagtaaaagtcatgagaaagaagattgaggactgagtcctgggacatatcagtcctgggacatatcaatgtgtaaaaggtgggatatgagaagaaagcaaaacagactatgacagatggactggaaaggcaggaagaaaagccaggtgagtgagtgagatcctgaaagccaagtgaagacactgttatggaggagagagttttccattg

SEQ ID NO: 151007 - DNA, 564 bp, Homo sapiens
gtgggttggaaatggaagatatgactggcttctggatatattcttcaggtactcctgacaagatctgctgacagattagatgtgaggtgtcagagagagaggggagtcaatgatgacaccttagtttctagcagagcaactgcaagagttgccattaatgcaagtaggaaagaccatgtgaggggtaggtatgagaaagaatatcggtaccccaatcttggacctggtaagtttgtgatacccaacagttcgtgaccaatcaaacagagatgtcaagtaggcaggttggtrtagaagtctggaattaaggagagagatctaggctggagacacgcatttggaaatcattagcacacacaaggtagtaaaagtcatgagaaagaagattgaggactgagtcctgggacatatcagtcctgggacatatcaatgtgtaaaaggtgggatatgagaagaaagcaaaacagactatgacagatggactggaaaggcaggaagaaaagccaggtgagtgagtgagatcctgaaagccaagtgaagacactgttatggaggagagagttt

SEQ ID NO: 151008 - DNA, 519 bp, Homo sapiens
agagagagaggggagtcaatgatgacaccttagtttctagcagagcaactgcaagagttgccattaatgcaagtaggaaagaccatgtgaggggtaggtatgagaaagaatatcggtaccccaatcttggacctggtaagtttgtgatacccaacagttcgtgaccaatcaaacagagatgtcaagtaggcaggttggtatagaagtctggaattaaggagagagatctaggctggagacacgcatttggaaatcattakcacacacaaggtagtaaaagtcatgagaaagaagattgaggactgagtcctgggacatatcagtcctgggacatatcaatgtgtaaaaggtgggatatgagaagaaagcaaaacagactatgacagatggactggaaaggcaggaagaaaagccaggtgagtgagtgagatcctgaaagccaagtgaagacactgttatggaggagagagttttccattgggtccaatattgctgacaggttaaataaaatgaggtcta

SEQ ID NO: 151009 - DNA, 573 bp, Homo sapiens
tggtgggttggaaatggaagatatgactggcttctggatatattcttcaggtactcctgacaagatctgctgacagattagatgtgaggtgtcagagagagaggggagtcaatgatgacaccttagtttctagcagagcaactgcaagagttgccattaatgcaagtaggaaagaccatgtgaggggtaggtatgagaaagaatatcggtaccccaatcttggacctggtaagtttgtgatacccaacagttcgtgaccaatcaaacagagatgtcaagtaggcaggttggtatagaagtctggaattaaggagagagatctaggctggagacacgcatttggaaatcattagcacacacaaggtagtaaaagtcatgagaaagaagattgaggactgagtcctgggacatatcagtcctgggacatatcaatgtgtaaaaggtgggatatgagaagaaagcaaaacagactatgamagatggactggaaaggcaggaagaaaagccaggtgagtgagtgagatcctgaaagccaagtgaagacactgttatggaggagagagttttccattg

SEQ ID NO: 151010 - DNA, 404 bp, Homo sapiens
ggaccagccaggccccaaggaggtggcaggaaaggaaggtaagacctggcaaagtagctgattgtttccctgaatgtgtgaytggctaaatcttgggactgggaaagtttttttctgtgcttttctgagctcaacttctgggtgcccacgccttgctttgaaagggtttggtctgtgaacctacacatctctcagtaatgatttaagttactcagaaaactgggagccctggagtgaaaggaagagacgaaagggaaagaaatccatgtagcagtcttgctccgtttgatctggcagacagcgggcgatgatggaagaatgctggagatggaggtggagggtggtcggattctgccatcctgagccatgtctgctgtttggacttgcagacttcaaacacggct

SEQ ID NO: 151011 - DNA, 404 bp, Homo sapiens
ggaccagccaggccccaaggaggtggcaggaaaggaaggtaagacctggcaaagtagctgattgtttccctgaatgtgtgactggctaaatcttgggactgggaaagtttttttctgtgcttttctgagctcaacttytgggtgcccacgccttgctttgaaagggtttggtctgtgaacctacacatctctcagtaatgatttaagttactcagaaaactgggagccctggagtgaaaggaagagacgaaagggaaagaaatccatgtagcagtcttgctccgtttgatctggcagacagcgggcgatgatggaagaatgctggagatggaggtggagggtggtcggattctgccatcctgagccatgtctgctgtttggacttgcagacttcaaacacggct

SEQ ID NO: 151012 - DNA, 404 bp, Homo sapiens
ggaccagccaggccccaaggaggtggcaggaaaggaaggtaagacctggcaaagtagctgattgtttccctgaatgtgtgactggctaaatcttgggactgggaaagtttttttctgtgcttttctgagctcaacttctgggtgcccacgccttgctttgaaagggtttggtctgtgaacctacacatctctcagtaatgatttaagttactcagaaaactgggagccctggagtgaaaggaagagacgaaagggaaagaaatccatgtagcagtcttgctccgtttgatctggcagacagygggcgatgatggaagaatgctggagatggaggtggagggtggtcggattctgccatcctgagccatgtctgctgtttggacttgcagacttcaaacacggct

SEQ ID NO: 151013 - DNA, 315 bp, Homo sapiens
gatggttttcctaaatatttaagtagatttaaaatttaccataaatattagtctgttgttatagtataatatcgtagtaaagatgttttatttttctgactgggtgctcacacctgtaatcccaacactttgggaagccaaggtgggcagatcgcttsagcccaggagttaaagaccagcctgggcaacatagcgagaccccacctccgttttttaaaagtttaaaaaaaaatttgttaaagaaaaaagtcttattttctgtggaatctgttgagcttttccttcctgattccttctgttgattcagacctgaga

SEQ ID NO: 151014 - DNA, 399 bp, Homo sapiens
acacaactggattggtttctttttctggttcctcactaactcagagtataatgttgatcaagtcattttatcactatggctcatgaggcttctatttcttcatttgtaaaataaggcagcaggtaatggagacaatatccagggttmcttctagccctcgaattgatggtatttatgttatttttcaattgttttcagatacatggagggtataaacctctgaattctccctgttcagttcttggcttccctttggttgtagactaaaagctataatacattagacctgtaggacccaggctatgaaggagtttcagcctctctccatccatgctgagccccctaattctcatgtaaacacatttcatttcaattttattgctcagggcatgtcttcta

SEQ ID NO: 151015 - DNA, 399 bp, Homo sapiens
acacaactggattggtttctttttctggttcctcactaactcagagtataatgttgatcaagtcattttatcactatggctcatgaggcttctatttcttcatttgtaaaataaggcagcaggtaatggagacaatatccagggttacttctagccctcgaattgatggtatttatgttatttttcaattgttttcagatacatggagggtataaacctctgaattctccctgttcagttcttggcttccctttggttgtagactaaaagctataatacattagacctgtaggacccaggctatgaaggagtttcagcctctctccayccatgctgagccccctaattctcatgtaaacacatttcatttcaattttattgctcagggcatgtcttcta

SEQ ID NO: 151016 - DNA, 529 bp, Homo sapiens
gaattctccctgttcagttcttggcttccctttggttgtagactaaaagctataatacattagacctgtaggacccaggctatgaaggagtttcagcctctctccatccatgctgagccccctaattctcatgtaaacacatttcatttcaattttattgctcagggcatgtcttctacaatattytatgtcatctagaccatttcaaatcaacacctacaaacatcttgacacttacaatcagcactaaagcatcaccctaacttccttgatgtgtggggagtcaaaaattgccaggtgctcactggggagtttcataaatgtaatgtcagaactctctcctatattagatttgctagaaggtggtagaaaattacttaatctctctctgctccattttactaatttacatactgaagaataggaaaacatttaggaagcattttgaagtccttagataaatgaaaatgcacttggcactaaaaactatcattatcccatttgtgaaggcctttatctccctgtctgt

SEQ ID NO: 151017 - DNA, 541 bp, Homo sapiens
gtccatcagtttaacccatttatgcctgaggttgcaattaytgaattttgaaatcagaccttggcaattaccttgagcagtaggatataaataactcccacatgcttagagttccaatagtggaacactgggcataaataagtttaatggaagtagtcaggaggacaaataagcccaactcaaaaagaatgagtgaagtatattcattgcagcatctttcaccatccccagatcaccttcttcctgtcgctgtaggatcatgccatatagagctgcagggccatttgccaagagagtagagaaatataaacttagaaatacaagatttcccctggtaccttatccaatgttgttgtttttaacctcctcattatagtttattgatatcttaaaatatataaaccctcatttattggtgtcaaaagtttctgccaccagacccaggaacccctggcatcttggcgatcagatataatttagaactaactatatgtacttttcccaatacccataagcacatctaaaaattcctgctaggaca

SEQ ID NO: 151018 - DNA, 541 bp, Homo sapiens
gtccatcagtttaacccatttatgcctgaggttgcaattactgaattttgaaatcagaccttggcaattaccttgagcagtaggatataaataactcccacatgcttagagttccaatagtggaacactgggcataaataagtttaatggaagtagtcaggaggacaaataagcccaactcaaaaagaatgagtgaagtatattcattgcagcatctttcaccatccccagatcaccttcttcctgtcgctgtaggatcatgccatatagagctgcagggccatttgccaagagagtagagaaatataaacttagaaatacaagatttcccctggtaccttatccaatgttgttgtttttaacctcctcattatagyttattgatatcttaaaatatataaaccctcatttattggtgtcaaaagtttctgccaccagacccaggaacccctggcatcttggcgatcagatataatttagaactaactatatgtacttttcccaatacccataagcacatctaaaaattcctgctaggaca

SEQ ID NO: 151019 - DNA, 569 bp, Homo sapiens
cttaaatcgtaactccactgcctccctcttacaaggacttctgtgattatattaggcctacctgggtaattcaagataatctccacatctcttgatccttaatttaatcatatatacaaaatcccctttaccatgaaaggttccggagataggacatggaaatcttaggaggtcatgatttggcctactgtatcatcttaaaataacaataaatagccttctcatgtccaattctttttttaattttattattattatactttaagttttagggtacacgtgcacaacgtgcaggtttatatatgtatatatgtgccatgttggtgtgctgcacccattaacttgtcatttagcattaggtatatctcctaatggtatccctcccccctcccccaatctcatgtccacttcttaaatcccatttctttattcttttttctctcagctttggtcasttcttcctcttcttattgtttatagtaatatcacatacaatcatgcaccacataatgccatttcagtcaatgatgggccatttaaactacagtggttccacaagattataacat

SEQ ID NO: 151020 - DNA, 563 bp, Homo sapiens
ccaggttggaaaaaataggcataatgattctcacatacctttcctttatggcaaatatttctgctttggaagttgctagcaagtgctttctctcattctgagcaccctcctgtgcaatggggctcagctttcaactctactcttcgcctgtgtcatcttctgcgagtattctcattcatttaaattccctcctaggacatttttctcatccaattcctacgwttttagtatgaggccctggaatcttgaaggtttgaacaatggtgatgctgaatatttaaagagtacactcaggacgtttctctgtgtttagccatatgagttcattcaaaaatatatacccctatctcccaatctccaggaaacttaagacaaaataaatttgaatctgtttccacttcctgctatgcaagtacaggaaattatgtcagattctttatctcttattgaaaataaacattccatttaaccaataacaatgttattagtctgcatagtgtatttgcttgctattgttgctgtaacacattactacaaatgtggtgacttataaatgacacata

SEQ ID NO: 151021 - DNA, 538 bp, Homo sapiens
gtctccaggttggaaaaaataggcataatgattctcacatacctttcctttatggcaaatatttctgctttggaagttgctagcaagtgctttctctcattctgagcaccctcctgtgcaatggggctcagctttcaactctactcttcgcctgtgtcatcttctgcgagtattctcattcatttaaattccctcctaggacatttttctcatccaattcctacgattttagtatgaggccctggaatcttgaaggtttgaacaatggtgatgctgaatatttaaagagtacactcaggacgtttctctgtgtttagccatatgagttcattmaaaaatatatacccctatctcccaatctccaggaaacttaagacaaaataaatttgaatctgtttccacttcctgctatgcaagtacaggaaattatgtcagattctttatctcttattgaaaataaacattccatttaaccaataacaatgttattagtctgcatagtgtatttgcttgctattgttgctgtaacacattacta

SEQ ID NO: 151022 - DNA, 630 bp, Homo sapiens
tggtataatgcttatggtgtcaaaactttagcatatgctgggcccagtggctcacacttataatctgagctctttgggaggctgaggcaggcgttatcatgaggtcaggagtttgagaccagcctctggcaaagagtaatagggtatgagtggctttatcactcaaaacctacacaacaatgcaggatggtgtaaggcaattccctttgaatattctccagaagtgggagtttaagatrcactgggttgtctagtgactaactataaaatcagacagagaggaatctttacctttaaaaaacaaacaattcttaggaagagtgtagtctaaaccaaaagtaaaaaattcaattgcttacttgaccaagcagtgaagtgaattaattaagtggggtaggaattgtggcaaaccaaagactacttatttcttctaaaggtatccttcatagacctcagggcactaggagttgctcaattccagggggttggcatatttatataacataggtacaatttcattgtattaattttacttaggatacaagctaagtggtgccctttgagtttataaaataatgtagttttgtgacactatcgctgattttcagtatgtggaaattcaagcttaga

SEQ ID NO: 151023 - DNA, 630 bp, Homo sapiens
tggtataatgcttatggtgtcaaaactttagcatatgctgggcccagtggctcacacttataatctgagctctttgggaggctgaggcaggcgttatcatgaggtcaggagtttgagaccagcctctggcaaagagtaatagggtatgagtggctttatcactcaaaacctacacaacaatgcaggatggtgtaaggcaattccctttgaatattctccagaagtgggagtttaagatacactgggttgtctagtgactaactataaaatcagacagagaggaatctttacctttaaaaaacaaacaattcttaggaagagtgtagtctaaaccaaaagtaaaaaattcarttgcttacttgaccaagcagtgaagtgaattaattaagtggggtaggaattgtggcaaaccaaagactacttatttcttctaaaggtatccttcatagacctcagggcactaggagttgctcaattccagggggttggcatatttatataacataggtacaatttcattgtattaattttacttaggatacaagctaagtggtgccctttgagtttataaaataatgtagttttgtgacactatcgctgattttcagtatgtggaaattcaagcttaga

SEQ ID NO: 151024 - DNA, 630 bp, Homo sapiens
tggtataatgcttatggtgtcaaaactttagcatatgctgggcccagtggctcacacttataatctgagctctttgggaggctgaggcaggcgttatcatgaggtcaggagtttgagaccagcctctggcaaagagtaatagggtatgagtggctttatcactcaaaacctacacaacaatgcaggatggtgtaaggcaattccctttgaatattctccagaagtgggagtttaagatacactgggttgtctagtgactaactataaaatcagacagagaggaatctttacctttaaaaaacaaacaattcttaggaagagtgtagtctaaaccaaaagtaaaaaattcaattgcttacttgaccaagcagtgaartgaattaattaagtggggtaggaattgtggcaaaccaaagactacttatttcttctaaaggtatccttcatagacctcagggcactaggagttgctcaattccagggggttggcatatttatataacataggtacaatttcattgtattaattttacttaggatacaagctaagtggtgccctttgagtttataaaataatgtagttttgtgacactatcgctgattttcagtatgtggaaattcaagcttaga

SEQ ID NO: 151025 - DNA, 630 bp, Homo sapiens
tggtataatgcttatggtgtcaaaactttagcatatgctgggcccagtggctcacacttataatctgagctctttgggaggctgaggcaggcgttatcatgaggtcaggagtttgagaccagcctctggcaaagagtaatagggtatgagtggctttatcactcaaaacctacacaacaatgcaggatggtgtaaggcaattccctttgaatattctccagaagtgggagtttaagatacactgggttgtctagtgactaactataaaatcagacagagaggaatctttacctttaaaaaacaaacaattcttaggaagagtgtagtctaaaccaaaagtaaaaaattcaattgcttacttgaccaagcagtgaagtgaattaattaagtggggtaggaattgtggcaaaccaaagactacytatttcttctaaaggtatccttcatagacctcagggcactaggagttgctcaattccagggggttggcatatttatataacataggtacaatttcattgtattaattttacttaggatacaagctaagtggtgccctttgagtttataaaataatgtagttttgtgacactatcgctgattttcagtatgtggaaattcaagcttaga

SEQ ID NO: 151026 - DNA, 536 bp, Homo sapiens
aatatttaaaattaaagagagaaagagaggtgaatatacttgcttggttgaaattgcaagtgggtttgtgttgtaaatattaaaatattacatagtttcattcagggaacttggtaactctttgattgcttttggagatctaaatcttcatacatatcataatgaaatagcattctttgaaatatgaatgatgataaagattctttgatttcagacatctattcagcctcttttcaggtctctctgtggagaagcaattattcttgttagcagagatgtcagaggatctatttcagttttactgttacctttttaacactcgactcagccaatgctgggcagatctttgtctgtcaattattcaargagacatgttgctttttgccatgcctttttgtaaaagtagtaaaaccagtatctcagaacagagaccaaccacttcaagtctctgaaaccttcttgcctttagtgagactaagaacaggtcacagagtagctttatcacttgtatatcatccttatgtttacaactaaaa

SEQ ID NO: 151027 - DNA, 636 bp, Homo sapiens
ccaaaaatccagtgacaaaaattagaagtatgttatctcaaattagaattttgtagtattataccatatttaatcaaataatgcttgtataatcattaactctatagaaataaggaagataataatactgttgtagtcataaatattgccacaatgaaaaactatttaatctttctaaaaataaaagcttactttaaactcataagagaatcgtgaacatgtctgtgagaagaaaacaaatgacttatcaaatgacttaattataaaaacttagtcaacagcgacgtaaaaatgtcttgcctaaatttaatcacagaaatcattctgaaactacttacttttaaatacacacttccctacttaggaaatactcattgtataaattgtaaatttctatctctgcatcatggccttggaagctycataacatctgacactcatctactctccagtttatctcctttttttttttgtcttcttgatattccttccttatgttctaccatcctagactatatctataaactttggctttttctgaggaaccttcttggtcctccccactagcccaactggtcccttttctctcttctcatgacactttctatatgcctctctttgatacttcttatatct

SEQ ID NO: 151028 - DNA, 524 bp, Homo sapiens
gtgttgggtactatattcaaaagcagatgttgtggctactcttaaacatgatttactaaatatgctacttgcattgttactatatacttgctgttgcattgactttgtcaacatccttgagaggattagccaacatctctttgtaaagtttgacaagtggattgaaattattttgggttggagagattttttatgactgtaccttgagtcatgaggtatttgcaatattgctgtccttgtgacagtgattttaacatctacattaacacccacttttcctgtttttgatttaataacatcggcttaaaaatactatctcagttacagcttatgatattccatactagcataaaaattcattagaggtttctcracagtagtttatagaaaaacagagttggggatgataaaacctacaacagctttctaatttttttagaggatagaaaatgctgtgaactaattatttctacattgtcataacatgaaagtaacagaatataaaataagtttacatattgagc

SEQ ID NO: 151029 - DNA, 557 bp, Homo sapiens
gcttttttaaaccttcaatctgaaggattattttgctggatataaaattcttgatccttttttctttttcttttttcaaattttygtgggtacatagtaggtgtatgtatttatggggtacataaaatgttttgctacaggcatgcaatgtgtaataatgacatcatagagaatggggtatccatcccttcaagcatttattgtttgtgttaccaacagtccaattatattcttagttattttaatattaatatttacaattaagttattattgactatagttatcatgtcgtgctatcaaataataggtcttattctttctaattaattttgttatacccattaactatccccctccctcagtacatttcccaacctctggaaaccatccttctattctctatgtccatgagtttgattgttttgatttttagatcccacaaataagtgagaatatgcaatgtttgtctttctgtgcttggcttatttcacttaacatagtgttttccagtttcatccatgttgttgcaaatgacttgatctcattcttttttatg

SEQ ID NO: 151030 - DNA, 456 bp, Homo sapiens
gatcatagtcctatttgatgagctcatggatgtgctaggtaccaagatgtcataaggaaagatgatgcccccattttaaaaatgaagagaataaggctcagaggccccttaataagtcctatccggagcaaggattcttttccctaggtctgtcagactcgtactttaaaaaaaaaaaaaaaaaaaaaaaaaaacctggtaatagtctatgtctaatggagttaagtgtccatattaaagttgactaatagtggccattatttccaattcatggatacttactagccacaaaatacagtactagattccaggggacacaaagatgcctgaracccatgccccagtaatggctgagatataggtatgaacatgtaaattacaccatgggacaggtaggattaaaaacaaaatattatggagcacagaattcttacagcctgttttaagaactttaga

SEQ ID NO: 151031 - DNA, 494 bp, Homo sapiens
ctctagaataatgctgtagagcttggatgataactgcagtgtgatcatagtcctatttgatgagctcatggatgtgctaggtaccaagatgtcataaggaaagatgatgcccccattttaaaaatgaagagaataaggctcagaggccccttaataagtcctatccggagcaaggattcttttccctaggtctgtcagactcgtactttaaaaaaaaaaaaaaaaaaaaaaaaaaacctggtaatagtctatgtctaatggagttaagtgtccatattaaagttgactaatagtggccattatttccaattcatggatacttactagccacaaaatacagtactagattccaggggacacaaagatgcctgagacccatgccccagtaatggctgaratataggtatgaacatgtaaattacaccatgggacaggtaggattaaaaacaaaatattatggagcacagaattcttacagcctgttttaagaactt

SEQ ID NO: 151032 - DNA, 302 bp, Homo sapiens
tgaattctattttacacatctaataatactagtaggtgtcctaagagagcctttcaaatggacacctatgaccttgtgtaactggtgaaataaattaggcwggaccaacacaaatttgaaaataattctaccctcccctgttggcccctggctgaccctgtattcttcagcctgactcatcacttcccttttgttcgtttctagtcttcctctccagcctctccatctgtcgttctctaacttcttcctttatttttccttttctcggtttcattgtgattgttttaaaaaccacgtctatg

SEQ ID NO: 151033 - DNA, 302 bp, Homo sapiens
tgaattctattttacacatctaataatactagtaggtgtcctaagagagcctttcaaatggacacctatgaccttgtgtaactggtgaaataaattaggcaggrccaacacaaatttgaaaataattctaccctcccctgttggcccctggctgaccctgtattcttcagcctgactcatcacttcccttttgttcgtttctagtcttcctctccagcctctccatctgtcgttctctaacttcttcctttatttttccttttctcggtttcattgtgattgttttaaaaaccacgtctatg

SEQ ID NO: 151034 - DNA, 504 bp, Homo sapiens
ctagtaggtgtcctaagagagcctttcaaatggacacctatgaccttgtgtaactggtgaaataaattaggcaggaccaacacaaatttgaaaataattctaccctcccctgttggcccctggctgaccctgtattcttcagcctgactcatcacttcccttttgttcgtttctagtcttcctctccagcctctccatctgtcgttctctaacttcttcctttatttttccttttctcggtttcattgtgattgttttaaaaaccacgtctatggcaaatatacccacaggtactttttagagggcttaatgacagtgtttatcagcagactctagaaatgtgttcatgacagatcaatgcttatttttgtggttcaaargaaagttgtaaaaatttttagaaattattagtattttcttgcgggaatagtgaaagttagttgtgtgtgatcattttttaagcatcaaagattggaaagtctgaaattgtgtttcaggtgtgtt

SEQ ID NO: 151035 - DNA, 462 bp, Homo sapiens
tcaggccatacacctactaacagcaatgacagagtgccagctkaagtccagttctcccaacatatgctgcagggcccttttctgagtcctgggctaccccagggtcatatgctctgctttgccatgaataatcctggtttacaccactgaaattattcgccacatcctcttttattcttaaaagttttcccctttggataataagttatattaattagggacataacagattctatctgcaaacataacatgtcccaaacttaactcctgatccagcaaatggcaactccttcctttcagtttttgagaccaaaacctttgaagttacccatgctctctttctctcatgcctcacttccaatccatactggttctaccttcagcacatattcagcctctggcttctcaccacctgctcttttacttggatctaagccacctttacttctcatactgaattct

SEQ ID NO: 151036 - DNA, 462 bp, Homo sapiens
tcaggccatacacctactaacagcaatgacagagtgccagcttaagtccagttctcccaacatatgctgcagggcccttttctgagtcctgggctaccccagggtcatatgctctgctttgccatgaataatcctggtttacaccackgaaattattcgccacatcctcttttattcttaaaagttttcccctttggataataagttatattaattagggacataacagattctatctgcaaacataacatgtcccaaacttaactcctgatccagcaaatggcaactccttcctttcagtttttgagaccaaaacctttgaagttacccatgctctctttctctcatgcctcacttccaatccatactggttctaccttcagcacatattcagcctctggcttctcaccacctgctcttttacttggatctaagccacctttacttctcatactgaattct

SEQ ID NO: 151037 - DNA, 493 bp, Homo sapiens
ttctctcactgctcctctcttccaagccagcccagcgtctactgggctggggctggggtctgaaggagtctggatgaaagtccttcccactcagagaagccattctcagacctccaatgggttctagggctgtgcccctccctctgctctggtccatgtgctaggctgtggaggtttgcaggccaggaggcggaggcagcccttctgaagacaaagggcaatgttggggggcgggcgaggaagagagaagggagttgggtggggggctggagcgcccccctccttcattctcacgggcctgggaaactggggctgagtgggacctcaatggctggtagcccctttaagggtgaattctcctcccgcctcgtaaattacgctggtccaccctctggccggcccgtgaggcmgtgaccgtgaacgccagcggggaagggagaatcagaggcctcggctgtggctgtcagaaattctcccggccaatcagtgtggt

SEQ ID NO: 151038 - DNA, 516 bp, Homo sapiens
ttctttaaattaaagaaaaaaaaactctctttattctttcctgctacctactgtggaagcctgttctttataactactcatctttgaatgagataagttttccctgtatcactattcataggaagactgagtggttgagagctcggagttccaggctaagagaaatttttcttatgtctcaggtttatttatgaattttttcctttatatttccccagccaatggatataggttgctgtaggactagtcgagaggcaaggtttatmttctccctccatcacactgctttctgaaaatacgcttgtttgtgtaattccttcagctccacttcttttgtttctctgaagcaaagtaggtctaggaaagctcttgctgcaagcctatacaccctgctgtgagagattttggttttgtattgaagatgtgctcctagaagcagtgtacctactgattctttacatctgcagctgggtgcatcctctcttctccccagtcctgttcatggctactcctttt

SEQ ID NO: 151039 - DNA, 607 bp, Homo sapiens
gggagctgtacaaacgatgaattaaggccaagtggaagagctttaatttgatatgatgaacaacaatagctaccgcataacaaggggaycccgtgaaagcagctttcacggattccctgggactgcattcctcaataaagtattatcacataaatttttacttctggctttaattcttagggaaaccaggccaagaaagaagaataaactctaagaaatactacgatggaggaatgaggacttggtagtggtgtaactgtgtatggcaaagattagggggaagtttaaagattagctccaagtttgtgggcctggggacctggggatggaggtggagtgaaggtaattttcatagtggtgaggaaagggggaagttaagaatcagccctagtgctccttacggtatgagaggggcttgtctatatcccaaatatatggtttaaaagtctctgggtctcctgggttacagtcctcaccctgtatccccttatcactctttgataggtctacatttaatatgaggttgggacaatctgagtgtgacccttaattattttatggcataaggtttaataaagaggaatccagtcaggatgacagacttatg

SEQ ID NO: 151040 - DNA, 607 bp, Homo sapiens
gggagctgtacaaacgatgaattaaggccaagtggaagagctttaatttgatatgatgaacaacaatagctaccgcataacaaggggaccccgtgaaagcagctttcacggattccctgggactgcattcctcaataaagtattatcacataaatttttacttctggctttaattcttagggaaaccaggccaagaaagaagaataaactctaagaaatactacgatggaggaatgaggacttggtagtggtgtaactgtgtatggcaaagattagggggaagtttaaagattagctccaagtttgtgggcctggggacctggggatggaggtggagtgaaggtaattttcatagtggtgaggaaagggggaagttaagaatcagccctagtsctccttacggtatgagaggggcttgtctatatcccaaatatatggtttaaaagtctctgggtctcctgggttacagtcctcaccctgtatccccttatcactctttgataggtctacatttaatatgaggttgggacaatctgagtgtgacccttaattattttatggcataaggtttaataaagaggaatccagtcaggatgacagacttatg

SEQ ID NO: 151041 - DNA, 646 bp, Homo sapiens
tcaataaatattatcccccattgtgaatgaaccccatatgaggctctctgcaggtggatactaaagaaaccccaggcatcagacatattctcagagaacatgaaatgtggtaggaggtataggcctcatgagaataaactaaatcaggatatttacacagatccatcaagtccagtacagactgaagtatgcagctgctgtccacccaaagtagctcaaattttacgtgctcaaaagtagaactcacctgctctttcttttgtagttcctatttcagttggaggcatccagttgcttgtgccagaaacctggttaccattcttgactccttcttctctatcattatttgaatgaccaaatactatcggctttaacccaaatgtttttcaaatctgcctctaggggaggcagcctttgtaaacagcagtgtaggctaacattattccagcttagatatctatggggaggaatctctttagactcaaatttcttwtctaagtgagtgaaatacaatgactgtcagacctaacaaaatcaggaacttgtctgcacccttccatctctgggaaattgacatggactcctaaagattgctgtacctgtcaaaccaaatggcagatagaaaagatggggcctgttggggggt

SEQ ID NO: 151042 - DNA, 291 bp, Homo sapiens
agatctggccctcaattagctaratgtagatgctgcctaacagttccctcctcaaaggccaccttggtgctgtgggggccccttgcctcttcccttcccactggtgcattacaaaacagtgttcttttgaaatgttcatcaggaataggcttttttaaaaaatgttgtgtatctgtatatagtattgtgatgtctgaatgacaatgtactgaatgcaaaaaggaaaaaaacccacaaacatgtttttaaaataaaatatctttttttgccttgattttattgctcagattc

SEQ ID NO: 151043 - DNA, 537 bp, Homo sapiens
tccctcctcaaaggccaccttggtgctgtgggggccccttgcctcttcccttcccactggtgcattacaaaacagtgttcttttgaaatgttcatcaggaataggcttttttaaaaaatgttgtgtatctgtatatagtattgtgatgtctgaatgacaatgtactgaatgcaaaaaggaaaaaaacccacaaacatgtttttaaaataaaatatctttttttgccttgattttattgctcagattctttctgaagtctattctgtccactggctcttcaggacrgtctactatgccctgactcagccagaatgatcagggggaggagtatagacattgctcccagctgggtagattccaaacccttgttttgctccacttaagtttttgggttatctatactatctatataggagaaaactttccatcctgatgtccaactcagatgagtgtttgttgaggaaggaaagacgtaattggtgactgaaaggcctggaggcagtgacaaaaatacattgatggttacttcggttaata

SEQ ID NO: 151044 - DNA, 358 bp, Homo sapiens
gaagaagaaaaaggaaagcctgtgcaggctcactactggtgcattgggacactggtaagcctaamaaggacctcagttcctgagtgcctgtgagccctcgtgcagtgcattaaatatacccagatttattttggaggagtatcatgcctggacttatttggatatgactttaccataagagtaagcaaacactgtgtgagtgtgtgtgagcatgtgtttcggggaggcacatttgtgaaatatattattctttccctgaataaggatttcttctttaacacaactctggttgtgttgatttcttacctttccttctcccaagaattggcattgtctttggggactctatgagatagtt

SEQ ID NO: 151045 - DNA, 189 bp, Homo sapiens
aggttgctgtgacattatttttgtaatttcttgagttggaatcttagctctgttttttctttcttctcttctaaygtattacagctataaatctgctttaaatgctactttagctgtattccacattttttaaagataattttttaaagcagttttagattcacagcaaaattgagaggaaggtagaga

SEQ ID NO: 151046 - DNA, 536 bp, Homo sapiens
aggtgatgggcatagcaggagggagaatttgacaccagttctaacaggggaaagaaaagtacagaatgctttgcatgtggagactatggaagtatttgtggttttacagtggagttgatcaagattatagaggaagtakttgagaccaaaggttagcttgaagatttaggaagatctgtgcctataaattctccattacatgtctgttccattaatcattcaaaaaagtgttgattatatgatttttcacttctaaactcctgagaattgtaggaaagggattaggaaggaggtgtgtgtgtgtgtgtgtgtgtgtgtgtttgtgtgtgcaactcacagagaaagagttaaggatgcagttacatccacagctgaactaattttcttgatgctccgtttatttcatatttttattttctcaagagtcccccaaaatagcaatttatacacatttgtcttcccacctaattttgctttaacaatagttaggaaaacacaaccagatgcttttttttataaaaaggcttctacatgtt

SEQ ID NO: 151047 - DNA, 335 bp, Homo sapiens
caaatgagcaaatggatgaatgaattatgttccactaagtatttacaggttgctagtttgctctccgtggactgcgaaaagagaaagagacatgtgtgataccagacaagctatgtaatcttttgaagctttagttttcacaygtgtaaaaggcagtaataatagtcattgcttcatagggttggaatgaagattattcaaccaggcctaaaggatgtggcatagtgcctggcacactgtacgaggctgatactaagtcagtggtggtggtgatgatgctgatagcatttatactttgatacgatacattatgcttacagacataatttccccca

SEQ ID NO: 151048 - DNA, 336 bp, Homo sapiens
ggcagggaatggtgctgctgttggcatctggcgggtagagaccaaggatgctgctgcgatgcacaggacagcccacaatagagaattctccagcccgaaaagtgctgaggctgattgaaaacctggtacaaagkgtagatttaccctagaatcttgctcccttctttactttcagcatgacctcaggcaaggagatcatctgtaaaatggattagtaagacttaacctgtgaataggaggtgattagacagaaggcacaatgcacgtcacgcattacctggcagacagtaggtaatatttaaaaaatattttttggctgagtgtggtggctcacac

SEQ ID NO: 151049 - DNA, 181 bp, Homo sapiens
aactggaagtcacgttgcattcgattccatttttctcaaggtggcacatttcasacacctcggtaagctcaaccccacaacctctaatctgaaggagtttcccttttaagactcttgccccaaataaaccaactagtccagggttcttcagacattttgttctgttttagacactagtcag

SEQ ID NO: 151050 - DNA, 599 bp, Homo sapiens
gtttaaccaatgaggaccaacccagccacttatgccacactgatctgaagccagaagaacgaaaaacctgccgtaatgtctataactgtaagttggccaactgaagttatctttctttagcatgaagaacaggatktctttgttcatttgattgcctgccctttttagaaatatagaattttttctgaaggaaatcattcgctttgctaaaaagttttagtgcgaacaatgtcattcattctataggcagataattcacatctcggatcatcacaccctattttttgtgattggtgttttctaggtgagttaccccagaattgcaaggaggtaaaaagacttaaaggtgccagtgaagatggtgaatatttcctgatgattagaggaaagcttctgaaggtgaatgtcagacaccagtcattatttcaagaatgtttttagagtgagtgatcaccgctctcattacctcatttctgagccactcttcatgggttatttatggtctttcagatattctgtgcggggatgcactctgaccaccccaaagagtacgtgacactggtgcatggagactctgagaatttctccgaggtttatgg

SEQ ID NO: 151051 - DNA, 599 bp, Homo sapiens
gtttaaccaatgaggaccaacccagccacttatgccacactgatctgaagccagaagaacgaaaaacctgccgtaatgtctataactgtaagttggccaactgaagttatctttctttagcatgaagaacaggatgtctttgttcatttgattgcctgccctttttagaaatatagaattttttctgaaggaaatcattcgctttgctaaaaagttttagtgygaacaatgtcattcattctataggcagataattcacatctcggatcatcacaccctattttttgtgattggtgttttctaggtgagttaccccagaattgcaaggaggtaaaaagacttaaaggtgccagtgaagatggtgaatatttcctgatgattagaggaaagcttctgaaggtgaatgtcagacaccagtcattatttcaagaatgtttttagagtgagtgatcaccgctctcattacctcatttctgagccactcttcatgggttatttatggtctttcagatattctgtgcggggatgcactctgaccaccccaaagagtacgtgacactggtgcatggagactctgagaatttctccgaggtttatgg

SEQ ID NO: 151052 - DNA, 605 bp, Homo sapiens
ggaccaacccagccacttatgccacactgatctgaagccagaagaacgaaaaacctgccgtaatgtctataactgtaagttggccaactgaagttatctttctttagcatgaagaacaggatgtctttgttcatttgattgcctgccctttttagaaatatagaattttttctgaaggaaatcattcgctttgctaaaaagttttagtgcgaacaatgtcattcattctataggcagataattcacatctcrgatcatcacaccctattttttgtgattggtgttttctaggtgagttaccccagaattgcaaggaggtaaaaagacttaaaggtgccagtgaagatggtgaatatttcctgatgattagaggaaagcttctgaaggtgaatgtcagacaccagtcattatttcaagaatgtttttagagtgagtgatcaccgctctcattacctcatttctgagccactcttcatgggttatttatggtctttcagatattctgtgcggggatgcactctgaccaccccaaagagtacgtgacactggtgcatggagactctgagaatttctccgaggtttatgggcacaggtaggagagccag

SEQ ID NO: 151053 - DNA, 605 bp, Homo sapiens
ggaccaacccagccacttatgccacactgatctgaagccagaagaacgaaaaacctgccgtaatgtctataactgtaagttggccaactgaagttatctttctttagcatgaagaacaggatgtctttgttcatttgattgcctgccctttttagaaatatagaattttttctgaaggaaatcattcgctttgctaaaaagttttagtgcgaacaatgtcattcattctataggcagataattcacatctcggatcatcacaccctrttttttgtgattggtgttttctaggtgagttaccccagaattgcaaggaggtaaaaagacttaaaggtgccagtgaagatggtgaatatttcctgatgattagaggaaagcttctgaaggtgaatgtcagacaccagtcattatttcaagaatgtttttagagtgagtgatcaccgctctcattacctcatttctgagccactcttcatgggttatttatggtctttcagatattctgtgcggggatgcactctgaccaccccaaagagtacgtgacactggtgcatggagactctgagaatttctccgaggtttatgggcacaggtaggagagccag

SEQ ID NO: 151054 - DNA, 528 bp, Homo sapiens
aaggccatctaactttagatatataaatttatgatatcaatattatagtatttcacggcatatgaggccatagtaggcaaacaaattttattgaatgaatgaattccctctaaactccttataaatcaatttcccagtgtgttccccttacttgtgaaaacttgaccccaaaatgtcatccgaacttttctcagacattttttgttaccagtttaacactcttcagataatctgagaaagctgtcagtaataaccctcagaaagataattccagcttcaagactttcacacaaaactatcctgggacacaaccaacgagatcgactttctagcaagaaaattttttggatgacgattatttaatcaagaggttaaaaaggcgcatgctgttttgtgtttgcacaaaagctrtaaggtttcagccctcacccacgctcacatacagtagcactgtggcatacttctccacatatgtaatgtgaactcaatctctctgcttagtctgctggtaaaatgataggggctatc

SEQ ID NO: 151055 - DNA, 574 bp, Homo sapiens
cgttctctacagtgatgggcattgaaaggaaagagtagaatttcaacagatttgaaaataggaaagaagattctagacctgtgctgtccaatatattagtctccagtcatatatgactagtggcttctgtattggaccatgtagatatagaacatgtccctcaacagaaaatgttctattagacaacactctatctagactaaggatagtatgaataaaattacrgaaaggtgaaggaggaagtagtttactaggaatatatgaccaagataggtgaccaaaatatagactgtgatcaaattacaaaaagctttagaagcattgatccattaattgtagcatttaaaaaatagacattgttcaatgggaacttactattttaagggctcaccctaaaagtatatgtaaaagttggagtacctcgtttgcaatcctgtatggcctccatacctggccttatactaggtttctttgtacctttagttgaagacattgtctcttatttggtcttctgaccactcttttcctttacctggcctcttcttcagccattactccatcactcgttccattg

SEQ ID NO: 151056 - DNA, 590 bp, Homo sapiens
aagaaggcgatcatcccacataacatacactagctgttttcagtactcctgtttagttttgcacaggagggtatgagctaatatggtagagaattctctatggagaattagagtgcatcctctccgttggaacgctgtatgactaagaataaacgacctgaaaagatgatgcccagggatctttctcttttacgtgaaatccttaactccagttctatgaagtcattacaagtgaggctaatgagaattcacctcacagtgaaggcatatgttgcctggctgttgcccaagtcctgtgatcccttattgtcttgcttcctctaggctatttttcctatgaattatctcttcttctcccatgttttcgtttttcatatctcctgtgcttcattatcctggagctacagacattttcaagttttcattattttaaaaatccctcacatgaatcatgatatcgtcttgcagkctctactcttagtgtcagctctttccatggtcccttgtagttgagtgtctatccccactctttgacaaatcagattcagcacttttctctctgatctcatttgctgtgacaggcctgtggg

SEQ ID NO: 151057 - DNA, 238 bp, Homo sapiens
gaattcaaatcctgagctctatgattttgaaawtggtgctttttttttttttttttttttttaacagctccctctgatgcctgaagttctaccactaaaatattcttctctgggcagaggcactgctgtggatttcatctatttatcctcccagtccacttttaatcaaaagtcattggtagggagaaaatatttaaagtatattgactgatgcattttacatacagttgacccctga

SEQ ID NO: 151058 - DNA, 622 bp, Homo sapiens
tttacgatatttataatcatgtacagcaaaatgttcattacatattgaagtatttactaaatatggttaagtaaaaaatgcaggtatgaaacataygaattctagtattatcccagtttataaggaaaaaaatgcataaataaacataatccggaaggatgtttactaaaacattcagtggttttaaccttaaaataggattaaagtttggaagtgaatatcttgtttattgctattattattatttagtctgtccatcatccctcctgcacttattctgagaactaatttgctaccccattctttatttggaaaactgcctccttttctccaggtgtgattttgatgaagcttccattcacagcatgctgcctgcccaccacgtttgagaggcagacatgtggccaactttggtcttatcaaagtactgagcgattggcctaaggagtggggaagaaagtaaaggtgatcatagcagctgcttttgatgtcccagcccatattgctttggcccatctgcaagtccacctgcagtcgtattggacaatttgtggcatgctgacagctccccacttcaagccatcacgtctctctgtttctctactgacgcctttttccagtg

SEQ ID NO: 151059 - DNA, 484 bp, Homo sapiens
ttgggacttgaggccttggcagaaagtgtcagcttcttgggtcaagggcaagagagtgaatgtgaggagaagtagggcagctatgtcagaaagtctttctggtctatacctctgtcactgactgtatgtatgtctgggtcaagtaactctctctggatctgttttccttctctaaaaaacagaaataaaaatgttcttcctctacctaccttgtggggattgctgtaaggagaaaagaaatgaggagtgtgatacagttgcagaagcatataactctacaaataaaaggtgctagtagcagtcactttggaagytctcgtcattttaaagggaacctagaaacaagtagtttcttctttccccagtagatctgttaattctcctcagctaggtctgtgctgagaccagcttcctgtgatctctgtatgatcggctcttagtgctgccctccaaaaccagcttttttcatgatggaactaggaca

SEQ ID NO: 151060 - DNA, 416 bp, Homo sapiens
tcatttctggttctagatctttgaggaatcaccacaccatcttccacaatggttaaactaatttacattcccaccaacagtgtaaaagcattcctatgctcgaaagtcttaatccaggattgtgagagttcaacagtcagcatcacagcatgccctatgcattttccccatgagtttcctcattctttcattcagtgagtattactgracacctcccagggtggtaagcaaaatagtccagacccaggcttcgaggtactgtctggtgatggaggattttaaaaatcaaaaatcccacacaaaaagaagcccagtgagtcacagaccactctgtgctgtgaaaaaagcacagggagatctgtgagagcccatcagggacacatccagagggacacgacaaagaaaatgacaaagaa

SEQ ID NO: 151061 - DNA, 593 bp, Homo sapiens
tttttctccaaatcaactacagtacatgacatataataggcactcataaataaatgttgaaagtatgactgagtgaacaaatggaaaataggaataaaaaaataaacagagggtgacataacaacatctctgggaggaactgtctcctaaacatttcaagaccttatattcaatgtcattgtctcacgctagagttcctcaattctctcagctcattgtacctatatggggaatgttttaaagtaccaactggataggctccatctcagaccaaytgaatctgaatctcttgggaggtgcatcccacattttggtagttttgaaagttctccagctacttctaatgtgtaactaacactggcttattccagcggttcttaaatgtgagctgtatcagaatttcccagagagcttgttaaaacataaatttctgagtcccacctccaaagtgtctagtgggtctgcatttctaatgagttcccaaatgatgctgatgctgctggactgggaactacactttgagagtcactagcttatactttcatgtagattgcattgtgcttagcttctccactttgggaggacagggaatg

SEQ ID NO: 151062 - DNA, 593 bp, Homo sapiens
tttttctccaaatcaactacagtacatgacatataataggcactcataaataaatgttgaaagtatgactgagtgaacaaatggaaaataggaataaaaaaataaacagagggtgacataacaacatctctgggaggaactgtctcctaaacatttcaagaccttatattcaatgtcattgtctcacgctagagttcctcaattctctcagctcattgtacctatatggggaatgttttaaagtaccaactggataggctccatctcagaccaattgaatctgaatctcttgggaggtgcatcccacattttggtagttttgaaagttctccagctacttctaatgtgtaactaacactggcttattccagcggttcttaaatgtgagctgtatcagaatttcccagagagcttgttaaaacataaatttctgagtcccacctccaaagtrtctagtgggtctgcatttctaatgagttcccaaatgatgctgatgctgctggactgggaactacactttgagagtcactagcttatactttcatgtagattgcattgtgcttagcttctccactttgggaggacagggaatg

SEQ ID NO: 151063 - DNA, 474 bp, Homo sapiens
gggttccctcttctacatcagtttttgttgagggagggctttcttctagttataacatcaaaccaggccaaccaaaataagcacatcttggatggtgtccttacgttttaagccaaatttagatattcagctagtggtcacacattttgtttcttccgatagatctcatctctcctgttcttctctttgggatctcttgtggccttatcttcctctgaggtcactgtcaaagaatctctgactttccttttacattcataagccctcttcaaycaaccccaagtagcctacctttctgtgtctgtctcattcctactcattctatgtactgagtcctttctaagaaaactaagaaggagaaaagatggtcacaaaaactaagcatatattcagaatttacacagaagtacctttacagatgttgcataaaaggaaacacagctacccttgtttaaaacttagattttgatatat

SEQ ID NO: 151064 - DNA, 459 bp, Homo sapiens
aagacaactttctatgtgtctaattcactgtgtgttattcatgctaagaatgcagtacaggactctttatattaactgaacaatcagatggtaaaagaatcactttggccatttgctgtgtgaagttcaggaacattttttgataaaataagtaattccatatgcatgtgaattcttagtatttgattcctgtttctcttgtaatgtccttggtcttttgtcttttgaatcaattaggtcagtctcaagggaatamaaaaagaaaaagaaagaaagaaaaacagaccatagtttaagccagaacactctaatactgtccactcaacatatggtgtttatagatcttgaaaacagaatgaggaggaatgcttcaggaatgctccctacatggttttaatttgttcatgttttaagtctttggttctggagtagttcttattacagtgaataaaatggtta

SEQ ID NO: 151065 - DNA, 514 bp, Homo sapiens
ctttgtgtctctgtgtaacattttggtaactctcacgatagttcaaacttattactattattatatttgttatggtggtctgtaatgagtgatccttttgtaattgttttagggcaacacaaacttctcccatataagacagcaaatttaatcaataaatgttgtgtgtgttctgactgatccacagagcagcccttccttcatttctttcactctccttggacctccctattccctgaaacacaacaakattgaaattaggccaattaattacactacaatggcctcgaattgttcaactgaaagagtcacacagttctcactttaaatcaaatgctagaaatgattaggtttggtgaggaagttacatcaaaagctgagataggctaaaagctaggcttcttttaccaaacagccgatttgtgaatgcaaacaaaaagttcttgaagaaaattaaaagtgctactttagtgaacatatgaataataagaaagtgaaacagcctgaataatca

SEQ ID NO: 151066 - DNA, 610 bp, Homo sapiens
caggtaccagctgtaacacaggcaggcttgggcacacccagcccagctgcgggctaagccatgtgcaaatcacgtgtggcccagccggtcgagtgtgcaggatgccccatgcggcaggcccagggctaaataaggcccaggtgggggcatcaccagctaaggattctagctggcaaaagtggccaagagaaatactgtgttatggagagcacaataaagagtctgctgtgcaaaagtgcctatgaagctgaagttctggtttcagtagaaattcccatattggctagtaacctgtgtgaacctgacttgtttcacttctgtagttccaactagcactcacccagctgtactgatgtgcctttggcaatatgagcagaaggctacatgagggtttgagtagtgaaatatgactaacctgccaataaatcatctccactgctttcagaaacctagagaaccacatagtaggcctttttttttttttttycctgcatgactctcatttggggaatgatcactaatgcccattctgtagatatggggtcagtaacattacaccaaatagaaaatgttaaatacagaatttcatttagaattagcattctgttaa

SEQ ID NO: 151067 - DNA, 625 bp, Homo sapiens
ctttttggaacaactcttgattttataatattgctggtatctctatctttcactaactggcctcttcttaaacctttttttattactggtgataaaaaagtatgatttcttctttagattgtagcatatgatttctgcagcttctgcaaataatcccccttctcctttcttgayttctaatagaatttaatggaagactctaacagataatctcatgataaattggaaatagaaggttaataatttttgtgcctttttgctttctgaactacattcaactgaagatctttctgctcagaaaaataatcaactatccaaaataactaggaattaagatgtaaaaaaaaaaaagacagattgaagcataaaagagacaggacaaaagcaaaatatcaaggaataggattaaatcaataaaaagcctgagggagaaatgtatatttttttcataaccaaccatgttaaaggaaaactactagaacaacatagtgtctcgtagaatctgtttaaagtatgcccactgaatcattacatttatatgttgtcatagatatacatatgatagatatgtctatgatagtctatgtagatatatcatagactacatatgtagtcatagatgtat

SEQ ID NO: 151068 - DNA, 487 bp, Homo sapiens
aaggtatatcctgacttatgtgaatctgtggaaaggtttagaaatcttacctattctgtgagaggccagagagctctgggttgtggaataggttgagctctggattgtagaataggttgcattaaatggaagagtagataaccaggcaggaatccatgtagaagatggaaatgaagggcctttgacttcaggrggagccatgacccgtaatagatgtgatgccccaaatctgggagaataacattggttctgatttgccagagtaagaagaaggcagatctcaggctcagaatagctgggtagagaaacccgagaagtatcagtttgactggcttctcagctggacttcatatctgcttagaatcacacagagagtttgcacctttaaaactgtgtcactccaactgataaatcttctcctgattaaattattggcctgagtatctttggtttccctgaagggaccaagggactcctgttaccaacc

SEQ ID NO: 151069 - DNA, 487 bp, Homo sapiens
aaggtatatcctgacttatgtgaatctgtggaaaggtttagaaatcttacctattctgtgagaggccagagagctctgggttgtggaataggttgagctctggattgtagaataggttgcattaaatggaagagtagataaccaggcaggaatccatgtagaagatggaaatgaagggcctttgacttcaggaggagccatgacccgtaatagatgtgatgccccaaatctgggagaataacattggttctgatttgccagagtaagaagaaggcagatctcaggctcagaatagctgggtagagaaacccgagaagtatcagtttgactggcttctcagctggacttcatatctgcttagaatcacacagagagtttgcacctttaaaactgtgtcactccaactgataaatcttctcctgattaaattattggcctgagtatctttggtttccctgaagggaccargggactcctgttaccaacc

SEQ ID NO: 151070 - DNA, 528 bp, Homo sapiens
gtgtctttctttttccctgggtctgagcatttttaaggaggaaagagagttgaaggaggggaaactatrgaatgaaaaccagcagaccattgtaaaatatgcgttcttatatgagtattgatgagaaaagaagggaaaaggcagatggaacacacaaagagcattttcaagggcttgtaatctcaaggaaaatgaaacgtgtcatggtctccatgaaatatatttgccgctaaaccacaaaccagaagactctttgatgttggcatagcttgccactataagaccaactcctgaagccaaagcatgcaacagatgcttcaagctaagaaaaactagtgtggtaggggcagtttcccattgactacatgattacttacaattgtgaagaatagaggcaaggatcacctccctatctgatgctttcagtcatctagagcagtattcctcagtcacttgggattctaattgagtatgtctgggtgtggcctgaggtttctgcatttcttataagctcccaggtgatgcaaa

SEQ ID NO: 151071 - DNA, 393 bp, Homo sapiens
gtttcatttacctgagtcctgcaatgataaaggtgcataatactttacattttattttttgctattacctatttggcatatgcaacatgtaattctatcttgcacattttttattggcctgcagggaaaataatctggattgttcatcctttcttcttgacaagtttaacactggctttccttgatatcttgttttgaagaacaatatcttaaatacattgggtcagtcccatgctactgatattatgataytattaagaaatgttttttcctctgaaaagtagtaactttgaaaaaggttaacgttctattattccaacctggtaacaccattttggggaaaaaagtagcttaactaggttggcataacctattatcttatagagctcactc

SEQ ID NO: 151072 - DNA, 649 bp, Homo sapiens
ggcaccttcctgggggtgactcttaatgataccaaagtttgagaagctctcatttaggtcatcagaagaaatgaacacgtgaaatcaatgacccagacaaggccagaaattttacatgggaaatcatggggccagatagtaacaatagtaattgaggagaaataaagataaatttgagctaagaggttaaagcaggtcttgaaagatgtgaggaattttactcagtgaagaggtgggaacattcttggtgggagaaagggcctcaaatgaaaacccttggaggaagtcagcctggcatcatggaaaaggccttgagctaaaattaggtttaatgaggattgggtttagaggagagtgttagcatctggtgtgggcagaataaatgtgatggtaatgtttaaaagtgattcaggatttaaggacttattcagatcaattcactttcagtgctacaggattgcaagcccagaattcagtgaattcaggaccttggtattattactyttgctaagtcatattttcaccttatcgaataatgattctcttcagtgcaacagatacacatctaacattagtgctatatgaaataagggggaaacatagaaaagttattgaactgtacagttcctgtgccttgaatttcatgttc

SEQ ID NO: 151073 - DNA, 601 bp, Homo sapiens
  misc_feature (1)...(601): n = A,T,C or G
nnnnnnnnnnnnnnnnnnnnnnnnnnnnnnnnnnnnnnnttggaaagagttgcaagtggttaaagcaactctttctctctctatatatatgtatatacacacatacacatatacacatatatgtgcatgtgtatatgtctctatstatacatatgtgtgtacatgtctctatatatagagagataggtttctctctctatatagagagcggattctatgtatgtatgtatatagagagaggtttgtatatttaatggtttggaaagagttgcaagtggttaaagcaactctatattatatataaaatctattatgatataatagacaatgttagtgtgaaattagtaatgtataatattaatacattacatgattaaatatatattacattgaacatatacattacatattatacgtaatgtaatatgttacattacactaaataaatatatgtaagatacattaatatatatttactaggactcatactaattttaattctaaactcaaccaggaggcacccacatttacagggcaataaagaaagaagaggtaatttaaaaagcaaaaggggcaaatacagttttgaaatgaaggctct

SEQ ID NO: 151074 - DNA, 601 bp, Homo sapiens
  misc_feature (1)...(601): n = A,T,C or G
nnnnnnnnnnnnnnnnnnnnnnnnnnnnnnnnnnnnnnnttggaaagagttgcaagtggttaaagcaactctttctctctctatatatatgtatatacacacatacacatatacacatatatgtgcatgtgtatatgtctctatgtatacatatgtgtgtacatgtctctatatatagagagataggtttctctctctatatagagagcggattctatgtatgtatgtatatagagagaggtttgtatatttaatggtttggaaagagttgcaagtggttaaagcaactctatattatatataaaatctattatgatataatagacaatgttagtgtgaaattagtaatgtataatattaayacattacatgattaaatatatattacattgaacatatacattacatattatacgtaatgtaatatgttacattacactaaataaatatatgtaagatacattaatatatatttactaggactcatactaattttaattctaaactcaaccaggaggcacccacatttacagggcaataaagaaagaagaggtaatttaaaaagcaaaaggggcaaatacagttttgaaatgaaggctct

SEQ ID NO: 151075 - DNA, 614 bp, Homo sapiens
tggtgtccctcttctctttctgcttctgtcatcctcagatagatccctgagtgtcacggggctctaagtctcatgatgatccatgtctccttgcgttagactggttccctacctaaaccagagccrttgctcaaattgcagagtttcagttggtgtctgaggtgatttcaaggttggtgctaccatgcaaagatggctggctacaagtatgccatgtgctatcagcacgttctatgtcccactacacatgcatttatacactgggaacgttatgactatactgcacagccagtagaaaattggcaacctccattgccaatatctgtaaaaatgcttgcttgtgactacagtcagcagggtttcgtaggccttcctgaagttgaataagaaaagaaaagtaaaacattttgggacttggaggattcttcccaccctcattcattgggatcccaggaaaaaaagcaaagtgtttggaggcaaactgagtttaaattccagctccactcatagaaattatgtgactttggcttgtggtgtattaagttctcatacataataggaagacaatacctacctcccatggttgttgaaagaatttaatgagtgtttattgc

SEQ ID NO: 151076 - DNA, 614 bp, Homo sapiens
tggtgtccctcttctctttctgcttctgtcatcctcagatagatccctgagtgtcacggggctctaagtctcatgatgatccatgtctccttgcgttagactggttccctacctaaaccagagccattgctcaaattgcagagtttcagttggtgtctgaggtgatttcaaggttggtgctaccatgcaaagatggctggctacaagtatgccatgtgctatcagcasgttctatgtcccactacacatgcatttatacactgggaacgttatgactatactgcacagccagtagaaaattggcaacctccattgccaatatctgtaaaaatgcttgcttgtgactacagtcagcagggtttcgtaggccttcctgaagttgaataagaaaagaaaagtaaaacattttgggacttggaggattcttcccaccctcattcattgggatcccaggaaaaaaagcaaagtgtttggaggcaaactgagtttaaattccagctccactcatagaaattatgtgactttggcttgtggtgtattaagttctcatacataataggaagacaatacctacctcccatggttgttgaaagaatttaatgagtgtttattgc

SEQ ID NO: 151077 - DNA, 522 bp, Homo sapiens
ggcttacaatccagagttattttataaacagcacyctatgacagttaatagatttagttcaagccatcgtcctacagataaaggaaaggaagcacaagaaagagaactttccccaaatcataaattaaagcctagtgggttccaggatctaggtctttcgggctagcatgtagtgttgttttctcactgattacttctaaagggctaggaaaccttgacttctctctaaaattctacagactaccagtctttaccatttgtctctgtgacttagcaccccaacagctatcctgatagcataaaactttttctagcctggggtcaggatctgacctggtactcccagtattcccagaaacacttaacccacaggatgtctcttctactgcctcacaactatactggctggtttaagccactggatgcttcacactgctttgtataatattatcctggaaaggctgtgatactatatttctggccactatacttccatttaaaattgtgagacaagacttccct

SEQ ID NO: 151078 - DNA, 522 bp, Homo sapiens
ggcttacaatccagagttattttataaacagcaccctatgacagttaatagatttagttcaagccatcrtcctacagataaaggaaaggaagcacaagaaagagaactttccccaaatcataaattaaagcctagtgggttccaggatctaggtctttcgggctagcatgtagtgttgttttctcactgattacttctaaagggctaggaaaccttgacttctctctaaaattctacagactaccagtctttaccatttgtctctgtgacttagcaccccaacagctatcctgatagcataaaactttttctagcctggggtcaggatctgacctggtactcccagtattcccagaaacacttaacccacaggatgtctcttctactgcctcacaactatactggctggtttaagccactggatgcttcacactgctttgtataatattatcctggaaaggctgtgatactatatttctggccactatacttccatttaaaattgtgagacaagacttccct

SEQ ID NO: 151079 - DNA, 472 bp, Homo sapiens
aagaggaacatcacacaccggggcctatcatggagtggggggaggagggagggatagcattaggagatataccgaatgtaagtgatgagttaatgggtgcagcacaccaacatggcacatgtatacatatgtaacaaacctgcacgttgtgcatatgtaccctaaaacttatagtaaaaaaaattaaaaaaaagaaaaggaactacactcctatattataccacatacagaaatgaaccagaaacggattatagacttaaatgtaatacctagtactataaaatttatagaaraaaatttagggaaagctctttaaggttggtcttggcagtgaatttttgggtatgacaccagaagcacaggcaataaaagcagaagtaaacacttgggactacctcaactgaaaaagcttctgcccagaaaatgaaactagaggatattatgctaaatgaaataacctggatgttattgt

SEQ ID NO: 151080 - DNA, 472 bp, Homo sapiens
aagaggaacatcacacaccggggcctatcatggagtggggggaggagggagggatagcattaggagatataccgaatgtaagtgatgagttaatgggtgcagcacaccaacatggcacatgtatacatatgtaacaaacctgcacgttgtgcatatgtaccctaaaacttatagtaaaaaaaattaaaaaaaagaaaaggaactacactcctatattataccacatacagaaatgaaccagaaacggattatagacttaaatgtaatacctagtactataaaatttatagaagaaaatttagggaaagctctttaaggttggtcttggcagtgaatttttgggtatgacaccagaagcacaggcaataaaagcagaagtaaacacttgggactacctcaactgaaaaagcttctgcccagaaaatgaaactagaggayattatgctaaatgaaataacctggatgttattgt

SEQ ID NO: 151081 - DNA, 348 bp, Homo sapiens
tataaaccagaatattataagcagatttttgtgtcacaagtgattcttttttttaacacatctatttattctagtaaatgttgctattttaccaggatcctcactttttaaattccattctattccccatctctaacaatgtttcaccactctttttccagacctttttgatctcatccatcttgagggatgcggcctaaagcacatacagtcctccaaakaaaaagtaatgccgtgttacaaaacaggtttcctattttgatgcacctggacataccgaggactaaactgtccttagaagggatgtgcacattcacatcaagacacaagacaacaccatcagacttc

SEQ ID NO: 151082 - DNA, 645 bp, Homo sapiens
cctactctcatggtataagacatctttagcatattccaccccaaatgctaaaacatgacagaattatatcttggaaatttataacaagaatttggagttaaagttcagaaataaaatcatatttggaagtcttggaaaaaagctgtctccttggtccatgctttggagaaacaaataatgctgcctcttagttccttaaggagtcacatatctttggatgaggatctaagactgactccctaatagccaagtcaaagaagctgcatgctgcacacatgtacattttcatctaacatacattgaatggtgttctgtgctaagtggactttcatatgtcttaatattcagagatgtaaaaatgaataggaaatatctcttgctgtcatagaccacgcagtcattagaggaaacagacaaataaaatcacaataatttacgtgctataataaaattatttagaaaacaccaagaaactcagaacagagcagtgcctttcaaacttcttttgacatataattgaaacaaaagttttataaagctatattraccacaactacatgcagtgactaatacttttgttatattctattctgttcctttattttaaaataaaataaatgccttaatgaagaaaataccataatc

SEQ ID NO: 151083 - DNA, 549 bp, Homo sapiens
acctataagctcaaaatcttattgttataattattatttttaatcatgatcaaaggacattagaagttatcatcttcattggtcttcatttaattgacacaagtgctcagtctacctttcattaataatcaacaagtatgagctgtaattttagttacaggaccatttcttcatggtgttagctatatcatgaaaactctacacagttctaactgttcttgacagatgagaaattagagaaggtctctttttataacatagattatgaatgtcactctgagatgttcatgttagaatagagtttagtcttccaaaagggacagaggcataaaaaaatcacattccataactgtattacattccttctccatcacctaaaggacagtataataccaagctctaataatgctcatttgattgaytcagccccaacagccttttatcaggcacaagctacttctctatgatggatgactatggtttatggtgcacatctcatttgcaaacagagtttgcaaattccccttcactggcagaattctgatgaag

SEQ ID NO: 151084 - DNA, 630 bp, Homo sapiens
gtttaaaaattcaacagtaagctctttgaataggagagaaaaggcagaggaatgttccaaggaaaataattgtgtcccttttttatttttatggtgataggatttaaaacaataatgtacttcagactaaaaataaggtaaaaataaamtaaataacaacaaatccataacaacacttcatagactttgaggaaagggaatcttgagaagcaggggagaataaaacagatatcggactctttttcacgcaaaaatcaatataaacatttctcacttctaatatctcagccactcatctcatttttgtggagttcctgcctcctgttagtctcattcctgattcagtatcatgctgtaagaattgctgtttcttaaaataaatggtctcagacaaatgaacatctctcataacttcagctactctagaatctgtgataaaaatcagtgattccaaattctcagtgattttcataggaagttaatcatagaaagatattattgactattttcttatgtccatagcctcaaggcaaacttgaaaaagacaaatgtacccacagatttgccattaagtccctatcaagtgactccccagatagctgtaccagtatctgtggtttataacaatgt

SEQ ID NO: 151085 - DNA, 428 bp, Homo sapiens
atctcccgtctgcctggctgtggctgcctcctcgtcagagcctcggstggatgggaccacacacacgctaatgctctctaatccctgcagctttgtcactttcaggactgctcagatgctcacccagctctgactggtttctcatcaccctcttgaagggttgagctgtctttcccatttatctcaacggtgatagtgacagcaatccaccttcctggcctttcctcctgggccacctgttaggctgccagccgcccttgagattgatatttgccatttctgccgccaggtttgttctggcctctgtgggcatgttcactaagaggcacatcagtctcgctgccccgtgttggggcaggaaactccattatagactctcagttgatcactgttcttctgcttcttccctgcatcagtttctatctgtg

SEQ ID NO: 151086 - DNA, 428 bp, Homo sapiens
atctcccgtctgcctggctgtggctgcctcctcgtcagagcctcgggtggatgggaccacacacacgctaatgctctctaatccctgcagctttgtcactttcaggactgctcagatgctcacccagctctgactggtttctcatcaccctcttgaagggytgagctgtctttcccatttatctcaacggtgatagtgacagcaatccaccttcctggcctttcctcctgggccacctgttaggctgccagccgcccttgagattgatatttgccatttctgccgccaggtttgttctggcctctgtgggcatgttcactaagaggcacatcagtctcgctgccccgtgttggggcaggaaactccattatagactctcagttgatcactgttcttctgcttcttccctgcatcagtttctatctgtg

SEQ ID NO: 151087 - DNA, 413 bp, Homo sapiens
gagcctcgggtggatgggaccacacacacgctaatgctctctaatccctgcagctttgtcactttcaggactgctcagatgctcacccagctctgactggtttctcatcaccctcttgaagggttgagctgtctttcccatttatctcaacggtgatagtgacagcaatccaccttcctggcctttcctcctgggccacctgttaggctgccagccgcccttgagattgatatttgccatttctgccgccaggtttgttctggcctctgtgggcatgttcactaagaggcacatcagtctygctgccccgtgttggggcaggaaactccattatagactctcagttgatcactgttcttctgcttcttccctgcatcagtttctatctgtgagtgacggagcacctgcccagg

SEQ ID NO: 151088 - DNA, 446 bp, Homo sapiens
gcctggctgtggctgcctcctcgtcagagcctcgggtggatgggaccacacacacgctaatgctctctaatccctgcagctttgtcactttcaggactgctcagatgctcacccagctctgactggtttctcatcaccctcttgaagggttgagctgtctttcccatttatctcaacggtgatagtgacagcaatccaccttcctggcctttcctcctgggccacctgttaggctgccagccgcccttgagattgatatttgccatttctgccgccaggtttgttctggcctctgtgggcatgttcactaagaggcacatcagtctcgctgccccgtgttggggcaggaaactccattatagactctcagttgatcactgttcttctgcttcttccctgcatcagtttctatctgtgagtgasggagcacctgcccagggggagat

SEQ ID NO: 151089 - DNA, 499 bp, Homo sapiens
ttgtgggttttttttctttgtgggtttttttttctttgcaaatgggctattcctccccactttagatccttcaatagttagatttttatttgcaaattggttatttctccccacctcaggtccttcaatagtggraataatttttacaaacacctgaccatcagtaatctgggaatggctgaacagattcaaagagaagtgtccatttcttaccatttgtgttgagtgtgcatgggtgtaggagccgatggaagagtgggtgaataatcgaagaaggcagccccggggatcatgctcatgatgttacaacgatgtcaccaaacactttgcaaatggaggacatcacaggggcttggccttgagacctttctctctctgcctctctgcttgttacatttatttttttctttaattgtcagtactgaaagatattatataaaccaaatctgtattgaaatatcagcatggtgtttataactcaaaggtgatgttactttac

SEQ ID NO: 151090 - DNA, 565 bp, Homo sapiens
tcttttaaattttgagttctctagtgcatttaaaattgattcgatttacaaaacttcaatgtatacttgacttttcagagctcatctatggcacacaatggaaaacaccttcagaagctcgtttatcctcccaatatcccaatttctccaaaagcattattttccacatgtttaagagaaacatagaaagataatacggcatcttttgtaagcagagaaccaaatgaatgctgtttgatgagaacgattcacagtaatgatgatgatcacagtgatgacaatggtaaatgtgaactgtccatggtccaagaattggagctaataactttttatttgcagaatagagatatattttattataaccagctaccatcatggtagctgagtactataaatggtgtaccccttttcrgttttcatcacattatatcaagacctcaccaacaataaaaataatcatattaatacattcaaaaattaagtatggcaattttactgtgattgactgtggcagcctctactggttatttactcagtagcctttaattcctccccacacaaggtt

SEQ ID NO: 151091 - DNA, 478 bp, Homo sapiens
taataatgacagttgtatttgtccagctcaaaagccctgactgctttatcaagtttttgagggcaaggactgtgccttccatttctttgtttctttctctctcatcatctatgtcatccccatagagtcatcttggactctctgtagattggtttaaaagctgtctcacagcgtggctgggcattgttcaaaagagagttttcttacttagttggctgataagcgaaagggatctaagttgtcaataacatcakataatgatctatttctctaccttttccctgacatttcagggcaagcaaggaagacaaatgccctgaactccttgtgtgggcagcaggtgtatgcatgttggagaggcactgcccagagtaagtggggaaaaagagctttattttatacctaaaacctatttttttatgtggaatagaataggaacaggtgggtgtgtttagtgtcagtaaatgcttaactgatg

SEQ ID NO: 151092 - DNA, 478 bp, Homo sapiens
taataatgacagttgtatttgtccagctcaaaagccctgactgctttatcaagtttttgagggcaaggactgtgccttccatttctttgtttctttctctctcatcatctatgtcatccccatagagtcatcttggactctctgtagattggtttaaaagctgtctcacagcgtggctgggcattgttcaaaagagagttttcttacttagttggctgataagcgaaagggatctaagttgtcaataacatcagawaatgatctatttctctaccttttccctgacatttcagggcaagcaaggaagacaaatgccctgaactccttgtgtgggcagcaggtgtatgcatgttggagaggcactgcccagagtaagtggggaaaaagagctttattttatacctaaaacctatttttttatgtggaatagaataggaacaggtgggtgtgtttagtgtcagtaaatgcttaactgatg

SEQ ID NO: 151093 - DNA, 553 bp, Homo sapiens
attttcaagatcacattgctagttaaaaataggattggttaagtctgctaaccctgagcacctctgcagaaatctccactcgagattatatctgtccaatccagcgctgacaaccagacataactggctgctgatttctaccctaaagctgggatagatttgctcagaaatccaggggaaattgaggcatggggaggaagtacacatgtccctcctcaaagccactgccttgaaaagcgcacatcctagacccttctctactgcctctcctgcttgaaccctatctccactccatcccattgggaaacagttcactgctcatggtagccttgytgtgtctagggttgagggggatccaagacagggaggcagagagggagtaaaatgaaattcgccatggccctagggactccaatcaggctggagttaatgaaaaggatcctgtcttttcccaggatggctaaatgtccgcaccgctcccagctagagggtcgagagggtgcggggtgcagagggcagacagaattacatttaaaaggcaaaggaaggagaa

SEQ ID NO: 151094 - DNA, 294 bp, Homo sapiens
cggcagtgttcctggggccctgctcaaaccaatctcattcctgacatgtcttgctgctctctggaacagtccacattcaaaatattaggaggatgaccctgccttccatttkttgaggagctgcagtttctctcttggcataaattcaggttgctttcttattttctctctctctctctgagcttgagggcagggttggagaacaaggagaattgaagggagatgaaggatgctgtggggtcctaaggaggtgagagtagaaatcccttcagcttcctaagcagcggcattctg

SEQ ID NO: 151095 - DNA, 591 bp, Homo sapiens
ctactggcagttcagttgtgaagaacctaactacagtgtaataaatgatgcttaaactcccagaccagctagtacracttacaaagactatttgaagcataaggtagttgaactctcattctgatagtccagcagtctccagaatcactgactagtgggtgtcaagtgctgaatttctctgagcttagccttatgagccctgagcagggggctggacactgcctgttggaactgggttgaggttccagtggcagtgggtcttagatcatccatgttggagaggctaaaggcagagcagaagggaagcatggagttctcccaaacgaaggttagcgcactgggggagacccataatcaaaagaacaaaaatactttgctttcagtagtgctttatacctttggaaatgcctctgcaatttttttttatcatcatagtcagtgcagatgtcattgcttggatctgcgctaaatgttgtaagggatctcctcaaaagatttacagtccaggagggagggcagcagcaagtaactgtactgtaagcctgactgtgctaagccctataggatatacagaatgagtatcgtgggggc

SEQ ID NO: 151096 - DNA, 588 bp, Homo sapiens
ccactaggagccagatgctgcatgagcaatgagagaaaaaggaaacctccttttattgggcacctacgttgtatcatgcactttacattgatcatctctaatccttccagtaacactcaaagggagttcatgtccccacttgacaaatgagaaaatggaagttaagtaattttctgaaggtcatacatctactaagaggaascacacgattttagaaccaattctatctgaccccaaagtcaaagttcttcttagataccacacagtgacactactcactaatttaccaattccttcactcattcattcagccaacaagtgttcctgagacactgctgcaagcaaggtctctgacaagctgagtgtgagaagaccttttgctaggaattcgtcactttggaggaactcagtgggaaactctttgggactttacaatgctgttatctttgtgtggtatcaaatgaaacagttggcttccttttaactaataataataataataataataataataataataataaaatgtacagtccaccaatctttcaaaaggagaagtgattgccaaactaatgaaaatcccaaagg

SEQ ID NO: 151097 - DNA, 588 bp, Homo sapiens
ccactaggagccagatgctgcatgagcaatgagagaaaaaggaaacctccttttattgggcacctacgttgtatcatgcactttacattgatcatctctaatccttccagtaacactcaaagggagttcatgtccccacttgacaaatgagaaaatggaagttaagtaattttctgaaggtcatacatctactaagaggaaccacacgattttagaaccaattctatctgaccccaaagtcaaagttcttcttagataccacacagtgacactactcactaatttaccaattccttcactcattcattcagccaacaagtgttcctgagacactgctgcaagcaaggtctctgacaagctgagtgtgagaagaccttttgctaggaattcgtcactttggaggaactcagtgggaaactctttgggactttacaatgctgttatctwtgtgtggtatcaaatgaaacagttggcttccttttaactaataataataataataataataataataataataataaaatgtacagtccaccaatctttcaaaaggagaagtgattgccaaactaatgaaaatcccaaagg

SEQ ID NO: 151098 - DNA, 454 bp, Homo sapiens
gctctacaaaaaataaagaaaattacctgggcatggtgggtggcacatgcacttgtagtcccaactagggaggctgagttgggaggactgtgtgatcctgggaggtcaaggctgcagtgatccatgatcacatgagactctctctcaaaaattaaaaaataaaaagaaattaaaaatttgaatttcccgttaatataaaacttaaagttttattgagtttccattattaatacttggttgatcaaccagaatatattacagattgaaaaaacctagtaaataacattttatcaaaaaggcatctcttaatgaaatggatgggaattttacaaaataattatgtattcatggataaatataatytattgcttagaatgagataatacttaacatcatttctacttttcattttaagagctataagtgctgagaaactttgttgcataaataagtc

SEQ ID NO: 151099 - DNA, 409 bp, Homo sapiens
atcaatcttcccacctcagcctccagaatagctaggactgaaggcaagccatgatgcctggcttatttaattttttttttaataagagacggagtcttgccatgttgcccaggctggtcttgaactcccagcctcaagtgatcctcccacctcggcctcccaaagtgctggaattacaggcatgagccaccttacccagcccagaacttactttttaataaacaaaaacataactttgcagtttctcagtgccacatttcaaggaagcattggtgaagtaatcttgtactctttcaaaatgtgaacttccttgtacrtcacctttatttatcctattcaataagaaaaataaaatctgcataaagatttaaatccttaataagatctatgatgaacctaagcttaatgg

SEQ ID NO: 151100 - DNA, 614 bp, Homo sapiens
tggctgtacaaacagccacaaacaagccaaataacacacttattactggaaaggtaatggctgaaagaaactgactgagtccctggatgcaggatggatgaatggccctgaggagtgaggatacctgtaccatgctccatttgcaggaagggcaaatggagaagacagaactgtcctgtcacaggcccatgagccacagaaatctcaaagtgaaatgtaaacacaggtgtattctcatacgtctttcagcaaatcatcatgcatttgttgcaataatatttcttctataattttcagcctttgcatgaagatttctttcatgcagaatccctgaagccagcatcccagctgtatcgaaaggttacctgttagcactttattagactacagggcaatcagcctgcaggctacatattttaaaacaagttttaaaattttaatctgttactctatttcaaggtttaacaatctagtttccaagttgcttatcagataaagctcaacatcctcagcatgccacacaggacccttcgaactgagctcagcctacctactgratgtgaccatctgtcaacctgcccgtcatgtgcccctctgcaccacttctcagctca

SEQ ID NO: 151101 - DNA, 552 bp, Homo sapiens
tgcccaggatggtcttgaactcctggcctctagcgatcctcccacctcggcctcctaaaacactggaattacaagtatgagctaccatgcccagctgatataaccttttattgcatcctttctatatcttcatatttatgtctcttgcaagcagcaaacagacattttcctatccttttttatctgatctaacaatctttgcctttgaaataattttatgcatatttactataattcatatatttgggtttgagctctctattgagctgtgttctttgtttatctcccctttactgctctcttctagattggtgtttttattattataatttccatgccagtagcttgttctttacatatcycttctctattctttttgtgattgctgtagagattacaatatggctccctaaattactgaagttcaatatcagtttgtacatatgccatatcctgaaaatctcaagaaacttaaaacactaaccccattctctttttcttgagttaacaagctattgctgtcacatattttaaatctctatgtgagaccca

SEQ ID NO: 151102 - DNA, 452 bp, Homo sapiens
  misc_feature (1)...(452): n = A,T,C or G
accttcagaggaagaatttgcctaatcaccttatgtctatatgtgtcctccaataagtaatttagttctcaactaatcacacatataccttttttcttgaaaaaatatctagartaaaatttaaaactcagacagggggcagagaaggatggtctttcctgcaaggacaccaattaacacctatctacactaaaaaagcaccttcttacgaaccaaaaatcaggtgagcacacacagtaactggttttaacttatctctgaaagaggcactgaagaggtgggaaaaacagtcttgaattgccaaggacacccacaccctcccccatcaccctgccctccccccccaannnaaccccaccccccaccccaccccatacacacatatcagcaacatggtgcagagagtatttctgtgtgctggggagaggggagcacagcagccatgaggcact

SEQ ID NO: 151103 - DNA, 432 bp, Homo sapiens
tcgaggtggcctcactggggtgcactgtcccccataagctacgtgtgactaactaacactggcagtggtgatctcacaacagagcatatggctgactcattggaggttttataacagaggctgtgtccctggatattctgactcaatatgggtgtggccagacagggaggagacaataggtgggcaggtatttayatttttaaaaagtcagaaaggtagttcagacatccattccccagtgaagaccactgacagactggaccagagagaagtttatccctgtcctcctctcccttcccaccaagggcctttcaagcacccattgctcactatgtatactaagtgtcctatatataatatacactttgcatttgatcttcctcatggccctgtaaggtagataacattattatctgatatctaccttacaca

SEQ ID NO: 151104 - DNA, 368 bp, Homo sapiens
ggtgaataaaaatacaaatatcacacgttaaaaattaaacctttaaacctgtggaatgaaaagaaaaaagtgagagagtagacctgtttttttctccccccaccatttcttgtttcctatacagacttaggatgtttcarcttacatttttcaacttcacagtagtgtgaaaccaatacacattcagtatgcttctcaacttataatggggctgtgtctggataaactcttaataagttgagaatatcataagttggaagcgcactctcaacttttacaatattttcaagttatgatgggtttattgggacataacttcatcgtaagttgaggagcatctgtattatttcaagtgttctgtagagatc

SEQ ID NO: 151105 - DNA, 465 bp, Homo sapiens
aggaaggaaggggtgctggtggcgagcaggaagggaaggcagagggacgtagctgtgtgcaggggacttctctttccagatgtcacgcttccaagtagagacagatgtctcttagatctcagcacactagagataatggcatcacttcctttttctgctctcccacccctttctgctcatgtctctgagtaattttcatcatagcgtttcttttaggagtgctgcaggtttaagcrtactatttttattgagttaagctataagaatgaaaaagcacagccttgtcaaataactatttaaccagaaagcctggccagggcactgcctgatgccaacattctgacccctttgccccaactcaaaatcagctgagtttggggagagtttaggcccaaggtagcatgatggacttagagttttataaacatataaaggctcaataaattgcttatattcaggccatag

SEQ ID NO: 151106 - DNA, 600 bp, Homo sapiens
gaattccatgatcatgagcccactgccgcacttctttagccataaagtgagtgccttggtcagaggcaatgctgtgtgggatatcatgatggtggataaggcattccgtgagtccacaaatggcagtcttggcagaagcattgcatgcaggataggcaaacccatatccagagtaagtatctattccagtgaggacaaacctctgccctttccatgatggaagagatcccatataatcaacccaccaccaggtagctggttgatcacccygaggaatggtgccatattgagggctcagtgttggtctctgctgttggcaaattgggcgcttagcggtggctgtattcaggtcagccttagtgagtggaagtctacattgctgagcccatgcataacctccatccctgccaccatggccacattgttcatggggccattgggaaatgacaggggtggctggggaaagaggctgagtggtgtccacagaatgggtcatcctatccacttgattattaaaataatcctctgcttaggtcacccattggtgagcactcacatgggatacaaatatcttcacagtttttgaccactcagagaggt

SEQ ID NO: 151107 - DNA, 523 bp, Homo sapiens
gaactactaatagtatattgaccttcattcgttcaacaaatatttcttgcttactcccaggttcctcttacctgtacattcttttacaaaacatccagaataaacgtgctggatatggtaaaaattgaaagaacaggaatatgaagttgagaaagcagtaaatacgtaaaaaatgctgaattayatgtcaagtaaattttgcttcatttctactttatgaatttctaagcgacagttttgtatttcaaaattatagaacatcctgctgatcttctatgtaactttttttccattcaagtactatttgaaatatttaactacacatacaaggtatttactgtgaatcaattaccaataatgaactcagtgcctaagaagaggtacacttattaacctatttttggtcacgctttaccacaaagaaaatatgaataatattctacaatatgtgcgatgtggctcatgatccctagggtagcttttgcatgtcattcatattctcaaaataccggctcaatgcagt

SEQ ID NO: 151108 - DNA, 556 bp, Homo sapiens
gcctactgacctattaatattgggcacatcaaaggaaacacagtgttaaacaagatacctgacaaaagcccaatcccctgggycaacattttaaaagtttacaaaagatggaagggaactaaaggacaactacaaaaaaaaactgatttatcacctctcctctaacaagaaagttccttctgctgcttctaccccctactcttaactgaggtagctggttaccagattatggggaaaggctgctgaaaatggaaagaaaaattaacagtctgctatgaataagacattatgaaaaaaaccaaacacccttgagattggtttagttatgtccctctaccataaagtttacacagctacagccatgttccctctgccaaagtttataaaaagcttgaattttgaaaactgctgagtttccaaatgtaaacatacagtatttcattcctaatcaaataactgtttacccaaactacctttaaaggacagtctaagtttttaaaggactcctatctacttttaaaggttatctttaagtaaatgacttgtagtccaaact

SEQ ID NO: 151109 - DNA, 541 bp, Homo sapiens
cctactgacctattaatattgggcacatcaaaggaaacacagtgttaaacaagatacctgacaaaagcccaatcccctgggccaacattttaaaagtttacaaaagatggaagggaactaaaggacaactacaaaaaaaaactgatttatcacctctcctctaacaagaaagttccttctgctgcttctaccccctactcttaactgaggtagytggttaccagattatggggaaaggctgctgaaaatggaaagaaaaattaacagtctgctatgaataagacattatgaaaaaaaccaaacacccttgagattggtttagttatgtccctctaccataaagtttacacagctacagccatgttccctctgccaaagtttataaaaagcttgaattttgaaaactgctgagtttccaaatgtaaacatacagtatttcattcctaatcaaataactgtttacccaaactacctttaaaggacagtctaagtttttaaaggactcctatctacttttaaaggttatctttaagtaaatgac

SEQ ID NO: 151110 - DNA, 552 bp, Homo sapiens
cctattaatattgggcacatcaaaggaaacacagtgttaaacaagatacctgacaaaagcccaatcccctgggccaacattttaaaagtttacaaaagatggaagggaactaaaggacaactacaaaaaaaaactgatttatcacctctcctctaacaagaaagttccttctgctgcttctaccccctactcttaactgaggtagctggttaccagattatggggaaaggctgctgaaaatggaaagaaaaattaacagtctgctatgaataagacattatgaaaaaaaccaarcacccttgagattggtttagttatgtccctctaccataaagtttacacagctacagccatgttccctctgccaaagtttataaaaagcttgaattttgaaaactgctgagtttccaaatgtaaacatacagtatttcattcctaatcaaataactgtttacccaaactacctttaaaggacagtctaagtttttaaaggactcctatctacttttaaaggttatctttaagtaaatgacttgtagtccaaactgctaa

SEQ ID NO: 151111 - DNA, 635 bp, Homo sapiens
ttagcagaatttatttgagcraaagatgattcatgaattggacagcactcagaaccaagagaggttcagagggctctgctttagcagcatgagcagagggcttttataggctgaaagcagaggcaaagaattatttgatgggctgcaggcaggtatttgccttgtttgggtatgatctggtggcaagtcccccagttagaggttagttgtcagtttctgactgatcaagcttaagtttcattttattgctgacactggcctttgttcgtttatgtaggaacccaaggtgccggaacagtgtaagcctaatggcctcccagttaatttttttttaacacagtctagagaagaggcaaagacatgctgtccacattggtctcagtaccacaaggctagcttacctctcaggttatcaggtctgggaaacatggcaatgtaggtttttgtttgtttgtttaatcatccagcccaaaatgtcaagcaatatagtttttaaaaggagaaattatcaacacggatttcacctttaaggaaagatccactaaagggcttctggttagtgaataggccaacccaggaaggtcacacctgaaagactaaatgcttgcagtgtttgcacaagttatgaagctgtg

SEQ ID NO: 151112 - DNA, 532 bp, Homo sapiens
aggtagtgagtaaattacagccaaatgcatggagaaacaytgaagcccatggagtaggtgacatctcccattgcattataattactgatgtaatgtaatgagtggtacagatgttttgcttttgtacaggtgagaaagcacagaaagagcattttgacaggtcagcgctctgcatgatcttgtaagttgtgagatccttcttagatgcgggacaagaaaacacaactatttcatgagtacttagcagtaatagcacagacttagagaaagtgatgtgagacttttttaaaagtttatgatacataatttgattttatgataaatatcctgatacgagctcatcgacctttttttgtcagttagacttacacacaaatcacggtcactataaataggaccacttgaaaacaaaaataaaggacaaatgattttgggcaagccacttaacatttctgggccgcacattccttttttttttttttttctttttttcaagagagacaggatcgctttacaaacccggctgaagtgt

SEQ ID NO: 151113 - DNA, 532 bp, Homo sapiens
aggtagtgagtaaattacagccaaatgcatggagaaacattgaagcccatggagtaggtgacatctcccattgcattataattactgatgtaatgtaaygagtggtacagatgttttgcttttgtacaggtgagaaagcacagaaagagcattttgacaggtcagcgctctgcatgatcttgtaagttgtgagatccttcttagatgcgggacaagaaaacacaactatttcatgagtacttagcagtaatagcacagacttagagaaagtgatgtgagacttttttaaaagtttatgatacataatttgattttatgataaatatcctgatacgagctcatcgacctttttttgtcagttagacttacacacaaatcacggtcactataaataggaccacttgaaaacaaaaataaaggacaaatgattttgggcaagccacttaacatttctgggccgcacattccttttttttttttttttctttttttcaagagagacaggatcgctttacaaacccggctgaagtgt

SEQ ID NO: 151114 - DNA, 532 bp, Homo sapiens
aggtagtgagtaaattacagccaaatgcatggagaaacattgaagcccatggagtaggtgacatctcccattgcattataattactgatgtaatgtaatgagtggtacagatgttttgcttttgtacaggtgagaaagcacagaaagagcattttgacaggtcagcgctctgcatgatcttgtaagttgtgagatccttcttagatgcggracaagaaaacacaactatttcatgagtacttagcagtaatagcacagacttagagaaagtgatgtgagacttttttaaaagtttatgatacataatttgattttatgataaatatcctgatacgagctcatcgacctttttttgtcagttagacttacacacaaatcacggtcactataaataggaccacttgaaaacaaaaataaaggacaaatgattttgggcaagccacttaacatttctgggccgcacattccttttttttttttttttctttttttcaagagagacaggatcgctttacaaacccggctgaagtgt

SEQ ID NO: 151115 - DNA, 532 bp, Homo sapiens
aggtagtgagtaaattacagccaaatgcatggagaaacattgaagcccatggagtaggtgacatctcccattgcattataattactgatgtaatgtaatgagtggtacagatgttttgcttttgtacaggtgagaaagcacagaaagagcattttgacaggtcagcgctctgcatgatcttgtaagttgtgagatccttcttagatgcgggacaagaaaacacaactatttcatgagtacttagcagtaatagcacagacttagagaaagtgatgtgagacttttttaaaagtttatgatacataatttgattttatgataaatatcctgatacgagctcatcgacctttttttgtcagttagacttacacrcaaatcacggtcactataaataggaccacttgaaaacaaaaataaaggacaaatgattttgggcaagccacttaacatttctgggccgcacattccttttttttttttttttctttttttcaagagagacaggatcgctttacaaacccggctgaagtgt

SEQ ID NO: 151116 - DNA, 517 bp, Homo sapiens
gagattattttagcacatgttgatctgcccaatattcttcttagtgactgcatagcagtcgttgtaaagttgtatagttgtaatatatgtaatttatttatgttcaaaccattggctggggacagtggctcaagcctataatcccaacactttgggaggctgaggcagaaggattgcatgagcccaggagtttgagacaagactggacaacgtaaaaaaaaataaaaattaattgggcgtggtggcatgcacctgtggccccagccactcagaggctgaggcagggggactgcttaagcctgggaggtagaagctgcaatgagctgtgttcctgccactgcactccagcctgggagacagagcaaaaccctgtctcaaacccctgccccactctcccttcccytgcccaaaccattaaagaacacaatattgtttattacagtgctatggtggctatcctttgtgtatatctttgaacatatgatgtgttcatatctataggattaaagaattgcct

SEQ ID NO: 151117 - DNA, 549 bp, Homo sapiens
caatgctgcagcaaaaatttgtgtttctctagtgttccttccattcaggtaatatagggggaggagagaaggcttgctatgattagttgactctattcttgcctaactgcttaacacagtatctccgtgtggtgtccttgcttgagtacacatgtgtggtttcctcctgccaatttctgaaagcatttgtaaggtttcagtaacctagcccttaatgtacgaaaaataatgaccaattacttaytgagctccactgaataagtctacttattgcagactaagtgtctacattccttgtctctaattctgtcatcaatcttataagacagagattcaccccatattacagatggggaaactgaggttcagaaatgttgcattatcagaccaaggttccacatctgacaaatggtaaagtcagaatttgaatggaggagtcagtttccctggctccagtgcttgtgtttcatctgtgacgtcatgatgctgccgcccagctgcactcccagacatcccctcgtttcacagacttttaatgactctcaaata

SEQ ID NO: 151118 - DNA, 631 bp, Homo sapiens
gaggcttaacacaactctgtataggaatagtcaggctggaggtaaacaaagcagaatgtctgaatctatgttgatacagagggagacgagcagcagtggcaacactggatgttctccaccataaagaagcaatccaaggtgcccaggrtgctgaagaggtagaggggcatacctgggtcaagaattattatcataatgccaatcggagtcccataaaggaggatgggcatcaaaaagaggaagagggttcaaaggggatttatcatggggttcagaatcacggatgcgaggggcagtagtggggacaacagacaggaaagtttccccttctcataatcatagtccagacatggcaatagccaatttccaaagttctgggtgttctgggctcagaatggggaatatcatacgaggccttggcaggggtagggtaatgcccttctcttcccattttaagggaaagaacaagctgaacctcctatgcaaagtaggatggtgatcctcgtcctcccaataagaaataaaataagtagcctccaggcattcccttctgccagaggagcaattgctttttaaatagtcctttggtgcccagtctattattaaaccatatgagtcattttttaatcct

SEQ ID NO: 151119 - DNA, 631 bp, Homo sapiens
gaggcttaacacaactctgtataggaatagtcaggctggaggtaaacaaagcagaatgtctgaatctatgttgatacagagggagacgagcagcagtggcaacactggatgttctccaccataaagaagcaatccaaggtgcccagggtgctgaagaggtagaggggcatacctgggtcragaattattatcataatgccaatcggagtcccataaaggaggatgggcatcaaaaagaggaagagggttcaaaggggatttatcatggggttcagaatcacggatgcgaggggcagtagtggggacaacagacaggaaagtttccccttctcataatcatagtccagacatggcaatagccaatttccaaagttctgggtgttctgggctcagaatggggaatatcatacgaggccttggcaggggtagggtaatgcccttctcttcccattttaagggaaagaacaagctgaacctcctatgcaaagtaggatggtgatcctcgtcctcccaataagaaataaaataagtagcctccaggcattcccttctgccagaggagcaattgctttttaaatagtcctttggtgcccagtctattattaaaccatatgagtcattttttaatcct

SEQ ID NO: 151120 - DNA, 489 bp, Homo sapiens
gggaacagtaaaaagatatgattccatttatgcctcttgtgaagctgtcagctggacaagggctctgagagcctaagcttcctccaaatttcatttttttttttgtraagtgctaagacatgtgttttgggtagaggctgagggttattagcttagtgcttccaagcactgctatgtgagacttctatttgaaatgactttgtagatatagttctgggaaaatggacatagcgagacagtttcaggctaggttcttgccctatatgtgtgacttcaggttgggctttctgggattcatttttcttccctaaaatctgagctgaaagggacctgagagggtgtctagttcaaatccttccctttatagatgagaactcatcttgggtttggttctcccgaaagcagagcccgagatgaggacttgggtgcagttagattatgtggtcagtgatccaggaagcagaggtagggaggctgcagggaaggaac

SEQ ID NO: 151121 - DNA, 559 bp, Homo sapiens
gggaacagtaaaaagatatgattccatttatgcctcttgtgaagctgtcagctggacaagggctctgagagcctaagcttcctccaaatttcatttttttttttgtaaagtgctaagacatgtgttttgggtagaggctgagggttattagcttagtgcttccaagcactgctatgtgagacttctatttgaaatgactttgtagatatagttctgggaaaatggacatagcgagacagtttcaggctaggttcttgccctrtatgtgtgacttcaggttgggctttctgggattcatttttcttccctaaaatctgagctgaaagggacctgagagggtgtctagttcaaatccttccctttatagatgagaactcatcttgggtttggttctcccgaaagcagagcccgagatgaggacttgggtgcagttagattatgtggtcagtgatccaggaagcagaggtagggaggctgcagggaaggaaccatgacaagaatgtgctacagagaggttgtcactgcagataactgggtctcattgcacctggggacctgc

SEQ ID NO: 151122 - DNA, 583 bp, Homo sapiens
actggaattttatcgcagttagcgcagggaacagtaaaaagatatgattccatttatgcctcttgtgaagctgtcagctggacaagggctctgagagcctaagcttcctccaaatttcatttttttttttgtaaagtgctaagacatgtgttttgggtagaggctgagggttattagcttagtgcttccaagcactgctatgtgagacttctatttgaaatgactttgtagatatagttctgggaaaatggacatagcgagacagtttcaggctaggttcttgccctatatgtgtgacttcaggttgggctttctgggattcatttttcttccctaaaatctgagctgaaagggacctgagagggtgtctagttcaaatccttccctttatagatgagaactyatcttgggtttggttctcccgaaagcagagcccgagatgaggacttgggtgcagttagattatgtggtcagtgatccaggaagcagaggtagggaggctgcagggaaggaaccatgacaagaatgtgctacagagaggttgtcactgcagataactgggtctcattgcacctggggacct

SEQ ID NO: 151123 - DNA, 561 bp, Homo sapiens
gggaacagtaaaaagatatgattccatttatgcctcttgtgaagctgtcagctggacaagggctctgagagcctaagcttcctccaaatttcatttttttttttgtaaagtgctaagacatgtgttttgggtagaggctgagggttattagcttagtgcttccaagcactgctatgtgagacttctatttgaaatgactttgtagatatagttctgggaaaatggacatagcgagacagtttcaggctaggttcttgccctatatgtgtgacttcaggttgggctttctgggattcatttttcttccctaaaatctgagctgaaagggacctgagagggtgtctagttcaaatccttccctttatagatgagaactcatcttgggtttggttctcccgaaagcagagcccgagatgaggacttgggtgcagttagattatgtggtcrgtgatccaggaagcagaggtagggaggctgcagggaaggaaccatgacaagaatgtgctacagagaggttgtcactgcagataactgggtctcattgcacctggggacctgctg

SEQ ID NO: 151124 - DNA, 498 bp, Homo sapiens
tggtcacgatacttggaacaaatgagtcagaagtttaggagttgagcaattagctggacataaccagaggataggaccaccatgactaataagtgggcacaaaaaggaagtcaattaggaataaacctaataaagcctccagaaatacttacactacaaaggcatttccactccactaaattatggtgatgactttggaaaatttatctgcttccttcttcaagagcatagtcatgggggkgggggtgaagttacccatgaaccctagtccctgtgtagtaactgaaactctctccataaataaagaacccaaggaaattttgaggtggccagcattacaaaatttagagtttaaaggcctactatacatgcccattagaacctatagctattttataattcatccctacatttcttcagtaaataattattaagcacctactatatgccagacactattctagaatgcatcacggaacatcacaaagaacctccggc

SEQ ID NO: 151125 - DNA, 588 bp, Homo sapiens
attaaccctcctgttacaaatgcagaaacaggctctgagaagtcaaggggcatacctggcatctcatggctggtgagccagacagctggggcacccagagctcagcatcctgactccctctgctgcagtgcggggagcttcctgccttagtcagggttytcctaaaaacaggccctccaacaaggatgggagtactggtggtttatctgggaggtggctgcaggaggcactgtgagggaggggagaagtaagaagaggaaagaggaaagctgattaaagaggtaggtttcccttgtgcatcctgggggcccaacccctccaggcctccaagaggctgcagaactcaccaggaagccagggcatttctccaggagcccttgtccctcagggttgagagccccacttagggagttaactcccagcacttctagcctgccctgcagggctgagcccccttccatggccaaagaacccataaaagcaaagagcagtggttgttgggggtacagagccttggcgtgtgcatgaattgtctaccgcagctagggtgtcctctgggtgggtcaaggaatgaagggcaggccaccc

SEQ ID NO: 151126 - DNA, 623 bp, Homo sapiens
ttaatatacctaacctacaaaacatcatagcttagcctatcctaccttaaatatactcagaacacttatattatcttatagttgggcaaaatcatctaacataaaggttattaaaacaaaaagttgaatatcttatgtaatttattgaattctatactgaaagtgaaaaacagaatagttgttctactgaatgcctactgctttatactattktaaagtcaaaaaatcttaaatcaaacttttataagttgaggaacatctgtatatggtgtgggcattgtgctttgtatattcagtataaggaatgctgatgattttagtaaataagaccagtataaagtagaagtggttgtacatcttcttaggaggctctaaagctattactaaaaaatccatttgctaatgcccaaaattctttcaaagtggagctgtgttaaaattcaggataattaactttaaggaaattatttggtttgaacactaaactttatgcttgtttaatctactcagcctgtttttcaaagtaaatggatatgatagacctacttacattacaaacacacatttacatgtggtacctgtgtatgcccaactttggcacacatgaccatgctctttacttt

SEQ ID NO: 151127 - DNA, 623 bp, Homo sapiens
ttaatatacctaacctacaaaacatcatagcttagcctatcctaccttaaatatactcagaacacttatattatcttatagttgggcaaaatcatctaacataaaggttattaaaacaaaaagttgaatatcttatgtaatttattgaattctatactgaaagtgaaaaacagaatagttgttctactgaatgcctactgctttatactattgtaaagtcaaaaaatcttaaatcaaacttttataagttgaggaacatctgtatatggtrtgggcattgtgctttgtatattcagtataaggaatgctgatgattttagtaaataagaccagtataaagtagaagtggttgtacatcttcttaggaggctctaaagctattactaaaaaatccatttgctaatgcccaaaattctttcaaagtggagctgtgttaaaattcaggataattaactttaaggaaattatttggtttgaacactaaactttatgcttgtttaatctactcagcctgtttttcaaagtaaatggatatgatagacctacttacattacaaacacacatttacatgtggtacctgtgtatgcccaactttggcacacatgaccatgctctttacttt

SEQ ID NO: 151128 - DNA, 623 bp, Homo sapiens
ttaatatacctaacctacaaaacatcatagcttagcctatcctaccttaaatatactcagaacacttatattatcttatagttgggcaaaatcatctaacataaaggttattaaaacaaaaagttgaatatcttatgtaatttattgaattctatactgaaagtgaaaaacagaatagttgttctactgaatgcctactgctttatactattgtaaagtcaaaaaatcttaaatcaaacttttataagttgaggaacatctgtatatggtgtgggcattgtgctttgtatattcagtataaggartgctgatgattttagtaaataagaccagtataaagtagaagtggttgtacatcttcttaggaggctctaaagctattactaaaaaatccatttgctaatgcccaaaattctttcaaagtggagctgtgttaaaattcaggataattaactttaaggaaattatttggtttgaacactaaactttatgcttgtttaatctactcagcctgtttttcaaagtaaatggatatgatagacctacttacattacaaacacacatttacatgtggtacctgtgtatgcccaactttggcacacatgaccatgctctttacttt

SEQ ID NO: 151129 - DNA, 554 bp, Homo sapiens
ggatgcccacaagtcccaaggtgccaggacaaggccggagttgcatgttgtcctggactaattattaatagtgttccctttcaaaccaatgagggtcctgagggtcctggtttgggcaataaattatatggtcacccaacacattaaaaacaaaccggccaggcgcagtggctcacacctgtaatcccagtgctttggtaggccaagccaggtggattgcttgagcccaagaggtcaaggtcagccggggcaacatggcaaaaccctgtttctacaacaagtacaaaaattaggcaggcatggtggcrtgcacctgtaatgccagctgtggtctcaggaggctatagtctttctgtaacacctgtagtcttaggaagctgaggtgggaggatggcttgagcctggaaggcagagcctgcagtaagccatgaaagtgccactgcactccagcctgggtgacagggccagaccctgtctcaaaataaaatatgaaacaatcaagccaaaaagatagttgaatggcccaagccaagaggcagggatgcctatggggt

SEQ ID NO: 151130 - DNA, 554 bp, Homo sapiens
ggatgcccacaagtcccaaggtgccaggacaaggccggagttgcatgttgtcctggactaattattaatagtgttccctttcaaaccaatgagggtcctgagggtcctggtttgggcaataaattatatggtcacccaacacattaaaaacaaaccggccaggcgcagtggctcacacctgtaatcccagtgctttggtaggccaagccaggtggattgcttgagcccaagaggtcaaggtcagccggggcaacatggcaaaaccctgtttctacaacaagtacaaaaattaggcaggcatggtggcatgcacctgtaatgccagctgtggtctcaggaggctatagtctytctgtaacacctgtagtcttaggaagctgaggtgggaggatggcttgagcctggaaggcagagcctgcagtaagccatgaaagtgccactgcactccagcctgggtgacagggccagaccctgtctcaaaataaaatatgaaacaatcaagccaaaaagatagttgaatggcccaagccaagaggcagggatgcctatggggt

SEQ ID NO: 151131 - DNA, 585 bp, Homo sapiens
gatttcgaatggggatgtgaagtacagatcatattctacccattactaactgtttgattgtaggtgaacttcttaacctctttatgtgcctccatttcctcctctgtaaagtagcaataacaataatattatttctgatgactggtgcattgcaagagttccaaaaatagaagttgtcttcttcccagatgcctccctgcctccagcatgctctgagccctcttggcatggagtggtctctgacctgggccagtatgtttagactcatcaccacttgacacagatctactgctgctgaattcaaggataatttatgtctcatttcaaaaacaaaccccttmtctacctgccacccataatcctttcagcttgttagccacaccatcccaatctggattcaagatctgccaaacctgggcttctcaggcatcagccaggcctttggcaccagtgaccactggatgacatctttgaggaaaacaataagaggaaaaggggacgtttgcagccctcctcattcattcgggcaggggcagggatctgggacaagccaagccagcatccaggagaggcccagggactggt

SEQ ID NO: 151132 - DNA, 384 bp, Homo sapiens
tagtttgttgaatactgactgccggactgagtggtgaatagcaggagaggtccagggcagccccagagctggcgtgcaggtttctgagacagaaaattctcttgtgccactctgttaaaggaatttcacggtaaccaaatattgccacccttaagaggcaatatttctgttctctrttctctaacaacagagaacaggctcctctgttgttagcaatgccagtcacataccaacagataatatgttgccacccttcaaaatggttggttctctcaggaaagcaaactctccccctcacaatctcattagtcattagaaagaatcaaggcttgcagatggtgcagcccttccaggtgcccagagccgcctgccctcctgagctca

SEQ ID NO: 151133 - DNA, 384 bp, Homo sapiens
tagtttgttgaatactgactgccggactgagtggtgaatagcaggagaggtccagggcagccccagagctggcgtgcaggtttctgagacagaaaattctcttgtgccactctgttaaaggaatttcacggtaaccaaatattgccacccttaagaggcaatatttctgttctctattctctaacaacagagaacaggctcctctgttgttagcaatgccagtcacataccaacagataatatgttgccacccttcaaaatggttggttctctcargaaagcaaactctccccctcacaatctcattagtcattagaaagaatcaaggcttgcagatggtgcagcccttccaggtgcccagagccgcctgccctcctgagctca

SEQ ID NO: 151134 - DNA, 596 bp, Homo sapiens
aagcttcctcattaaatgtactgtgtattgtctaaaccaatggccgcaacctaatttctgtgcatgcctctgacctgcttattcagyaagtgagagaatgcagcgatgaatatggacaccacaccacagtctcacatttttacaaggtgcttttggaaacctgaatggagatttgactttttttttttagttgcttccatggcaaccctccccatgaaaacaggcgcagtctgcagaggcctgttcttttctgttgatgtttgtcactaccacatggggtcaggtttgttctttctccctccccaaaaatatttgctagctctgtggaaaaactgctgttgccctaaacagtttacctgcatctgtaccccgctgttcctgtgccaaggtgactagggaccttctgtgtggctttggcatccctcagtttccagatataaagcagaggacaggttccctctactctcaaattcccatgggcatggctggggataggagagcaggcagagtccctcttcaaggacactcaccagctcctaacccaacatctctaaccagtcatgtagtcttgtggcttatagtacgaactttagttt

SEQ ID NO: 151135 - DNA, 600 bp, Homo sapiens
gagaagcttcctcattaaatgtactgtgtattgtctaaaccaatggccgcaacctaatttctgtgcatgcctctgacctgcttattcagcaagtgagagaatgcagcgatgaatatggacaccacaccacagtctcacatttttacaaggtgcttttggaaacctgaatggagatttgactttttttttttagttgcttccatggcaaccctccccatgaaaacaggcgcagtctgcagaggcctgttcttttctgttgatgtttgtcactaccacatggggtcaggtttgttctttctccctccccaaaaatatttgctagctctgtggaaaaactgctgttgccctaaacagtttacctgcatctgtaccmcgctgttcctgtgccaaggtgactagggaccttctgtgtggctttggcatccctcagtttccagatataaagcagaggacaggttccctctactctcaaattcccatgggcatggctggggataggagagcaggcagagtccctcttcaaggacactcaccagctcctaacccaacatctctaaccagtcatgtagtcttgtggcttatagtacgaactttagtttc

SEQ ID NO: 151136 - DNA, 588 bp, Homo sapiens
ccataatgagactggtacttagcccagacagtggcttttatatttgcagatgcccacttcatagctatcagtctaacttttaggagtggcaagtgtggagagctgccactattctgatcttcccaaacaatgaaccaggtttctggttcattatgaagcatcttcccttggcatttaatgatgtaaaaagttccgatgtggctgatgaaactgctcagracactccctgtgactttggggccaattcctctgacagttagaaggttatcaccttggtggcagactccagagtggatggagtttaccctaaatagtgtgtgtgtgtttacttcttattttagtcaatttcactttaaaggacaaattgattttcttctctcctgtgagaagtatcttttttctacagtgaattaagttagaatatatatctaagaacagttttattcttcctgacttcaggccatctttcagctagctgcctctgtaatactacattgagtatgtcaaacttagccaatatctgaagcactattccaacagccctttttctttctaacactccacacacatcccattggtatcatacaa

SEQ ID NO: 151137 - DNA, 464 bp, Homo sapiens
ccaataatttcccaaattatgccgacaaataattaattttatgagttatgctttccctttcagtttacaggcgttttaattactcccttttcagcttcaaggacctgctcaagcccctaggctgccttgacaatcagtgctaatagctgggggtacttcaagcccctaagtggggctcccagcagcaaataagcatttagcacttaatgcccaaacagccccatggagctgggggcmtgaggctgaggagccctcaggggatgggtgggaagtcatggcctgaaggacctgtgcttttgcagttttcattctgtgtgaggcaagccaggagcccattgtcagatttcatctcacttagaaagtgaggcagaagctgtgagcttccccttccttccttaacaagggacagatatgtgcccagctggaaggccacgttgccagcctctgccacaaggagagaattc

SEQ ID NO: 151138 - DNA, 464 bp, Homo sapiens
ccaataatttcccaaattatgccgacaaataattaattttatgagttatgctttccctttcagtttacaggcgttttaattactcccttttcagcttcaaggacctgctcaagcccctaggctgccttgacaatcagtgctaatagctgggggtacttcaagcccctaagtggggctcccagcagcaaataagcatttagcacttaatgcccaaacagccccatggagctgggggcctgaggmtgaggagccctcaggggatgggtgggaagtcatggcctgaaggacctgtgcttttgcagttttcattctgtgtgaggcaagccaggagcccattgtcagatttcatctcacttagaaagtgaggcagaagctgtgagcttccccttccttccttaacaagggacagatatgtgcccagctggaaggccacgttgccagcctctgccacaaggagagaattc

SEQ ID NO: 151139 - DNA, 463 bp, Homo sapiens
caataatttcccaaattatgccgacaaataattaattttatgagttatgctttccctttcagtttacaggcgttttaattactcccttttcagcttcaaggacctgctcaagcccctaggctgccttgacaatcagtgctaatagctgggggtacttcaagcccctaagtggggctcccagcagcaaataagcatttagcacttaatgcccaaacagccccatggagctgggggcctgaggctgaggagccctcaggggatgggtgggaagtcatggcctgaaggacctgtgcttttgcagttttcattctgtgtgaggcaagccaggagcccattgtcagatttcatctcacttagaaagtgaggcagaagctgtgagcttccccttccttccttaacaagggacagatatgtgcccagctggaaggccaygttgccagcctctgccacaaggagagaattc

SEQ ID NO: 151140 - DNA, 427 bp, Homo sapiens
ggaccttacgaacacacacacacacacacacacacacactcatatacayattatatagatctacttcacaccaaacacaagcataaaaaataaactgggaaaagatcaagattccaactgggttttgagttggaaaaaacattagtattttaaaatatatgttttgtcaaagaaagtgactatctgataaaggtaaaggaaaaatcagctgtttcagttttgggaaattcacaatgctcctttgtttagtgggcttgttgaacttttctgaacattcaaaaaatatttttgtcaaataatttggacatttcaaattctgcttcaagcatgaagggaggttgccactaacaccattgttacctcttgggccacggtctcccttgggatggtcatttcagagggaggaaatacccttggctgtcagagg

SEQ ID NO: 151141 - DNA, 567 bp, Homo sapiens
gtaattatggcagcatttatcagactagaaattttaaggttttttttttttccctcctaaaatcattaaagaagcttgratctgtcataggtatgattggtttttatctcttgtttctgtcttttgatcttttctgtccccgacattcatgcatccaaacaccttttgctttgtatttaagaataaggagaatctgttctagaacagttactaagatggtcagtgactttaccctagaaaaaattaatttcattatgataattacattaattgtgcagtcatcaagctttcagcaggtaaagacatttagattgattcctaagataacttacttttcaagttcatgttattcaacatttttaaaaaatattctattacgattgtcagttttgggatcagatctgtaggaatcaggaaaataaagaaattttctggcaaagaaatgaaaaaacttggttctctttggtttagagttactttgatcttaaagtgacaaggtttgaaagaataaaaataaactttatagatgcattctgtaaagctttgaatatttcagagaatatgcag

SEQ ID NO: 151142 - DNA, 567 bp, Homo sapiens
gtaattatggcagcatttatcagactagaaattttaaggttttttttttttccctcctaaaatcattaaagaagcttggatctgtcataggtatgattggtttttatctcttgtttctgtcttttgatcttttctgtccccgacattcatgcatccaaacaccttttgctttgtatttaagaataaggagaatctgttctagaacagttactaagatggtcagtgactttaccctagaaaaaattaatttcattatgataattacattaattgtgcagtcatcaagctttcagcaggtaaagacatttagattgattcctaagataacttacttttcaagttcatgttattcaacattttwaaaaaatattctattacgattgtcagttttgggatcagatctgtaggaatcaggaaaataaagaaattttctggcaaagaaatgaaaaaacttggttctctttggtttagagttactttgatcttaaagtgacaaggtttgaaagaataaaaataaactttatagatgcattctgtaaagctttgaatatttcagagaatatgcag

SEQ ID NO: 151143 - DNA, 631 bp, Homo sapiens
ataggtacaacttgcaagcagaggtactctattttatggatgcttgtacagtgaacaacagctttgaaggtagaggttgtctccttccagagcaaagggcagattcacttactgtccagtaaaataaaaataaggtctgcctctgagacaaagtttgggctggtttgcttgcagcccattacaaaagattcatgttccctaagctctgggtcctcaattgtgatgcgaaccctcwgtatgtgcagcatccatctaggccgctccactttgtccttggtagacttagggccaaaaagcatcaagaccaatatggagctaattctgtttactgtgctgtgagtagcaaagtcctttgtctcactcaaaactccagaagtcttgagtcttctgtgagcatccctgaaacaggcaggctgacctgttaacttacaagtagggtaacatctcagactcttctcacaggttttgacaccttttacttaatttatatttagcactagaggtagtctgatatttctcagctaaatttaatgtctcttttgaattaccaatgctaaagaataactttgaaaaagataaaacgatgactcttacatataatagaatgaaaacatgtcaaaattttatttaa

SEQ ID NO: 151144 - DNA, 433 bp, Homo sapiens
tatgtgatcctcatcttacagataagaaaactgaggttcacagagaataagtgattcgtccacagtgaaacatgtggcaagaggatgacctgggattcaaatcccggcctgcctaacagcaaagcctaccatctcattgatcccaggcagcattctgaaaggcaggcttgccctggcctgcaaaagaactcactagagccagarcaaggcacgaacaaattgttttgtgggcaagattaagtttaaaaacctcagcctcctttcctctctgtttagggggtttctttctggccaataaacatgtttggaaggtactcgaatacctactactgaattagatatgttcatcatcataactggaaaaaatgagagaagagcaaattatatgctctgcataacctagactcctccaagtcatgtctcaaaccagcct

SEQ ID NO: 151145 - DNA, 433 bp, Homo sapiens
tatgtgatcctcatcttacagataagaaaactgaggttcacagagaataagtgattcgtccacagtgaaacatgtggcaagaggatgacctgggattcaaatcccggcctgcctaacagcaaagcctaccatctcattgatcccaggcagcattctgaaaggcaggcttgccctggcctgcaaaagaactcactagagccagagcaaggcacgaacaaattgttttgtgggcaagattaagtttaaaaacctcagcctcctttcctctctgtttagggggtttctttctggccaataaacatgtttggaaggtactcgaatacctactactgaattagatatgttcatcatcrtaactggaaaaaatgagagaagagcaaattatatgctctgcataacctagactcctccaagtcatgtctcaaaccagcct

SEQ ID NO: 151146 - DNA, 423 bp, Homo sapiens
gaattctcaatttagcacatgacttttgccttttgggggttttattgagtgactattatgtttttctgaggaaaacatccatttctacagaattttaaaatgtatttttagacctctagaaatattaaatgctactgatagaccagttaagccatcaaaaacaacacccttaaacaagtttagaagcactttaactgagttgcacattgacactgggctttcaaaggttatgaaartttgctctaagaaatagctgtgtgtaaaaacagctcacagctaaatgccctaaatgtttcatgtggagtgttttcatttttatttttgttttgttttgttacaaattagagctagaaaggctttttaacttttttttcttctgggaaactgagaatatttctctcccttctaatgatgagatgattt

SEQ ID NO: 151147 - DNA, 519 bp, Homo sapiens
aggccatctggatggctctgatccactctgtgcgctccttgggggtggctgcttgcaagaaatagtgcacttcatctgctgtgatgatctcaaaaaggttctcttcctcactcttcctgcctggggaaagagaaggcaaatggcagcacgcacaggcatcagaaagaccacttgctccaccctcctctgcaagccatgaaatctctgttttcttcgtgttctaaggaaattgactatgtggctttcaaacatacaaacaaggtatgattatagrataattcattgcacagttatatacatagtattgatagagtagatacatagtatgactgtgtgtatatatatatttttaagaaataggtaaaacacttaaggagaaacattttctttcatagtttacaggcaaactaaatttctcacctttgtatagcaacagcgtttaatgagtaacctctaatagtttctaatgggtaccttccctctgctcataatataaatcaagggttgctcctgatatct

SEQ ID NO: 151148 - DNA, 362 bp, Homo sapiens
tctccagctggcccacgctggtcctgggtgagtagtcagccctcactgcggcccccagagaagtccccctccaggggccaccccaaaagcctggggcagttttgtccttctagagcataatagagtgtcactttttaaaacccacagaatccctcagagggggcagaagagaaaagacaagttggcaaatgctgtatttctaagaggaaatgatatatttttagtttcctatccactttccccttttataaagaatgtatacacatccatttmagaaaaattgagaacccataaaagtagaaaatgtttaaaaatatcaagcatagttctgcttcccaaagataaccactacaaacactttg

SEQ ID NO: 151149 - DNA, 555 bp, Homo sapiens
tttaccaaggcctgaaggcccgcatctccagctggcccacgctggtcctgggtgagtagtcagccctcactgcggcccccagagaagtccccctccaggggccaccccaaaagcctggggcagttttgtccttctagagcataatagagtgtcactttttaaaacccacagaatccctcagagggggcagaagagaaaagacaagttggcaaatgctgtatttctaagaggaaatgatatatttttagtttcctatccactttccccttttataaagaatgtatacacatccatttaagaaaaattgagaacccataaaagtagaaaatgtttaaaaatatcaagcatagttctgyttcccaaagataaccactacaaacactttggtgtgttttcttccaatttttttctgtgcatagatcttgggtttttttccactttacataattgcaaacatactgaatatagaatttgtatcttgctgtgtgttgttttttttttcttttacttagcattatcccataagcattttctcatgccaaaagcatgcttttt

SEQ ID NO: 151150 - DNA, 539 bp, Homo sapiens
gaacccagcccaagtggcacagaaggttttcctatcaccatgacagcatccctttaattctcctttcacgctcccacaagcaggaagccattagatagccaaacccctcctaggctgcgctcagaaacactccccacctctggggactgggccttcctcccacctttttatcctgacccctatattctctgctcgctgataacccaaatcatcatttccagggctcccaggagcctcgcgaccttgaaactcccaccgccttcccagagctccccagctgtgtgcgcatatgggtcccaaacacagacccccacctggggctggaacttagaatgtgtaaackgcagctgctcaggaaaactagttttgctaccttggaattacccgccttgtgttttaccaaacacaggcttcccccgcaaaaccccaccctcatcaagagaagtggttttaattaccattggctatttccataatggatccatctctagggaactagcatgtgtccagaggtgcctccctctcaaacatcaagcagg

SEQ ID NO: 151151 - DNA, 527 bp, Homo sapiens
gggcagctacctaagatcaaacccagcctcaattatgcacacggaagatttagttttgctttggcctgctgtaagcrttagggtcattcaccctatttggagcattaagcaggaagcacagacttttccaggcaccagtgagcagacccagaatgcccatgggtgcctaaagtacaaggggtgagacttgagtctataaagaggctgtcagcagcaccggggtttaggccccaggacaggcccctccctgagcccagcaagggcctgtgatgggtcagggatgtgccatcccagcagctgggagccttggccatcctctctgcggggtggggtggtaggagagcagccaacagcagaaggggagggaggttggtggccccccatggtctagagggttgcaggaggcctgtgcctgtagaaactgaaagggcagggcagcatcttcgtgggacctaggacggcttcccttgcttgctccccaccttcttggttttgtgccccttccaggctcccctgactgccgctcc

SEQ ID NO: 151152 - DNA, 527 bp, Homo sapiens
gggcagctacctaagatcaaacccagcctcaattatgcacacggaagatttagttttgctttggcctgctgtaagcattagggtcattcaccctatttggagcattaagcaggaagcacagacttttccaggcaccagtgagcagacccagaatgcccatgggtgcctaaagtacaaggggtgagacttgagtctataaagaggctgtcagcagcaccggggtttaggccccaggacaggcccctccctgagcccagcaagggcctgtgatgggtcagggatgtgccatcccagcagctgggagccttggccatcctctctgcggggtggggtggtaggagagcagccaacagcagaaggggagggaggttggtggcccyccatggtctagagggttgcaggaggcctgtgcctgtagaaactgaaagggcagggcagcatcttcgtgggacctaggacggcttcccttgcttgctccccaccttcttggttttgtgccccttccaggctcccctgactgccgctcc

SEQ ID NO: 151153 - DNA, 474 bp, Homo sapiens
agagagagaaggaaagagagagaagcaggcaggaggaggaaaatagcttttggcctcatgagacctttcgagaccaaatcacagggccccacaaggctgctttttaatagacatgttgatcacagttcttagacattcaataaatgcttttatgcattgactaaaacaacaacaaaaaagagaattaggtgtgtgtgaaatcaggtaacatttaacccagaaagtgggttgtttagattcagtgacctggaatttgaatgaaaaatgtgaagaamgtgttccttgctgagcaaaccctggatagctcagctgacttcacatattctcaaacacaagcccatctgtaggtctgggtggagcccaggggactgcatttccaacaagcttgcaggtgctgctgatgctactggtcccagatggcaccaaaatgggaggcttgagataaacagaggtggctgtctgtgtttatctcca

SEQ ID NO: 151154 - DNA, 547 bp, Homo sapiens
cacagtacaggcagcattcccagcacacgtaactgagaagaggtggaatccaggtgttccagggcagccagtcttgtccccatgccatcctcaaccacctgtagccagagcctgacacgccacctctagcttcccaccctcagtgcaactcagcggcaccccgtgtctgccagtgccaccctcggtgctctgctatctctgcttggcctcacacctcctcctcacctgcccttytcgtctctcacaaccccgactccaggtggtctccttatagcttcggatgatactgccaaccaactgcctctcctcctatttcctaaggcaaactccccgcctcacttccctgttggggcagtttggggagcccttgctctacctggctccagtccagttaagggaagagccccagcccagcttccccacaggaaccagctgcccttagaaagagccatgggcttatcaggcatcatgactccccttctgggatctgggcagtctggtggaggactgcgggggatactagatctattccagcaactctagtagg

SEQ ID NO: 151155 - DNA, 411 bp, Homo sapiens
gatagatagatagatagatagatagatagatagatagataatgtctatatagtcccaaactcctggcctcaagtgatcttcccaccttgacctcccaaagtgctggaattacaagtgtgagccactgcacccagactatttttaaaaaataagtgtaagccaccttattcatggactaaaggagaaatatctcatgaccatatcaactgatgctgaaaaagcatttgacaaaattmaatacctattcataataaaacaaagcaaaaatctctcagaaaaatagaaacagaggggaactttctcaacttgataaagattgtctacaaaaaacacagctaacattaaacttaatggtgaaagactgaaagttttcccataagattgggatatccacttccaccactcaacata

SEQ ID NO: 151156 - DNA, 550 bp, Homo sapiens
aacacaagaattctccagttaatataccccaaagtaaaggaagcctatcaaatgcctgaaaaggaactcaaaataaagatcttaagggaactcagcaaaatacaagagaacacagataaagtattcaacaccatcaggaaacaattcatgatctcaatgagaaattcaggaaaatggtagatatcataaaaaagaatcaaatctcaaaactgaaaaattcagtaaatgaaataaaaayaagagcttcaacaataaactagatcaagcagaagaaagaatttctgaacctgaaaacacatgttttcaaataacccagctagatcaaaagaaagaatgaagaaagcttacagaacatgtggaacatcattaagcgatcaatttttgcattatgggagttggagaagacgaggtgaaaaaaggcattgaaacctacttaatgaaataatagctgaaaactttccaagtcttgggagtaatatggacatccagatacaggaagcccaatgatcttcaaataggttgaagctgaaaaggccttctccaaggcact

SEQ ID NO: 151157 - DNA, 430 bp, Homo sapiens
cctgcagacaccttgattttagccccgtggatcccagtgcgggaggctgaagaatagctctcaaaaatatccagatcctaattcctggaacctatgaatgttaccatatatggcaaaaggaactgtgcaattgtgattaaattaaggattttgagatggggagattatcccrgattatctggtggaccctaaatgtaatcacaaatgtccttctaagagagaggcagagagagattttactatggaagaggagaaggtgaagtgatgttgggaacacagactggagtgatgtgctttacagatggtggaaaaggccacaaaacaagtagcactgatactagaagctgaaaaaggaaaggaaatggattctccctttgaatctccagaagggacgaatgctgccaacaccttgacattactcagtaaaact

SEQ ID NO: 151158 - DNA, 649 bp, Homo sapiens
tttttgtcttagttatctaggcagtacagctagtaagttagtgaatatttttaggccaaaggctgacataatgagatttgtttggaaggggcattctggcagaacacccacaataagatgtaagagatatagcacaactcccacctagaactatttctcaccacatcacaggctgcaggtggagatgcatggcaacgttgagggaactcagacacccaatctgatgcacggcataccaggaggtrgggaggggatctgcagagacctttcactgagttttggcacacagactgctaaaggaaagcctccgtggtgggcttgaacatgagcatagaagagctctttttaaacacaggccttgagctgactacaggggtcacaggcagaatagcaaacagagacaagactataaatagcagctgcagctggaaagcaaaagacaggcctgacctgtgcatagtatagaaaggacctcaggcaagccatcagtctcaccctattgctccctccccttgcagaggcccctccccacaacaggcatcctcagctccagcagagaaagactatgcattatcactggaagagctgtgaacctgaacagatttcgtcctccccaatctaaggagttaaaacttaaaacacggcgagt

SEQ ID NO: 151159 - DNA, 529 bp, Homo sapiens
tgttataaagggtatattcaggaaatcttcccataatgtgaaggtgatttagcaaaaatacttacraatatattttaaaaacatttgtttttcaactcagtatgtctacttttaataggtatttgtagatctgttagaaattatatctaattaattagaaaatactggctgggcatggtggttcatgcttgtaatcccagcactttgggaggccgaggtgggcggatcacctgaggtcaggagttcaagactagcctgaccaacatggagaaaccctgtctctactaaaaatacaaaattagctgggcatgttggcgcatgcttgtaatctcagctatttgggaggctgaggcaggagaatcgcttgaacccaggaggtggaggttgcagtgagccgagatcgtgccagcctgggctggaaaaatgaatgagaaaaacctacattcaagctctcagaatattagttactataagggaaactgggaagagtggaggaggcaaggtttatgagagaatagacaaaagtttt

SEQ ID NO: 151160 - DNA, 529 bp, Homo sapiens
tgttataaagggtatattcaggaaatcttcccataatgtgaaggtgatttagcaaaaatacttacgaatatattttaaaaacatttgtttttcaactcagtatgtctacttttaataggtatttgtagwtctgttagaaattatatctaattaattagaaaatactggctgggcatggtggttcatgcttgtaatcccagcactttgggaggccgaggtgggcggatcacctgaggtcaggagttcaagactagcctgaccaacatggagaaaccctgtctctactaaaaatacaaaattagctgggcatgttggcgcatgcttgtaatctcagctatttgggaggctgaggcaggagaatcgcttgaacccaggaggtggaggttgcagtgagccgagatcgtgccagcctgggctggaaaaatgaatgagaaaaacctacattcaagctctcagaatattagttactataagggaaactgggaagagtggaggaggcaaggtttatgagagaatagacaaaagtttt

SEQ ID NO: 151161 - DNA, 529 bp, Homo sapiens
tgttataaagggtatattcaggaaatcttcccataatgtgaaggtgatttagcaaaaatacttacgaatatattttaaaaacatttgtttttcaactcagtatgtctacttttaataggtatttgtagatctgttagaaattatatctaattaattagaaaatactggctgggcatggtggttcatgcttgtaatcccagcactttgggaggccgaggtgggcggatcacctgaggtcaggagttcaagactagcctgaccaacatggagaaacccygtctctactaaaaatacaaaattagctgggcatgttggcgcatgcttgtaatctcagctatttgggaggctgaggcaggagaatcgcttgaacccaggaggtggaggttgcagtgagccgagatcgtgccagcctgggctggaaaaatgaatgagaaaaacctacattcaagctctcagaatattagttactataagggaaactgggaagagtggaggaggcaaggtttatgagagaatagacaaaagtttt

SEQ ID NO: 151162 - DNA, 529 bp, Homo sapiens
tgttataaagggtatattcaggaaatcttcccataatgtgaaggtgatttagcaaaaatacttacgaatatattttaaaaacatttgtttttcaactcagtatgtctacttttaataggtatttgtagatctgttagaaattatatctaattaattagaaaatactggctgggcatggtggttcatgcttgtaatcccagcactttgggaggccgaggtgggcggatcacctgaggtcaggagttcaagactagcctgaccaacatggagaaaccctgtctctactaaaaatacaaaattagctgggcatgttggcgcatgcttgtaatctcagctatttgggaggctgaggcaggagaatcgcttgaacccaggaggtggaggttgcagtgagcygagatcgtgccagcctgggctggaaaaatgaatgagaaaaacctacattcaagctctcagaatattagttactataagggaaactgggaagagtggaggaggcaaggtttatgagagaatagacaaaagtttt

SEQ ID NO: 151163 - DNA, 569 bp, Homo sapiens
atgtttacatttggctgaatgcatgtcaccagaagctaggatatttacttatagcttggaagaactggaatgtctggtaataaggtcatgtggataaaagttatacatttaacaaaaaaagaaataagaaagtatatgttggtgaaattttcaattgagtataaatatgtctttttctagggtcaattgagtttctgagcattttkaaaactgagactactttttaattactttcaaattaaggaacattcaatactacagcaccttttgtgaagtaaattaaaaccattttctgagatacatagtctggatttcctcctactcctgttgctaggaggaagaaaaagagaacaagaaagatagtaaataattcaaccttaaattctatgtaatataccacccttctgccttatcttaggctaaattagcatatttcaaatattctaaacaatgaaatgaaaaaataagggacgggatttcagagaactccaacttaatgatgcagcagtcaaccagctgttaccaacagtttctttccagaatgaagtactgatttgacagtgattggt

SEQ ID NO: 151164 - DNA, 373 bp, Homo sapiens
tcacatctttaccaatagtggcaggatcatttttttttttaacttttagccattttcctgggtgtttagtaatacacwatggtgttaatttgtactttcctaatgactagtgatgttgatcatgttttatgtttatttatcatctgtatcctatcttttgtgatgtgtgttcaaatttttccccatttttaaaaactgggttgtttgactttttattattgagttgtatgtattctacttatggtcttcatataaattctgagttaaatgtatgttttacagatatttttccctgtctgtgaccattctgttgtcataaaagtatgcgttttgaaaaagagaaattctccattttgttgaagtccaatgtatt

SEQ ID NO: 151165 - DNA, 282 bp, Homo sapiens
ttcataaattagctttagggcttttaatagattttatggtatcaactacctagacaatctcctcatctttaaataaagatagttttactactttcaaatctgtaggccttttatttctttcacctgccataatgcagtagctaagacctcctgcttgttgaatacatagtgacagaacatcttagagggaaagcatttagcytttcagtattagacatgatacttgctatagtttttatttttgtgttttgtttttttgtagctatactttatcaaattgag

SEQ ID NO: 151166 - DNA, 616 bp, Homo sapiens
tttcatgatgattgtgaggcttccccagccacatggaactgtgagtcctgttaaacctctttcaattgtaaattgcccagtcttgggtatgtctttatcagcagcatgaaaatgggctaatacagtaattataattaaagacttgtaygcaaatgtttatggaaattaatcacccaaaactagaaagaatccaaatgtccctcagctggtgaataggtaaataattggtgtacccaatttggggaatagtacttaccaatacaaaggaatcaactatgatgcatgcaacagcatcaatgaatctcaaaagcctatgctaatggaaagaagctagacacagaggattacatattgaagggcttcatttatacgacagtctagaaagggcaaaactatagagaacacaaatacaaagccaaatggctggcgtggggagagagaattgattgcaaaggggcagaagggaactttcttagttgatgaaaatgatttatatactgatcgttgtggtggttacacaattatatatattagccaaagctttccaaattacatacttcaaaagggtgaattttattgcatgagagttatacctccataagcctgacacaataaa

SEQ ID NO: 151167 - DNA, 378 bp, Homo sapiens
ctacaaagcaagacgttaaatagatttgaagaaatgtaaaaccatgtttcctttttcattattatgttgttttagaaatatactttttcctaaaaatatattatctatgttagcataaaatgtatttgttactattttaatgaattaaataaatattttttataatttctcaattttcatttttactatagtaaaatgggatagctataatccaaattaaaataasgactggggtcctcaataatttttgagagtatagaagtttcctgagaccatgtttaataactgctgctctagagctttgtatactaaaagtcttcaggcatgatttagttggtctcattgcatttcttgaaattaaactataagtttcataaa

SEQ ID NO: 151168 - DNA, 394 bp, Homo sapiens
ttttgcctctataagtcttaggtgtgctcagaagagttaactctatcatctagtgcttaagtttcagaatatcaaatgtgcattgtggcagagctagcagagaaatgaatatcaccaaagatcaggtaggcatcagtattgccgggagttgcgaagccagaaaaccactgaaaatacttgaacccacagagcttttttggcaatggttaatatttcacaaagtcactaagagtgaagttgatgtgaagtctactagagwgttataggttatgcataagcaaaggaatctaaagctcatggtttttgacttaaatcgtcataataaagagtcatgcctttcaccaaattcccagaccctatatggagcctcttgaatgaaaaggaagatgaattc

SEQ ID NO: 151169 - DNA, 518 bp, Homo sapiens
ggtaaatggtgaacatgtactgggagggtgtcataagtgagaatttttttgttatatgcatcacagatttttagaaatatataagagcaattcttagtcactgaaaagccactctatctcttaaggacagcaatatcaccagggctgtgtaactcaagtcctcagctctccttgaagtttagtccaccacgggcatctcctctgggcatgttgagatggtcagaaatttctatgggcagaagatttcacctgcttcctccttttgtctccacaatttctaccttgaacatttctagatcttccatttgcaaaattgggtggtgatggcctggtgatgaagggagcaatgtgggttatgagccactgatatccctcctgtcgtgggtcacatmgtggccttagaaagatcatgtccactcagaacctcagaatgtgtccttatttgtaaatagggtatttgcagttaatgatctccatatgaaaccattatgggcttcggatgggctttcaactcaatt

SEQ ID NO: 151170 - DNA, 641 bp, Homo sapiens
atcataggcttacatggggtcaggatgattaatatcactgtcttccacccctatgtcttgtccaggtcttcagggcaatatcatacatggagctgtcatctcctgtgataatgcctttttctggatattttctgacagatccacctaaggctgttttacagtcaactttttccttatataagtactggatgtatactctaaaataatgatwaaaaatatagtatagtaaatacataagccagtaacatagttgtttattatcattatcaattcttatgtattatacatattaatatgtgctatagttttataagactggaagtacaataattttgtttatacaagtatcgtcctaaatgcatgcaaaatgcattgtgtggtgtgacttaggatggctatgatgtcactaggtgatattcaacttcattataatcttatgaggccatgacgtaataggtggtctgtcaataagcaaaatgttgttatacaacacatgaatatttatgtgtctaaattagataattatcatcacgctggactcacagctcctggtgataaaggtttgaaacctggtacttattattaggccattctcctttcacaaacaaataccagtttttgtgtaccatgaattctacact

SEQ ID NO: 151171 - DNA, 641 bp, Homo sapiens
atcataggcttacatggggtcaggatgattaatatcactgtcttccacccctatgtcttgtccaggtcttcagggcaatatcatacatggagctgtcatctcctgtgataatgcctttttctggatattttctgacagatccacctaaggctgttttacagtcaactttttccttatataagtactggatgtatactctaaaataatgattaaaaatatagtatagtaaatacataagccagtaacatagttgtttattatcattatcaattcttatgtattatacatattaatatgtgctatagttttataagactggaagtacaataattttgtttatrcaagtatcgtcctaaatgcatgcaaaatgcattgtgtggtgtgacttaggatggctatgatgtcactaggtgatattcaacttcattataatcttatgaggccatgacgtaataggtggtctgtcaataagcaaaatgttgttatacaacacatgaatatttatgtgtctaaattagataattatcatcacgctggactcacagctcctggtgataaaggtttgaaacctggtacttattattaggccattctcctttcacaaacaaataccagtttttgtgtaccatgaattctacact

SEQ ID NO: 151172 - DNA, 534 bp, Homo sapiens
gaattctcattatggatgatatcggttgtgcacagagaggaagagaagttcatggctcagtgtactacagcccagcaatgtcgaggctccgagtgataagtatattttatatttcttgggaaaccaagaaaaactccagtaatagtgctgtasattatgctcctttgtatagtgggtcagtaatagtgggatgggatgcatttcaccatatcccatttagctacgaaatttttattgttttcaaatccttgggtttaacggcaagggtggtattgagctctatggatggaaaagtaactcctaattctaggagaggtaatgagtattttaatcacttgaatttctacagcaaagtatcacaagcttatcctttattttgttatacagataccatataattagttttaatcgcacaataagtgattttactttttggtttttgcaactttttatagtagaattttgaaaagatttttttcatcagcagtgacagaacatcccatcagaatttatcttcctcagggaagcagaggc

SEQ ID NO: 151173 - DNA, 608 bp, Homo sapiens
cattcactattgaattcaaataaatatgctctgaatttagtctttaattatcaggtgagaatgtttactgccttcacgccaggtaggtcatggtaaagatgcttgccattgaccagcctcagtatatcaaacctttaaaaatgaacttttaaactaacacttccayttcaacacaggagaccaagagcaacagagaaaatacaggaatccaaaaattattttattacatgtgacaaatatgaaccttttaacaaaatctctgtaggattatatcaatataggaggttaaagattgcacagcattttcaatgaattggttgatgactttgcattgctttcatttgaatacatgcaggtgcggtgttgccaaaatcaattaattaaaaagggatgttaatgtgaaaattgaaagtggcactctcaaaacctttccaacttcccagcttccatttggaagggcataattaaatgtataaattaaatatccataaatgaggtagatatcgtgtaaagaaaactgtgcttggaagagataccagtgttctaattctggttctgccactgagttgtaatgccaccttgattgcgacagtttttaaatgtgcaca

SEQ ID NO: 151174 - DNA, 645 bp, Homo sapiens
tctttaattatcaggtgagaatgtttactgccttcacgccaggtaggtcatggtaaagatgcttgccattgaccagcctcagtatatcaaacctttaaaaatgaacttttaaactaacacttccacttcaacacaggagaccaagagcaacagagaaaatacaggaatccaaaaattattttattacatgtgacaaatatgaaccttttaacaaaatctctgtaggattatatcaatataggaggttaaagattgcacagcattttcaatgaattggttgatgactttgcattgctttcatttgaatacatgcaggtgcggtgttgccaaaatcaattaattaaaaagggatgttaatgtgaaaattgaaagtggcactctcaaaacctttccaacttcccagcttccatttggaagggcataattaaatgtataaattaaatatccataaakgaggtagatatcgtgtaaagaaaactgtgcttggaagagataccagtgttctaattctggttctgccactgagttgtaatgccaccttgattgcgacagtttttaaatgtgcacaaattcttgacatgcctctcactggaaagtggactttacgtttttgtaccttgaatgtgggctgacattaagtgactt

SEQ ID NO: 151175 - DNA, 400 bp, Homo sapiens
gaattctaaattcataaacagcgcatgccatattattacaaatttagagagcattgccaaataaaaatttctaatctgtctacctagactatgttctaccagctccagtagaaaatttcatgtgaaaaatgtattgtgctccatctgttcaggttcagagaattgagcctatgtacctaaagctaatttactaaagtgggagttgaagtgatgtcgtaaaagrgaaattttctaagtaagctgtcgttcactggctttcaacacaattgctccagccatagatcatattttatagaaaaagagtgtcctaattcttgaaggagtgttggatagtataatagcacacatacaaatcatatgatgtgcaatatctatgaagaataatgtcgtgacaagaagt

SEQ ID NO: 151176 - DNA, 526 bp, Homo sapiens
aattaccaggctagtctagtttgttcacattctcagagccacctcctttccctggaaagcaacctggtacctctgcttcttcttcctcttcttctttttttttttttttttttgatggtgtctttctctgttgcccagactggagtacagtggcatgatctcggctcactgcaacctctgcttcccgggttcaaaagattctcctgcctcagcctccgagtagctgggactacaggtgcacaccaccatgcctggttaawttttgtattttttttttttttttttttttttagtagagatggggttttgccatgttggccaggctggtcttgaactcctgaccttgagcgatccacccaccttggcctcccaaagtgctgggattacaggcgtgaacagccgcacctggccaactctgtacctacttcttattgctagttttgttgttaaagtcttgaatctgaatttcccaaacagattacagggttcatggaaatggaagctggttgtccatctctttgaattc

SEQ ID NO: 151177 - DNA, 459 bp, Homo sapiens
tactcactaataaacaagacttgatgaaaaatgcttatcaatgtctcyggtggaatttaaaaaaattgaaggtgcctcaaatgtcatttatggtgaaaatattataatctttttttttctcttattaagcattgcctcaccacacaagtgtcattaggcaaatcacagcccctctcccctactgatataagcaggattagtgaaatagcaacaaattctgtttcaccctcatatcatcacttctccagatccctgtgcctatgtatccactgagtcctgtcagaaggcagtgactaaagcttatgacttgtgatggatcagaacattacataattactactctcttctagtttatcactgagcccagatatattgtataaactcaattaccagatcacttatacagtccagactgcttagcagtataactaaaatgatgtgaggccagcagcaccaaac

SEQ ID NO: 151178 - DNA, 545 bp, Homo sapiens
tggtcttataggtcattttcagtrgcttggcctactaataactttcagtaattacaatgttaacatctctacaagatgaggaagttctcagcatttgtaatatgattttatacacctgaacagcatggaacaacttgagacactggaggagggctcattctgagaccttaaatcaaagagtgagctgtacatcagcccagccaagcttgtttggcagctacagacctgaatcttcatgaattggggatgtttgttcctctgcctgggaagtttatattcttcttcccatccctgcacccaaatccactgacaagtctatgtatcctgcaaatgccagtttctctgtagcccagtgtattagtccattttcatgctgctatatacccaagactgggtaacttataaagaaaaagagatttaatggactcacagttccacatggctggggaagccttaaaatcatggctgaaggcaaagaaggagcaaaggcatgtcttacatgactgcagacaagagagtgttcaggggaactgccctttatcaaa

SEQ ID NO: 151179 - DNA, 635 bp, Homo sapiens
tgatcatggaatggcagagaatgaatcagatcaatctcagacactatcacaggcaaatatgagggagtaagacccaacgtcacccaaaggccagaatgagtctcgttactgtgaataagaagacattttcttgttgttataatatttattacatttctctttaggagattgatgaaatttactcttattgtgagagtgtgattagcctaaatgaagagatcatcacataagaaagttgatataataatatcaaagtcttgataaaaatagcctatttaaaccatctttgagatggaaatattaaatcccttcatcttttataattgttcattttaagatgacatttcttataagacaaagttatttggacatttataatgaaaatatgccagagatatatcttacctttctgaataatttaaaacaaaaagataagctatttcaaagcaaatgtaatgtttcatttggtgaagcaagaataattaaattcattttatagtcaaaacactttaaaaaatgttagtgtactgtgtacagattttagtgtaattgayaatttcacctttttaattatagtgttaatcattatttgcaaaatgtgcttttaatctttttctgagttttgattaggcttt

SEQ ID NO: 151180 - DNA, 559 bp, Homo sapiens
tagatctagtttgtggagacacttactaaactcctgcttgtgtctgttaatttacatggatggatgcgagactgaaggtaaaacaatacaaaataaaaactaaaaaactatgtccttaatctgagttgaggcamcccagctacgtctgaaaaagctttgtggttgtagtggtagatgtgggagagcacacatagaatcctgccattttctggcttgaggccttgctttaaattaataaggaattgtttcatggcaagtagcttcagcaataagttctcatggctgtaaggaattagtggttgtggtcatagggaagccagtgatatctcaattcatctcatcaccctattcatgatgacatgaatatatgtagggaaaacccagtggctcagcattgagaccctcacagatcaatgttcatatagggtcagacatattcaacttattacttgaatggcttagtcagaaaacagccaagctatgacagcaccattagaatccattagaattaatgtcaaactctggagtagcagagaaccatggcaatggagaaacacag

SEQ ID NO: 151181 - DNA, 574 bp, Homo sapiens
cctgcacatgcttacactctatcctgctgccttgagaaggtgcctgcttccccttccaccatgattataagttttctgaggcctctccagccatgctgaactgtgaatcaattaaacctctttcctttataagttacccagtctcagggaagttctttatagcagtgtgagaacagactaatacacatatctcaaaataaaggcaacctatgacaaacccatggctaatatcatagtgaagggggaaaaactgaaggcctttcctctaaagactggaataagacagggatgcccactttcatcactgttacccaacgtaawacaggaagtcctggctagagcaattaggaaagaaagaaataaagggcatccaaattggaaaggaagaagtcaaattcaccttgttcgcagaattatcctgttcacagatgatatgatcttatatatagaaacccctaaatactccaacaaaaaacttctagaactgatacattcagtaaagttacaggatacaaaatcaacacgttaaaatcattttagcatctctatgcaccaataacaatcagagaatcaa

SEQ ID NO: 151182 - DNA, 223 bp, Homo sapiens
ggtggagaacctagattcatctttgtgggacttcagtctgtgctttgaacagcacagtcttcaaagggcccaaaggcacctgcagccacaggtgaggcagaggaatgagttcatccccacaggccctatctagatacatgcacctcatgctgctgagcsacctcatggtgctgagggctgggccagtcttcccggctttgttgggaagtgagttcatctgggg

SEQ ID NO: 151183 - DNA, 467 bp, Homo sapiens
actatgggtaaggggggactactgtactattctgtctttctagctgagccacttgctttccagatacaaagtatgcacaatttttgcttatgttttagtgatgacaatgggtagtgccaacttctctcatccagtgacaatgggtagtgccaacttctctcattaaaggacacttaatttcactgaacttaatttcattgaatacatatttttggcaggttccgcactgcatgcttcatacactttacctgttccatcagctgcagaggaaaggcagtgtcaaatcccaatgccaaaatctgsgaatattcttgagaattccaggtcaccaggcagtaataatgaaagtaataatattaatagttaccgtttgctgaatatttattggtatcaggggcttgggctaggcacattacatgccatatcttatttaaccatcaccacaatgctgtgagatatatgttatt

SEQ ID NO: 151184 - DNA, 467 bp, Homo sapiens
actatgggtaaggggggactactgtactattctgtctttctagctgagccacttgctttccagatacaaagtatgcacaatttttgcttatgttttagtgatgacaatgggtagtgccaacttctctcatccagtgacaatgggtagtgccaacttctctcattaaaggacacttaatttcactgaacttaatttcattgaatacatatttttggcaggttccgcactgcatgcttcatacactttacctgttccatcagctgcagaggaaaggcagtgtcaaatcccaatgccaaaatctgcgaatattcttgagaattccaggycaccaggcagtaataatgaaagtaataatattaatagttaccgtttgctgaatatttattggtatcaggggcttgggctaggcacattacatgccatatcttatttaaccatcaccacaatgctgtgagatatatgttatt

SEQ ID NO: 151185 - DNA, 589 bp, Homo sapiens
ctctgatctattaagtttaattgagcccaggctcattggggctaaagcatataccttgtgatttcgttgacagtagcatcatctgttgctatgtaatacctgggtttgactaaattagaccagcygttaactagaaggatgcattggtccaagaatgaaagatcagactgacagctgatgagcagtcttcctttacagattgtctttactgtaggatttccatggcaggtctaaaaaatgcggaataatggaaaatgatagatcttgtaggggaaaagagactactttttacttttattataggaatggaatgtgtttggcgtccatctcctactttatagtattatagttatacagtagttttaagatttggatcttgcttatgaaaaatttataagccatccccatattgtttgttctagacatgcttatgttctactgtctatagaaacatatgattttctttaaagattttttaaaatggaagggatattattctataaatcattaaagtacaaatattagttacatgaatgaataagcaccacagctataggataggagctgaattcaaatttgagaaccatgt

SEQ ID NO: 151186 - DNA, 556 bp, Homo sapiens
ccagcctcagccccctgtgtagctggaattacaggcacctgccaccgcacctggctaatttgttttgtatttttaatagagacagggttttgccatgctggccagkctggtctggaacccctggcctcaagtgatccgcctgccttggccttccaaagtgctgggattatagtcatgagccaccacgcctggcccaagacgtttcttgtgttacctctaccacctgccagctctctcactttaaccttggttttttcatcgctaaagtcaagacatcagatgtaatcacctaatatcctttctggttctgacattccattgttctcactgcttcctgggatgcctgtgagcctgtgtttgtgactatacagcacatgtcagtgaaccaggaacagaggaggtgcctggtataggtttcctgggtagtgattcttatcctcttactgtaattgtgttagaagatcaaggaggtgaaggactccatggagcatatattcatgaagtactctttaagttcaggctgtatgagggtgtgagtattcagagggaatgacta

SEQ ID NO: 151187 - DNA, 579 bp, Homo sapiens
aagcactgagtttaaggggaaaaacacattagctaaaacacaccaccttggaggagccaacagttttactcaatggtatcctgactggttagtgcaggacacacsacaggaatattaacggtgactgatgttatctataaaagctaggcttttttttcttaaaggtgagaatgcagtagagaagcaaaaggtatcaaaggaacaaaagaagaatggcagcaaaagttagaaactaagaaggcagcagcacaaacagatgggtgggtgaatatttgatggagaagacagggatgaaggaaataaaagtcagaccagccttgcaacctggagggagacaaggcagaataattctctgcttaccaaacccatggaacaccagcaggcaagttccctccctggcgtcagggccccgcaatctctctccaggtggggactgggccttttgacttcaacagactctactgcagggaaccagaggccaatgaactctttttcaatgatacctttttcaatgataccttaactgataaagaatgcttatgtggctaaattcctgtctcttgaattaagctactgcaa

SEQ ID NO: 151188 - DNA, 564 bp, Homo sapiens
aaacacattagctaaaacacaccaccttggaggagccaacagttttactcaatggtatcctgactggttagtgcaggacacacgacaggaatattaacggtgactgatgttatctataaaagctaggcttttttttcttaaaggtgagaatgcagtagagaagcaaaaggtatcaaaggaacaaaagaagaatggcagcaaaagttagaaactaagaaggcagcagcacaaayagatgggtgggtgaatatttgatggagaagacagggatgaaggaaataaaagtcagaccagccttgcaacctggagggagacaaggcagaataattctctgcttaccaaacccatggaacaccagcaggcaagttccctccctggcgtcagggccccgcaatctctctccaggtggggactgggccttttgacttcaacagactctactgcagggaaccagaggccaatgaactctttttcaatgatacctttttcaatgataccttaactgataaagaatgcttatgtggctaaattcctgtctcttgaattaagctactgcaatgagga

SEQ ID NO: 151189 - DNA, 527 bp, Homo sapiens
tataccatagaaccttaaaaattatctttgacaattttctcctcttggctttataaaaatctgtcctttccttatgcaaattattttccaaatatttaaatttttcgggccgggcccagtagctcacgcctataatcccagcactttgggaggctgaggcaggcctcccacttgaggccagaagttcaagaccagcctgggcaacataacaaaaccctatctctactaaaaaaattagccaggcatggtggttcatgcctgtaatcccagctacttgggatgctgaggcacaagaatcccttgaacctgggaggcagagattgcagtgagctaagattgcaccactgcattccagcctgtgcgacagagcgagactgtctcaaaaaaataaataaaaataaaattttcaggcactttgaggaaccctagtcttgaatcatcttgtacttaaaaagtaagtaaattaggtaatttattttgtgaatccttcgtaatatttgtatarccccttacagttttcgtaagct

SEQ ID NO: 151190 - DNA, 630 bp, Homo sapiens
ggtgccactatccctcatattgttggggttttttaaactcttattttaggttcatgagtacatgtgagggtttgttacrcaggtaaactcgtgtcttggggggtttgttgtacagattatttcatcacccagcccaatacccaatggttatattttctgttcctctccctcctccaaccatccacccgcaagtaggccccaatgtctgttgttcccctctttgtgtccatttgttatcatttagctcccacacacagtattcagttttctactcctgcattagtttgctaaggttaatagcctctggctccatccatcttcccacaagacatgagcttgtattttttatggctgcatagtattccatggtatatacgtaccacattttctttatctaatctgtcactgatgggcatttaggttgattccatgtctttgctattgtgaacagtgctgcaatgaacgtttgcatgcatgtgtctttatagtagaatgctttatgttcctcttggtatatacccagtaatgtgattgctgggctgaatgctagttctgcttttagctctttgaggaattgccatactgtttcccacaatgactgaactcatttacactcccaccaacagtgtg

SEQ ID NO: 151191 - DNA, 630 bp, Homo sapiens
ggtgccactatccctcatattgttggggttttttaaactcttattttaggttcatgagtacatgtgagggtttgttacacaggtaaactcgtgtcttggggggtttgttgtacagattatttcatcacccagcccaatacccaatggttatattttctgttcctctccctcctccmaccatccacccgcaagtaggccccaatgtctgttgttcccctctttgtgtccatttgttatcatttagctcccacacacagtattcagttttctactcctgcattagtttgctaaggttaatagcctctggctccatccatcttcccacaagacatgagcttgtattttttatggctgcatagtattccatggtatatacgtaccacattttctttatctaatctgtcactgatgggcatttaggttgattccatgtctttgctattgtgaacagtgctgcaatgaacgtttgcatgcatgtgtctttatagtagaatgctttatgttcctcttggtatatacccagtaatgtgattgctgggctgaatgctagttctgcttttagctctttgaggaattgccatactgtttcccacaatgactgaactcatttacactcccaccaacagtgtg

SEQ ID NO: 151192 - DNA, 622 bp, Homo sapiens
tgctatctagacttcaagctgaaagtactatggagtcaacagcatttgatagactgtcatgtcactaactatccacattatctatctcattttgggtgcacattcatgccttccattggattggaatgatttgtggagaagagccagatggtcatctgcctgctttgacagctgtcaagctgtcagtcagctgtggccaactaatccaccctacttgacctggtgttttttgggcgaactgcattctttcttaaattaagagtagacttgcctttaaatggctggctttcttttaaagaacaaagttttttgttttttgttttaaagctattggaaggaaatgtattccttttagttctctgaaagaatctattacatacaggaaataagtgatgaataaagtcctcgttctttcttcaatactatctcctcttattttttcagatagcatagagaagatcagactcatctatgaatcttttggtgaataattgaacaaatgggattttgmaatgctctcctatgaatataaccatccatttttgtcttaacaagagctcatataagatccatattcaagaacttccaaatattaaaaaagagattgatacagaccacacag

SEQ ID NO: 151193 - DNA, 622 bp, Homo sapiens
tgctatctagacttcaagctgaaagtactatggagtcaacagcatttgatagactgtcatgtcactaactatccacattatctatctcattttgggtgcacattcatgccttccattggattggaatgatttgtggagaagagccagatggtcatctgcctgctttgacagctgtcaagctgtcagtcagctgtggccaactaatccaccctacttgacctggtgttttttgggcgaactgcattctttcttaaattaagagtagacttgcctttaaatggctggctttcttttaaagaacaaagttttttgttttttgttttaaagctattggaaggaaatgtattccttttagttctctgaaagaatctattacatacaggaaataagtgatgaataaagtcctcgttctttcttcaatactatctcctcttattttttcagatagcatagagaagatcagactcatctatgaatcttttggtgaataattgaacaaatgggattttgcaatgctctcctatgaatataacmatccatttttgtcttaacaagagctcatataagatccatattcaagaacttccaaatattaaaaaagagattgatacagaccacacag

SEQ ID NO: 151194 - DNA, 579 bp, Homo sapiens
aagagaccagcccacatctaacctgaatgtcacctgtgatgtagtatgcacacatcaccctgtttaatcatgatgtaggcctttaaagtagatgctgttgattcttctcatcttacaagtgtgatataactgagtctcagaggaaagaataatgtgcccagggccacacagctggtcagtggcagagccaggaattgaggtgtctacctgactccacagtttttaatttagataaactctaagcttatctaactacaaaaacagagcaaagagtattaggaagccagtattagctaacataaatgagaaatggatactaagcaagagaaagtaaatgtgagaaggggaacccttgttactctgtgagacacagctgaccttggtgcagcaagttttctgaatgcaaagcccagagacagcttcaccttggaggagtgaggccgtctaccaagccctgtgaaaaggagcacctgaacagaaccgagacaacctcagacttgcttcaagcccgtgttcacaaaataatccaatgggtgcactgagcccagtgacagcggytgccctcaccttgccctacat

SEQ ID NO: 151195 - DNA, 595 bp, Homo sapiens
tttataaataattgtttttaaaaagttactcaggttaccagaccttttctgtgatcctgtgttcttgttattggaatcctaacatcaatcacaaaattatgtcacacgcttcctgaggagtgcatggaactgtttgtgtaagtggtgtggggaattcagatcaaatattcagggactcaaaactgaagacaaagacggccaatgctggaaaacgcatgtggctttttctaaggggctgagttccaagcatgtgtaattccactccctctacttcctacattctgatgactggaaatcttggggtcagtccaaggtcgacctacacaaagggaactccctaggatagccttagaaaaacacagcccctgcaacaggtaaatttagggtacatcattccaataractgtcttgcctgacaaggttctctgtaacaggtcacacaaaggatttataccttttccttactgacttaagaggtagagaatttatccagaggggtttcttaaggtcctattttaacaatacaatcaaaagtgttctatttggcctcacttttccacacatcgtaactgttcacaggaaaataaagtcaccc

SEQ ID NO: 151196 - DNA, 359 bp, Homo sapiens
tgaggtgttttagtttcccaaaaagaggggaatgcttcttgttttaaatacagatgcctgtgtgctggtggtgtacattagtgaataatcacatattaacagatttagcttttgtaaagaagcaaaatgaagtgttttcgtaaamcatttctgaacttgtcattgatgttatactctatcagttgctattgataattttatttaaaggaggaggtatatagtatagcgccaacttcctgattaggccttggggaaggtcacgttttgcagtgacctgggcaccactcttaaatgttgttattattggaagagggtacccctcaggctgctgcccttcctctccccagaagcgctctgtg

SEQ ID NO: 151197 - DNA, 489 bp, Homo sapiens
gaactaattaagtgatggttacaatatagcactagaggtatgatcaggaagccactggaaccaagaggtggctcgtctaaatcaaatggtacttgagatgaattttaaagaatgagcagaaatgtattgctagatgaagattagtggcatgcacaattcacagagagtaggttttataaagtttataggtgctaaggcttgacggaagaggccgctgcacctggcctcttggagattatatacatatatatagtctctaggccctttcctccttggaaatatataatatgtatatattttatatatatacaatagacagaggggtctctctatgttgcccaggctggttttgaactcctgagttcaaacaatcctcccgcctccacctcccaaagtastggaattacaggcatgagccaccatgcccagccccatgaaagtttttaaaaatagtattctattcttgttttgcggttggaaaatttttct

SEQ ID NO: 151198 - DNA, 453 bp, Homo sapiens
gaattcaaggtgaagccacagagtaaagtgaaagcaagtttattaagaaartaaaagaataaaagaaaggctaatccataggcagagcagtggcatgggctgcttgactgagtatacttatagttatttcttgattatatgctaaacaaagggtggattattcatgaactttccaggaaaggggcggggatttcctggaagtgagtgttcctccccctttctgaccataggtcactcttgttgccatcttggttttggtgggttttggccggcttctttactgcatcctgtttcatcagcaaggtctttgtgacctgtatctcatgccaacctcctgactcatcctgtaactaagaatgcttaacctcctgggaatgcagcctagtaggtctcagtcttattttacccagcccctattcaagatagagttgctctcgttcaaatgcttctgac

SEQ ID NO: 151199 - DNA, 482 bp, Homo sapiens
gaagagacacacagaaagacayaattattcacctgtataaacggactttcgtgcacaccctaatgtctcatggcttccaggtttctgaaatccatgagcttgactttgcatcgtctttaattttacaccatagcatttacaaacagcccttgcttctccaatttttcctgactctggggaaatcacaaacagtgaaatggacaaaagaaacaccagataaagagaagcagaagaatgtagagatgtagctcatactgccggggttctggaccctcagtgacaaggacctgatcagaagggtagttctctactctttgttggtgcaaaaacagcaaagcccaggtactgttaggatacaacgggtaatgtttgccatagaacagggtctgtaaggatccgcatatctcctcccctgactccttaacttgaagggagaaacccaacaccctggcttggaaagcagtcccagccatatggaattc

SEQ ID NO: 151200 - DNA, 562 bp, Homo sapiens
agtctttcataaatttgctccttcttgctcttccaatcattgctcacaactcacaactctcccacttgtctcctgagtcagaaagctggaatcactttaaagtgtggataatgtgcttgcactaagcacatttacccacaccaagactgtctataccccatgagaaaaagacttttttgtttctcagaagccttgttctgtaggaaacrtgaggcggtaggatcccagcatggactctgccatattcttatcctggcaacaggccctgcatgtggagcctcagatatcttcaacagcccctctgcggtgctgacaaggggcacacagggctctcagatggtgcttggaaatgcctggcttcctgaacctcttatttggttctttgcagaaggttttccacaagcaagaccgtgggtcaggatacctgaactgggagcagctgcacgctgccatgagggaggcaggtaggcacaggaagagctggagctgtgggcacacacgggcagggtgcacactcatcaggcagaggagaggggatgtgtggcatgctgaagtaactcta

SEQ ID NO: 151201 - DNA, 233 bp, Homo sapiens
gataggggaagcacagaaaaagaagtgaattgtctactaaatgaaaagtcttttccatttgctcagagcccgggtgtggaagcactggggaatctggaggtgggttggccatctgtgctggcaagtgaattgcctcaggtctggtatctggggagtggccgaggagaggggaagagsgatagagacttaggcttagactctggggcctgggagtgctcttgtccttctaatcc

SEQ ID NO: 151202 - DNA, 389 bp, Homo sapiens
cagagctgaagctcggatttcaggcaccagaggatggtagcgcccggttttctctggttcagaaaccacttggcttctcccctattgaagaaaggtcctcccagaccattggagagtggaggtgggactctcctgtgcagttaacatggctgtgaagggtaacagtgaaccacacattgaagcccgscatgatgccaatcagcttatgtgtgtggtggcacgagatcctcacaggggcctctggaccacagagtcaaacagtggcgactcgccaaaggtaactgacacagctggacttaggcgggcacctttgtaaaggccagcctgtgctcttggcaaatttgctatctccaggcagatgcagatttagaagttatacagtccaaccc

SEQ ID NO: 151203 - DNA, 553 bp, Homo sapiens
gatcctattctggcgaggctaatgactgctgtctcaagaagsacccattgtgggaactaaaatagagtgagcacattttccaaatttaaatttagacctgtaaactggtaatgaggactatgtgaggacttaggcagggtatggcattcccacgcatccccagaggaccagtttttataaacttcacggcaaagaacagaacatgtccaggtagcgttttgccagtgaatagccattttgggcctctctccagtggggatctctggcttctcttctttatcaaccactctgtcttggccaggcctggtcagcaggcagcctagtgtctgtctctcggggctgtgcaaacttacctactatcccctggcacagatccagccttttggccttggcaaaataaaactggggattgctgtgcagctcctgggaaagacaaacagaattgtcattctgacctagaacaaaaaagctcctggagctacagtgaccacgttttcccataccccaaaactgtacttatggggacaaagatacagaatataggtgtaatcag

SEQ ID NO: 151204 - DNA, 553 bp, Homo sapiens
gatcctattctggcgaggctaatgactgctgtctcaagaaggacccattgtgggaactaaaatagagtgagcacattytccaaatttaaatttagacctgtaaactggtaatgaggactatgtgaggacttaggcagggtatggcattcccacgcatccccagaggaccagtttttataaacttcacggcaaagaacagaacatgtccaggtagcgttttgccagtgaatagccattttgggcctctctccagtggggatctctggcttctcttctttatcaaccactctgtcttggccaggcctggtcagcaggcagcctagtgtctgtctctcggggctgtgcaaacttacctactatcccctggcacagatccagccttttggccttggcaaaataaaactggggattgctgtgcagctcctgggaaagacaaacagaattgtcattctgacctagaacaaaaaagctcctggagctacagtgaccacgttttcccataccccaaaactgtacttatggggacaaagatacagaatataggtgtaatcag

SEQ ID NO: 151205 - DNA, 551 bp, Homo sapiens
agatctgctttgatcctattctggcgaggctaatgactgctgtctcaagaaggacccattgtgggaactaaaatagagtgagcacattttccaaatttaaatttagacctgtaaactggtaatgaggactatgtgaggacttaggcagggtatggcattcccacgcatccccagaggaccagtttttataaacttcacggcaaagaacagarcatgtccaggtagcgttttgccagtgaatagccattttgggcctctctccagtggggatctctggcttctcttctttatcaaccactctgtcttggccaggcctggtcagcaggcagcctagtgtctgtctctcggggctgtgcaaacttacctactatcccctggcacagatccagccttttggccttggcaaaataaaactggggattgctgtgcagctcctgggaaagacaaacagaattgtcattctgacctagaacaaaaaagctcctggagctacagtgaccacgttttcccataccccaaaactgtacttatggggacaaagatacagaata

SEQ ID NO: 151206 - DNA, 553 bp, Homo sapiens
gatcctattctggcgaggctaatgactgctgtctcaagaaggacccattgtgggaactaaaatagagtgagcacattttccaaatttaaatttagacctgtaaactggtaatgaggactatgtgaggacttaggcagggtatggcattcccacgcatccccagaggaccagtttttataaacttcacggcaaagaacagaacatgtccaggtagcgttttgccagtgaatagccattttgggcctctctccagtggggatctctggcttctcttctttatcaaccactctgtcttggccaggcctggtcagcaggcagcctagtgtctgtctctcggggctgtgcaaacttacctactatcccctggcacagatccagccttttggccttggcaaaataaaactggggattgctgtgcagctcctgggaaagacaaacagaattgtcattctgacctagaacaaaaaagctcctggagctacagtgaccacgttttcccataccccaaaactgtayttatggggacaaagatacagaatataggtgtaatcag

SEQ ID NO: 151207 - DNA, 582 bp, Homo sapiens
acacacacatattgtgccaaataccaacagttgccagtacgtgcccattctccccttttccttgttaccagaatccattttgataacccagctacaaaacttgatttcctggagcttcttgcaggacaggttggctacacaatatagtttttcattttacagttgcaaaaccactaatcttattagcctccccatttttcaggtgttacaactgaaacctgtccattcattcaccaaaaattttactgggaacttatcatttgtcaggcttgaggtaggcactgctcaccaaagacagtccctgccctcatggctcttacagtttagagggtgggagagygagaagggttaaatgatcttcctggtgctatacagggagattttataagggctgtatccagaacccagagccctgactcccataacaatgttcagctctcagtgctacaaactgcctattacaccccgcacagtgtttgggacagaatgtacatgccctaaaagtaactcgcaaatgtgcttatactgagtgtgacttctccctcatggctgtaggagtgacctggggtcctctccatttgt

SEQ ID NO: 151208 - DNA, 566 bp, Homo sapiens
atgggcttggtggccttgagagaggactgtttaataatatgcaaacattgtccagaatctttgaattgctcaagcagaggcacttttcaatgtcttctttccaaaactggaattgcttaatagaaacaggataggaaggttgtggtaaggtatggtttgcaaagtcgttctcaggtgctctttaaaactgttgcactgctaaagaaatggaacaaaaacagttatcacataagcaagcacacacacaaatgcacagagtttctctctctctcytttcacacacacacaaacacacacacacacacacacacacacacacacacacacgcttgtggatgctgaagccctgtagacactgcagtgttcccaatactttggccaaaaaaaagctggattagggccagaaagtacaataactgaaataacttcatatgaaaccattgcaggcagcgggaagagtcagaggaagggcactgggagattattttgctttttatccttgcttaattaatgctcacagtgatgggagggtgcactgaaactgatcatctttcccccatcacaaa

SEQ ID NO: 151209 - DNA, 339 bp, Homo sapiens
gactctaatgtagttcaatactcctcattttgtgattgagaaaagtggagcccagagaaattgcacgaactgcctacagcaagatgagttcattggtaaactgtgggctataayatatctgcattacccaacattgctcccaagtgacatccctcactaggtttcacaggacaagtgaatcagggagctgaggcatttctacggtgggatggggaggctgctaagcccagaagtttctaggtaatgagcaaaacaatgaacaaagacactgtgaccaagactctgggcaatttgctgtgaggaatacaaataaataaggcctgttccagctcttctaga

SEQ ID NO: 151210 - DNA, 576 bp, Homo sapiens
agtcaactcataactaagtgaaaactaattctcctgacttgaaagtgattagaacaaatgtataaaaacctgcagtctgactgaacttttattttattttattttattttattttatgttttatttttttgagatggagacacgctctgtcgcccaggctggagtgcagtggcgcaatctcggctcactgcaagctccgcctcccgggttcacaccattctcctgcctcagcctcccgagtagctgggactacaggcacctgccaccacgcccggctaatttttttttttgcatttttagtacagacggggtttcaccatgttagccaggatggtcttgatctctygacctcgtgatccgccctcctcagcctcccaaagtgctgggattacaggcgtgagccaccgctcctggccctgactgaactttcaatggcagagatacagtattcatttctgtccagtttgtgagagtcaatgttttcactgacatcaacctctctttccaaatgagttgtaagaccaccctttgtaaagccttcacagattctcacctgtggctatggactctgtattc

SEQ ID NO: 151211 - DNA, 326 bp, Homo sapiens
tatgaaatcattgcctactatctttactcctctagagtttgaaagataattaaatagtgaatagagctatagtccctacccacatggtgcttattgtttaattgaaaatatagatgatataaataatcacacgatatcagttaactattggccgaaaataatgctgcattgcaaataatcacaaaagtatagtggcacataaaactcaaggawtgttactcgttcttctgaggtggtcagagaagtagctttgctgatttcattggactcattcacgtggtaaggaggtggttgggtgtaagatgattcaaggtggctttgtttag

SEQ ID NO: 151212 - DNA, 374 bp, Homo sapiens
tggggaattagttgagacttttattatcagcctatgttcctggtccaagtctttaaaaacaaacttaggtttgacaacggcccttaaaagtgtttgctctggactctgtttctcattgtacagctcacttgcctttttatgaatattaaatcctttactatgtgctctatttccagacccacttctgcatagtcgattttctaacttgccattcccactgagtcttcaggctatagattcctatcaactctagtcctaccgctagctacataagcaagatagtcttcatttcamcctggtcctgtggatattttcagacctagatgactccccacaaattatgaaactccatcatgtggggatgttaggaattc

SEQ ID NO: 151213 - DNA, 344 bp, Homo sapiens
aattatttttcttcagcactttaaatatgtcatctcaccacctcatggcctgtaaggttgctgctgagaagcctgcagccgggcatactggaacctccttacatgagctatgcttcttttctcttgccacttgcagaatcctctatttgttcctgatcattgaattttgattataatattattgcagtcttatttgtattgactcttattggtgacrttcaacttccctgcacttagatatttatattttcccccaggttttgaatgttttctgccattattcctttaaaaaatctttctactccattgtcttcctctacttgctcttaaacactgatgacaca

SEQ ID NO: 151214 - DNA, 578 bp, Homo sapiens
aaggagattttctacagatgcaaatttcaccccatgagagatagcgttgcaggaccacttcaaaatatgtcaaacaaatatattttggagtaaagtattttgatttcatttaaggcttgctatctgtcattgtgatgctataccagaatcaggttggaagttgstatcttattgccataaatcatctgttttgtcagtcttatgatttctattttaatgttaatccaaatcagttgtgcctaaactccaaaatgaaggggtatatgaggcatgtccaacctttcttctttttttcccatcatggttgggaattcagtttctcagctttcctttggtgcagaggggatccattcacttggttggggggtttaggactttatttcttgtttacaacggggataaacttgccgtaggaaatttgtcagttgtaattctgtggggtgtagaaaagccaaagaactccaactttactattaggctgatatcattctccaatatatcctttttaatttttgcaagagtttgctctaggccaagaagggaggcttgcttgagcccaggagttcaagacaagcctg

SEQ ID NO: 151215 - DNA, 578 bp, Homo sapiens
aaggagattttctacagatgcaaatttcaccccatgagagatagcgttgcaggaccacttcaaaatatgtcaaacaaatatattttggagtaaagtattttgatttcatttaaggcttgctatctgtcattgtgatgctataccagaatcaggttggaagttgctatcttattgccataaatcatctgttttgtcagtcttaygatttctattttaatgttaatccaaatcagttgtgcctaaactccaaaatgaaggggtatatgaggcatgtccaacctttcttctttttttcccatcatggttgggaattcagtttctcagctttcctttggtgcagaggggatccattcacttggttggggggtttaggactttatttcttgtttacaacggggataaacttgccgtaggaaatttgtcagttgtaattctgtggggtgtagaaaagccaaagaactccaactttactattaggctgatatcattctccaatatatcctttttaatttttgcaagagtttgctctaggccaagaagggaggcttgcttgagcccaggagttcaagacaagcctg

SEQ ID NO: 151216 - DNA, 574 bp, Homo sapiens
tgcaaatttcaccccatgagagatagcgttgcaggaccacttcaaaatatgtcaaacaaatatattttggagtaaagtattttgatttcatttaaggcttgctatctgtcattgtgatgctataccagaatcaggttggaagttgctatcttattgccataaatcatctgttttgtcagtcttatgatttctattttaatgttaatccaaatcagttgtgcctaaactccaaaatgaaggggtatatgaggcatgtccaacctttcttctttttttcccatcatrgttgggaattcagtttctcagctttcctttggtgcagaggggatccattcacttggttggggggtttaggactttatttcttgtttacaacggggataaacttgccgtaggaaatttgtcagttgtaattctgtggggtgtagaaaagccaaagaactccaactttactattaggctgatatcattctccaatatatcctttttaatttttgcaagagtttgctctaggccaagaagggaggcttgcttgagcccaggagttcaagacaagcctgggcagtatgatgag

SEQ ID NO: 151217 - DNA, 574 bp, Homo sapiens
tgcaaatttcaccccatgagagatagcgttgcaggaccacttcaaaatatgtcaaacaaatatattttggagtaaagtattttgatttcatttaaggcttgctatctgtcattgtgatgctataccagaatcaggttggaagttgctatcttattgccataaatcatctgttttgtcagtcttatgatttctattttaatgttaatccaaatcagttgtgcctaaactccaaaatgaaggggtatatgaggcatgtccaacctttcttctttttttcccatcatggttgggaattcagtttctcagctttcctttggtgcagaggggatccattcacttggttggggggtttaggactttatttcttgtttacaacggggataaacttgccgtaggaaatttgtcagttgtaattctgtggggtgtagaaaagccaaagaactccractttactattaggctgatatcattctccaatatatcctttttaatttttgcaagagtttgctctaggccaagaagggaggcttgcttgagcccaggagttcaagacaagcctgggcagtatgatgag

SEQ ID NO: 151218 - DNA, 419 bp, Homo sapiens
tcacaatatgcacaatggtttgccttttcgttgttttaggacaacttcctgtaaccccaaatatttgtgacattatcttgatatctgacaattccaagacagtttagtttctcatgaatttttctagcataagacatgacatcagatattatttgaatagttttggtaaagaagttgccaattacaaattatgtatatatatatccactactttggtctattataygttcatatacaccatgttttgaattttggtttagaattacaaatttcaatattgagcactttactaatgaaagtttttgttaaaaataattattatatgcaataaattactttttattacataataggagctatctgtgttctaaaaaccaaaacaacaaaacatgatttaaaactacccaaactataacaac

SEQ ID NO: 151219 - DNA, 561 bp, Homo sapiens
tattttttaatgatcataaatctcaaaaaaataaccaagaaaccatatgaacagtaaaaaaccaaatatcttcccctaataagtatcactttctcttctcagtaacaatattcatgagagatatatcacttagttaaaaagttttctcatacagctagaataattaaagacaggttattttaagctttccttatttactcttgtgatttgctttaattggtcactgaaaataacggaaattgattttataattgtgtatgcatatatagtatatacaaatatgtgtatgtatatatgtacacatatgcatgtatgtctatatgtgcatataatattgttgtgaaatcccaacagctaagtttgagtaccctgtgcacacttagctaaacactgacacatcagcccataggagcagagaacggtttacttratttggccaaaacatgaggacagaagaggacaggagaggcaaactctcaaattcgacctccctttgaacataactggggatttctgtaagtaaggtatgtgtgtggaaggtcagatattccaacgatgaag

SEQ ID NO: 151220 - DNA, 535 bp, Homo sapiens
gtacctctagctctggtttgtttttgctagaagttgaagtacatagttttcaaaaatggtttttgcacactagaaaagtattacagaacaaatttgaagtatacaagtaaactcccaacttcaagcaatatttgagtgcatgtcttgtgagactttgttatgatattttataaacaataacatgacttttacaaaaggcaacaaaacacataatacataatttctacattaaaaaatcttcattaacatcaattattctgtytatgttttattacatttatgtaccatataaaccaatgtccttcccttgacatttagatgttttcatttccttttttgtattatatgactttatgtaacatctttatgtaaaattttactagcttatatactgtcttattatatgtagtaagttcacagacaaacacagaatattataacacagtaattgtggtttataaactactcatatcttgagtagaatgactaaaagatgaatctatcaaaaactacaacaatgttttaaaatgtagac

SEQ ID NO: 151221 - DNA, 605 bp, Homo sapiens
gtgcatgcctgtaaccccagctactcaggaggcaggagaatcacttgaatctgtgaggcggaggttgcggtgagctgagattgtgccattgcactccagcctgggcaacaagagcgaaactctgtctcataaataaataaataaaatacaaaaattagctgggcatggtggtaggtgcctgtaatccagctattggggaggctgagacaggagaattgcttgaacctgggaggtggaggttgcagtgagccatcacgccattgcactccagcctgggcaaaaagagcaaaactctgtctcaaaaataaataaataaataaataaatacaaaaattagctgggcatggtggtaggtgcctgtaactcagctactggggaggctgagacaggagaattgcttgaacctgggaggtggaggttgcagtgagctgagatcgcgccattgcactccagcctgagagaaagagcgagtctccgtacgtcttaaaaaaaaaaaagaaaaagaaaagagargaaaaaaatagataacatttgaagcagctccactctgctggaaataaaaacaaaaagatctgatgcttataaacaaatcattattgtataat

SEQ ID NO: 151222 - DNA, 448 bp, Homo sapiens
  misc_feature (1)...(448): n = A,T,C or G
aaccatcacctggaagacttgctaaaagtaaagatgctcctcctcatcaagaataaattagcatctttggaaataacattgcatatatacacatgaaacaaattcctttggtgacagttatatacattaaaaatcaataagcactgcttcaattttttttaaccaaagttaatttttttttgtaattcaatatatattatgaggaaaaagttgtttctcatgagrgacagaatacagagagaggaactgataatgagatgtataacacatttttccattctttatattatttaatacttccaacaatcttagtagtaggtaatgcatatttaactatcttacagataagtctattgatgagtagaaactgtggtcagtatgctagatgactgttnggacagatctgtgttttgtctcatgttatagtgatacgactgtgggtaggtac

SEQ ID NO: 151223 - DNA, 565 bp, Homo sapiens
  misc_feature (1)...(565): n = A,T,C or G
aagacatacccaagactgggcaatttacaaaagaaagagttttaatggacttacagttctgtgtggctggggaggcctcaagatcatgatggaaggcaaggaggagcaagtcacacctttggatggcagcaggcaaagagagagctcatgcagggaactctgccttttaaaaccatgagatctggtgagacttattcactatcacaagaacactacgtgaaagacccacccctacaattcaattactttcctccagattccttccacaacatgcgggaattgtgggagttacaattcaagatgagatttgggtggggacacagccaaatcatatcaacatgtatacaactttgaacaaatgtatggccttatagagccccaggaatatgtgggggcatttttaagttcctactgacatttcattccttgtttaatgttgttcttttaarttttttatagccaaattcttattttctccaattggtatcaccggcttagcaantggtagtagtatacaatcgctgctgattattttcaacaaacatcctgtagatagaactttttt

SEQ ID NO: 151224 - DNA, 565 bp, Homo sapiens
  misc_feature (1)...(565): n = A,T,C or G
aagacatacccaagactgggcaatttacaaaagaaagagttttaatggacttacagttctgtgtggctggggaggcctcaagatcatgatggaaggcaaggaggagcaagtcacacctttggatggcagcaggcaaagagagagctcatgcagggaactctgccttttaaaaccatgagatctggtgagacttattcactatcacaagaacactacgtgaaagacccacccctacaattcaattactttcctccagattccttccacaacatgcgggaattgtgggagttacaattcaagatgagatttgggtggggacacagccaaatcatatcaacatgtatacaactttgaacaaatgtatggccttatagagccccaggaatatgtgggggcatttttaagttcctactgacatttcattccttgtttaatgttgttcttttaagttttttatagccaaattcttattttctccaattggtatcaccggcttagcaantggtagtagtatacaatygctgctgattattttcaacaaacatcctgtagatagaactttttt

SEQ ID NO: 151225 - DNA, 592 bp, Homo sapiens
gagaactgtcagtattttctggtcaattttttctataaacctaaagggctctaaaaatagtctattagttaaataaagttccaactttggacttatcagataaagattttaaattagcttactaagaaactattttaagtaatctcaaatatgctcaaagagctaaagaaaaaaaatagacaaagaactaagggcaatcagtagaatgatgcatggaaaagtggtaaatatcgataaagaatacaaattttaaaaacaaacctaatagaatttctggggtttgaaaagcacaatagctaaaatgaaaattcacgaggtgtgcaacagcaaatttgagcaggtgggagaaaaaaaaatctgtgaattaaagacaggggattgttatttccagtcataagagaagaaaaacaataaacagatcttatgatacctacgggatgccatcaggtacacaatatatacattttgggagttccagaaagaagagaaaggtacaaraagaatatttttttaataatcgaacactttctaagttttatgaatgacatgaatgtgcacataagaaaactcaacatatttaaacaagttaaat

SEQ ID NO: 151226 - DNA, 352 bp, Homo sapiens
tataatttcataagagtgtgatgttttacattatagatcatttttccttaaaacagtgtccatttccaggtgatttagatctatgctctcattacccattcccattccatagaaaatgaattaataaatatttagggagtagtgacaaactggaatacttacaaatattgactataaaatatgtaacacaggatgttatgtattttttattgaagtgaaattcacataacacataattaactattttaatgtatcaaattcagtggcatttagttcgttaaaaatgttgtttagctaccagttatttctggtctcaaaactttgyatcaccccagaacaccctgtacacttt

SEQ ID NO: 151227 - DNA, 503 bp, Homo sapiens
cttcatagaaaagttgaaaagatagtacagaaggtttatatatttctccatccaatccccccaatgctaacatcttatattactacggtaaatttgtcaaagctaagaaattaacataatacaatgttattaactgcattctttgtttgcaattcactacttttcccatgaatttcctttttgctactctaggatttaatccagggaamcatgttgtatttattcaaatcttctgagttcaaatctttggtctgtgactgtcccatattcttctgtaatttttcatcattttgacagttttgaggaatatgggtcaggtattttgtagaatgttctccaatttaagtttatctcatgttcttctaattgctctactgagattttttaaaaagaatgtcacacagataaaatgccattttcatcatggcatatcagagagtacatgctatcaacatgacttatctctagtgatattagccttgatcactcagttaagataggtt

SEQ ID NO: 151228 - DNA, 503 bp, Homo sapiens
cttcatagaaaagttgaaaagatagtacagaaggtttatatatttctccatccaatccccccaatgctaacatcttatattactacggtaaatttgtcaaagctaagaaattaacataatacaatgttattaactgcattctttgtttgcaattcactacttttcccatgaatttcctttttgctactctaggatttaatccagggaaccatgttgtatttattcaaatcttctgagttcaaatctttggtctgtgactgtcccatattcttctgtaatttttcatcattttgacagttttgaggaatatgggtcaggtattttgtagaatgttctccaatttaagtttatctcatgttcttctaattgctctactgagattttttaaaaagaatgtcrcacagataaaatgccattttcatcatggcatatcagagagtacatgctatcaacatgacttatctctagtgatattagccttgatcactcagttaagataggtt

SEQ ID NO: 151229 - DNA, 525 bp, Homo sapiens
agttcatcttgttcccttgaaaagcagacaattctcttatatactttggactaaaattactgccttgatatatccactgtgaaataatatgtgtgaaggtcaaaactttctttaatataccttttttcccctgtggacactacccaaatgttggccaaaattattttttatatgctaattttaaaatcatgagactatgtagcaatcactatatacccaatggattttaaacatattaatattttgttatatctrtttcaggcttcattttgtaaaaataaaaattaacacagatacagttaaaatgcctctgagcatattcatatatttatatttattaatattatccttgtattagttaattttcatactgctgtaaagaatacctgagaatgaataatttatgaagaaaagaggtttaattgactcacagttccacatggccgcagaggcctttggaaacttataatcatggtagaagataaaggggaagcaaggcacgtcttacatggcagcagctgagag

SEQ ID NO: 151230 - DNA, 567 bp, Homo sapiens
accacaggcagctgcagctttggagatggccgcctctcccccagggaaatcacaggcttaggcagattctagccaaatgggtgttgagaatctgtggggctccatggttgggcccarggccccagtgtcatgggctcctgagtgggttcttccaatccatgggttgcacagttctatggaaaagcttggttttccaggctgcatagcgtgctcactcaccacctcccttggctgggggtgggggctctcttgccccctgtggctctcaggtgggctgctgcaccacactgctcttccttcctcctcatgagtcaagcctgttgcctcgtcagccctaatgacagaaactggataacttggttgccaatgtaggatttgcacactgttttggatttttcgatgggagtctctgatcactactgtttctagttggccaacttggccccacctccccatgtgtgtcttttaacatttttatttggtccaataaaatgtttgcaaactaatgtctcataattaaagaaaaaatactgatctgtgaaatgtatcagtttggcggtgcagtgc

SEQ ID NO: 151231 - DNA, 567 bp, Homo sapiens
accacaggcagctgcagctttggagatggccgcctctcccccagggaaatcacaggcttaggcagattctagccaaatgggtgttgagaatctgtggggctccatggttgggcccaaggccccagtgtcatgggctcctgagtgggttcttccaatccatgggttgcacagttctatggaaaagcttggttttccaggctgcatagcgtgctcactcaccacctcccttggctgggggtgggggctctcttgccccctgtggctctcaggtgggctgctgcaccacactgctcttccttcctcctcatgagtcaagcctgttgcctcgtcagccctaatgacagaamctggataacttggttgccaatgtaggatttgcacactgttttggatttttcgatgggagtctctgatcactactgtttctagttggccaacttggccccacctccccatgtgtgtcttttaacatttttatttggtccaataaaatgtttgcaaactaatgtctcataattaaagaaaaaatactgatctgtgaaatgtatcagtttggcggtgcagtgc

SEQ ID NO: 151232 - DNA, 645 bp, Homo sapiens
gatagaggtgaagggttaatttacagctggatttgataagaaccacttgccrctccccacaagatcagaggggatctttaacataacacagaagggagagctccagacatgtgggcagtcgctggaatatctagcaccagatatatgagtgagagacactttctagccagaagagagctgggataaaagagtaggaagagccttctcacagactattgtgtgaataagaatgacagatatgccctgcttatacatattcatgcattcattcaacaagtatgtattaaacatctagtatgtgtcaggcactattatataactagggacacaaacaaaatactttgccctcatagagattacatgccagtgagacagtcagacagtaaacaagtgaatatataagaaatatacatttcattaggttgtgatggatactaacaaataaaataaaacatagcaagtaaataagtattatgggagataattgtatttttgtataggttggccagagtaggcctcaaagaggagatgacatttgagcaaaatctaaaagtagttgaaagagagtcatgcaaatatgtgcagcaagagaattccagttagacaaacagccagtgcatctggcttcctaaagagggcatgacc

SEQ ID NO: 151233 - DNA, 531 bp, Homo sapiens
agaattcatcaggacttttttgcaacattttatagttgaacatctagaataatttttagtttttaactttagaggaattattacttagttatttctttttattctgctactttcacttagttttattttaactcttttatttaaagagtatataaaaaaaagctttaatttatttttcctgaagcaatgtttgaattacctcgtacttcaaggtttgaggttactgcaagagagtgagaagcactgtcaccttagccatttgctaacaytgagaaactgatgtgattttgtcccttattcatttattcacccctcgtaagagtaagcgggagaaagaaaaaaagtaaggaaagggttctattatagtttctactcgtaattaagagagcagaaccagactctccaaaatttgtatagatatatttgatttcactagatggtgaatttcaagaaatcaagcatattggctcaccattgtatccccagggcctacctagtataatgccaggtacctagcaagtatgcagagtg

SEQ ID NO: 151234 - DNA, 572 bp, Homo sapiens
aagcttttatgtttaaatttttagcatcgatagcagtgttgtccagtagaactctgcagtgaagggaatgttttatatckgatcatgtggctacttagcacttcagatgtggctagagtaactgaggaaccaaaattttaattttgtctaattttaaataatttaaatgcaagtagccatatgtggctagtagttaccatattggacagcacagctctgtagactcaactgtaaggagtgttctttctttctttctttctttttttaagacagtctcactctgttgccaagctggaatgcaatggtgtgattatacatcactacagcctcaaactgtggggttcaaacgatcctatgtcctcagcctcctgagtagctgggaatccaggcacatgtcaccacacctggctaaagaaattttcttagaaagtattttttaaaaggaattgcattaaagtttaatgagtgaaaacaaagtttatttggggggtatccatttttctttgtcatattctattttttaaattttaccattatttttattagatatagcatctcattatattgcccag

SEQ ID NO: 151235 - DNA, 572 bp, Homo sapiens
aagcttttatgtttaaatttttagcatcgatagcagtgttgtccagtagaactctgcagtgaagggaatgttttatatctgatcatgtggctacttagcacttcagatgtggctagagtaactgaggaaccaaaattttaattttgtctaattttaaataatttaaatgcaagtagccatatgtggctagtagttaccatattggacagcacagctctgtagactcaactgtaaggagtgttctttctttctttctttctttttttaagacagtctcactctgttgccaagctggaatgyaatggtgtgattatacatcactacagcctcaaactgtggggttcaaacgatcctatgtcctcagcctcctgagtagctgggaatccaggcacatgtcaccacacctggctaaagaaattttcttagaaagtattttttaaaaggaattgcattaaagtttaatgagtgaaaacaaagtttatttggggggtatccatttttctttgtcatattctattttttaaattttaccattatttttattagatatagcatctcattatattgcccag

SEQ ID NO: 151236 - DNA, 552 bp, Homo sapiens
aaggagtttagtgactctacacataatacctttgactatatgtggagaaccaaggaacacaatgacattggttggttggttgcttcaaaattcactggacgaggtgatgaaagaaaatgatgaactcagggattctaactcccagtttcagaagcagatactgagcctcaaatctgctaatcttgccctgagtgagagtcttatctcctgtagagaaagagctgaaattgtggaaaatcagacacaagctcttattatactagkggctgacctgcaatgaaagatgcatgcacagcctcaccaggtgtctactgttaaagtgagggtattgattgaaaaagaatagaaccatgcaacttgcgatcaatatatggaaggaccctgatgaagctgggtacactgagcttgtaaactctgatgaaacttttagccagaagaagcagcttctccatccccagtagtggcaacatcccctccctgacccatgctgccatcagcctttccacctttgcctgaggagataaaccctgtgctgcctgagacaacaatgat

SEQ ID NO: 151237 - DNA, 591 bp, Homo sapiens
actctacacataatacctttgactatatgtggagaaccaaggaacacaatgacattggttggttggttgcttcaaaattcactggacgaggtgatgaaagaaaatgatgaactcagggattctaactcccagtttcagaagcagatactgagcctcaaatctgctaatcttgccctgagtgagagtcttatctcctgtagagaaagagctgaaattgtggaaaatcagacacaagctcttattatactagtggctgacctgcaatgaaagatgcatgcacagcctcaccaggtgtctactgttaaagtgagggtattgattgaaaaagaatagaaccatgcaacttgcgatcaatatatggaaggaccctgatgaagctgggtacactgagcttgtaaactctgatgaaacttttagccagaagaagcagcttctccawccccagtagtggcaacatcccctccctgacccatgctgccatcagcctttccacctttgcctgaggagataaaccctgtgctgcctgagacaacaatgatgtcctcccctgatgcagttgccaggcaagataatgttgattctcctcaggag

SEQ ID NO: 151238 - DNA, 593 bp, Homo sapiens
taggtgacaatacattgcagggctggggcaaagttctccagaaggctgtgtatgctctgaaccagtgtccgatatatggcactgtttctcctgtagccaggtttcactggtccaggaattaaggggtggaattggaaatggcaccattcaccatcacccctagtgatccactagcaaaatttttgcttcytgttcccatgacattatgttctgctggcctggaggtcttagctctggagggaggaacgctgccaccaggagacacaataacaattccattaaactagaagttaagattgccacctggacactttgagctcctcttacctttaagccaacatgctaagaagggagttgcagtgttggctggggtgactgatctggactatcaagatgaaatcagtctactactccacaatggaagtaaggaagagtgtatgtgtaatacagaagatgctttagggcatctcttagtattactatgccctgtgatgaaggtcaatgggaaactacaatagtccaatccaggcaggactacaaagggtccagatccttcaggaatgaaggtttgggtcacttcaccagggaaaaaa

SEQ ID NO: 151239 - DNA, 598 bp, Homo sapiens
tctccatattctctattgtcttttgcttagactccatttaggccaccatatttgaaatttcttatctcttaaatttccttttatattttccatattcttttctcactcttttctcattgtcttggaatctgctctctcttttgattctttaattctctgtcaaatgtgtttaatatgttgctaaccaatccactgaggtattattattattgttgttattcttattggtaaatgtttaagttaactgttaatattttaagttctcagatttggtgaagagctgaagtttggtaatkaatttccaagtgttcattatattttaaagataaaataaaataaaacaggccattcttgggtaaatgactctactgtgtcataattcaagggtcatgattaagccagttttatgcacctaatttccattaaaaagtaagtttcaaatagtctcagattttattttatttttttaagagatgggctcactctgttgcccaggctggagtgtaggggtgtggccatgactcaccgcagcctataactcctgagctcaagtgatcctcccacctcagcctcccaagtagctgggactaccaccatc

SEQ ID NO: 151240 - DNA, 552 bp, Homo sapiens
tttaacagtcaagtgggacttagaccgcctaggtttaggtctcaatacctccactcattggcagtgagaccttgggggaagttacttaactctttaattctcaaagttatcatctataaagaataatacctaactattggggatgatgtaaggatgaaaagcaatcctataggtaaaatgcttactaattacagtgcttggcacatttttttaagtgcccaataaacatattagttagttytcttttcttttttttaaagttagatacgttttaaggtctgcttagcagccctctcccttcatctgagggggcacatgactttggcacatgattcaggctcagtcaatcagagtgtcccatcctgagccaaagtgattaatttaggtggagcaagtgactacggggctccattattctggatcttttttttttttccattaaccaatgtagatgctctatacagcttttatcattaataagttacctagtatatgccatagtgatgaataattagcttatatttttatagaaaattctggtaaataacagtg

SEQ ID NO: 151241 - DNA, 552 bp, Homo sapiens
tttaacagtcaagtgggacttagaccgcctaggtttaggtctcaatacctccactcattggcagtgagaccttgggggaagttacttaactctttaattctcaaagttatcatctataaagaataatacctaactattggggatgatgtaaggatgaaaagcaatcctataggtaaaatgcttactaattacagtgcttggcacatttttttaagtgcccaataaacatattagttagttctcttttcttttttttaaagttagatacgttttaaggtctgcttagcagccctctcccttcatctgagggggcacatgactttggcacatgattcaggctcagtcaatcagagtgtcccatcctgagccaaagtgattaatttaggtggrgcaagtgactacggggctccattattctggatcttttttttttttccattaaccaatgtagatgctctatacagcttttatcattaataagttacctagtatatgccatagtgatgaataattagcttatatttttatagaaaattctggtaaataacagtg

SEQ ID NO: 151242 - DNA, 549 bp, Homo sapiens
actgtttttattagtattatttttatgaattctaattataaaggcatctgatatttattttatccttcataagaagttcaagtgattcagttaaaatttcatttaggccagtgcctgtaatcccagcactttgggaggcagaggtgggtggatcacttgaggccaggagttggagaccagcctggccaacatggtgaaacctcatctctactgaaaatacaaaaaattagttgggtgctgtgrcgtgtgcctgtaatcccagctacttgggaagctgaggcatgagaatcacttgaacctgggaggtggaggttgcagtgagctgagatcacgccactgcactcctgcctggttgatacaaggagactctgtctcaaaaaacaaaacaaaacaaaaaaacaaacaaataattcatttaatgcttatgataactttgatgaagtgggtgtaattattcccattttgcatatctggaaaccgagtttacagaggcacaaaactgagtttagattaagcaatttacttattcaagtttatacaatgagtatg

SEQ ID NO: 151243 - DNA, 563 bp, Homo sapiens
ttctgaaaaatcacccctttccagcccagagagccaaagctctgaagaaatgtaccaggatctctgctgacacatggacacctgtggcttgtgctacatgttctgaaacctgagagagtgagcagccactctgcctgggaagaaacatcacagtaggcattaaaaatggaattgaagaattagaaaatctttgtcatactttttatattgggatcaggttgaagatggttttgatttgataaaaattttaaaaagactgctcacaatgatgccttatgtgttaaaaaaaaaaaaaaaaaaggacattggtgtaagagagagaacctcaaagcagaaaaactttcttttggtatrttcatgatctttcctactacaggataacttctttcagtttttcttacccaacaagtcacttttttaaaattggaaaagtaaatgtaatatctagattataaacttagcatgtgcctcagtggtcacgtgagaggcagagatatcctctgtttaaaacatcctggtcagctggaaacactgagtctgaatacagaatatacatattgcaa

SEQ ID NO: 151244 - DNA, 591 bp, Homo sapiens
ttgtcttcccagtccattatagggtccaaggaccttggggtcaggagggacctggggggccctcggatgcaatttttttgcctgggcaagaatcctgtatatgacagccctgagagatggatatatattgcacccttgctgggctcatstctgacccatcttccattgtctctatcctaggacagatccactgtcttagcctttcacccacatccttaccttgctgcttcatagcagtctagtgtagtggctaagactttagactatggcaccagatttcatggcttctaatcctgactctaccatttacaagctgtgtgattatgggcaagtttgttatcctctctgtgcctactttggcatatggaaaatggagattatgcatatactgcctactgtgtttacactatattgctgttagaaagatgaaatgggttaatatgcataaaacactgagaatactgcttagcaagcattagcaattattaacttatgctcgtacattctttcctccctctcccaagtcacgaactttttccatagccctgcctgattttgactcccctcaccttccccctaacgatatgccca

SEQ ID NO: 151245 - DNA, 538 bp, Homo sapiens
ctgtctaataaaagttatccaaataaaataactgctggtagactaccaggttacataaagcatttgcttgaattaggcagcccaaggaaagttaacaaaaagaggtcataaatcacctcctttgggaggtaagcactttaagacagcagagactcagttggagggttcaagaatctctgtgatagtctatccccagtcctgagaggatcatatcacttcatggcccarcatccttcaacaagtaaaggatcccacctcaggcaaagggctgaagcagcaataaaacatctcaatattgcgtggtattctatttgatagggaataaatggactgcgaaactctttagtgtgttttaggaatttcccattttattataattttaaagtgtaatgtagcctagagagaaatatggtgagaaagagccttgcaaactctggcaaataaacatgataatagttcttccaatctttcatcaaaagatccttaggtcagtgtgatattatacacatgtataggtttttataatgttggggcactt

SEQ ID NO: 151246 - DNA, 547 bp, Homo sapiens
atctcaatattgcgtggtattctatttgatagggaataaatggactgcgaaactctttagtgtgttttaggaatttcccattttattataattttaaagtgtaatgtagcctagagagaaatatggtgagaaagagccttgcaaactctggcaaataaacatgataatagttcttccaatctttcatcaaaagatccttaggtcagtgtgatattatacacatgtataggtttttataatgttggggcacttgaggcatcagaagcaggtcttagaaacgraatctctctctgtgactttttcctgccctccttttacctaaggcaggactctaatctgactatgggtcataagacctcattccagagggtgtcttgctccatatcctggaggaaggaatgctgcacagaaatgccaagaagaatctgtacagacagatcttgctgggtttaggtcatacctttttgtccagtcatatttctatatgactgtcagtcactcctacccaatgatgtctccataaaaggcccaaggcaacagagtttgg

SEQ ID NO: 151247 - DNA, 416 bp, Homo sapiens
caatctagcaaacatacaaatttgtacttctttgctccayagctactaagcaatagctgttgaaatcattaaggtacaaattgaggacaggtggcacacagtggctcctgcctgtaaacccagcactttgagaggcccaggctggcagattgcttgagctcaggagttcgagaccagcctgggcaacatggcgaaaccccatctttacaaaaaatacaaaaaattagctgggcatggaggtgtgcacctgtggtcccagctactcgggaggctgaggtaggaggattgctcgagcctaagaggtggaggctgcagtgagccatgatagcaccatagcactccagccagggtgacagcacaagaccctgtctcaaaaaaaccccaaaccaaaaccaaaacaaaacaaaacctgagga

SEQ ID NO: 151248 - DNA, 432 bp, Homo sapiens
tcactaattatattcccaatctagcaaacatacaaatttgtacttctttgctccacagctactaagcaatagctgttgaaatcattaaggtacaaattgaggacaggtggcacacagtggctcctgcctgtaawcccagcactttgagaggcccaggctggcagattgcttgagctcaggagttcgagaccagcctgggcaacatggcgaaaccccatctttacaaaaaatacaaaaaattagctgggcatggaggtgtgcacctgtggtcccagctactcgggaggctgaggtaggaggattgctcgagcctaagaggtggaggctgcagtgagccatgatagcaccatagcactccagccagggtgacagcacaagaccctgtctcaaaaaaaccccaaaccaaaaccaaaacaaaacaaaacctgagga

SEQ ID NO: 151249 - DNA, 419 bp, Homo sapiens
ccaatctagcaaacatacaaatttgtacttctttgctccacagctactaagcaatagctgttgaaatcattaaggtacaaattgaggacaggtggcacacagtggctcctgcctgtaaacccagcactttgagaggcccaggctggcagattgcttgagctcaggagttcgagaccagcctgggcaacatggcgaaaccccatctttacaaaaaatacaaaaaattagctgggcatggaggtgtgcacctgtggtcccagctactcgggrggctgaggtaggaggattgctcgagcctaagaggtggaggctgcagtgagccatgatagcaccatagcactccagccagggtgacagcacaagaccctgtctcaaaaaaaccccaaaccaaaaccaaaacaaaacaaaacctgaggata

SEQ ID NO: 151250 - DNA, 574 bp, Homo sapiens
ttggcaggcttcagacaatcaatccaatgcacccaattcctttgggtgatgcgacttgttgctgggccacaccatccaatcacgaccctcacacagaacacggctcccaagcctgcctcccacccacaaaaaaaaaaacaaccctaacgaaatgtgtccctaaggtgctcaggaagggtattctcattcttctgsgggtagcccagatgtcagtgtccagaggcctgtctctggcgcttccctttctgcagagataaaatttctgcccccctgcctgggcagtgggaggagtgtcttgattgctaggaattctgtgggaagcagtgagtgaagtaagggtcaatgctgtctctaacgactttcaatcactcccttcttgtccctgggtcacgctgggctgtatctgagtgcggtgcctctccagaattcctgggctgccctctcttctgcatccccatatcatgggtgtctatatgggctcactccagcctggaacatcagtgaccacttctttctcctttcggcccactggaagcccactgtcttttccaccaatggctaccctctcattctc

SEQ ID NO: 151251 - DNA, 574 bp, Homo sapiens
ttggcaggcttcagacaatcaatccaatgcacccaattcctttgggtgatgcgacttgttgctgggccacaccatccaatcacgaccctcacacagaacacggctcccaagcctgcctcccacccacaaaaaaaaaaacaaccctaacgaaatgtgtccctaaggtgctcaggaagggtattctcattcttctgggggtagcccagatgtcagtgtccagaggcctgtctctggcgcttccctttctgcagagataaaatttctgyccccctgcctgggcagtgggaggagtgtcttgattgctaggaattctgtgggaagcagtgagtgaagtaagggtcaatgctgtctctaacgactttcaatcactcccttcttgtccctgggtcacgctgggctgtatctgagtgcggtgcctctccagaattcctgggctgccctctcttctgcatccccatatcatgggtgtctatatgggctcactccagcctggaacatcagtgaccacttctttctcctttcggcccactggaagcccactgtcttttccaccaatggctaccctctcattctc

SEQ ID NO: 151252 - DNA, 475 bp, Homo sapiens
atgataattactctgagcagtgacagaggacagggacttcaaaaatatactscaataaataaaacaaaagcatactgttttttaaaaaagtgttagatacaaatagcctttacattacccttcaaaagtcagtttctgtgattctatactgggatcctatcacaaactgcaatttctacacaggcccagtaagtcatgtaaacaggtgtacttgggtggccataagacaaatgatggatactgtggtaacctggagcccttatgctgctggtcatgtgggaatgtggacccagtgttgacagacttcccagtatttctaggaaaacccaaaatctggattttcccatttaaaaatattagacactaagtcaaaaaaaatatttaaaacactgtgtgggacaaaatgtaactttgggagactgtacactgtcaagagcatacatggctttacagccagagctctgggttcatatcc

SEQ ID NO: 151253 - DNA, 574 bp, Homo sapiens
agaaaatatatttaattcctgcatttgtcattagctaaatgtgtaaacttaagaggaaatcacgtaaattatctggattacttttctcattgataaaattaggcacattgatgcaagaatacttaaggcaccctaagattattctcataaaaaactgaaagacagttgacagacaaaaacactgacgttagtttattctattcctttatttctcctttgccacaaacaagtgggcaataacattttaaatttaaaattagcaagactgaagacatatagactaatttggtataatttgcttagtatgttatactgccatgtaaaatcatttacaattaatgcgaaaaaagcaaaaaccacccacttccttcaaacatctagaagaggttctataatctgattccaagctttaaaatgaacacacatacatcctgtatggcacttttaacactaytaattgctctacgttactgaaatcctttcattctgttgcttctgggttcttacacttccttaagttagtcccttcttttcaaatacctccttggagctttgctcactacataaaatgtta

SEQ ID NO: 151254 - DNA, 478 bp, Homo sapiens
ccactaggtatctaatctacaaaaatactccatatatgagtaaagataaatgaacagagatgctccccgcaatagtattttttgtttgaaactatggaaacacrctatagggaacatggttataatgatccaaacaataccttactttaaatgtccttacacagaacaatggcctccacctattactaagtggaaaagagcagttatatgttggatgttctaattcaactaactttgtaaaattccataatgctgtatttatggtgtgcatctctcttatctttacaaaactaagagcttatttacaggcattcttcttagtaccaatgttttatctctaatttctcctgtctataacttcccattctaacatgtcactggtaatgatttgcaggaaattagcactattataattccatcaaataatttcaatgagtcaattgtctaatcacacatatgcaccacaattagggctatc

SEQ ID NO: 151255 - DNA, 621 bp, Homo sapiens
gggagtagtatccagaatatacaaggaactcaaacatctcaacagcaaaaaaccaatgcagttaaaatacgggcaaatgatctgagcagacatttctcaaaagaagtcatacaaatgtccaacaaatatatgaaaacgtgctcartatcactaatcatcagcgaaatggaaatcaaaaccactatgaggtattagctcaccccagttaggatggctattatcagaaagacaaaaaataacacatgctggtgaggatgcagaaaaaaagggaacttttctacacagttggtgggaatttaaactagtacaatctctctggagaacagtatggaggttcctcaaaaaactacaaatagaagtaccatatgatccagcaatctcactacggggcatttatccaacagaatggaaatcattatatcacagagtcatctgcagccccgggttgattgcagctctgttcacaataaccaagacatggaatcaacctagttgtctgaccacacatgaatggataaagaaaatgtggcatatacataccatggaatactattcagctataaaaaataatgaaatcctattatttgcagcaacatggatgaagctagagtacattatgtt

SEQ ID NO: 151256 - DNA, 621 bp, Homo sapiens
gggagtagtatccagaatatacaaggaactcaaacatctcaacagcaaaaaaccaatgcagttaaaatacgggcaaatgatctgagcagacatttctcaaaagaagtcatacaaatgtccaacaaatatatgaaaacgtgctcaatatcactaatcatcagcgaaatggaaatcaaaaccactatgaggtattagctcaccccagttaggatggctattatcagaaagacaaaaaataacacatgctggtgaggatgcagaaaaaaagggaacttttctacacagttggtgggaatttaaactagtacaatctctctggagaacagtatggaggttcctcaaaaaactacaaatagaagtaccatatgatccagcaatctcactacggggcatttatccaacagaatggaaatcattatatcacagagtcatctgcagccccgggttkattgcagctctgttcacaataaccaagacatggaatcaacctagttgtctgaccacacatgaatggataaagaaaatgtggcatatacataccatggaatactattcagctataaaaaataatgaaatcctattatttgcagcaacatggatgaagctagagtacattatgtt

SEQ ID NO: 151257 - DNA, 595 bp, Homo sapiens
tagaaacagccaggcttcctgagagaatgttccattaaggggaaaaggaggttggctgtgcgtgaccaggcagttctctcccttggggtctctcgtgagcttactgtcagatggtggtacagccacagaagtggctccataccatatggctggctgtgccaagcactcagaggtctcccccaacaccatgatgtcaggttggagggactactggtttgagataggaggtgggacgaatgccaaaaatccatgccaaccctgcaaccacagtgccaaaaagctcatccttcagcatgctttgtggaaggattgaaggtttatggcaattaaagattgcaacacttttgagtcccaaaaaatctgcgtgtgattacacccccgactgaacatgatgaggggctatcctctgaattagcagaagcctaacttgctgygtgcagtggcagccacagcttattgctctggtaccacctgccataaatatacaagttgttttacctaacaaagagacagtgatattgggggttcatgccaccactgaccccactggccagtgggagaagactaagctctggctcaaccttcagtagacaca

SEQ ID NO: 151258 - DNA, 434 bp, Homo sapiens
gcttggaaaaaagtttgcttgagtgtttctggagttgcctttactctaggaatacaatgatcctactcccacaatatggctttctttggtttctaatgaatgcccaagwtgttcattgaggtgtctctctcagagtgatcagaactcaaatatcccccagtgctatgtgagctctggcatctccattgagctcacagttcccctgcagttgttgtttccccagtagctgtcctttatcctcctttctttgtggaacctctccctgtgcatacgcagctttctatttagccaaagccttgaggagacttctatacatattcctggatctcctttctccataaatcccttctcaatcttagccagcctagaacacctcagctgcctgaggcatcacaaacttcagtctctctcctcagttcagcaagactgctatg

SEQ ID NO: 151259 - DNA, 530 bp, Homo sapiens
agatctccaggtgatccacgtacacktcaaactttgaaaagcagtggtttgcagaacaaaaaggattcagcttctgatatggtttggatttgtgtctgtacccaaatctcatgtcaaattgtaatccccagtgttggaggaggagcctggtgaaaggtaattggatcacgggggcaaacttcccccttgctgttatcatgatagtgagtgagttctcatgagagctggttgtttaaaagtttaaaagcacctcccccttcgctctctcttccaccttctccagcaatgtaaaatgaacctgcttccccttcatcttccaccatgattataagtttcctgaggaatctccagccatgcttcctgtacagtctgcagaattgtgagtcaattaaaactgttttctttatacattactcagtcttaggtgcttctttatagcaatgcaaacatggactaatatagaaaattggtacctagcagtggggcattgctataaagatacctgaaaatttggcaatgactttggaact

SEQ ID NO: 151260 - DNA, 599 bp, Homo sapiens
tcctgtaacctccacacacagtttacccggttaataacatctcgattatatggtacatctgtcacaattaatgagccaacactggtacattaaactaaagtgcacaggggtcctctcacagataccatattatgtttcattatcatgtagtcctaggtacctcttgactctaacagtttgtcagggtttccttgttttttgatgacagttttaaggagtagtggtcaagcgttttgtagaaaggacatcaactggggtttttctgatgtttttctcatggttagactaaggttatgggtttttggaaggaagaccacagaggtgaagtgcccttctcatcacatcctaccaagggcacgtatcactgttggcattcaccttgaccacctgcctgacagtgtttgtaggtttctcactgtaaagttactcttttctctctttrgtacactttggaaggaaattactatacaatgagcagcctgcatttgcagagtggagagttatgtctcacttccttgaggcagggagtatctacctaaattattcagaattcgtgagcaggtgagctttaggaccattttttattatcgtctaccatg

SEQ ID NO: 151261 - DNA, 497 bp, Homo sapiens
gtatttagcaactactgaagaggggtttaaagtatatcaacattttacacgtttcagacatgttgatagttggcttttatgaaagtttctcaatttgtagagttttaattatggcaacatgaacacagtctttaccagaatgaatactactagagagaaatgaatgtacatgactatgttttttgatggggaagggggaataggttactttttaaagactgataggtttatagtctgtgtatcatcccagcttcttctatttgaaatctgggcttattgctttgctacaaaaaagtttctgtgcaggggtcactgtccatacaaaatacttcaccatttttatatattttgaatttatayggaaaagtttactaacatctatttctgaacaaatttcagtttttgcactttcaactgttcatgttcctcttcttgaagtatatgcaaaatgagacacatcataccataaacatagggtatctggattttctctgcaa

SEQ ID NO: 151262 - DNA, 497 bp, Homo sapiens
gtatttagcaactactgaagaggggtttaaagtatatcaacattttacacgtttcagacatgttgatagttggcttttatgaaagtttctcaatttgtagagttttaattatggcaacatgaacacagtctttaccagaatgaatactactagagagaaatgaatgtacatgactatgttttttgatggggaagggggaataggttactttttaaagactgataggtttatagtctgtgtatcatcccagcttcttctatttgaaatctgggcttattgctttgctacaaaaaagtttctgtgcaggggtcactgtccatacaaaatacttcaccatttttatatattttgaatttatatgkaaaagtttactaacatctatttctgaacaaatttcagtttttgcactttcaactgttcatgttcctcttcttgaagtatatgcaaaatgagacacatcataccataaacatagggtatctggattttctctgcaa

SEQ ID NO: 151263 - DNA, 513 bp, Homo sapiens
tgaggacgaccagaagtcactctcgtggccaccttggttttggtgggttttggccagcttctttactacggcctgttttatcagcaaggtctttatgacctgtattttgtgccaacctcctatctcatcctgtgacttagaataccttaactgtctggaaatgcagcctggtaggtctcagcctcattttacccagctcctattcaagatggagttgctctggttaagcacttttgacagttggaaattcatcctggaaacacttcgacctcaaggtgccttycccctctgtacaaccaggtgactgctcctctccctctctccagaggcagcctggaagtgtattttctggaacaagtaaggcagaggcctctgggccagggatcaccaggcttgagtgaaggtgttagtcacgctgaaaacagcagattcagtagaaacttgttctaaaggttgagccctctctcctcccagcctcttcctctcactgcctctcaaaacaccagtagacag

SEQ ID NO: 151264 - DNA, 602 bp, Homo sapiens
ctttgtcacagatcaaacgccaatgccagcagctccttcacagatctgtgccagtgtcacactgcactcaggggactctttgtcagctggtctaacaaatggtaaaacaaccccaaataaggacaaacattaaatcaaagaccgccaaggggtcttcctgtggttctggaaaactgttttgcagctccattctgcaycgtggccaggatgagccactgggtataaaggactatgcatcagggctgggactaggctgaggcaaggtttttgcctcagacacaacatttaagagggcaccaaaaaactcagccatcaagatgactgatactgtaattcaatattttttaaaagtcaaaatgaatgcaaaacaatcatgataacaaaatgccaacattttgaagaaagacaggatcaatactactgatttttcttgttgcctaaggttccaatgtggctcagtacaccactgttactgatcctgtctttctttacaatgttgggcattttcctcatcatagattattttgcattgattttaggttttataaatagtgccttaaaatgttatttatcttgatttccaaaattgtgggtgccccatt

SEQ ID NO: 151265 - DNA, 404 bp, Homo sapiens
gctagccagctcctcagtgctactcatagtcatagtaacacccagtgggtaggtaaactcatcctgttcatcacctctcaacytcactgcacacagtgtggactaatgaaaatggcatcgtttattttgagaaaatagcattaaatcaatatatagtcacagaattctgaaactggagacagtagtgtgctcataaacacttaacaaccaggctgggtgtggtgactcatgcctggaatcccagcactttgggaggctgaagcaggcagatcccttgagcccaggagttcaagaacagcctgggaaacatagggagaccctgtctctataaaaaatttaaaaaaaaaacagctctcaaaggaaaaaaaatgaaggtatgcacatctatttgtaagattataaat

SEQ ID NO: 151266 - DNA, 552 bp, Homo sapiens
tacagtaataggtgattcttttttgcaaagttatatcctaaataaggactttcaacctgggggattgggtagggaggaggacagagagagagtattaggaaaggagggactatattataacattcatctcaaatggatctgtcattttttaaatattaaacactgcagtcttaaggaattctgaattcccattggggaaggatawtacgtaactgtaactgaaattattggggacatcgactcaactatatagaattttgtaaatttaatacttttgctgctttctactgtcaggtgtccaatatttagtttacatgctgtggtacaaagtggtgacacatatgctaatttagtctactgtttgttaggtagcttttgggacactgatctcttgtggcagtacagtatgtacctataccttggaactcagtggcagcaatgcgtacatatcttacagatcaaacaaagagtattatttgtttcttttcacctgaagaaaggtctaaaaaccattctctgtaggagtcggccatttcacttagaaatagcata

SEQ ID NO: 151267 - DNA, 592 bp, Homo sapiens
gttattctcttcttggggtagtttgaagattagaaataatgggtgtatcacagtgccagatgtattgcagctggtccatagcgaaggtagtcatcatttttagtctctgttaatcttcagtgaatgaaaatgacttttttggacttaagttcatttttctggcactatacctccattcatcaccaggattgtcatgttcttctgaaagccctgagttccattttttgtagcacttgtattttgaaattatatgtttaattatgtgattattaatatctgccccccaaccccagacggtaagcttcatacagtcaggagtcatgtctgattttgctgaccactgtcttcctactgtctagcacagtgcctgcyacacaattgggctctactgaatgttaaatgaaataaattcttaatacctaatactgaaattacattgtgatattgatggctgcctacatcaaagtgggaatactttctttgaagaattaaaatacatgtaatatgaactgtgtaaaatctcagtgcttgaactcactagtcttctgtggtcacatattgacactatgctgattgaactccttagaaatgg

SEQ ID NO: 151268 - DNA, 485 bp, Homo sapiens
tttcacaaatctcatacacaagtatgcccacggtgtaagttcattgtcgttaactgtttagctcttttagactacagcacatcattttagcttctgttagtgatctgtgctatgtgctggggtgccacacacctacacacacacaagtttagttctcagttctgcttrataactctgggtttgagcaagtttcttaatatctcagcctaagctttctcttctgtaacataggcctgtatttatcacatagagttgatatgaggataaaatagctcacagttaaatgacatttcctatgtacaagtacagttttgagggctttgtgtatattaacttatttaatcaccgtagtagtcttataaaatatttttttaatccattttaccactggggaaacagaggcacaaaatgatttaggaaatttgcccagcatcacacaactagcaagaaggggaattggaattcaaatccagtcaattttgctc

SEQ ID NO: 151269 - DNA, 441 bp, Homo sapiens
ttctctcagaccacctgtccctcacattttcaccagttctgggtcttgttattctttttactctttgtcagtcaggtgattgaaaaatgtacatttttttaaaattggcatttattagtgagcttgaggatgtttttcacagtcatatggaaacagttctgcttcatgaacaagaccttggggccacatactggcttgttcacctggatgcattttctcagtctccctcagaatcatttttctccctgaaaaatgggattaaaagtattaatagtagtgcccatctcacagagtcattgcgaggattaaagagaggatgcatagaygtattgaatcagtgctgggttctggtagatgttcagctagccctagagattattagccatttgatgtgctgatcctcaggaaggtgggcgggagagacctagacgcagaaaagga

SEQ ID NO: 151270 - DNA, 431 bp, Homo sapiens
tctgtcatttcgcttggaaccatgtactaagtttctcctattctggggatctggagttggagtggaaatcatattggcagatgggaatctgatttctctcaaaagtttccatgcctgtgatctagcactttgcaaagatattgttattattattattgatattacattaaatcacagggcagcactatactttcaaagttggattaaatcaaaaggatcaagctaagktttctattggatcaaactcacttaaaaggacctagagctagtgttctaatgaaatatatgaaacaccagtttataaaacaaaatgagccaaaagatgtctatcttcaatgtgaatggattgcttaaagggagagttgagacctgctttgaaagaaaagtcctatctatggaagacatctcaacccatgaaattatttagcatt

SEQ ID NO: 151271 - DNA, 485 bp, Homo sapiens
taccacattttctttatccattcatctgttcatggacacttaggttgactccccatatttgtgaatagtgctgaaataaacatgggggtgcaggtatccctttgatatgctgatttcctttcctctggataaatacccagtagtgggattgctggagcatatggtgatcctatttttagttttttgagaaatctccatactctaaaaacaatatttttatcaagaagacgatacacctgtgattctggctgacagatttttttattttttcattttcagagagtgaatgagtgctctgatactatgcatatgtcatacattctagaactaacctgcatgcctccsaatgctggttcctctgcttctgagctatgtgacatgttgatgggcaggccacttcctctcttgaggcttcactatcctcactgcattatgggtgcaatacaatacccacctcattaggttgttgcaagactttaaataaa

SEQ ID NO: 151272 - DNA, 565 bp, Homo sapiens
agacctatagggtatcagctaccatgtaagagataagagaaagaagcagaatatctgagggatctgagaacaggaaaactcaaaaactatcaaccagtggtccctgggaagcacagcaggccaatgtgaggacagtggctgagactcgaaagaactctgcacattccaatttgtagtgcaaaacgttctcagtaagggagggctgaaggggctggaggagcgtggctcttataaaatctcaaaattgaggaacaaaagcttccttccaggacaaaacccatggagaaactgctgggtgtggatgccaacttgaccaggacgggagtaacagggataaaatagagattgagagagaagactcagattaaaaattgcaaatggaagtccaaataaatacagttaatttagtcaaagttgtctagtcaattcagcatgaccattaagatgaacacagttatccaaagctaatgctttttccatttttattaagatgtttgttaccatacgggcamagactgagagtactaaataaaataaagcttaagaaataaatgatggcacaaga

SEQ ID NO: 151273 - DNA, 565 bp, Homo sapiens
agacctatagggtatcagctaccatgtaagagataagagaaagaagcagaatatctgagggatctgagaacaggaaaactcaaaaactatcaaccagtggtccctgggaagcacagcaggccaatgtgaggacagtggctgagactcgaaagaactctgcacattccaatttgtagtgcaaaacgttctcagtaagggagggctgaaggggctggaggagcgtggctcttataaaatctcaaaattgaggaacaaaagcttccttccaggacaaaacccatggagaaactgctgggtgtggatgccaacttgaccaggacgggagtaacagggataaaatagagattgagagagaagactcagattaaaaattgcaaatggaagtccaaataaatacagttaatttagtcaaagttgtctagtcaattcagcatgaccattaagatgaacacagttatccaaagctaatgctttttccatttttattaagatgtttgttaccatacgggcaaagamtgagagtactaaataaaataaagcttaagaaataaatgatggcacaaga

SEQ ID NO: 151274 - DNA, 595 bp, Homo sapiens
ctcctgcttaccgcatgattattttgaggaataagtaaaggtgtgtatttaaaacattyagaacggtattttattttgtggtaccaataataagaactcaataaagattagctattttgtctacacatggcatttcatttgattgacactacaactctattattttaaaggggagaaactgagaatccaagaccacacagagggttaatggcagagccaggaatcaaacctagaacagccatcaatcaagtctgtgctgagcactaggagatagggcaaaggacggataatgttcatttgagaaagagggacttgagaaggggtgtgcaataatgaggagcatggggaatatttacaggtagtcacttgccgtatatgaataatctatggtttaggcacaagggaaactgtactaaatactaattgaatttttttaagtctttaggctgactctgggcacgctgcctaggagttagccctgctctgcaaggagcagctattaaatatgtatgtatgaaatatatatatttaactgaacctggtgatttttactgagcagatgcattttcttgtggtgacagtcatcttaagaggc

SEQ ID NO: 151275 - DNA, 590 bp, Homo sapiens
tggtaacattctattttacaacaaagaaaattagattacaagttatcctacaattctccctcctcccagctaagatcacacaccgtatagagttacaatggtgccaattacaacagcttttcatgcattgtatgttgctctggtttttgatgatctgaatggatttcatacctaatagcagctactgacagcaatcaaaacaatttgggggaaaacagttttgtcttctgtgttcaagtaatgctattgatttaaatttaatgtttgcttcatttctttcttggtacagtaagcaagcatgtggtgtctgtctgggcccccattctgcctaagaatgtgggtggcaaagcctatgtataccaggccttttctatcactagttgctagaagccaatatccattaaaaagagagtgtttttaagatcatttcatcmaatgcccactacatacacattcattcattctcactctctctctctctctctctgtctcatatcccagtttacagttgaagaatcagaggcacagagaagttaagttttttgaccaagtttacacagctactatattggtcgagctggggccagatt

SEQ ID NO: 151276 - DNA, 499 bp, Homo sapiens
tcatgaactgtgatgcaactgcatggttttaaaccactttcaattaagttcacacaagacccccgtggaatgcatttcaagcggcaacaacattctatatcccaatatcagttgttccgtcccatctcccagctctcctatgtttacaactttaatacaagaagcttaagttgtatcattctctgctactgattatgcacctttcttccagactacttgcatcctttccaaaatgcatcagctctgtcccccaacattgatccctctgatacaagtgggtgagttctttctgctcaggtaccgacacraagacttcactttcttgatccaattacagtcagactgagaatctgacaaggatttatccttgaaatcaaccaagaatcctagcagttcaggggctctatttggtagtaagatctttaaacttggcggctgttttgttattcagttctgaatccccagcgctcagcagaacagcttgcatgagtaggtcttt

SEQ ID NO: 151277 - DNA, 576 bp, Homo sapiens
gtgcagggcagtggggccctgggcctgggccatgaaaccactcttccctccaagacctctgggcctatgatgggaagggctgccaggaaggtctctgaaatgccttggaggcgtttttcccattttcttggctattaacatttggctactctttacttatgcaaatttctacagcaggcttgaattcctccctagaaaatgggtttttgttttctaccacatggttaagttgcaaagttttcaaacttttgtgttctacttccatttaaaatagaacgtccagtttcaaaacatcgctttgctcatgcatacactgttagaatcagccaggctacatcttgaatgctttgctgcttagaaatttcttctgccaaataccctaaatcattgttctcaagttcaaagttccacagatcyctagagcagaggcacagtgctgctagtgtctttgctaaagcatagcaagagtgacctttacttcaattctcaataagttttgcatttccatctgatattacctcagactggactttattgtccatatcactatcagcattttggtcacaacaattaaac

SEQ ID NO: 151278 - DNA, 583 bp, Homo sapiens
gaattcaagttaagtgacagtttttttaaatacccacacattatattagaactatattcgaagtggtcgggcttgggaccactttaggaggccaaggtgagtggatcacctgaagtcaggagttcaagaccagcctggccaatatggtgaaaccccatctctactaaaaatacaaaaatgagctaggcgtggttgtgggcacctgtaatcccagctacttggaagcctgagacaggagaatygcttgaacccaggaggcggagggaggttgtggagatcatgccactgcactccagcctggatgacaatgagactctgtctcaaaaaaaaaaaaaaaaagaactgtattcaaagtgaccatatctctcaatgtacccattttatccacagcaaagccatatgtgctcctgctccatgtgttgctgactttttggggatcatatagctctttgctgatctgattaaaactgtggataatcactctggaaaaatacacatatacaggtaaaatttttgtgtacaattttagagtgtccataaattgctgaaacccatctagggagaaaaacccctatttgaatga

SEQ ID NO: 151279 - DNA, 311 bp, Homo sapiens
tacattcttgaggctttcctatcaataactaagggatgaagataggtgtgaaatggagagaaagtctcattcacctatttaggttaagtgccgtgccttggcttgatttacagtcttatcaagaccacacaaaattgggtcgtgacaatttcctaaaatgaattttggctgctyttgccagaagaagagggattaggaaggtctacaaaaacctaaatgtctgcaccttcagcttctggctactgaacttgaatcaattcatttttttccccttgtctcttagatggtttaaaatacccaccttcacagta

SEQ ID NO: 151280 - DNA, 445 bp, Homo sapiens
tacagtctgtcttcaagcttactcattctttcttccacttgatcagttctgttattaagtgattctgacgcactcttcattatgtcaattgcatttctcaactctagaatttctgtttgattctttttaattatttcaatttctgtgttaagttgatctaattttgaattccttctctgttttagcttgaatttctttgagtttcctcaaaacagctattttgaattctctgtctgaarggtcacatggctctgtttctccaggattggtccctggtgacctacttagttcatttggtcaggtcatgttttcctcggtggtcttgatgcttgcggatgttcattggtgtctggggattgaagagttaggtatttattgtagtatttgcagtctgggcttatttgtgccatcttagttgagaaggctttccaggtatttgaaggga

SEQ ID NO: 151281 - DNA, 575 bp, Homo sapiens
ttgttttattctagctcctgttttaaagtaaaagccttcttttcttaaaaaaaaaagttgccatactttttttttaaataaaaataatgtgtgaattggtagctcaatgttttgatttccagsaccattgatgaagaattttgtcttttcaaacatttattgagcatcaggtatgctcttctgggaaatgcatgaacaaatcctttacccattttttacatctggttatttgatttttcccttatatgtctgagtgccatatatggtcttcctatcatctagttttggattacatgagttttaaatatgtacttctctctgagactttaaaaaaatattggtggtgtctttgccctatagaagttttaaatgtaccaacttgaaatctgatataagactaaactcaccaaaatgatgcctatattccactttttgttagataaacagaatcctagttttgttatttcattatttgttttagaataggctaaagtttgggagaactcattaggatgggtggcaaaagaaatgagccaggcttcaggaatatctcacacacagcagcctggggaagg

SEQ ID NO: 151282 - DNA, 575 bp, Homo sapiens
ttgttttattctagctcctgttttaaagtaaaagccttcttttcttaaaaaaaaaagttgccatactttttttttaaataaaaataatgtgtgaattggtagctcaatgttttgatttccagcaccattgatgaagaattttgtcttttcaaacatttattgagcatcaggtatgctcttctgggaaatgcatgaacaaatcctttacccattttttacatctggttatttgatttttcccttatatgtctgagtgccatatatggtcttcctatcatctagttttggattacatgagttttaaataygtacttctctctgagactttaaaaaaatattggtggtgtctttgccctatagaagttttaaatgtaccaacttgaaatctgatataagactaaactcaccaaaatgatgcctatattccactttttgttagataaacagaatcctagttttgttatttcattatttgttttagaataggctaaagtttgggagaactcattaggatgggtggcaaaagaaatgagccaggcttcaggaatatctcacacacagcagcctggggaagg

SEQ ID NO: 151283 - DNA, 575 bp, Homo sapiens
ttgttttattctagctcctgttttaaagtaaaagccttcttttcttaaaaaaaaaagttgccatactttttttttaaataaaaataatgtgtgaattggtagctcaatgttttgatttccagcaccattgatgaagaattttgtcttttcaaacatttattgagcatcaggtatgctcttctgggaaatgcatgaacaaatcctttacccattttttacatctggttatttgatttttcccttatatgtctgagtgccatatatggtcttcctatcatctagttttggattacatgagttttaaatatgtacttctctctgagactttaaaaaaatattggtggtgtctttgccctatagaagttttaaatgtaccaacytgaaatctgatataagactaaactcaccaaaatgatgcctatattccactttttgttagataaacagaatcctagttttgttatttcattatttgttttagaataggctaaagtttgggagaactcattaggatgggtggcaaaagaaatgagccaggcttcaggaatatctcacacacagcagcctggggaagg

SEQ ID NO: 151284 - DNA, 563 bp, Homo sapiens
agctcctgttttaaagtaaaagccttcttttcttaaaaaaaaaagttgccatactttttttttaaataaaaataatgtgtgaattggtagctcaatgttttgatttccagcaccattgatgaagaattttgtcttttcaaacatttattgagcatcaggtatgctcttctgggaaatgcatgaacaaatcctttacccattttttacatctggttatttgatttttcccttatatgtctgagtgccatatatggtcttcctatcatctagttttggattacatgagttttaaatatgtacttctctctgagactttaaaaaaatattggtggtgtctttgccctatagaagttttaaatgtaccaacttgaaatctgatataagactaaactcaccaaaatgatgyctatattccactttttgttagataaacagaatcctagttttgttatttcattatttgttttagaataggctaaagtttgggagaactcattaggatgggtggcaaaagaaatgagccaggcttcaggaatatctcacacacagcagcctggggaagg

SEQ ID NO: 151285 - DNA, 575 bp, Homo sapiens
ttgttttattctagctcctgttttaaagtaaaagccttcttttcttaaaaaaaaaagttgccatactttttttttaaataaaaataatgtgtgaattggtagctcaatgttttgatttccagcaccattgatgaagaattttgtcttttcaaacatttattgagcatcaggtatgctcttctgggaaatgcatgaacaaatcctttacccattttttacatctggttatttgatttttcccttatatgtctgagtgccatatatggtcttcctatcatctagttttggattacatgagttttaaatatgtacttctctctgagactttaaaaaaatattggtggtgtctttgccctatagaagttttaaatgtaccaacttgaaatctgatataagactaaactcaccaaaatgatgcctatattccactttttgttagataaacagaatcctasttttgttatttcattatttgttttagaataggctaaagtttgggagaactcattaggatgggtggcaaaagaaatgagccaggcttcaggaatatctcacacacagcagcctggggaagg

SEQ ID NO: 151286 - DNA, 609 bp, Homo sapiens
ttaatacatgtaatcaaatcatattaaatacttttattaaaaatgacatcattgccaggcatggtggctcacgcctgtaatcccagcactttgggaggccgaggtgggcagatcacctgaggtcaggagtttgagaccagcctggacaacatggtgaaaccctatctctactaaaaatacaaaaattagccaggcatggtggtgggcacctgyaatcccagctactcaggaggctgaggcaggagaatcgcttaaacccgggaggtggaggttacagtgagctgagatcacgccactttactccaccctgggtgacagagcaagactccgtctcaaaaaaaataaaaaggatgtaatttgcagttctagtgcttaatgtctatcaagctgccaatacagagaattggtatcgtactttgagcaggcattctaaaaacttttggtttcatgattcctttaaactacaaaaattactgagaactccaaatagcctttgtttacatggaatactttatcgatatttatatcttagaattaatactgggaagttcctaaaacacaagaatacattaatatagacaccattagctatcagagcaataatggcat

SEQ ID NO: 151287 - DNA, 609 bp, Homo sapiens
ttaatacatgtaatcaaatcatattaaatacttttattaaaaatgacatcattgccaggcatggtggctcacgcctgtaatcccagcactttgggaggccgaggtgggcagatcacctgaggtcaggagtttgagaccagcctggacaacatggtgaaaccctatctctactaaaaatacaaaaattagccaggcatggtggtgggcacctgtaatcccagctactcaggaggctgaggcaggagaatcgcttaaacccgggaggtggaggttacagtgagctgagatcacgccactttactccaccctgggtgacagagcaagactccgtctcaaaaaaaataaaaaggatgtaatttgcagttctagtgcttaatgtctatcaagctgccaatacagagaattggtatcgtactttgagcaggcattctaaaaacttttggtttcatgattcctttaaactacaaaaattactgagaactccaaatagcctttgtttacatggaatactttatcgatatttatatcttagaattaatactggraagttcctaaaacacaagaatacattaatatagacaccattagctatcagagcaataatggcat

SEQ ID NO: 151288 - DNA, 529 bp, Homo sapiens
ttaatctctgtcacatagtcctggactaggctcaggctaggtcttttcctcagacttctgactagggttggggggtctacttccaggaccactcatgtgctgtcacaggcttcagcttcttatcgtgtagacctcagggcagctcacaatgtggcaactgccttcacccagaatgagcaagatggcagggaagggggtgggggatggagagaatatgggagacratgttcaagatggaagccacagtctttttttagtctaatctcagaagtgacatcctattgcttctgtcatattcaattcctcattagtgagttaacaaatcgagtgtgtactcatgctaaagggtaggagcaccggaaggtggggatcactgtggccatctgagagtctatctaccataacccctacagtcatctctccactcagtagccagagatatcttttaaaaaacttttattttgagataattatagattccaagatgtcatttaaaaatgtaaatcaggtgaggtgcagcagttcatgt

SEQ ID NO: 151289 - DNA, 566 bp, Homo sapiens
tgtctttcatgctaccatttcttgcatcttattggttacttaggttagctgtattcattgtaagaggctatagcacaaggtcatgattaccaggaggcaataatcattggaggccatcctagagatacataattatggcagatacctaaaataatgtgtttgaaagatctttaatgattggttaaatgaaagaaaagattcaaaactgttaaagcagtataatctaaaagttattaaaaataackttttaatgttgtctgaaagtatgtgtgcatgcagaaaagatagaccaaaaggcaaacaaaaatgttagcatgacttttttctgagaggatgatgaaagtttaggttttcccatttttctcaatgtgtgtgtgtgtgtgtgtgtgtgtgtgtgtgtgtgtctattttcaaagttttctagagtataaatgaatagctttataattaataaacatgaattttgagggcacaattagaaaaattattttaaaattttgcttattttcttgaagacacaatttatattatttccctttagtttgaaagttaaagtaaactttcga

SEQ ID NO: 151290 - DNA, 566 bp, Homo sapiens
tgtctttcatgctaccatttcttgcatcttattggttacttaggttagctgtattcattgtaagaggctatagcacaaggtcatgattaccaggaggcaataatcattggaggccatcctagagatacataattatggcagatacctaaaataatgtgtttgaaagatctttaatgattggttaaatgaaagaaaagattcaaaactgttaaagcagtataatctaaaagttattaaaaataactttttaatgttgtctgaaagtatgtgtgcatgcagaaaagatagaccaaaaggsaaacaaaaatgttagcatgacttttttctgagaggatgatgaaagtttaggttttcccatttttctcaatgtgtgtgtgtgtgtgtgtgtgtgtgtgtgtgtgtgtctattttcaaagttttctagagtataaatgaatagctttataattaataaacatgaattttgagggcacaattagaaaaattattttaaaattttgcttattttcttgaagacacaatttatattatttccctttagtttgaaagttaaagtaaactttcga

SEQ ID NO: 151291 - DNA, 426 bp, Homo sapiens
ttctgcagctactatagatttgtctagcatgtattttttcatgttttactgaatctactgaatccaattatatattattttaaagacagtctagtaaaacgaacacatagctctaaataaagaatcatcattagtggctttcatttcagaatgtaagaacaatggaaaggcagrttgataatacacaatttcacctgtgagacatgattttctgtttacacatgatcaaaagaaaaacaagcttactgactttaatataggccatttttctaactcagccttaagtgatttcaacctcaagcttcctattttcaaagacattgagtcttaagggacaggctgtattttaagctaatatgtcaaattgatcgacttaaaaacatatctacctgtgatgtacgtctcaaacaaaatccataagaaaaa

SEQ ID NO: 151292 - DNA, 472 bp, Homo sapiens
gctgggaagaggcgctcctcacttcctagatgggatggcggccggggggagacgctcctcactttccagactgggcagccaggcagaggggctcctcacatcccagacgatgggcggccaggcagagacactcctcacttcccagacggggtggcggccgggcagaggctgcaatctcggcactttgggaggccaaggcaggcggctgctccttgccctcgggcccgcggggcccgtccgctcctccagccgctcaacaccaccactaccttaacacagccaccaccaattgckgtagtaataattttctttggtggacgttatttatttcttgggtttccagaaacaaatttactttataaatgtgaaaatatatagctaatagaaaaacatgattttccatgctaatattttcagatatttgtacaattcaaaaaattacagagagagaaaaatagagaacagggaataa

SEQ ID NO: 151293 - DNA, 553 bp, Homo sapiens
acatgctcttacatgtagaaagtcctaaatatcccacacaaaaactactgttagaaataaatccagtaaagttgcaggatacaaaatcaacattcaaaaatcagttgtgtttctatacactaacaatgagtaatccaaaaaggaaattaaaacaatcaagttacaatagtatttaagagaataaaatacttaggaatccacttaaccaaggagtaaacttgtacacagaaaacaagaaaacattactgaaagaaattaaagaagatgcaaataaaaggaaaaacattccatgttcatggattggaagatttaatattgttaaaatgtccatattacmcaaaataatgtatagattcaatgcaatctctattaaaatccccatggcattttttacagaaatagaaaaaacaatcctaaagttcacatagaaccgcaaaggaccccaaagagcaaaaacaatcttgagaaagaaaaacaaagtggaaagtctacacttcctaatttcaaaacatttaacaaaattacagtagccaaaacaatatgatactagaat

SEQ ID NO: 151294 - DNA, 475 bp, Homo sapiens
aacactcaaacatttgaatcattcatgtattcaaaagtgatttatcaaatactcataatgaaggaaggaaggaataaaaataatctgactctaaatgagggttttatccaagctgtacagatagtaaatttagaatcaaggtggaagatgctgtcatatacctccagattacccttcaggactcagggattccttctctcaacacagattctttctctcaacacagattacagctgtgtctctctccagaaattgcccttggtcaacaaaaactgcctaagtttctgttttctttgggggacagcttgtatccagtgactggtcaatgcaaggtcaccaagccctttcccacaatttargatatctctaaaggataaccctagcttcaatactccctgtgggatcatcagaagctgctactacaaccacattgtagttcaacatcttcagctgccgaatcacgtggcccttgctt

SEQ ID NO: 151295 - DNA, 456 bp, Homo sapiens
cagcaccccactgcagaatcctcttyacaatcaataggcaactgaatgtggcacctcatgcaattcttccataattctatcaacagaaagaatgcagtctgtttgcatacttttgtctaaaagaccaattccatttgtcccttcttggataaaatgacagctacagatcaatcactctcacgtgaaagtaaacatgctacaaaaaaaaacaaaaaaaaaacaaaagaagaagaatcaaaactgaaatcctcgcctattttaagcataattttattacacataaaaactcaaagtaaaatagaaaaagcaagtttttcctcatagacatgcattttgtgctattatacaacagtatcaggatgtaaaataaataagttacatcaaacaatagtcatgaatcttacctttacatatggacagcacttaattaagttccatatattttctattctctca

SEQ ID NO: 151296 - DNA, 575 bp, Homo sapiens
gatttgatatttgtgtatggtaaggaatagaggtcttgtttcattcttctgtttatagctatccagttttcccagcaccatttattaaaaagactgtcctttccgtagtgtatgttcttgggatctttattgaagatggggtggctgtaattgtgtggaattatatctgagttctctgttctgttccattggtctatgtgtctgtttttatgccaaaatcatgctgttttggtcactatagctttgtagtaaattttgaagtcaggtagtgtgacatctccagctttgttctttttgcttaggattgctttggctatttgggatctyttgtgattccatataaattttaggattttttttttcatttttgtgaagaatgtcattggtattttgatagggatttcattgaagaaaccaattttaccatagaccaatgtaaacaagagttaagttcctatggcatatttctggtctcaaaacccaccaaacttctaaataaagaccaaaacacttctaacagtaaacattgaaataaatgtgagctacacatacatttaaaaagataaataaaaaca

SEQ ID NO: 151297 - DNA, 575 bp, Homo sapiens
gatttgatatttgtgtatggtaaggaatagaggtcttgtttcattcttctgtttatagctatccagttttcccagcaccatttattaaaaagactgtcctttccgtagtgtatgttcttgggatctttattgaagatggggtggctgtaattgtgtggaattatatctgagttctctgttctgttccattggtctatgtgtctgtttttatgccaaaatcatgctgttttggtcactatagctttgtagtaaattttgaagtcaggtagtgtgacatctccagctttgttctttttgcttaggattgctttggctatttgggatctcttgtgattccatataaattttaggattttttttttcatttttgtgaagaaygtcattggtattttgatagggatttcattgaagaaaccaattttaccatagaccaatgtaaacaagagttaagttcctatggcatatttctggtctcaaaacccaccaaacttctaaataaagaccaaaacacttctaacagtaaacattgaaataaatgtgagctacacatacatttaaaaagataaataaaaaca

SEQ ID NO: 151298 - DNA, 394 bp, Homo sapiens
gccagctgcatcaggttgtccatggtctggttctccgaaatgtccacacgaatcttctcctcttctgtctcctcacacaggctgtgcttgcaggaaatgtggcgcaggatggcgttgctctgggtgatcttgtgagccccatcaaacaagtagggcagattgggaaagtccaggcccagcttgaatttttaattcagctactagcttctgtcatagtcaggagagtcccccattgtgtacttcttttcctcgtagcttgagtctgtgtattcaaggagcaggtggatggcatgtgccagcccgtggatgtccccgtaccccagtgtgatgggcatggtkctggttggtgcagattctgcagaccggtgctacacacttttaaacaaccagatct

SEQ ID NO: 151299 - DNA, 603 bp, Homo sapiens
tatctttgcagcacatcctttatttctggcttgcatgggacttgaaagcctaaaacaactaaatgctaagaaaaattatttttaaaatgatgacaaaaatattttctatttcagatgtatagatctgcaatccagaaactatgaatttttttcagttgagtagtctgtttgccaaaaaataaaaaaaaataaaaaataaaaacttgcctaagtttcttctcttacattttatttaggatttgcccttagacattatttagtgcttttctgaccctgtagggamggtgagaataattgaaacactagtttcttaaaatttctgttaaaattggttaaaggccatagaattttttttttaagctaagcatgttatagagaggtatcctataagaagcaaggggcaggtaaagactttagagatgtatagtccagtgtgttaattaaaggatactacctacttctaattcggtatgtattaatcttttctgatatatctgttaaagtactcttcgcatatttttaaaaaattggcattttaaagtatagtctttgatggtagaaatgtgagattgacaaaaatcatgtcctcttatgtatgaattt

SEQ ID NO: 151300 - DNA, 603 bp, Homo sapiens
tatctttgcagcacatcctttatttctggcttgcatgggacttgaaagcctaaaacaactaaatgctaagaaaaattatttttaaaatgatgacaaaaatattttctatttcagatgtatagatctgcaatccagaaactatgaatttttttcagttgagtagtctgtttgccaaaaaataaaaaaaaataaaaaataaaaacttgcctaagtttcttctcttacattttatttaggatttgcccttagacattatttagtgcttttctgaccctgtagggacggtgagaataattgaaacactagtttcttaaaatttctgttaaaattggttaaaggccatagaattttttttttaagctaagcatgttatagagaggtatcctataagaagcaaggggcaggtaaagactttagagatgtatagtccagtgtgttaattaaaggatactacctacttctaattcggtatgtattaatcttttctgatatatctgttaaagtactcttcgcatatttttaaaaaaytggcattttaaagtatagtctttgatggtagaaatgtgagattgacaaaaatcatgtcctcttatgtatgaattt

SEQ ID NO: 151301 - DNA, 599 bp, Homo sapiens
tgcagcaatccactcattttcctttgtatgtgtttttcatttccttgtgcttgttcattgctcaaaacccttctattgtaaacatcagggtggcaataagagaaaggtttgctcttaggaaaagttcaagaaagaaaggagcccccaaaccgcctgacacttctaagtgtcactggtactaaccatgtatctcagtgtcataagcggkaagaaacaacgactgcctgttcctgcaactggcaagtggccatgccaagacttccagaaataacagtgaatgaatgaaaccacatgggaaccagagagtcagcttggagaagcagggactttgtcaaatatttaaaataataaacgctaactttcactgagtactttctgtagtgccaggcactgctctaagaactttacattaacacacattaattactgctcaaaaacctttcctaacaacccagacctccctcacaaataggagttttcctttcttctttataaatgagaaaactaagcccataaagataaaatgtttacttaatgctgtacagctcagtaactagctgaattgaaattattcatgattcatgtccgttgcatttatg

SEQ ID NO: 151302 - DNA, 599 bp, Homo sapiens
tgcagcaatccactcattttcctttgtatgtgtttttcatttccttgtgcttgttcattgctcaaaacccttctattgtaaacatcagggtggcaataagagaaaggtttgctcttaggaaaagttcaagaaagaaaggagcccccaaaccgcctgacacttctaagtgtcactggtactaaccatgtatctcagtgtcataagcggtaagaaacaacgactgcctgttcctgcaactggcaagtggccatgccaagacttccagaaataacagtgaatgaatgaaaccacatgggaaccagagagtcagcttggagargcagggactttgtcaaatatttaaaataataaacgctaactttcactgagtactttctgtagtgccaggcactgctctaagaactttacattaacacacattaattactgctcaaaaacctttcctaacaacccagacctccctcacaaataggagttttcctttcttctttataaatgagaaaactaagcccataaagataaaatgtttacttaatgctgtacagctcagtaactagctgaattgaaattattcatgattcatgtccgttgcatttatg

SEQ ID NO: 151303 - DNA, 529 bp, Homo sapiens
catagtccagaaatgtaatgatgcttactctatatggaaaattaatttatgataaaatgatgtttttcaaaggaataagtcaataaataaatgactatttattcattgaataatcattcaataaactctggtaaggaaaaccttagccaatatggagccacttttgtttagctagtgcatttccaaactcccttttgtccatatcaatctcagaggctaaatgtgctgtctgtgtgtgtgatagagagagaaagaaagagagaaaggaatatgaaaatgttatgttccttatttgctacagcagaagcataggtacgcaatcatctaaaaccatgtaagatatttttgatataygtttaaaagcatgatagccagattataggtctactctacagccctacaactattactttctcagcttccttgtatctaggggccccatgtagtcaggtattgtcaatgaaacataaccataactctattaggactttcagtaaagcgtttacttttctgtaaaaagaggaagatg

SEQ ID NO: 151304 - DNA, 559 bp, Homo sapiens
tttcagtataagaaaacttaattctgaaaggagagaataagagacatgataaaagtgacagaattaccaatgtgtatgacaaaaagtattaaatgatttggatacatagaggatattttggktatttttttacctatgtaattttttttgtatttaggaggcttaaggaagaaagcactaaaaagctcagtgttggcatggctctgagaacctccctacagagttgaatagacacatattttgaaacagttgggacacggcatttctattagtttcttttattctcagtataggcctattttcttcttttaagctggtgtgtcaaaggactcttgagcaattgaatcttgtaggcccgggtgatttttggtcatttgccacatgtcactcctttctcaaccgtaaaccaacactacagaattacagctagaagaatatggtacccagggatttggacagttccattccaataaatgatttatataattaaaaacaaggatagggaagagggaacaaaacagtgaaataccgtacagttctggatcacaaaagttttgaa

SEQ ID NO: 151305 - DNA, 559 bp, Homo sapiens
tttcagtataagaaaacttaattctgaaaggagagaataagagacatgataaaagtgacagaattaccaatgtgtatgacaaaaagtattaaatgatttggatacatagaggatattttgggtatttttttacctatgtaattttttttgtatttaggaggcttaaggaagaaagcactaaaaagctcagtgttggcatggctctgagaacctccctacagagttgaatagacacatattttgaaacagttgggacacggcatttctattagtttcttttattcwcagtataggcctattttcttcttttaagctggtgtgtcaaaggactcttgagcaattgaatcttgtaggcccgggtgatttttggtcatttgccacatgtcactcctttctcaaccgtaaaccaacactacagaattacagctagaagaatatggtacccagggatttggacagttccattccaataaatgatttatataattaaaaacaaggatagggaagagggaacaaaacagtgaaataccgtacagttctggatcacaaaagttttgaa

SEQ ID NO: 151306 - DNA, 523 bp, Homo sapiens
taaatctaaattgataatttaattctaaaatatatgtggttgtatataaagccaataattactaaaacagtgactaagaacaaagatggaggacttactatgctgtgaaaggtaaataaacaaaacttgtaaaaataaaatacgggactatcttgttatctctgtgttagagaaagattttttaaacattacccaataacacaaaccataaatgaaatgattattctattagtcmtcaaaacataaggaatttctgttaattaaaagacagcattgaggatgtgagaaggaaagccatatcataacatgggagaaggtatttgaaacacatataatcaaccaaaggcttataggcagtatttgtaatagttataaattaataagaaaaatataaactaatcatgttaaaataaaaaaatcacttaaactcacttcactataagccccaaagatcaataatcatgtataaaaagatatttaatatcattaaccatcatggaaaagctaattaaaactacattgt

SEQ ID NO: 151307 - DNA, 619 bp, Homo sapiens
cataattatgtaagctgaattaccaagtttgttcacaataagagagaacttctgttagaamtaggctttgctgagaaccagtcttctatttaaaatcttacataaatgatggctagtagagttttcttcagactaaatttgggctgcacacatttcaatccatttttctcctctattctaatgtacttctggtgctgggtatcacaggctgtattcacatcgtaatatcattctagacctggatctttatgacacaacctgggtgaattagcacagcaagcagaaagaatattcctggattccatttctataccagatagcaatactaacccaaattaaatatgtgtctaccaaacatattctggctatttcaggggaagaaaaggtgtaatagaaatgatgctaggaatagaatttttacctgtagctagactattctaactctttcaaactttatgaaaaacatatgaccatgttaacccaatgttatgaaaaacatatgaccatgttaaccttctaacggtcttggaagggggtacttcaattgaggggatatgatcgctaggcttcattagctttccactaaatagactcctgtatcctgtaatcacattttagg

SEQ ID NO: 151308 - DNA, 586 bp, Homo sapiens
ggtgactctgaaccacagggtaggtatttgagtgtgaattaagttcctatagagcaaatgatgctgaagccaaatagctttggtaagatgcccttatttatactttaggttgccatggtctgggaaatatggactttgtatgtttataagctatataactgtccattttatcagatattgatcctagcattgtgcatggatgctcaataaaagtattcctttcctggtggtgaattatrttatgaattgcatctgcctcaaaattgtgtatttcttatatattcatcttctgtgtatgccttttcaaagtaatttatttagttgtagagtgaagtcatggattgtgaccatttaaaacacgaatacatagcaataaagaaatactgagtgaaggaattagtcaagtgattatgggtgtctaacctgtcataaaattatcaagtgcaaatacatgacctatgatgctggaaggagaaatcactatagcagggaatacagatgaaataagcatttgggatttaagacgtttatatccatgagtccatactcatcatgacccactttggaagcctggccactagattgg

SEQ ID NO: 151309 - DNA, 586 bp, Homo sapiens
ggtgactctgaaccacagggtaggtatttgagtgtgaattaagttcctatagagcaaatgatgctgaagccaaatagctttggtaagatgcccttatttatactttaggttgccatggtctgggaaatatggactttgtatgtttataagctatataactgtccattttatcagatattgatcctagcattgtgcatggatgctcaataaaagtattcctttcctggtggtgaattatgttatgaattgcatctgcctcaaaattgtgtatttcttatatattcatcttctgtgtatgccttttcaaagtaatttatttagttgtagagtgaagtcatggattgtgaccatttaaaacacgaatacatagcaataaagaaatactgagtgaaggaattagtcaagtgattatgggtgtctaacmtgtcataaaattatcaagtgcaaatacatgacctatgatgctggaaggagaaatcactatagcagggaatacagatgaaataagcatttgggatttaagacgtttatatccatgagtccatactcatcatgacccactttggaagcctggccactagattgg

SEQ ID NO: 151310 - DNA, 565 bp, Homo sapiens
ctggtttgtcttttagctctaggtagcactgtctagcactatgtttacttggttgagtacattctcgtttttgacttaggataggggaagccgatgatagttgatgagcgtgtgattgcatcagggagagaagaacaggcttgacaacatcagcctctccctcccaaaataccttcttcagccttcctcaaaactgtgttggttaggtccggtgttggttcaggtgccaagacagagttagtagtgaaggagatttattgagggaaatgcctatgaaagataaagggaaaaaacaacagatacaggcaagaaaaccttttatactggaatgctgatttgacatctataatcagagaggggaagagggggaatcgaatagaaagactttaagataatagtgcaktttggtgaaagtttcaggcagtcaaaccaggagcactgtcacagaaatagctcataaagaactctctcattggatgtaaatgagaccctattaccctgccataccgtcattcacaggaggctacctgggaagaaaatggccttgattcaaacattgcagtgt

SEQ ID NO: 151311 - DNA, 565 bp, Homo sapiens
ctggtttgtcttttagctctaggtagcactgtctagcactatgtttacttggttgagtacattctcgtttttgacttaggataggggaagccgatgatagttgatgagcgtgtgattgcatcagggagagaagaacaggcttgacaacatcagcctctccctcccaaaataccttcttcagccttcctcaaaactgtgttggttaggtccggtgttggttcaggtgccaagacagagttagtagtgaaggagatttattgagggaaatgcctatgaaagataaagggaaaaaacaacagatacaggcaagaaaaccttttatactggaatgctgatttgacatctataatcagagaggggaagagggggaatcgaatagaaagactttaagataatagtgcattttggtgaaagtttcaggcagtcaaaccaggagcactgtcacagaaatagctcataaagaactctctcattggatgtaaatgagaccctattaccctgccataccgtcattcayaggaggctacctgggaagaaaatggccttgattcaaacattgcagtgt

SEQ ID NO: 151312 - DNA, 602 bp, Homo sapiens
tcctaaaatgtatatggaaccaaaaagagtatgaatagccaaagcaattataaccaaaaagaacaaatatgaaggtgttactttagaagacttcaaattatgctatagagctatagtaaccaaagaagcattggtgctgatatacaagcagacacatagaccaatgaaacagaatagagaacccagaaataaaaccacatacctacaaaaaactgatcttcaataaaggcagacaaaaacattaastgggaaaaggatacccgattcagtaaatgatgctgggaaaattggatagccacaggcagaagaatgaaactggatccctagaataaagactcaaatgtaagaccaaactccataaaaattatcaaagaaaacctaggaaaaactcttctggacattggtgtaagcaaagaatttataactaagaccccaaagcaaatgcaggaaaaccaaaagtcaataaatggggcttaattaaactaaaaacttctacacagcaaagaaataatcaacagagtaaacagacagcatacagaatgggagaaaatattcacaaactgtacatttgacaaaggacaatatccagaatccaaaaagga

SEQ ID NO: 151313 - DNA, 521 bp, Homo sapiens
ccaaaacataatggatttgataagccatgttaggagtttaaatttagtaccagaaaaaaatggacagtcatttgagtggttttaaacaaaaatataaatttagggtagggtgtaaatagaattatactaataaatattattatggaagtaggaaatacaaaaaaataagatactgcctttaaatagattcagttatgttaaggatacatattattagctctagagtaaacaccmaaacacaataataaaaggtatatctaagaagctaatagagaaaataaaatggaacacacacatacaaattcaaccagctcataagaaggcagaaaaaagaaagagagaaaaaaatagaaagacagaatgaaaacaaataaagacagtacacttaacgccaacatttcaacaattacattaaatgtaaatggactagacactccaattaaaagtcaaataaatgcaacatggttgaacctcacagatattgtgccacatgaaagaaattggacacaaacaagtacata

SEQ ID NO: 151314 - DNA, 599 bp, Homo sapiens
ttaacattttcaaataataaaagaggaaactgaggacatagagttagaagtgtgttcacctgtgagtaacagaaaaaccaacttcagggcataaacaaacaatggctgttattcttcaaaaagtaaaaaaggggattggagataggcaattcaagtctgttytacctactaagtaatttggacaaagacgggtaggctgtttcttttgctgtccccacccccacgcacagtgtactaccttcctcatagttatatgatagctgctatatcttctggaatcacaggactccagggtaaaataaataaagaaagacgggtgatgagtacactaatagccaagacttcaccactacacaatatatatgaaaaagtgaagagaaagaagacataagggtcatactggctgaatcccctagcttcctcaggggtttcacccagcaggcttttgcctatttgtcattggccagaactgtgttacatggtcacccctaactggaagatggctaggaagaaggtgattgtagatagaagccagagcagcaaattagtaatttctgccattgctactaagagatggagtgagaatttggtctagcctt

SEQ ID NO: 151315 - DNA, 611 bp, Homo sapiens
cattaaaaaatgcaataaaaacaggcaccagaaccaagcaaatcctcacastggaatgggtgcatttatttttcacagttattgttaattccatatgagttgtttgtgtattcagaatacttgttaaattcaaaaagaaagaggccctcagaccaggattagcagtcaatggagtataatggcaatgagatagtatggaagttgaaatttgaaattctgctgcaaaatggtcctggaaagcattcaagcaattatccagctaaaccaaaaagaaaaagaatttctaccatacaattaaaaataaaggcaatgttgaggtaaatggtccagattgcctttcatattgattaaattgccttcatgaatatgaaactctgctttgtccacagccaaagactaataaaatcacaggatgtcagaagagaaggaactatatagatcaacttattccatcacaccattctgtagataagaaacctgagagtagtgtttaaaggattttaagatgtagaacagaacccaactagaacctaagtcttagaaccttctagctagttcattccaatttacacaacatgagttaactaatagctcataaggaagaaagatta

SEQ ID NO: 151316 - DNA, 611 bp, Homo sapiens
cattaaaaaatgcaataaaaacaggcaccagaaccaagcaaatcctcacactggaatgggtgcatttatttttcacagttattgttaattccatatgagttgtttgtgtattcagaatacttgttaaattcaaaaagaaagaggccctcagaccaggattagcagtcaatggagtataatrgcaatgagatagtatggaagttgaaatttgaaattctgctgcaaaatggtcctggaaagcattcaagcaattatccagctaaaccaaaaagaaaaagaatttctaccatacaattaaaaataaaggcaatgttgaggtaaatggtccagattgcctttcatattgattaaattgccttcatgaatatgaaactctgctttgtccacagccaaagactaataaaatcacaggatgtcagaagagaaggaactatatagatcaacttattccatcacaccattctgtagataagaaacctgagagtagtgtttaaaggattttaagatgtagaacagaacccaactagaacctaagtcttagaaccttctagctagttcattccaatttacacaacatgagttaactaatagctcataaggaagaaagatta

SEQ ID NO: 151317 - DNA, 611 bp, Homo sapiens
cattaaaaaatgcaataaaaacaggcaccagaaccaagcaaatcctcacactggaatgggtgcatttatttttcacagttattgttaattccatatgagttgtttgtgtattcagaatacttgttaaattcaaaaagaaagaggccctcagaccaggattagcagtcaatggagtataatggcaatgagatagtatggaagtygaaatttgaaattctgctgcaaaatggtcctggaaagcattcaagcaattatccagctaaaccaaaaagaaaaagaatttctaccatacaattaaaaataaaggcaatgttgaggtaaatggtccagattgcctttcatattgattaaattgccttcatgaatatgaaactctgctttgtccacagccaaagactaataaaatcacaggatgtcagaagagaaggaactatatagatcaacttattccatcacaccattctgtagataagaaacctgagagtagtgtttaaaggattttaagatgtagaacagaacccaactagaacctaagtcttagaaccttctagctagttcattccaatttacacaacatgagttaactaatagctcataaggaagaaagatta

SEQ ID NO: 151318 - DNA, 550 bp, Homo sapiens
gttcttggagttaaagactatgtcaccaaataaagagacaaggtgacagcttctcaagcagttgatgatcaggcattactgcttgggggcagtaattgtttgcaccagttctctgtttgacagccttgtctcaatttgattattttgtgaaaaggtgcccttgactctgatgtctttagggttaaaggcacatatacctttgaactgtggaattcctgtggagcaaggcttttcaaacttcgctgtctgtaaactttcacatggaggatttgctaaaaactggrctctagtctcaaaatgtaggttcactggatctggagtgattcctagcattctgtatgttttttaaacaagcaatcctgtgaacctgttgcaggtgggtgatggaccacatttgagactcactgtgctaccaccttgctgctcaaattatgattgcaagccagtggcactgggattggctgagagattgtcaaaaatacaaaatcaggcatcccatcctctacccatggaatcagaaacttcattttagcaaatttcctgagacatt

SEQ ID NO: 151319 - DNA, 365 bp, Homo sapiens
aaagagatataaatatttctggccttggaataggcacttttaaaaaataatgtaatgcctaaagcacaagcaagaaaaggaaaaatagataaattaaacgtcataaaaattaaaatgtctgtgcatcaaatgacactattaagagtgaaaatacaattcatagaatatgagaaaacatttggatatcatatatgtgataagggacttgcattcaagacgtataaagaatatttataagctcacaagaaatacacaaatgataaaaataaataattttaatagacatttatctaaggaagataatgtgaatggctatcaaacaygaaataggaaaagatgttcaacgtcattagtcgttgtcaaaa

SEQ ID NO: 151320 - DNA, 572 bp, Homo sapiens
aattctgactttcctgactttatcacgatttgtttgaccagttttctactattagacaattaggttgtttattttttactcgtaagatatagggataaacttcctttgatataaaacatttcatttatttgttatcattgccttagggtgtttttgtttgtttgtttgtttgtttgtttttgagatggagtctcactctgtcacccaggctggagtgcagyggcacaatctcggctcactgcaacctctgcctcctgggttcaagcgattctcctgtcccagccttccaagtacccgggactacagtgcatgccaccatgcccagctaatgtttgtatttttagtagagacggggtttcaccatgttggccaggctggtctcaaactcctgaccttgtgatctgcccacctctgcctcccaaagtgctgggattacaggcgtgagccactgcacccggctgggtgtatttttaaaagtagcctttttcattcaaaaggtttgaacatttattgcttcaatatgtattcacaactggcatctataaagtttgcattgatttgcagctttgcta

SEQ ID NO: 151321 - DNA, 572 bp, Homo sapiens
aattctgactttcctgactttatcacgatttgtttgaccagttttctactattagacaattaggttgtttattttttactcgtaagatatagggataaacttcctttgatataaaacatttcatttatttgttatcattgccttagggtgtttttgtttgtttgtttgtttgtttgtttttgagatggagtctcactctgtcacccaggctggagtgcagtggcacaatctcggctcactgcaacctctgcctcctgggttcaagcgattctcctgtcccagccttccaagtacccgggactacagtgcatgccaccatgcccagctaatgtttgtatttttagtagagacggggtttcaccaygttggccaggctggtctcaaactcctgaccttgtgatctgcccacctctgcctcccaaagtgctgggattacaggcgtgagccactgcacccggctgggtgtatttttaaaagtagcctttttcattcaaaaggtttgaacatttattgcttcaatatgtattcacaactggcatctataaagtttgcattgatttgcagctttgcta

SEQ ID NO: 151322 - DNA, 579 bp, Homo sapiens
tgtattttccacatccttgaggcatactcacatctggtatcaaaacaaactctcagataggacaaaggaactcatcataaagaaaacataattattccgtgtggtatttaatcacggtggtacatgcattagaaacatttggaccattygttaaaactgtaggtttgagggccatgtatctgatctgctgatcagaatatgttacaacaattccctgaagtctgcatttttaaaagctcctcactcccatgccaccttattctgatacacactgtaatttgagaaaaagttacctcactagggaggcacatagagttagttaccataatgttattcaaataaaatataatctgaaaagattccaagtggcggttgatcaaagttaatatgcgtttatgagaaagcagtttattcattataggttacaagtggtcccaggatggtgggaggataatgcaatcctttgaggaaaggaaatatttaggactaagtcagatattttggtgtcctggagtctagagcagagccctagtctaaggctgggtaactgaacaacttagccagtggtctattgagaat

SEQ ID NO: 151323 - DNA, 656 bp, Homo sapiens
ttgactagaggccaacctgcaggttggccacctggcaggctgtaaccctaagaaataaaaacttcttttctccttttcaaaatgtataaattgtgatttctattaagtcaacaatgtccaggaataatgttattcttgagacagttttatgatctgagctttgttcaaaaactggaaaagttacaaagtaaaaccataattttctttagtgggttaactgtgtgccaatttaaatttaattttttcagctgtgttgaggaaaaatttatgcctccgaagctgcacatgtagaaatttcacaatttgaagaattttcacatatgtatgctgggtgaaaccacaccataatcaagatacccaacatttctaccttccccaaaagtttcttcacaccgttgtgcattcrtctcttcattcaaccctttctctgcaatcaatggtttacttctcgtcagtatggattaatttgcaatttcaagaatgttgtataaatgaaattatagagcagtacgtttttgtctgattttattcactcacagaattatttcaagatccatccatattgttgcatgattcagaaggctgctctttttatattgctgagtagttttcaatggaatatactacattttgtatatccataagcctatcatgtg

SEQ ID NO: 151324 - DNA, 541 bp, Homo sapiens
tagcaatttttgtaagtgtaggtgtatctgtgttcatctttctttgtctcaaagcagacagatattgcttgttcttatcttatatactctccgtctttttattaagtttaggtgcttctttctttctgaaacaatctcttgttcttccaccccttcttcagcctctccacctcagcatcctcttcaggactgcatttttctgttcactatggatgtcttctctggagatcctcagtattctacatcatcaccacttccatttctttggtaatcacatacgtcaccatttctctgtctcacactgctcttctcagttctaaagccatgtatccatttgcaaaatgtaaattttttcttacatgtcccatgagcctctcagactcaatacacccaaaacaaattcygtatctaccacctcaagttagtcatctttcaatgtcccctctgtcttggtaaattctcacctactctgttgccaaagctagaaatctggaagtcgtggatattttcttctttctccctcgcatgtagttctttttca

SEQ ID NO: 151325 - DNA, 579 bp, Homo sapiens
tagcacttttgtggagttcatagaggactccaattaacaaaccttccataaagtccacctacttcactgctgggggacaacgcagcttcctagtcaatgccagggaggaaaccctgcagttgtaggacgcttggctcttgtttgtatcaatattctcctaagttggggtttaaaatggcagctctccatttaaaaaaattaaatagtacactctaatcattttcaagttaagcactttgacttggttaatccataatgtgattttatcaatttgcattaagtgctcttaaacatgtgtgtgtgacggcaaaattgttcagcatccttatctcattatgaagaaagttttaacattatctctccaaaaatttctttggacatgacatttctttgtgtgtcactgatatctttttcagagaaaagtggggaaaaggagattttggattgtggaaatttttgctccttcttacttgcactctcatttaaaaagtataaaatcactgttctggaaagcaatggattagtaggaatgasttgttggtagtggcagtaagaatagcaatcacatactctaagctt

SEQ ID NO: 151326 - DNA, 580 bp, Homo sapiens
atacttatttgatatattaaataaaatagtgaatattctttatctctaaatattctacaacttccaagaaagtctatgtttttacatttaagttgtccaaatagatcaagcaatatgttatcctttggattctctattactaatctaaagtttagagaatagtttggtgctttaggaaaaagttggtattttcatgacaccattattattagagtagaaaatatgaaatatagaagaaaacatttatgatatttagagctcaactgaacatagtcacatgcctgacagttggcctgattttcccaccactaggatttttttggagtgggggtggaatgcacacmtctcctagaattcagatttgagacgcaaagggaagaaaaatgaggcaggaagacatctcactattttagggatttaaaatgaattttaccttttttcatgatgtcagaagcaagttgatactttatacatattttctcctttctcactgattattcctatgtaaggatacgtcttaaagctgtaatgaaatgtatattacagggatatgaatgagagtgattagattatatgtaga

SEQ ID NO: 151327 - DNA, 435 bp, Homo sapiens
gggtggtcttgaggaccccaaatttacaaattttgtgagatgtgagatggtcttgggactcccacatttttcaattkgtgtcagaagtgagagtcctcttggaaactccttaactctgtagttggtgtcacgagtgaagttgtcagaaggagatgcagggctagcttacatgccttcttgtgtgtgtgttcacactcaacatgaagtgtttggaagggaaggttcctactagatagatccctccaactctgtgggtgatcttgggaagagggggtgggaaaaatgttggcatgattatacaattatttcccacatcacctcaactttcttttcttctacctaatgcagtggtcctgagactagggctgcaaatctgaatgctggcagcatggattatcctgtagcaagaaactgaaactatatttttattttata

SEQ ID NO: 151328 - DNA, 414 bp, Homo sapiens
cctatctctgtatagcctgcaataaattttcgtgaggcatcattctgaaaagataaatgtatatgctgataacactrtaaatgtgcagtgcccaagaaacagattggaggcttggatttcgcatatgtgttgtcacatgtatgatatttcctgatttgttatggtcatgaagatgacctctgattctaaaatttgatgatttcaaaaaataatagaagaaaatagaagtgatttaagagagtataactttttaaaaattgggtgaaaataaatagattagatgtttctaatgtttaggttggacccagaaattaaaaacacatctgaaacaaaataatattaaaaacaaaagtaaaagtaggaattagaaatgcacattaaaataaactaggaacatcttagtttaaagaattc

SEQ ID NO: 151329 - DNA, 617 bp, Homo sapiens
atgctttccagtctaacccatgaccctctctgattgttcctgagtgaatacagccttgtgtacaccacgcttctggagcccttggggtgaacatcatctcaggaagggtattctgggctgtctctttccaatctgccatgttgcatgtggctactagattcatggagctaccagcccccaccccttaattgctcaccaccaacatgtctactgtgaatgaacttaggcaagaaatgcttcatgctgctttccaataaagttactcctctggcagaactgcggagctctccttttttttttttttttttaagactagtcaagtgcaatggagctctccattcccattcttctgacaacctgcatctccctttagatagaacacccatgccactacaccagagctgggagcagggacagtggcccacttctgcagtgaaacttatgctctacaagtgggtactgtgtgttagggtgggggagggaaaaagttratagtacttggttttcttttcttgccccctcttggcataaaattttcatccattaaagcacactcaggggccccagatttgtcttgacctatctatgtctgaatcaaagcccttgacccacaagta

SEQ ID NO: 151330 - DNA, 607 bp, Homo sapiens
cctttaaaaagagtatgagaagtaatctaacactacagcagttaacacaagaatgagcctgaagtcagaatttctccttgcacaattatgattgtccaaaagtttggttttgcttatgttgaaaaagaaagggtaaagacaaaaattacttaaaggaaaaaaaagaagctctaaaaagagacaayagacttaaaatccttaagcctcaataaggcaggcacaaagatgaaggaaccatcttgaagcactacaacattttgctgaaacaccagtaactacagtacctaaaccaccttcctatcctttcctcctccacttctaaagataaatttaaaacaaatgctagttaaataagaggagctaccagtgcaattaaatacagaatcaagttaaaaatgaaaacatgggaattccaatactgtaggtctttaaaaatataatgcactaccgttcaccttggaaagctaagaagtcattctcttgaagtccttctcagaattctgtcagaatatgaaattcagatggaaatatatatgcaaataggtatacattattttttagcccaccactgtgaaagaaaatatgcaaatttgctcttgaaaggtcc

SEQ ID NO: 151331 - DNA, 502 bp, Homo sapiens
tcgtttcccttaggtctgctgactcatttatttaagtcaatggcaagtcctaayttgttcaattgtgaagtgcttggacagaaattactgctattgtaagagtgagtttttacactttccagtgatgccccttccttgccaccaatccccttgctagttgattcatttctatccttctccacattcctcttgggagcacacttgaatctagtcatttattcattcaaaatctattaagaacctattatgagccagggttttgggaatttttgccttcttctggcaatttttaggtgggttggaaatattcccggcccacttgtagcttccttccactctcatttaatatatagcacataaccagggtgactgtatgtcctggtttgtctagaacagtcctagtttgtgcccattatgcaagcataactctcaatagtgcccacttgggtcacaaaccacactgggttgttgctgccactgccgccatagtgccagccccttg

SEQ ID NO: 151332 - DNA, 475 bp, Homo sapiens
aatggtctccgagcacctctgccgtggaggggagtgagaagtagaggatacagattccaaatcagaaaaacaagtgcccttctcaagacagtgattacattacctctggagggaaagaggaatacgaratggagggtggtggaggaaacttctatgtgatctacagacctaaagcaaatactgttcaatgttgttatctgacaaagcaggataatgggtacaaaagcatttgttatattcttctgtatacctttgtgtttgttcgaaatattccattaaaaacacaaagcataccatgagtgaagcataaaatttgattgatcccaacctccagtaagcactttactgattttcaataaccttgacctttcctgaagaggtacattgttaatctaaggtcgagttcaaatgtcacttcctccatgcagacatctctgattctccctcttggctgaaagaatgtacctaggaattc

SEQ ID NO: 151333 - DNA, 561 bp, Homo sapiens
actaataatgatagaaaagttagaaaactgattaaaattcactaatacaaaaagacatagattagataagggccatactttatctaacatgtaaaaaaattcaatactattaaaagaatttcaggcatgggaaatgatgggaaagtgtccagtttattttctaataccactataamcccccccaaaaatataactagagaaaactatagagaaatgttatttatgaacacaaatacagaattttataataatttattatgacagtaaactagtgttatttactaattgccttactcaactttgtttccatctattagaaattgtcaagataattgtacctgttctgtgaatggtgcctcatagtgttattcagtgcaagccttgcacaatcatgcatagagcagggcctgacacactgacaaaaatctattacagatagatagactaaggattttacatatcaacgttaaaaaataaagtattacaaatgaatcagggagtgacatctcatgcaaacttcaggaatattgcagaattcttaacccaaactggaaaccaaga

SEQ ID NO: 151334 - DNA, 449 bp, Homo sapiens
actaccaacaaccattagttttaatgttgtctgttatcagataagcttaaacaccttaacataagtactcctttactttttctaactttgtcccactcataatctctccgaagaggattaagtggtagatgaaataagcctaatacaatktaatgataatctagatggttatataataaaatgttgtgaataaaactcactgaatcaaatgccagattggaaaaaagtattttatgttgatctaaacttattatcctacaaaacaacttttaaggaaaaaaagaaacaaacctgggaacatgttatgtgtttgatattcaaagaggatcaacagggatataagtatgtagaccaaaacaagtcttctttgtaatgcatcgtctgcaacatggctcatctccttgctactaatcaaaaatttaatgtgtttttggcaaaaagaaattact

SEQ ID NO: 151335 - DNA, 432 bp, Homo sapiens
tggacaggagtcctttgccacatgcatagtttgcaaatattttctcccactcggtgggttgtctgttcactatgttgatagtttcctctctctctctctctctctctctctctctctctgctgtgcagaagttctttagtttaagtaggtctcatttgccaaattttgtttttgttgcatttgcttttgggttcttggccatgaattccttgcctaagccaataagtggaagagttttttgatgttctagaatttttattgtttcatgtcttagatttaagtctttgatccatcttgagttgatttttgtmtaaggtgagagatgaggatccagttttattcttccacatgttgttggccaattaccccagcaccatttgctgaataaggtgtctttttcttactttatgttttttgtgtgctttattgaag

SEQ ID NO: 151336 - DNA, 590 bp, Homo sapiens
cgtgacattcttagaagcacatgttttctagaaaaagataatcataaacatctgtttttgcagtggtattttttcatcataataaatgcagacagtattccatggatttctatggatacagaaataygaatttttagacacaccattggaatcactggtttaataaaagctaagtgaagtgtggaaaatatgtaaaatatgttgatttactatctctcagagcatttctaaggaagcattcataaacctgactgcttttaaaaataaaatgaaattcttctataggtctatggttggtcgtattcccaagttaaccttttttggggggcaggggcaacaccatggctgtgagcctaactcacttaagaggctctttggagaaaacctgtgaacattctgatatttgtgttgcaaattctaaagtctccttctatggaaattttaaattttgactgctaacccacaggaacagattgagaacaattctatgtaaagacagagaaatgggcaagagtcttgcaaagttagaaaatttatcagtcaccagaattaggctcagaagcgtttgtattatcagatcaagtattttt

SEQ ID NO: 151337 - DNA, 590 bp, Homo sapiens
cgtgacattcttagaagcacatgttttctagaaaaagataatcataaacatctgtttttgcagtggtattttttcatcataataaatgcagacagtattccatggatttctatggatacagaaatatgaatttttagacacaccattggaatcactggtttaataaaagctaagtgaagtgtggaaaatatgtaaaatatgttgatttactatctctcagagcatttctaaggaagcattcataaacctgactgcttttaaaaataaaatgaaattcttctataggtctatggttggtcgtattcccaagttaaccttttttgkggggcaggggcaacaccatggctgtgagcctaactcacttaagaggctctttggagaaaacctgtgaacattctgatatttgtgttgcaaattctaaagtctccttctatggaaattttaaattttgactgctaacccacaggaacagattgagaacaattctatgtaaagacagagaaatgggcaagagtcttgcaaagttagaaaatttatcagtcaccagaattaggctcagaagcgtttgtattatcagatcaagtattttt

SEQ ID NO: 151338 - DNA, 266 bp, Homo sapiens
ggcttgtgattcatagtttgaatatcagatggtcctgaagcaaaaaatatatttgcttttaaaaattgagaatttgacttgtctyattgcccacaccccacatttacaaaattgtggatcattgaagtatctgaggaaaactttcgatctattagagcacttgataatagcagtttcatcccacagttattcaccaataagtatgagataaattctttgagcctagaaaaactgggagagtagatgttattatttgaccatctggg

SEQ ID NO: 151339 - DNA, 608 bp, Homo sapiens
taaatgcactttgcatggagaacactgaacttgatgctatggaggtcccatatggtaggtgcacaacgatgcatgaatgagtaagtgaatgaatgaatgagttcagagggaattaaaccacgagaaaaatcatgatggtttgtgacttatcaaggaaagcatctgatgaatcttttaaggctgatgccttaaaaaaggcatagaatgatgattggaagaggaggaaatggcttagatgagaatagaggtttagcaagaagaatttaaaaggacaggagccatcatgtaataatatttgactcctctccatgggcctatttgcttgtgtggaatgtaaaatttcagggaacagaaatttttaaacattaatttggaacacattagcrtggccttccatagagtatgccagagtgtttttaggttgtttgaagataaagatgatcctcttacctacattatttcaagttcaaaaatgaaaaattatggggcatgataatttcaagttttagatttagggtgaaataattcatttagatgcatcacaaattaatcttccctcatagaatcagaataagcaattgaaattctgttttgcagcaagctgctcc

SEQ ID NO: 151340 - DNA, 570 bp, Homo sapiens
gcattgaggacaagattttccaaatcatattccttggaatgtcattccttcaaagatgctttgtaagaaaagggattcaagtatgctcaataaatgttgattccatttttttttgtagattcacaatgcagagcattgtataaaaaaggcaaccataaaacctatttaacttcatttagaaagttcacaaaataattgaagaagctgctcaagwttttatgctttagccatttctatttttattttatttttgagacacggtcttgctgtgtcacccaggctggagtgcagtggtgcagtcccagctcactgcagcctcaacttcctggccacaagtgatcttcccacctcagcctccagagtaggtgggactacagatgtgtaccaccacgcccggctgatttttaaatttgttttgtagagatgggatttcgccatattgcccaggctggtctcgaactcctgagttcaagcgatccacctgctttggtatctcaaattgctgagattacaggcatgagccactgcacccggcttctatttttaattatgccttatttgcccaacaaa

SEQ ID NO: 151341 - DNA, 570 bp, Homo sapiens
gcattgaggacaagattttccaaatcatattccttggaatgtcattccttcaaagatgctttgtaagaaaagggattcaagtatgctcaataaatgttgattccatttttttttgtagattcacaatgcagagcattgtataaaaaaggcaaccataaaacctatttaacttcatttagaaagttcacaaaataattgaagaagctgctcaagtttttatgctttagccatttctatttttattttatttttgagacacggtcttgctgtgtcacccaggctggagtgcagtggtgcagtcccagctcactgcagcctcaacttcctggccacaagtgatcttcccacctcagcctccagagtaggtgggactacagatgtgtaccaccacgcccggctgatttttaaatttgttttgtagagatgggatttcgccatattgcccaggctggtctcgaactcctgagttcaagcgatccacctgctttggtatctcaaattgctgagattacaggcatgagccactgcacccggcttctatttttarttatgccttatttgcccaacaaa

SEQ ID NO: 151342 - DNA, 501 bp, Homo sapiens
cagtcctttgctaaagaatagcaagggtgacctttactccagttcccagtaagttcctctttcccatctgagaccacctcagcctagacttcattgttaatatcactatgagcattttggtcaaaaccattcaacaagtctctaggaaattccaaactttcccacatcttcctaccttcttctgaaccctccaaactgttccaacctctgcccattactaagttcaaagttgcttccatatttatagcagtgccccactcccagtaccaattttctgtatttgtctgtttccaccctgctataaataactacccaacactgggtggtttattaaaaaaaaaaaaaaaaaaaaaggtttaactgactcaaagttccacatggctgggaggcctcaggaaacttacaatcatggcagaaggaggagaagtaagtaccttcttgcaaggcagcaggagagagagagagagtgagggaggggggmtgccaaaaacttttaaagca

SEQ ID NO: 151343 - DNA, 556 bp, Homo sapiens
tttctcaatctgaccaacacttataaattgaaccatttgaaatatccatattttcttggccaaaattggtagactatcagcaatttagtatggttcaacctaatgaaggtagagttcaagaaccatcttagttaaattggtacctgggacaaactaatctcacatactgatcagtttttgctggtatccattctggtagtgtgcttaacaagttaagcaatacagaaagggtaggacatgttttggtgaaaaatggtagtcaattttccatgtttagtgaaaaaagaagacmattatttaatgatgagtagggagaaagtgggagcctaatggtgaagccaactaacagatccttgtaccgacaaatattgtcacttttgactatcgtgctgaatattccacattaggtaacttaacggaagaactttaaagaaaaactttccaaggcctagcttatagttctctgggttaaaaaggattttaaaatctgatttgatttatgagttacattcacttgaatgtctagaggatggcagaaatattgttatgtgaattc

SEQ ID NO: 151344 - DNA, 556 bp, Homo sapiens
tttctcaatctgaccaacacttataaattgaaccatttgaaatatccatattttcttggccaaaattggtagactatcagcaatttagtatggttcaacctaatgaaggtagagttcaagaaccatcttagttaaattggtacctgggacaaactaatctcacatactgatcagtttttgctggtatccattctggtagtgtgcttaacaagttaagcaatacagaaagggtaggacatgttttggtgaaaaatggtagtcaattttccatgtttagtgaaaaaagaagacaattatttaatgatgagtagggagaaagtgggarcctaatggtgaagccaactaacagatccttgtaccgacaaatattgtcacttttgactatcgtgctgaatattccacattaggtaacttaacggaagaactttaaagaaaaactttccaaggcctagcttatagttctctgggttaaaaaggattttaaaatctgatttgatttatgagttacattcacttgaatgtctagaggatggcagaaatattgttatgtgaattc

SEQ ID NO: 151345 - DNA, 625 bp, Homo sapiens
tgttctttattgtttgagggttttcatctatgtgtatttttactacctggggtttgaaaagctgcaaactaaatttcataaaccataaaaacttataatgctattaacttgggatgagcttaatctttcatttcctatctccttcaaccttactggagtttcacctttcatcattcctgtatgcatactgggttctgygcacctatgtgggtgaggtgctaataagcaacaagactgtattgatcctgttcatatgctctacagtatcctgtttctcacctacagagtgctggctggcaaacccaaggagcactcagaataacacactctgttaggcaacaatgagttttatgaagttgaaatggtccctactgactcggggggataaaatcccagctaacacaatcagcactgtggaatcaaattttcagtgatgatagaaatattctatatctgtgttgtccaatacagtaggcactagcaacggcaatagagcattggaaatgtggctaatgtaaccaagaaagtaaatttttaatttcatttaatcttgatgaatttaaattttaaaactcacctttggctgatagctactatattgatagtagcagccacataagagaaa

SEQ ID NO: 151346 - DNA, 625 bp, Homo sapiens
tgttctttattgtttgagggttttcatctatgtgtatttttactacctggggtttgaaaagctgcaaactaaatttcataaaccataaaaacttataatgctattaacttgggatgagcttaatctttcatttcctatctccttcaaccttactggagtttcacctttcatcattcctgtatgcatactgggttctgtgcacctatgtgggtgaggtgctaataagcaacaagactgtattgatcctgttcatatgctctacagtatcctgtttctcacctacagagtgctggctggcaaacccaaggagcactcagaataacacactctgttaggcarcaatgagttttatgaagttgaaatggtccctactgactcggggggataaaatcccagctaacacaatcagcactgtggaatcaaattttcagtgatgatagaaatattctatatctgtgttgtccaatacagtaggcactagcaacggcaatagagcattggaaatgtggctaatgtaaccaagaaagtaaatttttaatttcatttaatcttgatgaatttaaattttaaaactcacctttggctgatagctactatattgatagtagcagccacataagagaaa

SEQ ID NO: 151347 - DNA, 625 bp, Homo sapiens
tgttctttattgtttgagggttttcatctatgtgtatttttactacctggggtttgaaaagctgcaaactaaatttcataaaccataaaaacttataatgctattaacttgggatgagcttaatctttcatttcctatctccttcaaccttactggagtttcacctttcatcattcctgtatgcatactgggttctgtgcacctatgtgggtgaggtgctaataagcaacaagactgtattgatcctgttcatatgctctacagtatcctgtttctcacctacagagtgctggctggcaaacccaaggagcactcagaataacacactctgttaggcaacaatgagttttatgaagttgaaatggtccctactgactyggggggataaaatcccagctaacacaatcagcactgtggaatcaaattttcagtgatgatagaaatattctatatctgtgttgtccaatacagtaggcactagcaacggcaatagagcattggaaatgtggctaatgtaaccaagaaagtaaatttttaatttcatttaatcttgatgaatttaaattttaaaactcacctttggctgatagctactatattgatagtagcagccacataagagaaa

SEQ ID NO: 151348 - DNA, 600 bp, Homo sapiens
gagatgttgatgacctagttgtcccaggagctctgtaagaaaagtcaaaaactctgaattgcaaaaaaacaaacaaataaacaaaactctgaattgctttctagcccycatattcccactagcaagtgtgatctagaaaaaaataaaaaaggattacaagataaatctcttgaggagattccaatccaagacacaaaataatctctcttttaatcctctgcaatctgtataataaaacctccctttgtcaacaatgttttcatcccagaggaaagcactacctaggacactgaaatattgtcatcctcttctcccctttatgctccagaatcttaagaaaaaaaaagattacaaattgaatgtgtatggaatgcaaaaagaagggtggaagtgtaatataataaaggtagtatgttagactcacatagaggcaccaaaaaaggaacttttattttttgatgaaaaactctcaaaactagattccagtctttttttccctttctctaaactcttctaattggcttgccaaattaaccagtgttctccatttcctctctaaaatataagacttaagtccaagtacactgaatagtttatatc

SEQ ID NO: 151349 - DNA, 312 bp, Homo sapiens
aatgacacactagcaacattttgcctcctgtttctatgaccttaggctctgttggcctaggggttctagttccaaagagaggcatgctcccagaaraggcacaacaatgatccagttgacctggaagttaagaatgtcacctggccacactgacacttctcatgcctctgaatcaacaggcaaagaaggcagttactgtgctggccagggtgattgatcctaactaaccaagggagaactttgactactactccccaaaagaggtaaggaagactatgtgtggaacacaggagatcccttagggaatattgt

SEQ ID NO: 151350 - DNA, 312 bp, Homo sapiens
aatgacacactagcaacattttgcctcctgtttctatgaccttaggctctgttggcctaggggttctagttccaaagagaggcatgctcccagaaaaggcacaacaatgatccarttgacctggaagttaagaatgtcacctggccacactgacacttctcatgcctctgaatcaacaggcaaagaaggcagttactgtgctggccagggtgattgatcctaactaaccaagggagaactttgactactactccccaaaagaggtaaggaagactatgtgtggaacacaggagatcccttagggaatattgt

SEQ ID NO: 151351 - DNA, 469 bp, Homo sapiens
ggtgggcaaatcgtttgggcccaggagtttgagaccagcctgggcaacactacaaaaccctatctctacaaaaaaataaaaaaattagctgggtgtggtggtgcacacctgtagtcccagctrcttgggaggctgaggtgaaaggattgcctgagcttggggaggtagaggctgcagtgagctgtgattgcaccactgccctccagcctgggccacagagcaagaccctatctcaaaaaagaaagaaagaaaaaataataaaagaaagaaaggaagaaagaagggaaagaaagaaaagaagaaagggaaagaaagaaaaaaaggaaggaacaaagagagaaagaaaaagaaagaaagaaagaaaagaaaaagactgaagggatggcaaaagatattttacacaaatggaaaccaaactaagcaggagcagctgtacttagataagatagactttaagttgaaactgtaa

SEQ ID NO: 151352 - DNA, 585 bp, Homo sapiens
taccctttacactccagggcacactgggtccaagtctaacatccaaatccccaaagagctactacttttaattactaattagggatgacctggagtaacccctaccacccgccaaaggaagagatggtttcatttgtttttccaaattttcaaaccaaagataaccctaaacaaagtcacttacatcacattaccactataggaccaaacactgtttagctcctctaggcagaatttggatttttaaaraaatttttaatgactaaatgttttcctggctcaaaacatagattatctaatggtaacttttctatcctggactatgaattaaggagagatatagaagacaatgaggtgcccccttagcaactcatagccatcctagctgcttactttactaggctgaccatgattttccccaccctaaaagtgaatctcagtggacactctcatcctatgccaaatacaaaattgtaatcatttctctgtttcagtctttgtatttctgcattgctatggagtgttagaatgggcaagctgaagaaaggtaaaaataaatatgtgtgtgtgtgtgtaatctatgca

SEQ ID NO: 151353 - DNA, 601 bp, Homo sapiens
atttggtataacacacacacatacacattcacaatcattttttcaatctggctttatagtaggaaatacaattgagaaacttcagaaaaaaggaggccaacatctcaaacttctctcctaaacctggttagtttttttttcttctatattttagtttcacaaatttaggtataatattgaactccttgttagtataaaagtttagatgttgaaatagtttacttacaaacctagtatatcrccaagaagctggcaatataagaggacatttgattcgttaattcctgcaggtattttacatcattatgcaaatactaaaaaagtataaaataaagtgatctatagtttaaagccagataagaaataatggtagccataacaacaacagcaacaacaacaacaataatagttgctaatagttattgattgcctacttatgctactctctgttctgagcactctgatcataccatctaatttcatcctcacaagaatattgtgcagtagatactgtttcagtcctttactagtgaggagactggctctgaagtaatgtcaacagcaaatgtcaaatcagaatgtcctaatacaaggaaagctt

SEQ ID NO: 151354 - DNA, 309 bp, Homo sapiens
ctctcaccccaatttactgaatgggtctgctaaaagcataagctttttagtcccataagtaattttaaaatgattattctaactgaactgctcctaagatttactacctatattcaagtgtaaacaaaacactakatctcagattcagtaaggaacttttccatttcctttctctccatttaagctcaaggcagatattatgattttgaaagtaatatttatttggataatatcagaaaaccaacctaaacaaattttttcttctcatgctattattctgaaacttccatggctatttttgtatacatt

SEQ ID NO: 151355 - DNA, 488 bp, Homo sapiens
tgtgaacttcaaaatgtttattccttctgttcattttcattttttatagtttatgtattcttggtagtctctttcttcttctgtgatgttttgttcaaaaatgcttacaatcccaaggcatttaytggtgtacagcctgactcagcatgttcttagacatgcatggtatttgacaaataatttgggattttaaggcaaacttagagatgcctaagattggttagacgctattgacgggtggcaagcacattgctgaaaagtgtccttgctgcacttaattaatccccatcagaagctaggtgatccctgactacagatttagtcatcaacttgcttgcgtttgaggcgaggtattcatccatgtaaactgcaaccctcttgtcatccctcttaccacctacgtctttcttgtgaaacaggaagggtttggggatgatctggtgttttcagcctgcaaaattaagggtcacagttgtgcttctttccac

SEQ ID NO: 151356 - DNA, 488 bp, Homo sapiens
tgtgaacttcaaaatgtttattccttctgttcattttcattttttatagtttatgtattcttggtagtctctttcttcttctgtgatgttttgttcaaaaatgcttacaatcccaaggcatttactggtgtacagcctgactcagcatgttcttagacatgcatggtatttgacaaataatttgggattttaaggcaaacttagagatgcctaagattggttagacgctattgaygggtggcaagcacattgctgaaaagtgtccttgctgcacttaattaatccccatcagaagctaggtgatccctgactacagatttagtcatcaacttgcttgcgtttgaggcgaggtattcatccatgtaaactgcaaccctcttgtcatccctcttaccacctacgtctttcttgtgaaacaggaagggtttggggatgatctggtgttttcagcctgcaaaattaagggtcacagttgtgcttctttccac

SEQ ID NO: 151357 - DNA, 579 bp, Homo sapiens
tggtggtgagggcctgtagtcccagctactcaggaggctgaggcaggagaatcgcttgaacccgggaggcagaggttgctgtgagccaagatcgcgccgctgcactctgcactccagcatggagacagagcgagactccgtctaaaaaaaaaaaaaaaaaaagaaacagattcacactcaatagtagaatactagatagactcaaaaaggacagtttgagtgtcctttttgagggatgtcattgaaaaggaaaagaaaataatgaagttcatgattggtggtagattttattcacttttaacttttctaacaacagggcattttcattagtgagtttcccccaaatattttgatttaatctacataaaatgcatagtttttgcagaaacaccatgactatataaatgcattactttaccaaagttccattakccgcaagatactaacatcctagcttctttcataggccatgctgattgaatccaggttttctttcttgacaatgcttactatgaacattttgtgattaaatatcatgtttgatataagggtacttttcatttgccaatataaaaatga

SEQ ID NO: 151358 - DNA, 576 bp, Homo sapiens
aagtaagcattagctccatacagctactgagcaattgaagtggggccaggccaaatacagaagtgctataagtgtaaaatatataccagatttcagagacttagtatgaaaaacaatataaaatataccattaataatctgttatattgattacattttgaaatgataatgtkgatatattgagctaaactattgaattaaacttacttttacctatttctttttacattttttttttttttttttgagatagagtctcgctctgtcaccaggctggagtgcagtgacacgatctcggctcactgcaacctctgcctcccgggttcaagtgattctcctgcctcagcctcccgagtagctgggactacaggcatgcaccaccatacacagctaatttttgtatctttagtagagatggggtttcgccatgttggccaggatgaactcgatttcttgacctcgtgatctacctgcctcagtctcccaaagtgctgggattacaggcgtgagccaccgtgcccggcctctttttacatttttacatggctactcaaatatttaaaattaaaaatattg

SEQ ID NO: 151359 - DNA, 546 bp, Homo sapiens
agatctgtacactaaaaactatagaacatcaatgaaaaaaaattgaagaagacacaaacagatgaaaagatattccatgttcatggattagaataattaatattgtcaaaatgtgtatactatcccaagtgctctatagagtcaatgcaatatccatcaaaattccagtgtcacttttcacagaaatagcaaattaattttaaaatttgtagagaaccataaaagactatgaatagccaaagccatcttgagcaaaaagaacagctggagacatcacattccctgatttcaaaatgtattataaagctattgctataaaaattgcatggtactgacataaaaataratacatcaaccaaagaagcataatagaaagctcagaaataaacccaagtatttatgatcgattgatttttgacaaatgtgccagaatatacagtggggaaaggacagtctttttaataaatggtgttgggaaaattagatatccagatgaagaagaatgcaatcgggccctcatctgacatgttacaaaaatcaactcaa

SEQ ID NO: 151360 - DNA, 546 bp, Homo sapiens
agatctgtacactaaaaactatagaacatcaatgaaaaaaaattgaagaagacacaaacagatgaaaagatattccatgttcatggattagaataattaatattgtcaaaatgtgtatactatcccaagtgctctatagagtcaatgcaatatccatcaaaattccagtgtcacttttcacagaaatagcaaattaattttaaaatttgtagagaaccataaaagactatgaatagccaaagccatcttgagcaaaaagaacagctggagacatcacattccctgatttcaaaatgtattataaagctattgctataaaaattgcatggtactgacataaaaataaatacatcaaccaaagaagcataayagaaagctcagaaataaacccaagtatttatgatcgattgatttttgacaaatgtgccagaatatacagtggggaaaggacagtctttttaataaatggtgttgggaaaattagatatccagatgaagaagaatgcaatcgggccctcatctgacatgttacaaaaatcaactcaa

SEQ ID NO: 151361 - DNA, 497 bp, Homo sapiens
ccagggtaactgtgcactggggaaagggaaatgatcagaactttcggggactactggaccctggctttgagctgatgttgattccaagggacacaaaacatcattatagttctccaattaaagtggggtcttatgtttgtcaagtaattaatgaagttttagctcaggtccaacttacagtgggtccagtgagtccccagactcatcctgtggtcacttctccagtgccagaatgcataattggcatagacatacttaacagctggcagaaccyccacattggctacctgactggtaagatgacggctagtatggagggaaaggccaaatggaagccattagagctgcctctacctagaaagatagtaaatcaaaaacaatattgcatctctggagggattgcagagatcagtgccatcatcaaggacttgaaatatgcaaaggtggtgattcttggccgggcacagtggctcacacctgtaatcccagcattttgg

SEQ ID NO: 151362 - DNA, 301 bp, Homo sapiens
attcctgttcatctctcctatttggcctgtgcagaagacagatggatcttggagaatgacagtggattatcataagtttaaccaagtggtgactccaactgcatctgctgtaccagatgtggtttcattgcttgagcaaattaacacatctcttggtaactggtatgcagccactgattcggcaaatgccattcctkttcataaggcccaccagaagcaatctgccttcagctgtcaagaccagcaatataccttctctgtcctacctcaggggtacatcaactctctggcattgtatcat

SEQ ID NO: 151363 - DNA, 580 bp, Homo sapiens
atgggtgtccctgtctgcctttattatttaagaaactctctcaccattcctgtcatagcctcttttatgcctggcctactgagcagaggttcatccttcagtcggttagcaagcttttgtcaagatagatggaattttagacttagtctgaagtgcggtccctctccatctgctttggaaacagctcacaaattcttcttgttgtttcagatgtgatcatcaatctcctgccagaggaaattaaaaactgttatttgtctgttgggcaggagagattccagagttttgacccctaattcattccctactctttgtgctttggctgtaacatctaactaagggtttgcagggtcttcttttatttctccagattcgttgcattaaaaattgttttatcccattagtgtgtcatttcatcatagttattaaaaaaaaactcagcccctttgtagcccrgttttgtctgccgtcttccaaccactgtgctgcttccccggagagtctgtctctcagcagctgctggttggatcattgaggccttaacccaggagaggtgccatctctctcagaggtgctggct

SEQ ID NO: 151364 - DNA, 559 bp, Homo sapiens
ttctctgaggcagtgattctaaattgaaacttgagtgacgaaaaggagatggctatgcaaagatgggaggaagggcattcataaaacagatcccgcatgggggagatcaaaggaaagagtgtgtctggaataaaaccaataagagacatagtaacagcaagatgaggggagggaggtggtcaaggtccagatgatttggagtctcaaggtcacgccaaaaaaggagtattttattccaagcattctgggaaatcacttgaagctaagaatttagttctcttttcatgtaaatcagtctcccccacatccaagaattaacatctcaccttttaaacatttctcacaattcctaggtcctccaaacctttttacatgaaaggctttttaataaatagctgctggctgattgtgttgtayatgaaatctttaagttagttaatagtttaagtaggggcttaaccccgagacgatcagaggtcatgatgattgcagccctcgacctcaaatccacaggaaagctgaagaaatgagctcagcatggaagcagaatgtcctgact

SEQ ID NO: 151365 - DNA, 563 bp, Homo sapiens
aaatagctgctggctgattgtgttgtacatgaaatctttaagttagttaatagtttaagtaggggcttaaccccgagacgatcagaggtcatgatgattgcagccctcgacctcaaatccacaggaaagctgaagaaatgagctcagcatggaagcagaatgtcctgacttcrcctatgacttgactctgagagtcgtgaaagtgcctcacactgcgagcagcggcccacgaggatccaagagagcccctttgtcgacccccttcaaagcaaagcaaatcacctaactttggagaggttctgacagtcttcatattcatgtgtcacttagctttaattgaaactttagaacaggtaaatttgtaacaattcatatttttcatgctcaaaagagtgtctttgtgtaaaacagcagcctgaataatggggggtagggggaggattaattcagagaggttatttgtttttttctctcttgatgcaagccccatttttacatgcttttcttttgactgaagggcaatctttaattgcagctttaagggaagcttaaagaggtcatta

SEQ ID NO: 151366 - DNA, 590 bp, Homo sapiens
gaattcttattacacctgggatggggtgctaggtgggaacagaatcagagtgaaaagcagaattgtggaactggagacccagatacagtctcactacatccacatcaccaaagtcacaaagtattgcttttcattttcagcccttagagattctgaaagagaaaaaccatcaaagtaaacagtactttgttctccatgttggttgaataatatcctgagtggtatacttggatctcagaaagatttctaaagcctttgcaatgttcacaacaactacagaagaaatatactgttcgccatattatgtaatgaaacaaatcctgtttgggtctggagatgtggccagtttggcaatatgccagtctcgttttgttgaacaactatttaattgtttgaaataaaaacaacaacaacaamaaaaaactggttggtatccatcagcccttgctaggtaattatattccaaattggtagacatccttcaaataccaattatattaaaagtagttgatgaatttaaattcttttagaaaattatgtttttctaaaatgagtacttacccatatagggttattactgtctgaacata

SEQ ID NO: 151367 - DNA, 554 bp, Homo sapiens
gtaagtttgttttttccttgtgccctttatcctgaatttgcaggccaagacgatcaaagaaatggtaacacacatacatttcttggcagtcgataaaaacagtgttacagaagtaaatgacacaaaaccagaggataataaaacttcccaattatataatcattttcatccttttttctctgcaggcttggaacactggagattttttttatgtgtttttttttttttttttatcaaaagtcaccagatggaaaatgamaaagtcagtcaaaggagcccaggtaaacttcaattcatacatggatgatcttaagagaacatctattcttgcctcattacaatggattcctctgattaaaattataattttagctaggccaagagaatattaaaaaattataagccctagaatgtgacgtagtgttatggattgaattgtgtctctccaactgatgttgaagtcataacctctggtacctgtgaatgtgactacatttgaaaatagtgtctttgcagatgatcaaattaagatgaggtcattagatatgccctaa

SEQ ID NO: 151368 - DNA, 535 bp, Homo sapiens
agtgatttttctaaaaacacagagcaagaaagcagcactgcccagcagagatgctggcctgggatttacagacagaaaatctatgaatcccatctcttttcttattagttctgtgaaggcaacttactatytttcagcctcaatttctgcatctgtaaaatggagaagggaataattccaatctcacaggtcagtgagaatgcatacatgcctgacttacacaagtgctcaataaaagacacattttatcgtcaatgacttcccacgaccagaacccaaatataccgattgccatttcaagcttgcttctattacacctactttacctttcactaacccaagactatgcccatggtctcatgaatcacaccaaacacttgatgtacatgtaagtggaaagggacaaaggaacaagaaataattaagaactaatatttctcattggttgatatgaatgaacattcagttgatagttaccaatgaactattattactaaaaacactaaggtttataagataaaggtcaagggttttt

SEQ ID NO: 151369 - DNA, 495 bp, Homo sapiens
aagcagtttcctctttacatcataaagtgctacaggtattattgtatatgtgtttctatgcacctatgctagagtttcattaagaattatatctggatgataaactattgaattgaaggatatggacatcttcagcaagacatggtataactgtttttatatttgttacataaactcattctcycattagactccagagttgataattattcataccatcatccgtgtcattttaattttgtcagacctctttttctattgccagtcagatgagttggaaaaaatacttactgagttttactctgcatttctcttatttctactgagttgggcattgttttatattattttcatgaatattctattgccattgtctgtaaattccctgtttatatcatctgctgatctttctattggattgtttatagttttttattaatttataagtactttgtttctggatgctaattcttggtggttagatgtatcatgaat

SEQ ID NO: 151370 - DNA, 643 bp, Homo sapiens
tccaatttaccagtgtgtatcttttagcccatttacatttatgtgtgaatttgaacgtgtcatcataatgctatctggttattttccacattagttgacacagtttcttcataacrttattggcctttatattttgatgtgttcttgcactggtttgtagcagtttttcctttccatatttagtgtttccatcactaaattgcaaggagctcttgcaaggcaggtctggtggtgatgaagtccctcagcgtttgcttgtctagaaaggatgttttttgtctttcacttatgaaacttagtttggctggatataaaattctgggttgaaaatgtttttctttaagaatgtttaatatttgcccccaatctcttctgacttgtagagtttctgctgagaggtccgctattagtctgaggggctttgctttgtaggtgacctggcctttccaggcagagattgtttttcttttcccttcctttctcccaaataagtggagtctctcacctgtgctgagccacccagagttgggagtgtgatgatgcaagcacccatgtgtccaccaacacttggactgcactgggtggaacctgaattcagcatagctctatgtcttgctcaaggccctgccctttaatatggtaa

SEQ ID NO: 151371 - DNA, 643 bp, Homo sapiens
tccaatttaccagtgtgtatcttttagcccatttacatttatgtgtgaatttgaacgtgtcatcataatgctatctggttattttccacattagttgacacagtttcttcataacattattggyctttatattttgatgtgttcttgcactggtttgtagcagtttttcctttccatatttagtgtttccatcactaaattgcaaggagctcttgcaaggcaggtctggtggtgatgaagtccctcagcgtttgcttgtctagaaaggatgttttttgtctttcacttatgaaacttagtttggctggatataaaattctgggttgaaaatgtttttctttaagaatgtttaatatttgcccccaatctcttctgacttgtagagtttctgctgagaggtccgctattagtctgaggggctttgctttgtaggtgacctggcctttccaggcagagattgtttttcttttcccttcctttctcccaaataagtggagtctctcacctgtgctgagccacccagagttgggagtgtgatgatgcaagcacccatgtgtccaccaacacttggactgcactgggtggaacctgaattcagcatagctctatgtcttgctcaaggccctgccctttaatatggtaa

SEQ ID NO: 151372 - DNA, 643 bp, Homo sapiens
tccaatttaccagtgtgtatcttttagcccatttacatttatgtgtgaatttgaacgtgtcatcataatgctatctggttattttccacattagttgacacagtttcttcataacattattggcctttatattttgatgtgttcttgcactggtttgtagcagtttttcctttccatatttagtgtttccatcactaaattgcaaggagctcttgcaaggcaggtctggtggtgatgaagtccctcagcgtttgcttgtctagaaaggatgttttttgtctttcacttatgaaacttagtttggctggatataaaattctgggttgaaaatgtttttctttaagaatgtttaatatttgcccccaatctcttctgacttgtagagtttctgctgagaggtccgctattagtctgaggggctttgctttgtaggtgacctggcctttccaggcagagattgtttttcttttcccttcctttctcccaamtaagtggagtctctcacctgtgctgagccacccagagttgggagtgtgatgatgcaagcacccatgtgtccaccaacacttggactgcactgggtggaacctgaattcagcatagctctatgtcttgctcaaggccctgccctttaatatggtaa

SEQ ID NO: 151373 - DNA, 536 bp, Homo sapiens
ttctagtggggaggatcattgtcataggtttccatttcaccatcttgctccacccctctcaaatttatataaaaayttaaaagtcatttcaaaatgattctaaaacaatgtggaagaaataacaggcaataattattattcaccatactgagattatcatatcaagaattttattgaaattattatattaactttacttctaaaaaattgtaatttttaaaaactatacttatggttaaagacattatttacaaagcaaaaagtaaaataagttcagagaaaatttctcatcaaaaaatattaagagaaggatatcctgtaattaagtataataataatggcaaacatttatatagcatgttacatatacacaattatagtatacacacatattgatatgtaagtgattatgtgaatgtgaatgtactactagcaacttctctgaaaattatgtacagagttagagaggaataaatttaagtatagataagttactcattcaaagtcttacaggtcaaaattggtagagttgggac

SEQ ID NO: 151374 - DNA, 561 bp, Homo sapiens
agttataaaaactagagcttattttttctcttaactcggtttttctaacattttttattaatgtaatgaagggatccatctgtgacagatcagaaattaaaaaaaaagaaagaaccaccacaggtgattagacctgcctgaaccttttgtaacattcttttagcagaaaatgaatgtgtcatatgcatattggcttttccggaatccatgaggtgaatgaattttcaggcttggatgagtgttagaaactaaaataaactaaatgaccagaatcaccaccaaaatcagccctcataatagtctggcactaatgttgttgctgccaccgctatcacaatataaccagaccttggacctcagggggtctgttgctgtcactcactgtccctgaaatagcatcttccctctccccagtcctttgcattgctcaccctacattcaaactacgggsttagaatatctcattggccacaccaacatccttccaagtgccttctgaaaatggctgttgggtctatgaataccggctgccactaacatctatcccatctgtggtagttc

SEQ ID NO: 151375 - DNA, 397 bp, Homo sapiens
aagtgataaaaaaaaaaaaaaagaatggactttcccaggccagctgtggtggctcacgactgtaatcccagcactgtggcaggccaaggcgggcagatcacctgagatcaggagttcaagaccagcctgaccaacacggagaaaccccgtctctactaaaaataaaaaaaattagctgggcgtggtggtgcatgcctgtaatcccagctacttgggaggctgaggcaggagaattgcttgaacccaggaggcagaggttgttgtgarctgagattgcaccattgcactccagcctgggcaacaagagggaaactccatcaaaaaaaaaaaaggactttctcaaagaaaatgtatttaaatgtctgcaccaataattccagcatgtgtatgaataaat

SEQ ID NO: 151376 - DNA, 642 bp, Homo sapiens
tctaatgtctgtgttccaaaacacatcacattattaggatgtagggagatatgtatgtgtgctccctggggtggggatttctagttactagaccatctccatttttagcakttggcatcctcatgatacttttataaatacgacattaacaggagagcagcagtacgattttgccgatggaataacagatttgccggcaatcactgaaagagtgcaaatatcgggtccttgtgacttcaacggactcttccaaattgtatgaatgtatcaatgtattagataaacccagtttcagaatgataaagaaaaaatgttagaccaaataatgcggctagttaacagtggtacgatttctagcccgtgggtttaaaatgcacttaaagtcctgtccttgccttttattttctgaacttgatgtttttgcattctttgagttcagtttaaagacaactacgagcatctgcaaccaatctgacaataatgtgttcatcaggtgcctatggattaaatcacatactggcatatttaagctgaatgtcaatctggaaaataaattgactatattaacagaaataccactctttgtgtagatatttgtcgtatatttaagaaaaagctaaaaagaatggaaatcgcatgact

SEQ ID NO: 151377 - DNA, 642 bp, Homo sapiens
tctaatgtctgtgttccaaaacacatcacattattaggatgtagggagatatgtatgtgtgctccctggggtggggatttctagttactagaccatctccatttttagcagttggcatcctcatgatacttttataaatacgacattaacaggagagcagcagtacgattttgccgatggaataacagatttgccggcaatcactgaaagagtgcaaatatcgggtccttgtgacttcaacggactcttccaaattgtatgaatgtatcaatgtattagataaacccagtttcagaatgataaagaaaaaatgttagaccaaataatgcggctagttaacagtggtacgatttctagcccgtgggtttaaaatgcacttaaagtcctgtccttgccttttattttctgaacttgatgtttttgcattctttgagttcagtttaaagacaactacgagcatctgyaaccaatctgacaataatgtgttcatcaggtgcctatggattaaatcacatactggcatatttaagctgaatgtcaatctggaaaataaattgactatattaacagaaataccactctttgtgtagatatttgtcgtatatttaagaaaaagctaaaaagaatggaaatcgcatgact

SEQ ID NO: 151378 - DNA, 642 bp, Homo sapiens
tctaatgtctgtgttccaaaacacatcacattattaggatgtagggagatatgtatgtgtgctccctggggtggggatttctagttactagaccatctccatttttagcagttggcatcctcatgatacttttataaatacgacattaacaggagagcagcagtacgattttgccgatggaataacagatttgccggcaatcactgaaagagtgcaaatatcgggtccttgtgacttcaacggactcttccaaattgtatgaatgtatcaatgtattagataaacccagtttcagaatgataaagaaaaaatgttagaccaaataatgcggctagttaacagtggtacgatttctagcccgtgggtttaaaatgcacttaaagtcctgtccttgccttttattttctgaacttgatgtttttgcattctttgagttcagtttaaagacaactacgagcatctgcaaccaatctgacaataatgtgttcatcaggtgcctatggattaaatcacatactggcatatttaagctgaatgtcaatctggaaaataaattgactrtattaacagaaataccactctttgtgtagatatttgtcgtatatttaagaaaaagctaaaaagaatggaaatcgcatgact

SEQ ID NO: 151379 - DNA, 377 bp, Homo sapiens
aatcaaatcaccgatttaaagaktgcaatatataataatcatttttaaagtattggattaaatctgataggttttccagaaatgaacaaaaatcagctctaaaaccaaagctgatttttagaaaatttgaaaatgtaaatcagccctatccatactatagtttctctaaaactttatctgaaagagtcattttaaaataactattaaacaatgtaactgctatcttaatgttctgaaataagttaaaacattttaaaatatgaatactgtaaaggaaataaatggtgggaaggaaaagtagagaaagaaatgccaattccagtccaaagctttatttgccaagttttcttggaatgaattttaccaatttatgaatt

SEQ ID NO: 151380 - DNA, 581 bp, Homo sapiens
taaacaagaaacatgtgtaatatttgtaaaaacacaaagcttttgggccgggtgcagtggcttatgcgtataattccagcactttaggagcctgaggctggtggatcatgaggtcaggagattgagaccatcctgactaaaaaggtgaaaccacatctctactaaaaatacaaaaaactagccaggcgtggtggtgggtgcctgtagtcccagctacttgggacgctgaggcaggagaatggcgtgaacccaggaggyggagcttgcagtgagctcagatcgtgccactgcactcgagcctgggctacagagcgagactccttctcaaaataaataaataaataaataaataaaacttctatttctttcactttctaatataattttaatatctcctcctgggatttcactaagacacattttggacctcattctgatcttcctctcccctccaagcccaccaacttctgccctatcatctatcctcatgtctctctgtgtgacatgctgacttactttttggagagaatcgtctaaacaattaattctttcttctcgtgtctaatccatccactagtttc

SEQ ID NO: 151381 - DNA, 576 bp, Homo sapiens
aattctttcttctcgtgtctaatccatccactagtttcttatttcaacaattacatttttatttccttatttcattttattctgagactgagtctcattctgtcacacaggctgaattgcagtggtacgaacctgcagactcggcctcctgggctcaagtgatcctcccacctcagcctcttgagtagctgggactataggcaggtgccccatacccagctaataccatacccacacagcagagacataaaakatttccatcctcaaagaaggttccattgaacagcactgctctaattcaataaaaaataccactgagcacaacatagtaatagaaaagattgaagaggcagtgctgatacttaaaaacctggtattttcagccaggcatggtggctcatgcctgtaatcctggcactttgggaggctgaggtgggaagatcgcttaagcccaggagttctagaccagcctgggcaacatggtgaaaccctgtctctacaaaaaatacaaaaaattagctgggcatggtggcatgtgcctgtagtcccagctacttgggaggctgaggtgggaga

SEQ ID NO: 151382 - DNA, 460 bp, Homo sapiens
tttatttaacataaaaaactactccaatattttctgcatttttaatatgctcacccaaagaaagcattaatttgcatctttgatgttaaacagatagcctaatcaagtcactatcaagatcaagactaaaagttacagcttttttcttttgatgcctttcagatatatctatttwtatataaaaatatatatacacacacacatacatacacacacacatatatatgtagttatgtgtgtgtgtatatatagttacagttttggccaggtgcaatggctgacacctgtaatctcagcactttgggagaccaaggctgaagacttgcttgaggccaggagtttgagaccagcctgggcaacgaagcaagaccctatctctacaattttttttttttaacaaaattagccagggatgatggcatgcacttgtagtcccagatacttgggaggctgaggcgga

SEQ ID NO: 151383 - DNA, 460 bp, Homo sapiens
tttatttaacataaaaaactactccaatattttctgcatttttaatatgctcacccaaagaaagcattaatttgcatctttgatgttaaacagatagcctaatcaagtcactatcaagatcaagactaaaagttacagcttttttcttttgatgcctttcagatatatctatttttatataaaaatatatatacacacacacatacatacacacacacatatatatgtagttatgtgtgtgtgtatatatagttacagttttggccaggtgcaatggctgacacctgtaatctcagcactttgggagaccaaggctgaagrcttgcttgaggccaggagtttgagaccagcctgggcaacgaagcaagaccctatctctacaattttttttttttaacaaaattagccagggatgatggcatgcacttgtagtcccagatacttgggaggctgaggcgga

SEQ ID NO: 151384 - DNA, 560 bp, Homo sapiens
agatgttagatgtttttgtccttgttacagatgtaaatgctcagttggaaagagggaastatttagagtgaaaaagtttcggtggaacacacacaaaaataggaagatcaggtataactgttccaaaaaaaagagtatggcagtatagaagaaaaggtctccatgaaaatgcagaagaacaatttcacagctggtgctggcatttcagagaccttgagctgggaatcaaaagatgggaatttcagtctcggatgtgccactccttagaggtttaatatctactaaacccggcgggctccacttggtggtgtttgctatttaaaaaaacaaaaacatgtggcaatgatcttccacgtgattctgacttgagccccacccgagtctgcagacttacccttccactgctttgcccttcaagtttgtgcccattagcaaagagaaattttctctttgggatcactgctgtgttgatctcaggaatatttggcgttgaatttaacatatttttcatatgtgtgtgcaatagggaggctgagaaacttgtcttttttttaaggtgt

SEQ ID NO: 151385 - DNA, 600 bp, Homo sapiens
ctctactttccttttctgaagcatcaacccaacttgacaatttgcaggcacacaatttctgggatcaatatataagtaacgaatgaaaaacatgtkgttttacaaaacatattccttaaaacatttgaatacatctaattttaagttaaatcccagtaatcactctatccacataaattatagctcaaggttctgtgaattttgaaggaaatcacagaacctcaaaactacagttagtgatctatgaagaatcagctttcagagaacatataccttggcaaaggcagtcgccttgtaagtagttactaaagaagtagttactgattaagaaaatagtctagatttgctaaaaacaaatcagactaggctactgactgtggctatcattagacttcctccacctataccgaggtctcagtttctctgatgcttggcactttctgaccagcccaagtatcctaagaaacacgaagctacccatatgtcaaagcctgtgttggctgatgaggcaatttctcacacaggacagcttagaacttgaagccaactaatttcatgtctcaacatctctatcatcctagatcaccaaacaaaacttta

SEQ ID NO: 151386 - DNA, 543 bp, Homo sapiens
gggtatatgcactgatatttcatggctcctgtgacttattaaaataaaaacatggtaggtggcggatgaacagaaaccataaagagaaagaaagtagaggaagggaatrtgttatcaggaaataagagattttaacaaatacttgggagattgaaagcagacaagagtgtaaagaagccaggcatggtggcttactcctgtaatcccagaactttgggaggctgaggcaggaggattgcttgagcctagaaattcaggaccagccagggcaacatgaaaagactgtctctacaaaaaatgaagaagtcagccagtcatatggcatgtgcctgtagtcctagctaatcaagaggctgaggtgggatgatcacttgatcctaggaagacaaggctgcagtgagccatgttcttgccaccgttaatgcagcctggatgacagaatgagaccctatctcaagaaaaacaacaacagagaaccacaagataaaaccataaaggaagccagagcccacaatttgtttaaacagtccaagatagaaccca

SEQ ID NO: 151387 - DNA, 539 bp, Homo sapiens
tgatcatccaggtgacagaggataaatcctaaaccagtcccttggggctttgggacacttgtggataagcagaagctacatctccaacatctgagcacaatggaggagcttgtactaaccttccaatcaatagtaaacatagaagctaggtaaaatacttaaagcaaccaaagttgttaaagaaaaaaacaatccaagtgggacttgaagggaagattgctggaaagaatgtacactagtgcagctatgcaagccccacatttgcctctgcttttgycctcagagcatttgcttagtcctggcatgtgcaacaaagaccaagttgaaaggtagtgggagcttgtagcattctcagtgtcaggcctctgagcccaagctaagccatcatatcccctgtgacctgcatgtatacatccagagggcctgaagcaactgaagaatcacaaaagaagttatatttaaatggcctgttcctgccttaactgaggacattccaccacaaaagaaaacaaaatggcctgtccttgccttaactgatg

SEQ ID NO: 151388 - DNA, 539 bp, Homo sapiens
tgatcatccaggtgacagaggataaatcctaaaccagtcccttggggctttgggacacttgtggataagcagaagctacatctccaacatctgagcacaatggaggagcttgtactaaccttccaatcaatagtaaacatagaagctaggtaaaatacttaaagcaaccaaagttgttaaagaaaaaaacaatccaagtgggacttgaagggaagattgctggaaagaatgtacactagtgcagctatgcaagccccacatttgcctctgcttttgccctcagagcatttgcttagtcctggcatgtgcaacaaagaccaagttgaaaggtagtgggagcttgtagcattctcagtgtcaggcctctgagcccaagctaagccatcatatcccctgtgacctgcatgtatacatccagagggcctgaagcaactgaagaatcacaaaagaagtkatatttaaatggcctgttcctgccttaactgaggacattccaccacaaaagaaaacaaaatggcctgtccttgccttaactgatg

SEQ ID NO: 151389 - DNA, 539 bp, Homo sapiens
tgatcatccaggtgacagaggataaatcctaaaccagtcccttggggctttgggacacttgtggataagcagaagctacatctccaacatctgagcacaatggaggagcttgtactaaccttccaatcaatagtaaacatagaagctaggtaaaatacttaaagcaaccaaagttgttaaagaaaaaaacaatccaagtgggacttgaagggaagattgctggaaagaatgtacactagtgcagctatgcaagccccacatttgcctctgcttttgccctcagagcatttgcttagtcctggcatgtgcaacaaagaccaagttgaaaggtagtgggagcttgtagcattctcagtgtcaggcctctgagcccaagctaagccatcatatcccctgtgacctgcatgtatacatccagagggcctgaagcaactgaagaatcacaaaagaagttatatttaaatggcctgttcctgccttaactgakgacattccaccacaaaagaaaacaaaatggcctgtccttgccttaactgatg

SEQ ID NO: 151390 - DNA, 594 bp, Homo sapiens
tagttatgccatgtaatgcacctagcacaatgccaaacatttttcagtgcttttaaaaatgttagtccttctcatttcccataaaatattttcttggtaatagtctctttccaggtgatgtgtacaaaagtcacacaaacagtactcagtggaaggtctttgcagatgcttctcacaataaatccggactaaagtcccatgcctaagttcttactgaggaaggggacaaagccagcccagatgttcagtagaagcagacggtgtgaagaaagctttttcctgccttctcctccatttgcaacagcagctcytccagattgtcttccatgtcgtctgactgctgcaggcactggcaaatctcacagatgaggaaagctcccagggtggcatcttccagggtatcttggatgtccatgttgatcacgtgcacaggctgaaaggtctgctgttctctggaacacagatcttccaccactgtgtcatagacactctcctcacaggtgaagatgacatcaaagaaatcagtgcactcctgaaatctttctggaccgggcttgattctctcatttcttcccaagatgtgtaagattccgt

SEQ ID NO: 151391 - DNA, 463 bp, Homo sapiens
tgaattcagtttactagtattgttgaggatttttgcatctatgtttatatttgttgaggatgtttgcgtgtaatttttttgagacagtatctcrctctgctgcccaggctggaatgcagtggtgtgatcatggctcacttcagcctcaactcctgggctccagcaatcctcttacctcagcctcccaagtagctgggattacaggcatgcaccaccttgtctagctatctttttctattttttgtagaaacttggtctcgctatgttgcctaggttggtctcaaacttcggggctcaagtggtcctcctgcctcagcctctcaatgtatcaggattataggtgtgagccactgctctcagagttattttcttttattgtatggtccttgtctgtctttcgcatcagatagtcctagcctcatgaaatgagtttggaattttgccctcttcagtttttttaaag

SEQ ID NO: 151392 - DNA, 463 bp, Homo sapiens
tgaattcagtttactagtattgttgaggatttttgcatctatgtttatatttgttgaggatgtttgcgtgtaatttttttgagacagtatctcactctgctgcccaggctggaatgcagtggtgtgatcatggctcacttcagcctcaactcctgggctccagcaatcctcttacctcagcctcccaagtagctgggattacaggcatgcaccaccttgtctagctatctttttctattttttgtagaaacwtggtctcgctatgttgcctaggttggtctcaaacttcggggctcaagtggtcctcctgcctcagcctctcaatgtatcaggattataggtgtgagccactgctctcagagttattttcttttattgtatggtccttgtctgtctttcgcatcagatagtcctagcctcatgaaatgagtttggaattttgccctcttcagtttttttaaag

SEQ ID NO: 151393 - DNA, 456 bp, Homo sapiens
atatttgttgaggatgtttgcgtgtaatttttttgagacagtatctcactctgctgcccaggctggaatgcagtggtgtgatcatggctcacttcagcctcaactcctgggctccagcaatcctcttacctcagcctcccaagtagctgggattacaggcatgcaccaccttgtctagctatctttttctattttttgtagaaacttggtctcgctatgttgcctaggttggtctcaaacttcggggctcaagtggtcctcctgcctcagcctctcaatgtatcaggattataggtgtgagccactgctctcagagttattttcttttattgtatggtccttgtctgtctttcgcatcagatagtcctagcctcatgaaatgagtttggaattttgccctcttcagttttttkaaagtgtttgagaaggactggttttctttcttctttaagtgtt

SEQ ID NO: 151394 - DNA, 406 bp, Homo sapiens
atttccttctcacacacaaaatacattcattccatcttaatagccccaaaaagttataactcattccagtaccaattcaaaattctaaggtctagagtctcatctaaatcagatatgagtgagacccaaggtacaattcatcctgaggcaaatttctctccagctgtgagcctrtgaaatcaaataagttatgtgtttccaaaatacaatggtgagacaagcatagactagacactttcattccaaaagggagaaatagccaagaaaaaaaaggggggtaatgggtcccaagtaagcccaaatccaaacaaggtaaataacattaaaactttaagcttgagaataatttttgactccatgccctgccttccagacacactggggtggcggttgggtcccaaggctt

SEQ ID NO: 151395 - DNA, 625 bp, Homo sapiens
gcctttgatggctttaaatgtaaytgaaagttgtcttagcattttcttatactgtcactgacactctaaggtaataactctattagtgaagatttggactggggtgtaactggaaggggcaaaccctttgctacatgaggttcctgatcttttaaaaagtaagaaaagggggccaagagatgaagccgatgttatatttttcccaggtaaacttgacactacgtcaacccctgctacatcttagtaggagagctgaagggagagtatttgagccaatgaataggcagcagtgagtagagctgatggtggaggattaggcaaggaacatggtttgtgggagtctggtggtgacagtaatcagagtggttgcttcattcactgagcaatcatgttccagacaattcatgtattcattcattttctgttctgtaggggcagtgccctacagtggttggagacatgaactctggagtcagccttgcacggctccaaatcgtacttcttcactgacttattttggacatttcatttaatctctctttgtttcagttttctcatctgcaaaatgggtttaataataatagtatctatattttagggttattgcaatgattgagtgaattca

SEQ ID NO: 151396 - DNA, 489 bp, Homo sapiens
agacttatagaatgtcttagtccattcctggtgctataacaaagtaccctagactgggtaatttataatcaacaaaaatctattgctcacagttctggaggctgggaagtccaagatcaaggcaccaccagagtcaatatccggtgagggcctgctctgtttcaaacatggaactttctcactgcgtcctcacatggcagatgggagggcagatcccyttaacatcttttataagggcactaacctcgtactaatcacctcctaaaggctgacctcttaatactgttacactgggggttcagtgccaacatgtgaatgtgagggagactccaacattcagaccacagcggagagtttaagtgacttggcaggaaactaagctgataaaatatagggtccaaattctgaagttcatactctttctgttactttttgagacaaaatcttttatttctagagaacaaagccttgaggaggccctagatattg

SEQ ID NO: 151397 - DNA, 625 bp, Homo sapiens
gcctttgatggctttaaatgtaattgaaagttgtcttagcattttcttatactgtcactgacactctaaggtaataactctattagtgaagatttggactggggtgtaactggaaggggcaaaccctttgctacatgaggttcctgatcttttaaaaagtaagaaaagggggccaagagatgaagccgatgttatatttttcccwggtaaacttgacactacgtcaacccctgctacatcttagtaggagagctgaagggagagtatttgagccaatgaataggcagcagtgagtagagctgatggtggaggattaggcaaggaacatggtttgtgggagtctggtggtgacagtaatcagagtggttgcttcattcactgagcaatcatgttccagacaattcatgtattcattcattttctgttctgtaggggcagtgccctacagtggttggagacatgaactctggagtcagccttgcacggctccaaatcgtacttcttcactgacttattttggacatttcatttaatctctctttgtttcagttttctcatctgcaaaatgggtttaataataatagtatctatattttagggttattgcaatgattgagtgaattca

SEQ ID NO: 151398 - DNA, 563 bp, Homo sapiens
cccctggaaattgttgtattccacttattacctgtatttgaaatgaaaatatcaagatagtttatctttgaaatgctcctttccagactatgaagttgaaaacttaatagtatcatgaattcagtttaaaacaacaatmtatttattcaagatactctcttcacaatactatacctcagaaatgttctcaataaagtatgcattttagcattgtttttactacactaattaattgagacccaaagtgtacttggtgttgttgaggggcagggaaggagagagataggttgagaaagatggagagaaagagaattaccattttaatggtgctataatctaaaagtctgaagatgaaagcatttcagaaatgtgatttgctcttttgtttctgtctttatctttcaaatacataccaccttagtgaagaggttggtcatctattactttgacaattctactttataccctctaatgccaggacttaaagatagatacatttaaggctactcactcacttatttctttcctctcagatgagtggtcaaaattagcaagcagaagtt

SEQ ID NO: 151399 - DNA, 613 bp, Homo sapiens
tcaccattgctgcgttttaaatgttttgctcattttggacttgagatgaataaaaaaacaaaatccttgcggtccttagcattttcaaccaacagcagcaatttgtgaagataaggcctctgaccctaagttgatcaaatgatgtcttgccactctttgaggccatccttacaactgtctgttgaacacattctttaaaaacaaaaacctcactttctcctctttcaaaactaagcagttttaagcagctctgaaaggaatttaaatctgtgcttttattttgacatttgttccaacattgattagataatttctgatctgtttattgttttgtactacagtgtgaaatctctagagattatactccattggtgttccccccttgagggaaaattcacagtataagaactaactgttataatataaaaccaatattctygtgagatttgtaaattaaattttcattccaacttttgtttaatatattcagtgtcaccttgtaaggcaactgagataattttgtgtaccctatcaatttgtttcttgtttgacatctgtgtttgtttatatagctttcagaagtggagaattctgttgccaattaatgttgatg

SEQ ID NO: 151400 - DNA, 367 bp, Homo sapiens
ttcgtaggttttcttctaggactgatagtttgaagtctcacatttaaaatctctaatctagtgacttmttttagagtttctctctttattttttggcagagaaaaaaagaaatgttcttctggaaactctatgatagaactaaaaagtatccctctttgtgttttctgagttcataatttatatgatataaaatttgtatacaatgattctcattatcaaatactgagcaatttatacctttggaaggtatttaccatactaatacattaaaagttgctttcaagaagtaaaaaaagacaaagaaaaatacaacttattaatacattcaaattctgcttctgtgttttgactgttttgagtttgatt

SEQ ID NO: 151401 - DNA, 571 bp, Homo sapiens
tgcccttcaatcccagaataacttgctatgggttcaagtcatttcaggagtaggaggcagtctccgggtgcttaattatgtatgtagaaaagaaatcaaaagttcctcagtgttgtctatcacatatatgaaagtaagaaaatgaaatgagtttgttgtcatagatactgccaccaagaacagatttctcttagtctgtccctagaagacaagataaaaacgaaaaggtataaaggtattttaagtttttagttgaacttaacttaagcactattgtttctccactcaaacatctcattaacaaaagcaccataaacctcaaatgtcaactttgaaaactgttataccggcacyagtcattgttgtttttgctttacctctgcctgtcaaactcagaaactctctcacttactcactcatattttctctccgcttcacttgtaatttcttggctaaggtagatgagtaactgtgatgaaccaaactcccaagtgtcagaaggagactagaaaaaaagctattgagcacacacaaatcacttttatgcagtgtgacttgtcacagtaaaagg

SEQ ID NO: 151402 - DNA, 555 bp, Homo sapiens
tgcattccacaggagggatttctttttccttggcgaaacctgttttgctcctaaggcctttcaactgattagataaggcccactcagattatcgaaataatctcctttacttaaagtcaattgactgtagatgttaagcacatctacaaaaatgccttcacaacacctagattcatgcttaattgaataacttggcctaaataacttgacacataaaactaaccatcacagtagatttgaatccaaccttctgacttcaggcctaaattcttaagcattgtgatactctgtgtttcaaccagtattttttgaatgattaaaaatgaaagaatgactccatcatgacaaaatggatgactgttgtacttcctgaaataactgtattctccctcttacctgtcctcagccttgttgaatacttcaatttgtaacttgtttccaggattctttgagcagggccatttaaaatatatttgaaaagagatttgatgtgtgaagcttaytcgttttctagccagaggtctctctgtatgttagggatttgtagtggaaaac

SEQ ID NO: 151403 - DNA, 597 bp, Homo sapiens
gtatatctgaataacaattctatttatttcaaatgatctgcagactaacctcaatgtgcaatgcactgtgcttaagtgttttagaatagattagaaaaaaacacagcgcttgacctaaagatctcctcarctgaaaagataggtatagtaagtaccattgagggtagagagtcactagccctggacgatggctcttggacttcagagaagggaaagctaatttaacagacttaggccaatgatttagaagtccactgtttcaaagagaaatgtatatacattctcacatatggctatcctttggaggttggacttgggttcattattcagaaaaatttgaaagctgaatccaccaggcaagtttaagtgtgaattaccccaaatttattttctgagcatgcaaaatttgatcttcaaaatatcaaatgtgtgcagaagacactctgtgctgagatgcacgcatctgttgaagtgccaactggtctggccaaagaaagaacagctgcctgagtcttgaggcagagataggtcggagacatctcagcctccaaggctagttgacttaaaacatggtcggtaagaagaaaagcctcaccc

SEQ ID NO: 151404 - DNA, 571 bp, Homo sapiens
tcttcacagtcatacctccctttgcattgctaagaaactctgcatattatccccttggctatattgattgtttccaagtataactgtatggacttgccacaggatggctgcaccataattacccaaggagtttattacaaaacaggccccaaccccatagtttctgattgaataggtatcacattggattctttatttttaacagtttaccaggtgttataggatgaattgtatctctccagattcatatgatgatgtcctaacccctagtaccttataatgtgaactcatctggaaatagggtcattatagatgtaattgggtagatttagatgagttcatgctagagtaggataggtccttagtccaatatgtttggtgttcttataaaaagtggatatttggacacatacatgygcatagggagaatactatgtgaaggcagagatcaagatgatgcttctataaggcaaggaatgccaaaaattgccagagatcaacagaagctatgggaggggcatgtaagaaattcttcttcacagccctcagaaagaactagccctgccaacaa

SEQ ID NO: 151405 - DNA, 597 bp, Homo sapiens
tgatcttttttcccattattttgctacttgaaccctcttctacaacttctggttgatttatgtgayccccaacatgctgtatgtattgcttcttccttcccatttattccagtaaatccctttgtccaagccttctctccccacatttaccctttctttacaggttgcttttctggtgggtttgtcccataaggtttccttctcccctgaactgctctagtccttgtatctattccatctattttatacttttctcacatcatggtttaatgctattctttaatacataaaagtgttaaggtatttgctactattatcaatatttcatttattattaatttatgcatttgacaaacatctattaaacacacagtgtggctgggtgcagtggcttatgcctgtaatcccagctcttggggagtttgaggtgggaagattgcttgagctcaggagtttgagactagcctggccaacacagcaagaccccatctctaaaaaaatttttttaaattagctaggtatggtggtgtgtgcgtgtagttccagctacttggaaggctaaggcaggaggattgcttgagccagaagtttgaggct

SEQ ID NO: 151406 - DNA, 550 bp, Homo sapiens
ctaaaggaaaaaaaaaatgaatgttaagagaaaggagtgagcaagtgtgtccatctgcttgtgtttcaggaaagaaaagggaaatagtcaaagctacttcaagtacctaaagtactagctgtgcactgaaaaaaaaaaaagaaaccaatattttatgtaaaattctaataatttttaatgctggcagtaaaaaygtagaactgagttaactttttttttttcatttgccattgggaaacaattccctataatatacctacctactaagtctgctaaaggaatgtctgagacagtgaaaaaggtcccagtctctcttcctagttgttctaccctgatgagccataaaactactggtcactaataactacaggagagtcatcaattgtcaattaaaagaaaatgcatatagactttttagtattcagagagaagggagaaaagtagcgttaagccagatgaaatgtaagggaatcctaactagtaggctagcaggttccttaaaactgcacctgcgtttaaaaaaagtgagggtggggggcacgcaccagaa

SEQ ID NO: 151407 - DNA, 550 bp, Homo sapiens
ctaaaggaaaaaaaaaatgaatgttaagagaaaggagtgagcaagtgtgtccatctgcttgtgtttcaggaaagaaaagggaaatagtcaaagctacttcaagtacctaaagtactagctgtgcactgaaaaaaaaaaaagaaaccaatattttatgtaaaattctaataatttttaatgctggcagtaaaaatgtagaactgagttaactttttttttttcatttgccattgggaaacaattccctataatatacctacctactaagtctgctaaaggaatgtctgagacagtgaaaaaggtcccagtctctcttcctagttgttctaccctgatgagccataaaactactggtcactaataactacaggagagtcatcaattgtcaattaaaagaaaatgcatayagactttttagtattcagagagaagggagaaaagtagcgttaagccagatgaaatgtaagggaatcctaactagtaggctagcaggttccttaaaactgcacctgcgtttaaaaaaagtgagggtggggggcacgcaccagaa

SEQ ID NO: 151408 - DNA, 462 bp, Homo sapiens
ttctcctctcagttatcctactgaaaattattttcaaaacacatgctttgttacatgtgaattaaatagaaccataagatctcttttcccagattagaggtcaccaaacttttcttgtaaaagttcagatggcaaatactttaggtttgagggatatatggtttctgtctcaattactaaactgkctgggcggctggaaagcagcaatgaacataaattaatatatgtgccaaattaatatatgtgcctgtgttccaaacaacattatttacaaaagcaggcagtgggatgggtttggcccacaggctgtggtttgttggccccttttctagatcaaatggagaagtcaggaggtggggtgtaatcctgggaaaatctgtatttttgctggactgaaatgcaggataaaaatctatgtatgttgctgaacatagccacacgaacctatccctattcattaat

SEQ ID NO: 151409 - DNA, 462 bp, Homo sapiens
ttctcctctcagttatcctactgaaaattattttcaaaacacatgctttgttacatgtgaattaaatagaaccataagatctcttttcccagattagaggtcaccaaacttttcttgtaaaagttcagatggcaaatactttaggtttgagggatatatggtttctgtctcaattactaaactggctgggcggcyggaaagcagcaatgaacataaattaatatatgtgccaaattaatatatgtgcctgtgttccaaacaacattatttacaaaagcaggcagtgggatgggtttggcccacaggctgtggtttgttggccccttttctagatcaaatggagaagtcaggaggtggggtgtaatcctgggaaaatctgtatttttgctggactgaaatgcaggataaaaatctatgtatgttgctgaacatagccacacgaacctatccctattcattaat

SEQ ID NO: 151410 - DNA, 597 bp, Homo sapiens
cttgacagtcttttggctgtcaaagccccatccaaatcccagcaggctcctgcctgggtcagtgctggacatggtcctgctgctggcctcaggctgccttctggaatcctctggaatgctttctggaaagtcacgagggggcaagtttttgtgtttcatcctttttgttcctagctgagtctgctaatgaaagctttctgctttgaggggagagagaggctgccccatctggtgctctcctgccccctggtaagattatagtaatagaggggagatgcatttaggacagcartctctagctgctactatagttctttctctaacctcaccctgaaatgcaaagtgatcctagcttggcaatgaaatagaactaggaatgacatgatggaagggtttgggggtcaaagaaagctgggacacacagtataatgcaaagttaaacaatgaggatgtgtgggatgcgcctacaggaaaaggtgtttccaaaactatctgatctaataacttgtcctccagcgtctcccaagaatgttattgtagggagaacattaagggttattacatagagggaaggataattgctgtttattatatgta

SEQ ID NO: 151411 - DNA, 597 bp, Homo sapiens
cttgacagtcttttggctgtcaaagccccatccaaatcccagcaggctcctgcctgggtcagtgctggacatggtcctgctgctggcctcaggctgccttctggaatcctctggaatgctttctggaaagtcacgagggggcaagtttttgtgtttcatcctttttgttcctagctgagtctgctaatgaaagctttctgctttgaggggagagagaggctgccccatctggtgctctcctgccccctggtaagattatagtaatagaggggagatgcatttaggacagcagtctctagctgctactatagttctttctctaacctcaccctgaaatgcaaagtgatcctagcttggcaatgaaatagaactaggaatgacatgatggaagrgtttgggggtcaaagaaagctgggacacacagtataatgcaaagttaaacaatgaggatgtgtgggatgcgcctacaggaaaaggtgtttccaaaactatctgatctaataacttgtcctccagcgtctcccaagaatgttattgtagggagaacattaagggttattacatagagggaaggataattgctgtttattatatgta

SEQ ID NO: 151412 - DNA, 586 bp, Homo sapiens
tctcaggaagtgcttgttggtcctgctcccaccaagcttcaccagctcccacaacaggggactggctcagaagacacagtcctgaagatcttctctacccctgggagaagcatttcacaagaagaaacctcaaggcctcgcaggatggctycaaggccaggggcagccgagacctcagaatgtaacaaaccagccagagcacctgagttgtagcatcagcatctcagagtaggcctgatgctgacagtaagcaggcagcatctgtatctgggtggaactttcctttcaacccgggcaacatttactgagcacctggcaagtggctgggcacagttatccctgccatgaggaggacagtgttgacacagacacgaaaacagagaggccactctaaaactcagcagctatgatagctgcagcagaggaagccagagggcttcaggctgcagagaagggaaagattaattcacaccataggatttgagccttttgggtgcttcacaccgggagcatcactttgaatttgtcttctgattcagcaattcaaattgctgcaatttttggaaagggatttctaggctggtgc

SEQ ID NO: 151413 - DNA, 586 bp, Homo sapiens
tctcaggaagtgcttgttggtcctgctcccaccaagcttcaccagctcccacaacaggggactggctcagaagacacagtcctgaagatcttctctacccctgggagaagcatttcacaagaagaaacctcaaggcctcgcaggatggcttcaaggccaggggcagccgagacctcagaatgtaacaaaccagccagagcacctgagttgtagcatcagcatctcagagtaggcctgatgctgacagtaagcaggcagcatctgtatctgggtggaactttcctttcaacccgggcaacatttactgagcacctggcaagtggctgggcacagttatccctgccatgaggaggacagtgttgacacagacacgaaaacagagaggccactctaaaactcagcagctatgatagctgcagcagaggaagccagagggcttcaggctgcagagaagggaaagattaattcacaccataggatttgagccttttgggtgcttcacaccgggagcatcactttgratttgtcttctgattcagcaattcaaattgctgcaatttttggaaagggatttctaggctggtgc

SEQ ID NO: 151414 - DNA, 530 bp, Homo sapiens
tggctgtgcttttgaccttgttcctctggggctggctaggctgcttgaggcaggaggttactgaccagggctctgctgcccccaccccaccccaccagctgcctcaggagctgtgggggccgggggagggagggaatctctatcagtctgcatgcctgtaactccttctcacccacctgtgtactgcagccygcaggttgggaggctgtactttagcatcccgggcttcagcctgcccaggagtcacccctccccacctactgctctcagcgtcccagctgggccatcctcagtgaaaaatctgctttgaccagagcagtgtgtcaagccagggcagacagtcaagtcccagagcccagtattgtggcccaggaagactgttggcccctttcccctccctgcctggccctggctgggagcctgggcagccataatggcatgtaagtgcctgtttccctccttctgccgaatcacaatagagttacaatcagaaagcaattcagagaccctgactagtaggtaggattaag

SEQ ID NO: 151415 - DNA, 575 bp, Homo sapiens
actctttgacaattgggaccttggcaggactgtctgttagggtaataatgacaggaaaatcctcatacggtggaccaggtcatgttctcagtgctctgtgtttaattccatttcacagcaacccttatcaagtaggcattactatcatccccactttacaggtgagaaaactgaggaacagagagattaagtaacttgtcaagggtcacgtaagtactgaatgacagagaagggtttcaccctgaggcattctggctctaggatccccttaaccactgccttcagctgactctctcaggttcacaatattctccttaggacctattttctagctccttcttcaattcctttgtggggctctgaatcagttagcttttactgtataacaatctacccctgaaaatctagtggcttaaatcataaacatttattacatctcatgattctgtatggtggggggttgagttgtctsggcagttctcttggtctggtctggcttagctgatatccctggtcattggagacccagctggggatgggtggtctaggatggcctcaatcacatatctggtggc

SEQ ID NO: 151416 - DNA, 363 bp, Homo sapiens
acagaagacccagaggggtgggaagggaggactgtttgcctcagagtgcttgaggtggaatgtttaaatactggggaatagcctctgtttacttctgtgtttatagttgtctctccatcctgaaaataaaccatccttgagtaactatagcaaagaaagctgagggtttatggggggttagagggagcgagtgaacatgggaaagcacttctggaagcatgggccaggctgtccaccrccgaccgaatccctttgatacacagaagcagtaactgtgcatgcaacacattctctatttaagcaagtggacacagtccagctcttggaatttcagaacaattactctgcctaactgttatgcag

SEQ ID NO: 151417 - DNA, 507 bp, Homo sapiens
cctggcgatgacttcgggtctggctcctctccctccattgtcccccaccccagtcaggaatggcacagaacccacagaaagttaggaagtcctggggaaatgtcagtaacaagggaacaggcacagcagggcagctctccttccctctttcaatgtggccatttcccacttaggcaggtatcagtgtccctagtgtaacagctgaaaaaccttgacaaatggagggagaaacactcccacctatacctgtgtagaagactgagtccaagagaattgagttgaaamtttaaagaaggagttgttggtgttcacagagctcagagccccaggatccccaaggagactatagtggccgaccagtcctcctagccaaaaatggcccatctccatattctctactctacccaagatgctactagggtcttattcattccggaacaaataaatcatggacccacctgttgaagagcctacaagaggcagcctgtgtaatgggaaaagcatgaa

SEQ ID NO: 151418 - DNA, 520 bp, Homo sapiens
acctgtccctcctcacttccccctgactgcttacctgaccctcctcacatatatacacacatagtccccactggagaagtgtcatcgtacccaagacaagggttagaaagccaaacacagtaatacaagcaaataaacaaaaaactaatcgaacaacaattatcatcccrgcccaggatttcacaggtccctctgacaattcttaaacagctggtctaccgatataggttattttttagccattatgagaatacctggagttcttccaaacctcagcatccctcttggaagccccagacagatgaagaaaagcccccacaatgaaaatgccttcttgttttagctgttttgattgaccattcacctgacagaggattgcttcaagaacacatggtctcatgtgttgaaaactggggtttgagtcctagtctcaccaattactagctgtgtgatttagggcaagtaatttaacctctccaagtctgaacttcttcctctatgagatgggaataacacaaat

SEQ ID NO: 151419 - DNA, 518 bp, Homo sapiens
aaaggccggctgcccttcccagtgccaaggagggcatgaaggactcagacaacattgctcccatcttgtctactcaacaactgccacatggagcactgactatgctctcagccctttgctcagcacatggtctacgagaaacagtggctcagtgttttgttccatttctgaatggaatgcctttccccttgcccacgacttgaacaccaactcagactaggaattatggagcctttcctggccttccccaaactctttcccccaaccctccctakgcacacaggacattatgagtcacctcctgctttgtgtgtccactgtactctgagcatgggcccaccacagccttgataacactttgttgcacttacatataacagctgagctgataatttattaccaataacagctaccatttatcaagtacctactatgtgccaagcactgggtcgagtgctgtacatcattatgtacacacttaatactcacaacacctagtgatgttggtagtgttctcc

SEQ ID NO: 151420 - DNA, 518 bp, Homo sapiens
aaaggccggctgcccttcccagtgccaaggagggcatgaaggactcagacaacattgctcccatcttgtctactcaacaactgccacatggagcactgactatgctctcagccctttgctcagcacatggtctacgagaaacagtggctcagtgttttgttccatttctgaatggaatgcctttccccttgcccacgacttgaacaccaactcagactaggaattatggagcctttcctggccttccccaaactctttcccccaaccctccctatgcacacaggacattatgagtcacctcctgctttgtgtgtccactgtactctgagcatgggcccaccacagccttgataacactttgttgcacttacatataacagctgagctgataatttattaccaataacagctaccatttatcaagtacctactatgtgccaagcactgggtcgagtgctrtacatcattatgtacacacttaatactcacaacacctagtgatgttggtagtgttctcc

SEQ ID NO: 151421 - DNA, 548 bp, Homo sapiens
gtatcagaagctgggcgtgggtttggatgctgtcaatgatgctatgcttctggaagcatgtatctactgcctgctgaagctctgttgttgggagcagccctattacctgaacctgattgagctcttcctgcagagttcctatcagactgagattgggcagaccctggaccccatcacagcacccccagggcaatgtggatcttsgcagattcaaggaaaagaattacaaattgtcaagtacaagacagttttctactctttctaccttcctatagctgcagccatgcatatggcaggcattgatggtgagaaggcacacaccaatgccaagaagatcctgctggagatgggagagttctttaagattcaggatgatcactttgacctctttggggactccactgtgactgacaaagttggcactgccatctaggacaacaaatgcagctggctggtggttcagtgtctgcaatgggccactccaaaacagtaccagatcctgaaggagaattaggggcagaaggaggccaagaaggtggtccaggaga

SEQ ID NO: 151422 - DNA, 438 bp, Homo sapiens
aagcatgtatctactgcctgctgaagctctgttgttgggagcagccctattacctgaacctgattgagctcttcctgcagagttcctatcagactgagattgggcagaccctggaccccatcacagcacccccagggcaatgtggatcttcgcagattcaasgaaaagaattacaaattgtcaagtacaagacagttttctactctttctaccttcctatagctgcagccatgcatatggcaggcattgatggtgagaaggcacacaccaatgccaagaagatcctgctggagatgggagagttctttaagattcaggatgatcactttgacctctttggggactccactgtgactgacaaagttggcactgccatctaggacaacaaatgcagctggctggtggttcagtgtctgcaatgggccactccaaaacagt

SEQ ID NO: 151423 - DNA, 438 bp, Homo sapiens
aagcatgtatctactgcctgctgaagctctgttgttgggagcagccctattacctgaacctgattgagctcttcctgcagagttcctatcagactgagattgggcagaccctggaccccatcacagcacccccagggcaatgtggatcttcgcagattcaaggaaaagaattacaaattgtcaagtacaagacagttttctactctttctaccttcctatagctgcagccatgcatatggcaggcattgatggtgagaaggcayacaccaatgccaagaagatcctgctggagatgggagagttctttaagattcaggatgatcactttgacctctttggggactccactgtgactgacaaagttggcactgccatctaggacaacaaatgcagctggctggtggttcagtgtctgcaatgggccactccaaaacagt

SEQ ID NO: 151424 - DNA, 421 bp, Homo sapiens
gggtctgggcatggtggctcacatctgtcatcccaacactttgggagtccaaggcaggaggatcacttgagcccaggaatttgagaccaggctgggcaacatagtgagaccccatctctacaaatttttttttttttaactaaaaaccaagtgagaagggaaactatttcacagagttgttgagtgaattcactagacaacacttatgccattcctggtacatagaragcaccaaatacatgttagctgtgattatgctgtggaatcatgattctttggggcccctgacactcactgaacaatatgaaaatgttctattttctgtacgtcactttcctctttctgtccataaatttccttccaccatgtggctgcgctggagtatctctgaatctgctgtgatttgggggctgcctgactg

SEQ ID NO: 151425 - DNA, 421 bp, Homo sapiens
atggctaggacctgaactccaagctgtgggccccaggtttttcatctgcttaggccactccccactgcccagacgtcccctggggtgtccggtttgctggaagggccaccactggccttgagctcccagtgtcatttccgggcgctgacgcgtgagggtctccaacaggcgggcccacgggaagtgctttctgtgcttggcccttcatgctttgcctctggttcctgaaatgggcactggaggtgggcacagttactgtccacatttcacaggtgagcaaagtgaggcttagagaagctaagtgacttgtccaaggtcacacagcaaaagaggggcctcgaacagaactaaagggcccatggtgcacaggcagaggttgccatakagcgaccagggccttctcaaatccggctgtgagcag

SEQ ID NO: 151426 - DNA, 563 bp, Homo sapiens
ccttggcctcccaaagtgctgggattacaggtgtcarccactgtggctgccctaaatatgctacaattatatacttataaagatgtgcattcacaaattacttccaatttctttattttttttgttttgctttggtttcaccaccatagacagtgccgaaaaagcaatccttttttttttttttttttttttttttttttttgaggtggagtctcactctgttgaccaggctggagtgcagtggggccatatcagctcactgtaacctccgcctcctgggctcaagtgattctcctgcctcagcctcctgagtagctgggattacaggtgtgtgacaccatgcccagctaattttgtatttttagtagaaacagggtttcaccatgttggcctagctggtctcgaactcctgacctcaggtgatccacctgcctcagcctcccaaaatgctggaattacaggcatgagccaccgcacccagctggaaaagcaattcttttacatctattttcataccccgttgtttttgtttctaaagaagaggttccccagagtggaatcac

SEQ ID NO: 151427 - DNA, 460 bp, Homo sapiens
cggtgagaaaggaaatatcttctgatacaaaccagaaagagagattctcagaaactgctttgagatgtgtgcattcatctcacatagttgaaccacacttttgatggagcagtttagagccactctttttgtagaatctgaaaatggatatttgggagccctttgagtcttatggtgaaaaagaaatatccttacataaaaactagaaaggagatctctcataaactgctttgtgatatttgcatttatctcacagaattaaaaccttcttttgatggagcattttggaaacaccatttttgtagaatctgcaaagggatattttggagaactttcatgcctatagtgataaaggaaatatcttcacctaaaaactcgaaggaagctttctgagaaactgctgtgtggtatgggcattcctctcacagagttgaacyattcttttgattgagcagtttgg

SEQ ID NO: 151428 - DNA, 462 bp, Homo sapiens
gcccatggtgaaaaagttaatatcttctgatacaaactcgaaacaaagattctgagaaattgctttgtgatgtgtgcattcatctcacagagtttaaccattttttaattgagcatttaggaaacacagtatctgtaaaatctgtgaaggtatatttagattccccttaagkcctatggtgacaaaggaaataccttctgattcaaactagaaagaagctttctgaggatccactttgtgatgtgggcattcctctaacagagttgaaccattattttgattaagcagtttggaaccactgttttcctagaatcttcaaagggatatttttgagttctttgaggcctatggtgaaaaaggaaatattctcacataaaaactagaaacaagctttcttgggaactgctttgtttagtgtgtattcgtctcacagcattagacctttcttttcattgagcagct

SEQ ID NO: 151429 - DNA, 462 bp, Homo sapiens
gcccatggtgaaaaagttaatatcttctgatacaaactcgaaacaaagattctgagaaattgctttgtgatgtgtgcattcatctcacagagtttaaccattttttaattgagcatttaggaaacacagtatctgtaaaatctgtgaaggtatatttagattccccttaagtcctatggtgacaaaggaaataccttctgattcaaactagawagaagctttctgaggatccactttgtgatgtgggcattcctctaacagagttgaaccattattttgattaagcagtttggaaccactgttttcctagaatcttcaaagggatatttttgagttctttgaggcctatggtgaaaaaggaaatattctcacataaaaactagaaacaagctttcttgggaactgctttgtttagtgtgtattcgtctcacagcattagacctttcttttcattgagcagct

SEQ ID NO: 151430 - DNA, 462 bp, Homo sapiens
gcccatggtgaaaaagttaatatcttctgatacaaactcgaaacaaagattctgagaaattgctttgtgatgtgtgcattcatctcacagagtttaaccattttttaattgagcatttaggaaacacagtatctgtaaaatctgtgaaggtatatttagattccccttaagtcctatggtgacaaaggaaataccttctgattcaaactagaaagaagctttctgaggatccactttgtgatgtgggcattcctctaacagagttgaaccattattttgattaagcagtttggaaccactgttttcctagaatcttcaaagggatatttttgagttctttgaggcctatggtgaaaaaggaaatattctcacataaaaactagaaacaagctttcttgggaactgctttgtttagtgtgtattcgtctcacagcattaracctttcttttcattgagcagct

SEQ ID NO: 151431 - DNA, 678 bp, Homo sapiens
aacatcgcatcagaggttctacaaaaactttgtttccagactactcagtcaaaagaaagatttaactctgtggtatgaatgcatacatcacaaagcagtttctcaaaaagctgacttccactttttatcacaagatattctttttccacaataggcatccrtgcactcccatatatccctttgcagattctacaaaaacattgtttccaaactgctcaaacaaatgaaacatttaagtatttgagaagaatgcacacaccaaaaatcgttttctcagaaagcttctttctagtttttatctgaagttatttcctttttgaacattggcctcgtgtgctcccaaatattccttcacagattctacaaacacagtgtctccacactactcagtcaaaagaaaggtttaactctctgagatgaaggcacacatcacaaagcagtttctcaaaaacttcttcctagtttttatccaaagatatttccttcatcaccataggcttcaaagtgctcccaaatatcctgccacagattctgcaaagacagtgtttccaaactgctcaattaaaaaagaggtttaactctgtgagttgaaggcacacaccacaaaacagattctcaagaagcttctttatagtttttatctagaaatatttcctttttcaccttaggcctcatgca

SEQ ID NO: 151432 - DNA, 678 bp, Homo sapiens
aacatcgcatcagaggttctacaaaaactttgtttccagactactcagtcaaaagaaagatttaactctgtggtatgaatgcatacatcacaaagcagtttctcaaaaagctgacttccactttttatcacaagatattctttttccacaataggcatccatgcactcccatatatccctttgcagattctacaaaaacattgtttccaaactgctcaaacaaatgaaacatttaagtatttgagaagaatgcacacaccaaaaatcgttttctcagaaagcttctttctagtttttatctgaagttatttcctttttgaacattggcctcgtgtgctcccaaatattccttcacagattctacaaacacagtgtctccacactactcagtcaaaagaaaggtttaactctctgagatgaaggcacacatcacaaagcagtttctcaaaaacttcttcctagtttttatccaaagatatttccttcatcaccataggcttcaaagtgctcccaaatatcctgccacagattctgcaaagacagtgtttccaaactgctcaattaaaaaagaggtttaactctgtgagttgwaggcacacaccacaaaacagattctcaagaagcttctttatagtttttatctagaaatatttcctttttcaccttaggcctcatgca

SEQ ID NO: 151433 - DNA, 583 bp, Homo sapiens
aacaaaggtctctccatcatagacaatgtaaagatttaatttctgtgctttagatatgcatatacctaaacatctcagggccttacagatctgtattgctgcccacgtgtcccacctcaagccctaaggtggttttcccctatctctgtagatggaacatacaattgggttttataccgagagattccattgcccaaggaaggtcaggagacagatgccttcctcttgtctcaactgcaaagaggcattccttcctcttatagtaatcctcctcagcacagacccagtaggggtgttgggctgggggatggtcaggtctttcccttcctacgaggccatatttcagactgtcacatggggataaaccttggacaatacctggctttcttaagcaaaggtccctgtggccttccagtgtttgkgtccctggatagttgagattagggagtggtgatgactcttaaagaggatgctgccttcaagcatctgttaaacaaagcacatcttgtagagcccttgatcaatttaaccctgagttgccacagcactcatttcagggagcacatggttttcggggtaaggt

SEQ ID NO: 151434 - DNA, 533 bp, Homo sapiens
gaacaccatctgccgagcgtctcctggtacatgctggctgcctgattttgagggattcagaagttatttatgtttcargcttgaacagcaatctctaaacactgtcttccctaccaggaaaccatttccccttttccatgagaggtctatgagctctctgatcacttcagtgggaagaagctgtcaagacagtttatctggagcttctactttggggagaaaaaaactatttttttaaaaaaagtggacagagttgtgaagtgtatctaataaggcctggctttggcacctggacacatagcattcaccccaaatctcttctagcaggtaggcaggtttctgagttacaatgtatagtgccgaaaggtggctaagtctggagtgaaagccaagcacacccagagcctccacctgccagagcagtcacgaagaagcaccaagcacgagtgggattttgtccaaggagaacatttgttctgtggatgttcatttgtttgtgtcagtcttattgtgactttttatttagtttttat

SEQ ID NO: 151435 - DNA, 643 bp, Homo sapiens
atgcaaatatgcatgcacattatctcatttgatcctcatgctagtgccatggggaaggtcctgatatcttccccctttaacagatgaggggactaagattcagagaggttgaataatttttctcatactcacataccaccaagagccaggatttggctaaagagttatctgactccataaacacacaaaatatattaactgggctaagccacattgacagagatactcagccttcccttatccatgaattactccctgtaagatcttctaagagacagtcctcacacaaccccatgcctcgacaagagtaactgcaaaccagaacaggccacccccaggttgggtacacaggagtttcccragacttggagaacaggaagagcttaaaggaatccatttctagattttcaaggcactatcaagactgacccgagaaggctcccgaggctggggttctcctttcccagcccctcctttcacaatctataccaggatctccaaaccttctcaaggaaaagcttcttcctccctccttaagtgagaccggttcttgagcaagggagggactctaataccttcagtcctcaaattcccttgctgaaaggaccgtcctctgaaaagaggtcatggagtggcaaccagc

SEQ ID NO: 151436 - DNA, 329 bp, Homo sapiens
gcctaaaaggaacaagacccccataatattttttaaaaattaaactatcttttaatctmtttgcttttataagcagaaagcaggaaaaaaatcatatctataatattaaccaactgtatttttcagtgttaaagacagagaagacaaattaaaaagaatacatgctttggagaatgtcagtggggtagagaagcaagaatgcagactccaggggatattacaaaggaggggtgctgttggcctggagccacccttctcccagaattcccctcaaccatccattgctggagttccctgcactggcccacgctgcccccccccccacccct

SEQ ID NO: 151437 - DNA, 587 bp, Homo sapiens
cattgctacttatatgtatttcattaaagcaacctaaaacagatgtatttgatatatctgttttaaagggtttagttagaattagcttatctaaaagtgatctagtctattatgttctgaatctaatcacatagttcagattccaaaagaatctgaagtgaccctgtgacaacatgaaactacattaaatgaatatatattttgtctaaatgacatccttggcttactttcagaactttaaaaaatcttttcaaagcctgacaacgtcaggtactgattgagatgatctagtacgtctgatatgctcatgtaaagtatttagatgctgttttgttattgtraattcaatagtgccttgtgagcatctgaacctagtactccctctaaagagtgtggaactgggtttgtgttgacagcacatcgctgaacagacatcccaaactgctctttccggcactagggagtgggcagcataatccctttattacgcaaagagcatatcaaattcaagtaccaaaatgcttccaaatagatttaggccaacactttctttgataggatgagacatggaaaaagatcctatttct

SEQ ID NO: 151438 - DNA, 587 bp, Homo sapiens
cattgctacttatatgtatttcattaaagcaacctaaaacagatgtatttgatatatctgttttaaagggtttagttagaattagcttatctaaaagtgatctagtctattatgttctgaatctaatcacatagttcagattccaaaagaatctgaagtgaccctgtgacaacatgaaactacattaaatgaatatatattttgtctaaatgacatccttggcttactttcagaactttaaaaaatcttttcaaagcctgacaacgtcaggtactgattgagatgatctagtacgtctgatatgctcatgtaaagtatttagatgctgttttgttattgtgaattcaatagtgccttgtgagcatctgaacctagtactccctctaaagagtgtggaactgggtttgtgttgacagcacatcgctgaacagacatcccaaactgctctttccggcactagggagtgggcagcataatccctttattacgcaaaragcatatcaaattcaagtaccaaaatgcttccaaatagatttaggccaacactttctttgataggatgagacatggaaaaagatcctatttct

SEQ ID NO: 151439 - DNA, 575 bp, Homo sapiens
gtgcctgggacatagttcttgcttttatataatcccaatattttattacaatcccaaaactcatatagataaaaacatatagcaataggaggatctatttcttattaatgctacctatagaaatttaactcaattcataaagtcactctcatgcttctatatattcccactaggttcccattaaatgtttcrttagaactgaagctgtgtttttagtttccataaaaagatgcagctgatttcatttgcacttggcactgagttttatagtgtataggcactcaggaggtgttgaatacagtctaagcaaaatttaatccatattctggtttctttttctagtgctgcatgaaatggatgattatggaaatacccctctgcattgtgctgtagaaaaaaaccaaattgaaagcgttaagtttcttctcagcagaggagcaaacccaaatctccgaaacttcaacatgatggctcctctccacatagctgtgcagggcatgaataatgaggtgatgaaggtaaggctactggccggctccaaagggcctgaccggcggtgcaggtgctgggaccca

SEQ ID NO: 151440 - DNA, 552 bp, Homo sapiens
gcaatcagcctgcctaaagtagatggttttggggaaaaggtggggttgataaaattggagaatcaataaggctgaaaaatattacaagaattaaagattcctacattaatggattctgagcaggaaaataatattacgtaaaaactgyttttgtaagaagggtgaactcagcagtcatgtgtagaatgatagaagagcagaggcctggaggctggaaaatcattgagaagatgttgcagaagtccaggaacaggcagtgaaggcctggactagtacaccagttctcaaatttttggtcatgggtgtactgatactcttaaaaataattgaggagtccagaagtgttttgtttgtttggtttttatctgtcgatgtttatggtatttgaaattaaaacagaattattttaagaaaattattaaatcattttaaaataacaataaacccattatacattaacataaaagtaactatgctttttcatgaaaaataactatgcttttaaaaatatatagtgagaaaaattatactgttttatacttttgcagattt

SEQ ID NO: 151441 - DNA, 623 bp, Homo sapiens
ataataatgcagctggaaggagctatttggatcgaatgagccaaatccctggtttgcagattatggaacaaaaccctagaagacaaagggatcatcagtttaaaatacaaaaccctaatgtcatagaaaattctatcaaagcaaagtttaagtgtttgaacattgacttcatcaaagattaaataaaaatggtcctgagttgttattactctctaaaaaagtgttgtttattaaaatgtttgkcatatattgttgttgttcattgttttactcatttggagaggttctaataagaatagcaggaaactaactgaattatttaaaagctaggctcaatgtattcaaggaaaccaaaagtttaacgtactttgagcagcacttgatgaaaatgatcatcaacatgatgagttgtattttaggcatgcacagtatttgctaaatgaatgaataataaatataaaaagtacttggctggagacaaagtattgtaccttagaatactgacattgaacaacacaaatttggtaaatccttactttttttaaaattatactttaagttctgggatacatgtgcaaaacgtgcaggtttgttacataggtatacacgtgccatggtggttt

SEQ ID NO: 151442 - DNA, 623 bp, Homo sapiens
ataataatgcagctggaaggagctatttggatcgaatgagccaaatccctggtttgcagattatggaacaaaaccctagaagacaaagggatcatcagtttaaaatacaaaaccctaatgtcatagaaaattctatcaaagcaaagtttaagtgtttgaacattgacttcatcaaagattaaataaaaatggtcctgagttgttattactctctaaaaaagtgttgtttattaaaatgtttggcatatattgttgttgttcattgttttactcatttggagaggttctaataagaatagcaggaaactaactgaattatttaaaagctaggctcaatgtattcaaggaaaccaaaagtwtaacgtactttgagcagcacttgatgaaaatgatcatcaacatgatgagttgtattttaggcatgcacagtatttgctaaatgaatgaataataaatataaaaagtacttggctggagacaaagtattgtaccttagaatactgacattgaacaacacaaatttggtaaatccttactttttttaaaattatactttaagttctgggatacatgtgcaaaacgtgcaggtttgttacataggtatacacgtgccatggtggttt

SEQ ID NO: 151443 - DNA, 623 bp, Homo sapiens
ataataatgcagctggaaggagctatttggatcgaatgagccaaatccctggtttgcagattatggaacaaaaccctagaagacaaagggatcatcagtttaaaatacaaaaccctaatgtcatagaaaattctatcaaagcaaagtttaagtgtttgaacattgacttcatcaaagattaaataaaaatggtcctgagttgttattactctctaaaaaagtgttgtttattaaaatgtttggcatatattgttgttgttcattgttttactcatttggagaggttctaataagaatagcaggaaactaactgaattatttaaaagctaggctcaatgtattcaaggaaaccaaaagtttaacgtactttgagcagcacttgatgaaaatgatcatcaacatgatgagttgtattttaggcatgcacagtatttgctaaatgaatgaataataaatataaaaagtacttggctggagacaaagtattgtaccttagaatactgacattgaacaacacaaatttggtaaatycttactttttttaaaattatactttaagttctgggatacatgtgcaaaacgtgcaggtttgttacataggtatacacgtgccatggtggttt

SEQ ID NO: 151444 - DNA, 475 bp, Homo sapiens
tgaataaaaattcttcattggcctagagcagtgtcgtctaatagaactttctgcaatgacgaaaatgttttctacctgtgcagtgcaatatgagagctgcaagccaaatgggctactgagcatttaaaatgtggctagwgttactggaaaacaaatttttaactttatttaatttaaactagtttttaagttaggaagccacatgcaactattggttcccatactagatagcccaaatctagaccaaaatttgcaactccagtcctcaaatatgttttgttttacatgcacacaattttaatttgttgccaatatttacacaattgtgggctgctattgccacatggcaatgatttgttgaagctagtagccactgtccttttaaccagaagcctaagttacttggctgttactgttttctctgtagttatttcagtttgagacctttgatttagactacagggggtcaaatgca

SEQ ID NO: 151445 - DNA, 590 bp, Homo sapiens
gtcatatatttctggaagttatatcttactacactttcagtgttctctaagcaagaataaaacattgcttaaaatgacgaattgggggataatagatgttaggtgttattataactattgctcytttggttcccccaaaagcatagcttgagataagactttggttgcatgaatttgctttgtaaaataaaacataagaagggagtatggaaatggaacaggtaaagtgagaaagtgatagagaaaatgctaataaacagtgtggtatgaagatgactgtcaaaggaccgctgagatataggtacagtgcttccctgatcctttcttttgaaggactaaaggctaaagtatctgtgcctttgctcccctgacaatcttttctggagctgaccatttcacatttctgagttgggcctgctcaaactgagcagaatcttggacttcaatgtaaagtcttgaagcagaaagcctgagatccattccatgagtgcttagaatataactttcagcatgcaacaacctctcctccacatttgtgcatgaagtcagaggtgattcaaaaaggtgcaaacgatgaatcaaagtgtcta

SEQ ID NO: 151446 - DNA, 513 bp, Homo sapiens
gtcaatatcttgtatttcataaagctctaacatttcaagcatcatctcataagttcctaaccctggtttcagtttgcatatttgttgaaaaaacaagagaagttcattcaacagcattaaaattcatccctgctaacattcgacaaagattttttgggaattaatcaactgcagtgsctcccgaataaaacactcacaatataatattttaagccacagctagctattaacactctgaaagatgaactgcatacatgtttcacgaagatttatatgaaggactgatctgaaatatataagagatgctgatagagaattcacctggcttctaaatgaggcaatactctcccagaatttatttattaccaatgtatttcaattgtgaaagatggtgtaagaacttggaacccacaagcatctggatagaaatatgaagatggcttgaccttgcaggtgatgagttatttgccgctgctcccgggtattattccacctgctttgggtaaacagcat

SEQ ID NO: 151447 - DNA, 532 bp, Homo sapiens
ccatacctgtcctgcagtttcctgattccctgctttattttctcttataattcaatctagactgtatttttctatacagaaatctcattccccttgttagatygaaaatgctatttattggatgtgtgagattttcttcaatataatcccatgaaagtcttctgtgaaatttcataatattttatgcacacttgaaacagaagtgatcatttggggttccttgtggtgtagtacagaaagcattagatttaaaattagacctgtgaatttcaattgtccctgtcactattgtttctgagactttagctaaatcatatatactgctaattttgtggtggatgaacattgttaccacattgatctttgttgaccagaaaaggtcagctgtgatcagtctataatctattcaataaaagacatatttattgtcacctcagaagtaataatatatatcaataataataatattactcattgagaattagagaaagtaagtgccaatacattttgtaaaatgttaaactgaatgaga

SEQ ID NO: 151448 - DNA, 532 bp, Homo sapiens
ccatacctgtcctgcagtttcctgattccctgctttattttctcttataattcaatctagactgtatttttctatacagaaatctcattccccttgttagattgaaaatgctatttattggatgtgtgagattttcttcaatataatcccatgaaagtcttctgtgaaatttcataatattttatgcacacttgaaacagaagtgatcatttggggttccttgtggtgtagtacagaaagcattagatttaaaattagacctgtgaatttcaattgtccctgtcactattgtttctgagactttagctaaatcatatatactgctaattttgtggtggatgaacattgttaccacrttgatctttgttgaccagaaaaggtcagctgtgatcagtctataatctattcaataaaagacatatttattgtcacctcagaagtaataatatatatcaataataataatattactcattgagaattagagaaagtaagtgccaatacattttgtaaaatgttaaactgaatgaga

SEQ ID NO: 151449 - DNA, 431 bp, Homo sapiens
ttaaactgaatgagagatagatatgggttttaatctttggttttcatctgattcatgaaacaagattattttgggttttatttttctattaccattgaggctacataatagtcactttaagtttaaaacaagcataaaggtaaatgtgaagaagtgggtttatatttaataagcacaagagatatttgtcaattgaataaataaatgactgaatgagtagatgaacttcagcaagacatattacatctttcctaaatagtgtcaggtygcatataaaaatcagcatctacatatattctgaattcaattgagaataacatgtgattcaggagttaacagtatttccctgatgctcaaaatcagcattaatgagatttaatatgaaaacaaacgaacaaaactttggtttaggttaagaaagcaaaattagt

SEQ ID NO: 151450 - DNA, 439 bp, Homo sapiens
tgacagcacaagagagaatcgttgcttatktgtggaaatgtgtcccacctgacccttagcactgccaatcacagctcttcaaccaccgaaagtcagtttgaattgccaagtagttaaagccgactggtcatcctgaactagtgcacagcttggcttctagttgcttttcacgaaggagacacagttgtcctataggtgccgtgtgttcactagcaaaagcagaaaagtccttcctatctataccccacttgtccatgggtttgatacagattttcttctttgctgtgtgtgatggatttttacatgtcagcaccttgtacatacgtgttgtgagcttatctgagcaatttggtcatgtccaactaccagggtcttgttcatcgataatagtcaccagttgttggaggtcaatgatggttaactactcttctaccttcta

SEQ ID NO: 151451 - DNA, 258 bp, Homo sapiens
ttcttgttttaacctctgacagcacaagagagaatcgttgcttatgtgtggaaatgygtcccacctgacccttagcactgccaatcacagctcttcaaccaccgaaagtcagtttgaattgccaagtagttaaagccgactggtcatcctgaactagtgcacagcttggcttctagttgcttttcacgaaggagacacagttgtcctataggtgccgtgtgttcactagcaaaagcagaaaagtccttcctatctata

SEQ ID NO: 151452 - DNA, 258 bp, Homo sapiens
ttcttgttttaacctctgacagcacaagagagaatcgttgcttatgtgtggaaatgtgtcccacctgacccttrgcactgccaatcacagctcttcaaccaccgaaagtcagtttgaattgccaagtagttaaagccgactggtcatcctgaactagtgcacagcttggcttctagttgcttttcacgaaggagacacagttgtcctataggtgccgtgtgttcactagcaaaagcagaaaagtccttcctatctata

SEQ ID NO: 151453 - DNA, 380 bp, Homo sapiens
tgtctgtgtgtgtgtgtgtgtgtgtgtatgtgtatataaatataaaagggttgaagtcaarttgactgaaataaaagatagctaagcaggcccaacgtaaacataattggagtcccagaagaaaagcaaaacaacgaagcagaatatttaaaactataatcccagaaacttttgcagaaatatagacctgaatctgttgaaaaggccaagccagaactggaatgatcaattcaaaacatattacagtaaagccatgagtcttaaaaaaaaaatcctggccgggcgctgtggctcacgcctacaatcccagtactttgggaggctgaggcaggcagatcacgaggtcagaagatcaggatcatcctggccaacatggtgaa

SEQ ID NO: 151454 - DNA, 380 bp, Homo sapiens
tgtctgtgtgtgtgtgtgtgtgtgtgtatgtgtatataaatataaaagggttgaagtcaagktgactgaaataaaagatagctaagcaggcccaacgtaaacataattggagtcccagaagaaaagcaaaacaacgaagcagaatatttaaaactataatcccagaaacttttgcagaaatatagacctgaatctgttgaaaaggccaagccagaactggaatgatcaattcaaaacatattacagtaaagccatgagtcttaaaaaaaaaatcctggccgggcgctgtggctcacgcctacaatcccagtactttgggaggctgaggcaggcagatcacgaggtcagaagatcaggatcatcctggccaacatggtgaa

SEQ ID NO: 151455 - DNA, 380 bp, Homo sapiens
tgtctgtgtgtgtgtgtgtgtgtgtgtatgtgtatataaatataaaagggttgaagtcaagttgactgaaataaaagatagctaagcaggcccaacgtaaacataattggagtcccagaagaaaagcaaaacaacgaagcagaatatttaaaactataatcccagaaacttttrcagaaatatagacctgaatctgttgaaaaggccaagccagaactggaatgatcaattcaaaacatattacagtaaagccatgagtcttaaaaaaaaaatcctggccgggcgctgtggctcacgcctacaatcccagtactttgggaggctgaggcaggcagatcacgaggtcagaagatcaggatcatcctggccaacatggtgaa

SEQ ID NO: 151456 - DNA, 636 bp, Homo sapiens
aggcccagcacaagaacgaaaacagcactacaccaagcttatcacagaattccagcatggttggcgaaagggaaaaatattaaaagagtgggtaatcaaggtgaagaggatagagacacatcacatgcaaacaataagtgacaactgaatcagtcttatcaacagcagtctggaattgagaaaacaatgggaaataccttcaaggaaaaataatatttgtgctagcattttacactcagctaaaatattagtcaaaggtaacagtataataaaggcatgctcagacastcatggtgtcaaaaattttaccttttatgtatcctttccagaagcagaactcatctgcataatttttatagcattcaattatactgaagtaatatatgtacaatgcttggaaatatgaaggtaaataccaaaagaaacagatgatttgaaagtagctgtctttgaaaaatggaaaaggaaatgtactgcaaagcgttgctggtttctctttcttttcattgtgaatttcatggcactgcccgttagtctttttaaacaataaatatgtattacttttataactctctctctctctcaatttccacacccccatcaagtccatgggagctatcaaggcaattaagaatt

SEQ ID NO: 151457 - DNA, 636 bp, Homo sapiens
aggcccagcacaagaacgaaaacagcactacaccaagcttatcacagaattccagcatggttggcgaaagggaaaaatattaaaagagtgggtaatcaaggtgaagaggatagagacacatcacatgcaaacaataagtgacaactgaatcagtcttatcaacagcagtctggaattgagaaaacaatgggaaataccttcaaggaaaaataatatttgtgctagcattttacactcagctaaaatattagtcaaaggtaacagtataataaaggcatgctcagacactcatggtgtcaaaaattttaccttttatgtatcctttccagaagcagaactcatctgcatratttttatagcattcaattatactgaagtaatatatgtacaatgcttggaaatatgaaggtaaataccaaaagaaacagatgatttgaaagtagctgtctttgaaaaatggaaaaggaaatgtactgcaaagcgttgctggtttctctttcttttcattgtgaatttcatggcactgcccgttagtctttttaaacaataaatatgtattacttttataactctctctctctctcaatttccacacccccatcaagtccatgggagctatcaaggcaattaagaatt

SEQ ID NO: 151458 - DNA, 551 bp, Homo sapiens
atttctataattatgaatttaattcaaytttttgtaggatatgtctactaattttgcataaaaacaaaagcataattatgttcatcaattgtaatagtctaaacaccatcagaaaatatagccaatagtttatcagcatcatttaaaacaccttagaagggttaactcataagatataatttttgataacattatttttatttttgtattctattataacttatgagacaaaaattgagccaaatactttacttttctgatactcataatagtaaacttataattagatgctattattctacccattttatgatgaaaaattaagtatattgcctcaaaattaacaaatttctacttcaggcaatctaattccagtggtatttcatttagcaattctgtgcgtgcatggttgtgtgtgtttaagtgaggggaagagatttaatgtccttcagcagaccttcaaaacagtttctgatacaaaaacttctctagaaattggtgatttacttaagaaacttgacgtctacaaatcagattaatccaggtagcag

SEQ ID NO: 151459 - DNA, 551 bp, Homo sapiens
atttctataattatgaatttaattcaattttttgtaggatatgtctactaattttgcataaaaacaaaagcataattatgttcatcaattgtaatagtctaaacaccatcagaaaatatagccaatagtttatcagcatcatttaaaacacmttagaagggttaactcataagatataatttttgataacattatttttatttttgtattctattataacttatgagacaaaaattgagccaaatactttacttttctgatactcataatagtaaacttataattagatgctattattctacccattttatgatgaaaaattaagtatattgcctcaaaattaacaaatttctacttcaggcaatctaattccagtggtatttcatttagcaattctgtgcgtgcatggttgtgtgtgtttaagtgaggggaagagatttaatgtccttcagcagaccttcaaaacagtttctgatacaaaaacttctctagaaattggtgatttacttaagaaacttgacgtctacaaatcagattaatccaggtagcag

SEQ ID NO: 151460 - DNA, 551 bp, Homo sapiens
atttctataattatgaatttaattcaattttttgtaggatatgtctactaattttgcataaaaacaaaagcataattatgttcatcaattgtaatagtctaaacaccatcagaaaatatagccaatagtttatcagcatcatttaaaacaccttagaagggttaactcataagatataatttttgataacattatttttatttttrtattctattataacttatgagacaaaaattgagccaaatactttacttttctgatactcataatagtaaacttataattagatgctattattctacccattttatgatgaaaaattaagtatattgcctcaaaattaacaaatttctacttcaggcaatctaattccagtggtatttcatttagcaattctgtgcgtgcatggttgtgtgtgtttaagtgaggggaagagatttaatgtccttcagcagaccttcaaaacagtttctgatacaaaaacttctctagaaattggtgatttacttaagaaacttgacgtctacaaatcagattaatccaggtagcag

SEQ ID NO: 151461 - DNA, 596 bp, Homo sapiens
gtgtttctgttcatgtctgctactctcaagtttagtatcttttgcatcttaactgagcacttaagattcactgtggcttaacttttctgcagtttgtggcaaaaatagcaccaatttatttttccttcacaatttcatggacagaagattcatttttaccatacatctcaccaacctcaggatacaatttttttcttttctttttaaatcaataatttttaccttttcacttaaaggaaacactttacagcttctctttggcatatctgaattgccagcaccactcctctcactttgggtccattattaagtaaaawaaggcttatttgaatacaggcactgtgacactgttaaagtgggtctcatgaccaagatggctcctaagcgactaacagctgggtcactcagacagtctagatacactggacaaaggaatgattcacatcctgagcaggaagatgtgagatttcatcacattactcagaatggggtggaatttaaaacttacgaactgtttattgctataattttccatttaaaatttgtgaactgtggctgaccatgagtaatggaaacctcagaaagtgaaactagac

SEQ ID NO: 151462 - DNA, 455 bp, Homo sapiens
tccttaactctctatgtgatcatattttgagactggttttgcagcttaatgtcatagacaagtcaaggtcctataagtaaaggaaattgggttctagtctaaagtgttactactcatccctcttgtggcatcaatcatacagtacgattaggtgaactttaaaatttgctcctgtttgaaaatctatrcttaaaatattcagggtcccttaatatattttcaagaaaatctaaaagaatttaattagacatgagagacatcttttttagaacattgttctttttgtctccttagccatgtgataaaaaagaaacagtgctttctaaaaaatgtgaaatctctgtgcacacagtaatttgtgctgcgagtaaagattcagcccattatatgtcacttacagcactctactcctggctgctgtcatttcaaggacgaatgatgacccaggttggcca

SEQ ID NO: 151463 - DNA, 455 bp, Homo sapiens
tccttaactctctatgtgatcatattttgagactggttttgcagcttaatgtcatagacaagtcaaggtcctataagtaaaggaaattgggttctagtctaaagtgttactactcatccctcttgtggcatcaatcatacagtacgattaggtgaactttaaaatttgctcctgtttgaaaatctatacttaaaatattcagggtcccttaatatattttcaagaaaatctaaaagaatttaattagacatgagagacatcttttttagaacattgttctttttgtctccttagccatgtgataaaaaagaaacagtgctttctaaaaaatgtgaaatctctgtgcacacagtaatttgtgctgcgagtaaagattcagcccattatatgtcacttayagcactctactcctggctgctgtcatttcaaggacgaatgatgacccaggttggcca

SEQ ID NO: 151464 - DNA, 595 bp, Homo sapiens
cacttttgtttcacagttgaaaggagaaaaaatcaaattaaagtcaatatatatttcatgaactacctggccaagtactagaagctatggtctcacaaaaatactttgattttccataaacatcagaactatcaaaaaataattttgtttgttttcaaggtttagtaaagctttcatgcaagtcaacatatatgtgatgtaatttactgaatacttaatgatattaagacttttcttcagtgtgataatagtattggggttaggtattgttttacatgccctcctcttttggaaataagatgctataatrttttggatttgttttaaaataatccagtttttttaaaacggtacatgtaagagtacagatgaaactagatggcatatgagtggattattattaaagcagtgtgactggtacacaggacttccctcaactgtcatatgtatttgaaattttctataataaaaagtctcaaatgacatgtgatacatcaaattcacaaatattaatgaatggagcttctatttcatgccatgtgaaaaagtgattttccttttctcatcatatgaattcactctaattcagattctt

SEQ ID NO: 151465 - DNA, 345 bp, Homo sapiens
tttgttggataagcttaggacacagtttgaagacatggtgtaatctgtcttgaatcactttggcaggtggtggtaatcaggaacagatggaaagtaagaaaaggcagtggataatgggaaaataaccaacaagtgtctgctacactcacagagttaggcgtttttttcctctgtgttccgaaggcaccctgtgataatgtgyctagtcacagaaaacacatagtattataacaacgtgcttacagcttcctccagtaagctgtgaacttcttgctgggaatgattttatcttcatgtatgtaacacctagcacagtagctaacacagagcagaaggggcataaat

SEQ ID NO: 151466 - DNA, 557 bp, Homo sapiens
tttataaggattatacagcatataaaatgctcagattagtattttatacataagaaactattttttggagagctagaaacatgcttgttaatgagtttaactttataatgtttatgaaattacaartatttttataaacatactttatgtttgttatcatattttatcttcagaacaatctgagaagacaggtacattatcatcctcatcttagatatgaaaaaaaaaaattaagtgcagggaggataagtaacttgtccatggtcctacagtagctaagttacagaggcagggatcaaactgcagcagtaagtctctagatcctgagcttccatgatttgctatttttaaggaataaagtatagtaataaaaattgtgttttgaatttctggttgagaggatttccacatatgatagattttattgaattagacactaggtttctcttcagggttcttctaatgcttgttaatatctcttttttaaaaggataaagacagacttcagcttaagactactttattcagaacttaaataagctgactaatgctcataa

SEQ ID NO: 151467 - DNA, 420 bp, Homo sapiens
gagggacaggaagtggcatagagcttccatgctcttcccaggggtgctactcttcaggaaacttcatgtgtttggctatccagaagctctcccaaccctgtcttctttgggtttttatgaaggatttatcacaaaggcatgactgatcaaaccactgaccattggtgatcaatttaaccctcagtctctcgcttcaacmtagattttgtggggtggggctaaaagttccaacccactaattataccttggattttttcagggacaagcctctatcctgaagctacctagaggctgccggccaccatttacacacattaacatacataaaaatatcactggagattctaagaattttaggaattgtatgtcagaaaaatggggtcaaagaccaaatatgtattctacaatatcacagaatg

SEQ ID NO: 151468 - DNA, 524 bp, Homo sapiens
gttgtgaggctccactgagatgatgtatgtgtgttgtaaaccacaatagatagtagataggaaagatataattataggagtcattttgaaaaaaaagaagtgatagattttggcaatagattccatgtgtggagtgaaagagatgagtcagagtttagtcattaacacattctgttctattttggccatatgtatttatgagactataaatgaagattagcattcactaagaggcttattggtaaaacagttttctatgttggccttttgtactataactctcaaacatttcatagctggaaaatcagtcattttaattgtgtttgattactgagttctatcagtttatcacaaactgatatacmtagggtttgaataaggtatttgattttgtatgaagaccttggccttgctcttcagtgtcatccttggatactcttgtcaccttcagcagctatggtttactagtgattgccttgcgtaaggagtttatttatttatttatttatttaatttatttttga

SEQ ID NO: 151469 - DNA, 524 bp, Homo sapiens
gttgtgaggctccactgagatgatgtatgtgtgttgtaaaccacaatagatagtagataggaaagatataattataggagtcattttgaaaaaaaagaagtgatagattttggcaatagattccatgtgtggagtgaaagagatgagtcagagtttagtcattaacacattctgttctattttggccatatgtatttatgagactataaatgaagattagcattcactaagaggcttattggtaaaacagttttctatgttggccttttgtactataactctcaaacatttcatagctggaaaatcagtcattttaattgtgtttgattactgagttctatcagtttatcacaaactgatatacctagggtttgaataaggtatttgattttgkatgaagaccttggccttgctcttcagtgtcatccttggatactcttgtcaccttcagcagctatggtttactagtgattgccttgcgtaaggagtttatttatttatttatttatttaatttatttttga

SEQ ID NO: 151470 - DNA, 557 bp, Homo sapiens
taaaacatttagtaagtttctaatataagacaggtatgtttctagggaatttkcatattaaaatatataaatgaattttttcataatcatctaaggtacaaaatatctgcatcttagagatttaaaagaaaaatttaaatctcagaaaatgtaattttctgttcaaacagctgctaaaagtccatgcctgtctgattgtaaaactcattttttttttctgctctgtcatgttacctcccagctggagatcaagtactggctgtgcttgaacttgaacttatttatgatgagtttttcttaactttaaaaggtctataatacttgcttactccagtgaggtgatataagaataaaatgaagtatagtacctgaaagaacaagttaggcctgtagaataatgatattaacttaatatcattaccataaaaataaagttgccaatttctcaaaccccataaagtcccctgatcttctgttttatactgtgacaccatcccttgtataccattccatctcagcttgttcattcagcaaagattttaaccacctactatatt

SEQ ID NO: 151471 - DNA, 580 bp, Homo sapiens
atctcttcatctggatcaagtacataacaagaaatgaacatctataactgtgaaaatataaacatataaattgaagcttatctttattgatttaactcaagccstttcaaggacataattcatcttggatttactacgtattctgaagtttgagaaaaagctgtgtgcatttatatcttgtatagctgacattccagtaactagaaacgtagagaatataaaacaatgttttgtggctacctactctggttgaatattcaatggttttaaaattttattcaatgtagataatatacatggaagtttttctatattccttttaaactatagagttttaaaacagtaacggaatgtatttaatagtcatgacctattctgttctgcagtattcccatgttcccttctctctccctccatatggccttccatatgctgttactctgctctcccctctcttcgcaaagcagccccacactatctttcagcctcaggtgaaccttttctgacctccagaactaggtaaaatcttcagtcctatgccttcctcacataaagtgcttctccttcctggcatttgtca

SEQ ID NO: 151472 - DNA, 532 bp, Homo sapiens
agctacagtaactgaaacagcatggtactggtacgaaaacagatatatagacaaatataacagaacagaggcctcagaaataatgccacacatctacaaccattggatcttttaaaaaccagacaaaaacaagcaatggggaaaggattccctatttaataaatggtgtagggaaaaccatgctagccatatgcagaaaactgaaactggaccccttccttacaccttatacaaaaattaactcagacacacaccaccaagcctagmtaatttttgtatttttggtaaagacagagtttcagtatgttggccaggctggtggcaaactcctgacctcagatccacctgcctcagcctcccaaagtgctgggattacaggtatgagccaccacacccagccacaacttttgtacattgattttgtattctgaaactttactgaagttttgtttgtgtttgtttttccagttcttgaaacctttgggatgagcctctgagattttctaggcatgaaataatattatttgtgaag

SEQ ID NO: 151473 - DNA, 558 bp, Homo sapiens
aaatgagcctggagcttctcagggatgaggaaggcaacttggaatttgagaactcggtcccaccatgtctgagacagacttttcaggtatgcagacccatcaactcccctttatacctttgcttaggccagtctgagttgtttcaccttcaactgcaacatcacaagatgaatttcatgcacaataaccagatccaccrtttgactaactcataccacggttttactttgcctactagtttgtagtgcattaatacctcaggtttaactagggtgatcacataatttatcatcccagccagggcccagggcattttgagagtcaaaagagcactatttatgcttatgtcaggacaaaagcgtagatctcagcaactgaaatgttatgttcaccacaattttgaaaaatggtcagattgttgattatttgaagatacagagtcagtatttttttaaagtagtttggcttacaaagttcacagctgtattgctgacacctagaatgcccagcacaaagtagatactcaatgtttatttaataaataaagcatttcaaaaa

SEQ ID NO: 151474 - DNA, 414 bp, Homo sapiens
caccttcaactgcaacatcacaagatgaatttcatgcacaataaccagatccaccgtttgactaactcataccacggttttactttgcctactagtttgtagtgcattaatacctcaggtttaactagggtgatcacataatttatcatcccagccagggcccagggcattttgagagtcaaaagagcactatttatgcttatgtcaggacaaaagcgtagatctcagcaactgaaatgttatgttcaccacaattttgaaaaatggtcagattgttgattatttgaagawacagagtcagtatttttttaaagtagtttggcttacaaagttcacagctgtattgctgacacctagaatgcccagcacaaagtagatactcaatgtttatttaataaataaagcatttcaaaa

SEQ ID NO: 151475 - DNA, 457 bp, Homo sapiens
gtcaggtgacattcttgtcacctgatgttatggtgtcaccatcaggtgatggtgaagcagttgttacactctctctctaaaataataattggtcacagctggtgccagggaaaggcagtctcccaatagacagaaacacctgaaactggtgatcagcagcttcccagaaagatctcagaagctggatgaatggctcaagcatgctcactaagagacaaatggcagagtttamctggtatatgaccttcctctaggaacactcaactggtaagagaagagtgcctcaagtgagcaagcatacaacttcagtaaacacactgtgcatgtgacccctcccaagtgctggcaggccactgggcatgcaaaagtccaccccaaaagaaggatcaggggagaagtaatgcaatcccaaaagcatgccaacatgtaagaccctaagtcgaaggtcaaaaccgtg

SEQ ID NO: 151476 - DNA, 528 bp, Homo sapiens
catttcagcctgatcaataaccatttctggggaactagtgcagtcatttagaggaaagaagacattctggccttttgagtcaccagacttcttgagctggttccttctcatctgtgtgaactgatgttcctttaactgcggtgcaatttgagtatagtcacttgactttgtttctgggtgttttcagagggccaagcctttgtgctatttctttatttgtagctgaattcttgtcctaggtttcactgcaggtatattagcaaagtatttttttattgaaatttgagctgtggcccaktaggtggcacttaagcatagtggccagtagataggcttcttctcagccatgtggtgcctatgtatttcctcacaattgcggtcatgctccttctcagtgttctgagggtgtgagctcctctcctactcaagtattgactgcagatcttggcttgccactcccaggctacacattacagccctgaggcaagctcaggctttatgttttctccccagcttggggttagcagt

SEQ ID NO: 151477 - DNA, 389 bp, Homo sapiens
gaagtcagggaccctgaacggagggacctgctgaagccgtgacagaagaacataaattgtgaagatttcatggatatttatcacttcccccatcaatactcttataatttcctatgcctgtctttactttaatctcttaattctgtcatcttcgtaagctgaggatgtatgccgcctcaggaccctgtgatgattgtgttaactgcacaaattgttcctaaagcatgtgtgtttgaacaatatgaaatctgggcaccttaagaacaggataacagtgattttcagggaacaagggagataaccttaaagtctggctgcctgtgggccrggcaggacagagccatatttctcttattaccgaaaatgggtaagagaaatatcgctgaatt

SEQ ID NO: 151478 - DNA, 514 bp, Homo sapiens
ggagaatagtgactgctcatttgccactgtgggaagtcaattaataatgcctaagataaaatatcaagaagtagcaattattgaaacaaatgtgttatttggagaaacagaatagttacataaaaataaatcagctataagaggagaaaatggttttcactggaagcagtaaatgatatggtggccatctggttttacataaatttgtaaaaacattatatgtgcataatattggcattataactttacacataaaaatataactttgattaaaaaataaaaaaacaaattctgcattctatctagttcattctctatttttagaaatcctargctccagatctctttgggattaatagctttcatgtcaataattagctaaaagaaggtgacagcaaatagattttttttgagatgtaaatttggtaagagtgacatagatttaagaaagactgaataaagcatgttgacaggaaaagaaataattttatgccacagcccatttatttatact

SEQ ID NO: 151479 - DNA, 520 bp, Homo sapiens
ctgcatgagggggaattaattttgctgtaagttacaatctggggtctcaggaattccctgcatcttgatgagcccragtgtgggccagttagtccctgcagagcaatcattttagactttagaaccaaaatcccaagacaaaatggcccctcacccaacaactgctgccaaattcttggcacttggggaaattttggccaaccatctgtctgttggaggaactgttctaatcctttgacaagagtacattgtcattcagatggtatgaaccctagtggctccatactcatctttccccgttcatttcatccactttggggaggagccctaaccaggtcaaggacacacaatgagtattgggaggacaatagccattcctgcctactaaggcaagtataacccactatatgccagaagcaagtgctcaggagtcagccaggctatgttctcatatatccctgaccttgtgggcaacttattaatgcctctgagcttcatttgccacaaatgggaccaatag

SEQ ID NO: 151480 - DNA, 619 bp, Homo sapiens
ttttgttttaagatatgaaagcatatgggagtcctgttgggcacaaatggctctatattttctaaatctctctaaaacaaaatgtgtaagtcagaattttctgctctaaattccatatggctttaattaattcacagagtgagtaaatgtattttccatttaatgaaaaaggcttttggcagtaggaccacttactctgcactagttaatggagcattaagaataacacagagaaatattaattatatttgaaaagatggctagctttaaagttaggctattagccacttatagcatctctcacagaaatgatacaacatactcaaagagaaatcttgtcctactattaatactatcatattcacaaattaataagtcacgacattctctaaaatatctctaattctctaaaaataaacaaatagccctataatatcctactcctgaccaatgccatctttgcatttaaagtatctatcttataatttcaaacacgagattttaccagttgttgtgtttgctctgagcaaaacaaataaagtaggaatattaggattcttggtcacaagatttgtaggraatattattgtttgttcttaaaaaagagagggaaacagta

SEQ ID NO: 151481 - DNA, 610 bp, Homo sapiens
actagcttttaactctttggcattttaaaacatctgaccaattaaatacaaatactttcaaatttatgtgaaacatttacatttaccaaggttgatcatgttatacaggccataaaacaactttcaggaatgttaaaaaactgaaatcaattaatgtttgtcctttgaccataatctggttaaatcggaaaaaaaagataaaaaatcttgaaaaattcccaaataagacattaaacaacacacttataacctaagcttacactgaaaaagtgagaaaacagtgatttaaatataaagcaagaagataataaaaatcgtgagtaaataagcataaattctaaaattgaaagcagaaaatctattaagaaaaatcaataaaaccaaaggcactttctctgaaaagatcaacaaaatggataaagctctatcaaactaatcaaataaaagaaagaaaacacaagttatccatgtccagaatgcaagaagtggtatcattacagaaataacagattttgaaacaawaataatgcaattccacaaacaaaagtagacccataaatacaaaaattttaatgaaattaatcaattttattacaggcataaaatatca

SEQ ID NO: 151482 - DNA, 561 bp, Homo sapiens
attgaacttttctattaaaaatgtgaaatacttttttatttgttcaattctgttttgcatctttaaaatgtcttaaagatttcttcatacaatatttaggaaatttatatgaagtttttaattattttataaataagtattacacattttaccttgtaaytttttaaaaaaatgaaacaagcttagttttagtttagtacatatgcagtctattaaagcattaatttactagattctgctatttgcagtagctttttattagatcctcttggacatttcaaatatataatcataacatcagcaaatgtagttttgtctttttctttctactttttgaacatattgttgctctctcttacctagttacattgaaaatatgctcaattgtagaagtaacagtgggtttctctttctttctcctaaccttaggagaaatgcttccaatgtgtatccagtaagtaaaatctgatttttggactaatatttacttttaaacctattatataaatttctatttattcttgttttattagtaggaatgggttttgatttttgcaaaat

SEQ ID NO: 151483 - DNA, 602 bp, Homo sapiens
atttattggccgagcgtggtggcttatgcctgtaatcctagcactttgggaggctgaagctggcagatcacttgaggtcatgtgttcaaaaccaggctggccaacatggtgaaaaccccatctctactaaaaatacaaaaattaaccagctgtggtggcacacgactataatctcagctactcaggaggctgaggcaggagaatcacttaaacccaggaggcagaggttgtagtgagctgagattaygctccagcctcagtgacagagcaagcctccatctcaaaaaacaaacaaaaaaaaattaacatcattaattttactattttagctgttagtactgagaataaaaataaagtttaattctcaaataaagtctgtattttcaaatataatttcaccttgttttaagaatctcaaagttttttttcttattctcactcatacattcctttaatcactgtataattatttattaaatagccaccaagttcaatgctagggttatagaggtgaaaagctatttttttacaagatttaaatagatataaaagccaaatgaattagtatcattcgtcttagtttggttacaacagagataaac

SEQ ID NO: 151484 - DNA, 559 bp, Homo sapiens
cttttagtgaagaaacttaaaagtctaaaaattttaatttcaagtttgactttctaggtcaatgtgaaggcatacttatcgaaataggatggtacaacatatttaattgaatgattttgggggattgatttattattttaaaatgaatcacatatrtgcctccatttaactcttgccttgagaggccataaatgctaaggactgtcttagtttcagagttggtggagaattctgaatgtttgatatcacaataaggtcctgatgacgggggaataaagaaagtcttttttttttgtttttttcagaagagaaaattcagttgcttaacctgaaaaacacgttggggattataaagcgtagcacaaaatgtaaagcttaacctggaacacagtttctcatgagtctattttactcaaagaccattttcattgtgctgcgttagacattggcaagttttgctgtaaagtgtcaaatagtaaatattttaggcttggcaggctaaacaactctgatggaactactcaatgctgttgtagctagaaagcagacatagataata

SEQ ID NO: 151485 - DNA, 446 bp, Homo sapiens
ttgttactctctcacgccccctcactgctgccaaagttatgtttacacctaaccaccaatgtgatggtatcaggaagtggagactttgggaggttattaggtcatgagggcagaatcctgatgaacgggattagtgtccttttaagagaggctctggagagttgctttgttccttccgtcatgtgagaatgcagcctggaggcaccgtctatgaaccaggaagaggttcaccagactccaaatctggcagtgmcttaatgttggacttctcaacatctagaacagtgagagataaatttctgttgtttataagatacccagcttaaggtattttgtcatagcatcatgaagggactaagagcctttaacatatcaatcattgttttaaattccctattttctaacaccctcatgtgtcatatcagagtcttattatgagcattgca

SEQ ID NO: 151486 - DNA, 589 bp, Homo sapiens
aataatgtctttttgtattcacttcatctcagattataaaaataatatctctagctttactgattttgtaatactcttccccaaacatctttcattattatgcactcttagtatattgtgacttcttcccatccactaatggttagtattaagagtagaggcagagattgtgagcataacttataatacatacatatcaaatgtaataatacaatcaaaacatgcacgtagaaatgagtgtgtagataaacacattttgggctgagtactgtaaaattctgtaagagtaatcaccgactaataaaaaataacatctctcttataaagaaaaaaaggaaagtatagaaaattataaagaarcaaaatatgctatccataattcaactatccaaacaaatcacacaattagaaaatttattcctggtcttttcatgtatgtttttactatatttgagatcattcaataaaagtaattctataccatttttcttcatccaacatatgttaatgtagctatttcaataactgctttttggcaataatattgttagtatcattggattttttggaatttatatagttaagtgat

SEQ ID NO: 151487 - DNA, 545 bp, Homo sapiens
cagtgaagccaaattctttgctgagacatagcaaaggtgacctttgctccaattcccaatgagttttttatttccatttgagacctcatcagcctggtcttcactgcccatatcactatcagcattttggtcataaccatttaaccattttctatgatgtttcaaactttccctcatgttcttgtctttttctgaaccttccaaactctttcaacttctgccagttacccaatttaaaagtggcttcaacatttcagatatctttgcagcaatgcccctttccttggtaccaattttctgtattagtctgttctcacattgctataaagaaatacctgagactgggtaatttataaagaaaagaggtttaattggctcatcattccagaagctgtacagaaaacatgctggcatctgctcagcttctggggatgcctcaggaaacytacaatcatgatagaggtgaagggggagcagacacttcacatggtgaaagcaggaggaagacagagagcagggaggtactacacactttaaaacaacca

SEQ ID NO: 151488 - DNA, 557 bp, Homo sapiens
aatatattaaaaacatatgatgtactgttatataaacacacatatatatgtatatatgcctttggatttctaattatgggcaagaagctggctaagataactgcaagtaaaagataaatcttataaaaagaaaggatgatttggagggtgcaatccagaacccagaagttataggcagtagttgcaggatattatttcctaatcaagcagtagaataacatgacaatgtggtttcagaattggtatggctcattgaccatttcatgacttctttactcctttatttgaggagaactgtgtattacagtttccctatacctctctcctcactgaatactgtatgtgttgggtggggtggggagaaataatgtctctttaatccacaggttttaagtttaagaaaaactacactcaagcagattcctccaacataaattcaatgtatatggcaaygctgacttccattttgagcatgaaaaagtaaggggatgagacttttaagtgtcttgggagccaattatatattttctgtgatatagcaaggcaactattctgcg

SEQ ID NO: 151489 - DNA, 421 bp, Homo sapiens
acctgtcagagtgccaaaattttaagacctcaatattcaatgcattaamtaacttctacatattaatttgaactaaactaactttatttaatatataacatattatatatgtacatatatattacatatatatgtaatacagacatatatatatatatatatatatatatatataaatacagatggagtccttgtacatttagattcctggaagtagagtctttacagttcagtcctaggcagtctcagccctactggttggggtccaaatctgcctccccttctctcattctgtttgtttatcttaaaacccttgccaccccatttacttgcataacacatcttatttatactaataaatattcttggttatagaacagatgattattggaatagtggctaagtatgtgagcccttgctt

SEQ ID NO: 151490 - DNA, 421 bp, Homo sapiens
acctgtcagagtgccaaaattttaagacctcaatattcaatgcattaactaacttctacatattaatttgaactaaactaactttatttaatatataacatattatatatgtacatatatattacatatatatgtaatacagacatatatatatatatatatatatatatatataaatacagatggagtccttgtacatttagattcctggaagtagagtctttacagttcagtcctaggcagtctcagcccyactggttggggtccaaatctgcctccccttctctcattctgtttgtttatcttaaaacccttgccaccccatttacttgcataacacatcttatttatactaataaatattcttggttatagaacagatgattattggaatagtggctaagtatgtgagcccttgctt

SEQ ID NO: 151491 - DNA, 592 bp, Homo sapiens
gcccctcccatcacaggcctggaggcctgggaaggacaactggtttcttggtgagtgcagcctcagaactttgtgccctgaatgcctgctgctccagccatggctaaaagaggccaaggtacagctcaggtggtggtttcagagggtgcaagccccaagccttggcagctttcatgtggtgttgggcctgtgggtacacagaagataagaatcaagctttgggaacctctgcttagatatcagagaatgtatggtaacacatgaatgtccaggcagaaatttgctggaagagtggggccctcatgaagaaactctgctagggcagtgcagaagagtaacatggggttggagcccccacaaagagtacccactagggcactgyctagtggagctgtgagaagagggccactgtcttccagaccccagaatggtagctccactgacagcttgccctgtgcacctggaaaagccacagacactcaacatcagcccgttaaagcatctggaagaggggctgaaccctgtaaagccacaggacagcagctgtccaaggctggggagcccacctcttgcatcagtgtgaactgtatgt

SEQ ID NO: 151492 - DNA, 513 bp, Homo sapiens
tgtggtatgtgtaatggaaaagaactagagagtgttggaagggaygctgatgaatgggaggtattgaacatattgagtattttctaagtttgcaaatgttactggctctgattagacaagctgtgtttgctaattggtgcccagtgaagttaggtttctaccttcaacagaaactgagacataggggtactatctttcttattcgttacacttcagtggctcctaggttcctgaaaaagacattcctttgctgtaaatctggcaagaagctttttttaaaaagtgacctatatgtttcaaaggggcagagaactaacttaaattacatgttttctaaaggaaatgcactaagaaaaaaaaaaaaaaagatcgtgcctagagttaggaagattgtctaaagttcagttcagccgagagaaagattaaggtatcttggtcaagagaaagcttcataaagtaggatttacatttctttaccaggttctttctttgcttgcttgcttatttgttttt

SEQ ID NO: 151493 - DNA, 493 bp, Homo sapiens
agaccagcttggacaacattgcaagaccctatctctacaaaaaaatttaaaaattagctgggtgtcatggtacgcacgtgtagtcctagctacttgggaggctgaggcaggaggattgtttgtgcccagaagtttgaggttacagtgagctatgatcatgccactgcactccggcctgggcgacagagtgaggccctgtctctcaaaaagaaaatagataaataagcttctccaatgcataaactttactcaagacttatgcagggtggtagaggtgcagttgcctggcatctggractggaaggggatctgagagcataaacttcttatatagattttaaaagaccctcctgtttttagccccatccctcacacttgccttcaaagatctctgggggctatctgtccttgattatttttctggctttctggtggtatctcagcatgattaagaaaacatagcctttatgtactgtgttatagtaggcagctc

SEQ ID NO: 151494 - DNA, 542 bp, Homo sapiens
ttgtgggatttctcagcctccataatcatgtgagccaattcctgataataaatctctttatatttattaaacagaactctgttggttctgtttatctgggggaccctgactaatgcagttgtgctgctggtagaataagggtgtttggaaatgagggagaggtgacagtagtaataattaataactgtctataatatgtgtgccaaacacctgactaaacatttcgcagaagttactttatttacagagagcccaagcaaggtcttcagcatwctggtcttgtttgtttcttattctggatgctggccagagaagtgtgttcattttacgaaaattcattcaactgaatactagagacatttctctatatattatctcaacaacaacaaaaaattttgaaaaaattatgtaacccttgcaaccatttacaatgcaggtgctgcaatccttattttgcacatgatgacattgaggcatagaaaggttaaggaacttgtccaaagccacacagctaggaatggcagtgctaggcttgcaattga

SEQ ID NO: 151495 - DNA, 561 bp, Homo sapiens
aacactacacacacacaaagtcaatcctaaaccagagggccaggctagagagagtggcagagggagggctgggtggctaccaagaccaataagtacaaccctattctcaaagaagcttccagtctgatggggaggcaggcatggcacaataacacaagactatgctttcggggcatggggacagtgccaagcaccagctaggcatgaaatccatcagcctcygagtttggggtacctgaagaagaactgctttcaaagctctcaggtggagttaggccagatctggggctcggtgtcttaactcctttctgctcagggctgctgctgaggtggccaatgggctctggatccctgatggcatagcagggtggtatgactggattaattaggttttattaatagccaagcacttcatgaattataattaagcagatgtgcatctggtggcagtagtggctgagggtgggaagcagtggttccaggaggctctgaagcactattaagtatgaataccatgtcacgggatatagcgagaacccagtccaggtgccttgttaaaca

SEQ ID NO: 151496 - DNA, 397 bp, Homo sapiens
gtgcttttgtctcccagaagggaaagtctcttagaggagaggaagtggttgcctagtgtattagtcagcattttccagagaatcagaaccaccgggttggaaaatgaagagagagagagaaagagagtggttttacagaattggttcacatgawtgtggagtctggcaaatccaaaatcttcagggtagccagcaggctggagacccagggaagagttgacattgcagctcaaggacaaggcagtcagctggcagaattctctcttcgttggggaaggtcagtcttttttctcttaaggccttcaactgattagatgaaacccacccacatcatggcttacccatgtaatctgctttactcaaagtctgctgatttaaatgtaatttcatctaaaaa

SEQ ID NO: 151497 - DNA, 397 bp, Homo sapiens
gtgcttttgtctcccagaagggaaagtctcttagaggagaggaagtggttgcctagtgtattagtcagcattttccagagaatcagaaccaccgggttggaaaatgaagagagagagagaaagagagtggttttacagaattggttcacatgattgtggagtctggcaaatccaaaatcttcagggtagccagcaggctggagacccagggaagagttgacattgcagctcaaggacaaggcagtcagctggcagaattctctcttcrttggggaaggtcagtcttttttctcttaaggccttcaactgattagatgaaacccacccacatcatggcttacccatgtaatctgctttactcaaagtctgctgatttaaatgtaatttcatctaaaaa

SEQ ID NO: 151498 - DNA, 542 bp, Homo sapiens
tgtaaattgagtgaacatcttttgagaacagtttcatgctgctggttgctaattctccagacaggcttcctattatgtatgtttcagagggagccagaggctgagtccagaagcagccggaaagttgacatgggtgaaagttaagctcttctgaaaaggaagccagagatgatctgaaggcgtgagccttgggagtttggctgaayctagagcggcctctggacatagagtgagcagccccagcagccattcctctggctcctgtgtcatgcggagcagctggcagatgcgtaggtgcagccagaagctaggcattaaagactaagcttgaagaccatctccttcttgaattccccctgattttccagctagaaggtgctccaagttgttccagctcactttgcctgtgccttgtacaacatggtccactctcttccttgtattgtggctctttgtatctggcttttctctgatgctcaactcttaactccttgaaagccaggactatacacagcctgtcacttaaggcttagcaaggtgat

SEQ ID NO: 151499 - DNA, 542 bp, Homo sapiens
taaattttcttcataacactgttcttcattaaaaggtagctttattttatatctcagtgataaaaagccaccaaatcagttctagtttttgtcaactctgttggtatgaggaatctcaagattgaaaatcagattccctttaaactcagcccctataatatttagtcactttgtttttgacagttctctgtctctgctstaaactgcactattcctaagggtaaacatctcaatcagtaccatcctatcacaaagttactttgaaaacatcatttcatggctcctttactccatcatatggattatgatatttttacatatttatgttgtttctacttttgtattataaacaatgctgtgataaacatctttgttcacattttaggtagttttcttaggattatagctaacagttattatgcatatcttatattttagcattttgttaagcaagcattatcttatttagtcctcataagatattggtacaattactggtgatagatatacagcattgattcatttattaaacaataacattg

SEQ ID NO: 151500 - DNA, 467 bp, Homo sapiens
tggtacaattactggtgatagatatacagcattgattcatttattaaacaataacattgaactcctagcatatgccaggcactgttctcagtgttctctttcatctatgcctttcttggcagtggtacactacgcaagttctsaaacttgctatgtgaccttagtagctggttgaaagcagggcaggtcaactccccacacaggctgagaaaatctcttggatgccaacatccttgattcagaccccataaagtgcaggttatgccacaagtcatccggaaaagtctcaggagatctctgcgttgtctcaaggttttaaagtcagaaaagtataaaccctctccaaggtgctgaaaacagctgctcttactatgtgtgaacgagaaaactatcagggactgcatttggtcatcactcaaccctctgaaagatcagcaggacagatgcttttcttctaatcattgttt

SEQ ID NO: 151501 - DNA, 467 bp, Homo sapiens
tggtacaattactggtgatagatatacagcattgattcatttattaaacaataacattgaactcctagcatatgccaggcactgttctcagtgttctctttcatctatgcctttcttggcagtggtacactacgcaagttctgaaacttgctatgtgaccttagtagctggttgaaagcaggkcaggtcaactccccacacaggctgagaaaatctcttggatgccaacatccttgattcagaccccataaagtgcaggttatgccacaagtcatccggaaaagtctcaggagatctctgcgttgtctcaaggttttaaagtcagaaaagtataaaccctctccaaggtgctgaaaacagctgctcttactatgtgtgaacgagaaaactatcagggactgcatttggtcatcactcaaccctctgaaagatcagcaggacagatgcttttcttctaatcattgttt

SEQ ID NO: 151502 - DNA, 501 bp, Homo sapiens
agtgcaggttatgccacaagtcatccggaaaagtctcaggagatctctgcgttgtctcaaggttttaaagtcagaaaagtataaaccctctccaaggtgctgaaaacagctgctcttactatgtgtgaacgagaaaactatcagggactgcatttggtcatcactcaaccctctgaargatcagcaggacagatgcttttcttctaatcattgtttaagtaatgaatgaaactaagtttttgaagtttcctcctttctccttcccccaggaccaagtgatattaagctgtagaaatagcattcatgtcatctgtggagtgacccatcctttctaggagtgagagagtggaaaagggtccttaagatatctgaatccttgaaatctctggttagcattgtgttggttataggtgtgataggggagagagagtgggaggaatggtatatgccctagctgcactaagtaatccttccctcctatctactcaacattaatgcttt

SEQ ID NO: 151503 - DNA, 497 bp, Homo sapiens
tgtcatgtaggaagtttatcttcacaccccctcttcccattctgtgagcagccactgctgctccaggatgtctatgctcttcaactctttgtagcacaggactcagctcctgtgcatacagcaagaggacaagaatgactacaggtgcaggcaagataacattaatttttttttttagtcctactatgttctgggcactttgctgagtcctctacatgtggtatatatcttaaatttcaaacatcctcttcatatatatgttttatacaaacacatgcatatatatattttgtaaaataagcaaaatagacttcaaaagttaagcaacttgcccatggttacatagctartaactagccagagtgtgattgaaacccaactcatttgctaaggagatcaaagtatcaactaggggacaatttatccaaaattgccattttatagatgacaattccaagggttatagcagtgatattacttgcccaaggttacacagt

SEQ ID NO: 151504 - DNA, 497 bp, Homo sapiens
tgtcatgtaggaagtttatcttcacaccccctcttcccattctgtgagcagccactgctgctccaggatgtctatgctcttcaactctttgtagcacaggactcagctcctgtgcatacagcaagaggacaagaatgactacaggtgcaggcaagataacattaatttttttttttagtcctactatgttctgggcactttgctgagtcctctacatgtggtatatatcttaaatttcaaacatcctcttcatatatatgttttatacaaacacatgcatatatatattttgtaaaataagcaaaatagacttcaaaagttaagcaacttgcccatggttacatagctaataactagccagagtgtgattgaaacccaactcatytgctaaggagatcaaagtatcaactaggggacaatttatccaaaattgccattttatagatgacaattccaagggttatagcagtgatattacttgcccaaggttacacagt

SEQ ID NO: 151505 - DNA, 473 bp, Homo sapiens
gaatggattctcagggcaaacaatgttacttgccctccaaaaatcagactgggaggccctgcagctggcagtgagttggttccattggactaaatattgacaaagattcttctactccttytgaaaatatatcttacagaaggctctgccaagccttgcttgaactcccaatgagaatctgcggggaggaggtagagagatggtagaagagaagagaatgaaaagcaagagagagcaaaacaaggcaaagagaaaatcaatgcctcattgcaagcaggtgggagctgtggttgtgatgaatatttactgtgtagtggtctaatgattttagaaattttttttgactgtaccgagcgcttgtgggattgtttttcaagaaataaaatacattaaagctcagtcgttaagagcttaaaggaggagggattgcaggctccaagcccattagcacaccctgtcattaagtaaggcct

SEQ ID NO: 151506 - DNA, 473 bp, Homo sapiens
gaatggattctcagggcaaacaatgttacttgccctccaaaaatcagactgggaggccctgcagctggcagtgagttggttccattggactaaatattgacaaagattcttctactccttctgaaaatatatcttacagaaggctctgccaagccttgcttgaactcccaatgagaatctgcggggaggaggtagagagatggkagaagagaagagaatgaaaagcaagagagagcaaaacaaggcaaagagaaaatcaatgcctcattgcaagcaggtgggagctgtggttgtgatgaatatttactgtgtagtggtctaatgattttagaaattttttttgactgtaccgagcgcttgtgggattgtttttcaagaaataaaatacattaaagctcagtcgttaagagcttaaaggaggagggattgcaggctccaagcccattagcacaccctgtcattaagtaaggcct

SEQ ID NO: 151507 - DNA, 523 bp, Homo sapiens
gcctctctctatttatttttcatcacccttatgtatgtagcaagggaaatgatgctgtgttcaaggtgctattggaaactaatgatactaaggaaattaaaaacttggattcagtgatgycattcattttattgatgagaccaacttgtagtgatagagattgatagacatgtgagggccaaatgagggaaatcatatgtttagcaactacagatgctctgcagcatcacagacacatccttgtttaagtgacatgctgcctgtcaatgaattcaaagtgtgaggtcaactggtgaaatgtgaactggacattttaatgtaacacgacaaataggaagagacagcaactagaaacattgaaaaattacaagttaggcgcaagatatttgtccagggaggtataatcttcatctcacagaggcaattggaagcatcatcttaataccttcatgatcacaattcgtcaggactgtagtagttaatcccctatcccctccaaaaagaaaaaaagaaaaaaagaaaa

SEQ ID NO: 151508 - DNA, 451 bp, Homo sapiens
gaattcagaaaaatgttgatttatgtgtccctcattgttacagcagtggtattataaattggatgtccttattctgactggtggcactcctatgrtacccttcttgaccctaagccccaccccctgtagaaatcaactgctccctcttctctgtaagtctggctccaataaggcctacaacactttagggatttgtccttttacaggtctcttcctctctttcctttgaaggcaacaattaggttgagtccacctagcatagggtctggccctgaatagtcattctataaatatttgatgagagaaagagagcttccccatgcaacttaccccaacttccatctgtgtatacactctctgaataataagcgtatggaaagactcaccttttctttcctttctcacagttagttctattcccctttgcattgggtctcaccaagtgccaggc

SEQ ID NO: 151509 - DNA, 534 bp, Homo sapiens
aatgaaaaaaaaaattacaaaacctcaacctgctgaaagacaaaagttttaactttaatctacaaagttaaataggtgagtgcattttcttttcttaaaataacttgcttgctaagggaaaaggtgtgcaaatttctcagactcaaaagtgcatccaaggaaaacagccaagctctacagaccgcccatcatccacctgcaagttcttatgacagaccctggggtggttaaaactgtaatgtctcaatttggaatgagttgtccccttttgaargacccatggggtaagggttccagttgaattcctagggcagtcttgtacaatgcctcacttgctgttctcatactgttccatgatagggacaaggagcatctatcaaaaaccagcttggtttcttggtctgtgaaccagctcagaagaccaatcaccaagattttcaaaccctgcagaaaagaaaaaaaaaaaaaaaaaaaaagcagcattagtgaagtgggaatagagctcctgaagggagtactctgaagacaataaca

SEQ ID NO: 151510 - DNA, 594 bp, Homo sapiens
ggcggtttaaaaagtgtggtacctccctcccccattcttgttcctgctcttgccatgtgacatgtcaacttcccctttgccttccaccatgagtggaagcttcctgaggccctcatcagaaactgagcagatgcaggcatcacgcttcttgtacacagcttacagaactgtaagccaaaataagcttctttcctttataaattaccaagtcttaggtatttctttatagctgtgcaaatggactaatgcactcttccttgattctctttccaatccatacagttctagcaacaatcactttcttagctgtgatcatcatctttgatctggtttattacaagaacttctaaacagaattttgtgctccagrcatgcccctctctacccaatctcaacacaatagtccaaatatttttttacacaaatatattttgggtcacttctggaatagaaccattgtaagatttcccattattttcaggatagagtccaagctctgttacatggcttgcaagttcattttgcaatttatctcttgccccttttccagcttcatttgtaccactcctaactctacacttagttcttcaagct

SEQ ID NO: 151511 - DNA, 536 bp, Homo sapiens
acacactttaaacagtaaaaaaaaaaattacagtttygatataggtacaaatttataatgtgcctatgtacagacaaacattaaaagctttcacaaaattagtattttaaaatatttttaatctgcttccatatacacacgcatattaaaatagaaaatgttaatttaaaataaaactctagttgttaagtacaaactaagccaggcaaggagagagcattttagagtttattaagttttatttttacctacatatataactattcatcatataaatgtttgttttataagaatgctgaactcgaaacctgacttaattagcataaaataaatcataattctaaggtactccacatttatttgaagaataattagtgtctgtgacataaacttagaatcaaacccctagacccatctataaggctaaaccctgaatccccatagcaaatctaatatgccaaacttgattatattaaactaaattttcaagacttctcttggttagttggatggtatagttttatttggtttttcat

SEQ ID NO: 151512 - DNA, 494 bp, Homo sapiens
taaagcaccacaagacatatcctgtgtagcagtgtggtccaatagaaaatcaagcaagccacatatgtaattttagatgcttttgctttccacattaaaaaagtaaaaagaaataagakaaattaattttaataactattatatttagctcaaattatataagatactattatttcaacatataactaatatcaaaattattaaggctatatttttcgtgtttttttattgtctttgaagtcagatgtgcattttatacttgcagaaaatgtcagttagggctgcccatattgtaaggcttaatagccacatgtgtctaccatattggacagcacagccctagagttatttttgcttacttttcacttgaaacaaatgtcagcatgcaggaaacatctaaagccaatttctatagaaaactgtatattatttgtataatacagtagtaatagcaacttttatattctataaaataaattcttcatgatgaattc

SEQ ID NO: 151513 - DNA, 494 bp, Homo sapiens
taaagcaccacaagacatatcctgtgtagcagtgtggtccaatagaaaatcaagcaagccacatatgtaattttagatgcttttgctttccacattaaaaaagtaaaaagaaataagagaaattaattttaataactattatatttagctcaaattatataagatactattatttcaacatataactaatatcaaaattattaaggctatatttttcrtgtttttttattgtctttgaagtcagatgtgcattttatacttgcagaaaatgtcagttagggctgcccatattgtaaggcttaatagccacatgtgtctaccatattggacagcacagccctagagttatttttgcttacttttcacttgaaacaaatgtcagcatgcaggaaacatctaaagccaatttctatagaaaactgtatattatttgtataatacagtagtaatagcaacttttatattctataaaataaattcttcatgatgaattc

SEQ ID NO: 151514 - DNA, 578 bp, Homo sapiens
tacatttattttcttctatccctaaagaactctttaatccttcaaagtaaaaagaaggaattggaaaaaacaactgtattagcctgccctggctcccataacaaaataccacagactgaatgrctcaaacaatagaaatgtattttctcactgttctggaggctgaaatctgagatcagggtgcaggcatggctggtttctgatgagggctcactttctggcttatagatggccgccttctgtgtccttacatggcagagagagaaagagagcaagagagagagaaagctctgatatctctcctcctaaaggcactaatcccatcatgaggaccccacccttattacttatttaaacctagttatctcccaaaggcctcatttccaaatgtcattgctttgggggttggggtttcagttttagagagacaaaattcagtctgtagtaacaacccagggatggtcattcttctgtatgctctgggtccagaaaagcttgtcctcttcagagcagtcactgtgtctcagagcaggacagaaacagtgtggggagtggcacgtgtgacaagggacacctca

SEQ ID NO: 151515 - DNA, 560 bp, Homo sapiens
cttattttttttctttttttcttttgtgctatgattcttattgaagctcctttctgtataacattgtaccactgcagtaaatgatcaatttcaacttcacgcagccaaggtcaggtgtgagggaawaacaggctgtctacgacaccatgtaggcatgatttattgcatttccagaagaggattcttgacattttgaaaatgtaatgtagtgcaacagtaattaagccaaaggtagactgctgaacaattgattagcattgtcagagaagcctgattagcttagatacttccagaactgatcttgccagctatgaattaaaggttagtaattaaatttatgggccatagccactgtctccaggtggcatttcacataggagtatttgtgttctgagaggacaggcaaataaagcaaacgtcagttgccttttcactaacagcctttggttaaaaatatcttttcagagacaaaagaaaaacgatactgagtcaaaacttgtctgtaagttaaaatgttgcttatattatccagtaatgtttttaacaagttctagctaccc

SEQ ID NO: 151516 - DNA, 602 bp, Homo sapiens
catgcagcctagtgttatcagttcactttttttcagaaaaaaaatggcattctgtttattttatttaaaactttatattggccgggcgcagtggctcatgcttgtaatcccagcactttgggaggccgaggtgggcagatcacctgaggtcgggagttcacgaccagcctggacaacatggtgaacccctgtctctactaaatatacaaaaatcatctgggcatgatggcatgcacctgtaatcccagccactcaggaggctgaggcaggagaattgcttgaacctgggaggtggaggttgcagtgagccgagatcgcaatgctgcattccagcctgggcaacagagtgagaccctgtctcaaaacaaagcaaaactttgtattgaaaatcaagcagaagagagagacggagcaagaagaggagaatggaatcatcgtgaacacttcttaatcgcaacgagcatcatttattttctcaacttgtgattcataggatttcataagacatctaatccacccttctcattttacatatgaggaaattgagggccaaaatwacttgtctaaggtcacacatgtttatgggtgcaaatataatgtta

SEQ ID NO: 151517 - DNA, 526 bp, Homo sapiens
ctactacaaagaagctctggattctgttatgcccctttgaaaactattggttatttttgtaagcagcaagttaactttgctgaacacaaaactgcaaactatttctcccctgctgtgaacagcagctggactcttagtacagttcatttagccttagctggatttctgggcatctgacccatgcgtatatgactcgggaccagccacagattaggacagaatttatacacaaaatttgcagctccctctctgtggctctctccttcctactatataccacactcttacccccaaccctgccattttccagctgccacaatctgcttggaccctgacatctgatttttcaagctagtataactgcamgtattctgagtttgagttgccctacatagtagactagagactgccctcagacaaaaaaaaaaaatctaaaaatatgggaaacttgccaagtaccattcccttttttcgagtgtcaactccaatgcagtatttgctttcttctgatttttatcccatgcct

SEQ ID NO: 151518 - DNA, 377 bp, Homo sapiens
agtctacagtagtgtgcagtaatgtcctaagccttcgcattcactcacaactcactgactcacccagggcaacttcttttttttttttctcaatttttaaaaaattatactttaagttctgggawacatgtgcagaacatgcaggtttgttacataggtgcacacatgccatgatggtttgctgcatccatcaacccgtcatctacattaggtatttcttctaatgcgatccctcccctagcccccacactccccgacaggccctagtgtgtgatgttcccctcacccagggcaacttgtaatcctgcaagctccattcatgataagtgccttatagagctgtatcattgtttatcttttatactgcatttttactg

SEQ ID NO: 151519 - DNA, 377 bp, Homo sapiens
agtctacagtagtgtgcagtaatgtcctaagccttcgcattcactcacaactcactgactcacccagggcaacttcttttttttttttctcaatttttaaaaaattatactttaagttctgggatacatgtgcagaacatgcaggtttgttacataggtgcacacatgccatgatggtttgctgcatccatcaacccgtcatctacattaggtatttcttctaatgcgatccctcccctagcccccacactccccgacaggccctagtgtgtgatgttyccctcacccagggcaacttgtaatcctgcaagctccattcatgataagtgccttatagagctgtatcattgtttatcttttatactgcatttttactg

SEQ ID NO: 151520 - DNA, 626 bp, Homo sapiens
tcaagtacttgcctgctggaataaatggggcttcacagtgagaccaagtcgacacaacagggagacccagtggattttccctctctgttagctcatggtgaaatcaatcataatataccgccctaaaaattgaactcagggaattggaatcgctgaggttctttgtaacagggcctaaagctgtagacggggggaaaaggaagagatgaatggggctgggmagccttttgacagaagtatcttaaaatacttatcccctgctgatttatgtttatcctttgcctcaactgtcttgaatacaaaacaactagaaaccattcatcatgaaacccaaagaacccaaaattcctggattgaggtttgaatatgttttccatcaatctttgatgcagacatgaaaagtcaaaggaggcttatggcaaaaattgaccataaacttcatatctattatgagtcaaccctgcattatgcacagagacaaaagcaatatatgtatggattgagaaggcattgtaattgcttatagctgaagggaggtcatgtaggagaagaaagcagatttggtttggccagaacaagagggacaagatatgaattgcagagaggtaggatttagcagagtatta

SEQ ID NO: 151521 - DNA, 630 bp, Homo sapiens
ctccattttttcttttaggctttttaaaaattatccaagatttctatactgagcatataactttttatttattttagccttagaatctcaccacctyaaggaagctgcctttggccagcaccatactgtgatcacctgatcttcctctactgaacgcctgtacaacttgttgccacattaacaccaagcacaagatacggttctcatcattatttttctgtgagctctgtgagggaggtaccagatgtttgagttctttcactcacacaaccattttatcatggtcaataaatacgggtgtctccattcaatcgctggtaccctcaaatccaacctggatgtaccagtgctgtgtgtagggttggtttgtgagttactcccctcagcagcccccacaccttgttcctagctctctacccggagggcctgtcatcatcatctcctgacaccaagtgcacttccaagggttagaagctcatttctaaactgagagtttttctgcctcaacccatcaaggttcactgtgaaaagtgaaaccagcagatggaacagaaggaaagggttcattattacagaacataatttattacccacaggattcctgagtcattgccgctgggtgaggaaaga

SEQ ID NO: 151522 - DNA, 379 bp, Homo sapiens
tgaggttataaaagtctctgtaggttctttacaattaagaaaaatccctgaagtgcaaatactcaaaaatgcagagcttagtaaaggcctgtacaaagaataccttcagtttatcccacttagaaaagtacatcaaaatggttgaataaccccagtcagacatgactaggcttacaagtacttatggcttactataaggctatgcatcaagtgatgccaataaaacaggaagakgtaggatggagagcccatcagagggcaggatggtgggagcagaaacagaataggaggaggacaccagcctcacactcttccaggtcataaagatgactgattaacctctaccatgattccctcaactggagaaacttctggccca

SEQ ID NO: 151523 - DNA, 549 bp, Homo sapiens
agaactgcttgagacaaagagtttgagaccagcctgggcaacatagcaagaccctatctctacaaaaaaaaattaattagctgggcaaggtggcatgcacctagagttccagctactctggaggctgaggcgggaggatcccttgagcccaggagtttaacactgcagtcagctataattgctccattgcactccagcttgggtgacagagtgagaccttgtcaccaaaaaaaaagaaaagaaaagaaaaagaaacttcattttgtgagaatttacgatagttttttttttttagatagaagtttccctagagcattacaaatgtgacttggtctgtgctgtttstactcacagcacttccaaaaccaaatgtgtcctttctttccttacagcaaccaattctccaactctccagacaccaaccagttgtcctgcagtccaactcaattctgacactaactactcagagttaaacttcgcaggtttaaaggttcagtcccacaagactgccctcatttcagatgccaatcataagtattgtgcccacaa

SEQ ID NO: 151524 - DNA, 643 bp, Homo sapiens
ttaactgtcttgttttttactttccttatattataggtttatcaaccagtaagacttttgccctctttgaaatctgacaccccttccactgccagttttagttcttcctgaaaagtggttgtattcatacccttgttttgggggcatatccttactttcttagactcctgttgctgaagttagctcaagggaacttstgcttctaacaatcaaaggtcttaacaaacaaatcttattaactaaggatgaatgtagtgagtctagtagatggtctagaggctaagatgtactaaaatctgcaaaaaaagttttaaagacaagatgaacaaaattctatgtatagttgtgtttagagaaagaagagtaaggaaggaagtcctaatgatgtatcactaacagaagaaagaggaaaagctaaattaacatagaagaaataaagctgtcaagaaatattatttttaaacttgaataagtagaacaagcatgaagaaaaaagagctgacatatacagtcctacttttaactgagttaaaaattatctaggatgcacaaattatatttatgggtacaaagaattggctagactattgttagtgatctttcaggagtcctgggacacaagagacacaaaacagaaaagaag

SEQ ID NO: 151525 - DNA, 586 bp, Homo sapiens
actgctgtactttaactgcatacatttttttaattgatgatgataatttgatgataatgatagtgatgattagattaccacgtcaataccttaaaactttggatgggccctgtttaaaggtacttgtggaaatgggagaccccagaggaagctcttcctaggctgtggtgacctcrttattggcctattatttaatggaggtactctaacactgctgatagtggtctgttgcaatctgtccatccacagattattatgctgattgagaaagtgtaatccagaaatggaacatataaagtcattctcatttatgccagttcttctgagcctcctagatgtaaagattataaacgtttttcattttgagtttaattcaaggtcctactgtgtctattttccctcactaatttgcatagcatccctgtctttcctgtctcctgcttcttttcctccagttccctctgttcttcttattaggtctggatctctctatgtgatgttaagttttcctctagttgaccctcattttcttgtactgtcctgggtaatctttctcctttgatccaaatagttgtaagtggttttt

SEQ ID NO: 151526 - DNA, 373 bp, Homo sapiens
ggcatggccttctcagtgttaatctcctgccctggacagctgtcctcaaggtccrttaccatcctaggaatcctgggacagcttgtaaccaggtatttctcccacctcctcagttgtaattgggagactttggtcttttcacatgcctttcttgttatgcctgaaagtcccacaccgttattagggagggacatattagccaaagctggagctattatctatatgaatatggggaacaagttacccatttgttgttccctacttgaggagggaatcagtaccatcaagctattcatcaaatagccagtggttctaacagttttgctgactttctgtttggcttctcacaggtgattctcagtacaggcttgtg

SEQ ID NO: 151527 - DNA, 591 bp, Homo sapiens
ttatatagtgggtaattgtggaatacatataagtgaaatgaatgacagcaatatgatgaggacaggagtgtaaaattgctaatactctggtataaagttcctgtactactcatgaagtatcatagtgagagtaaacttaaatttcttataaatgcttattacaagccccagtaccctaaaatattttaaaagtataattaatatgcttagggaataaaatggaattktatattatctgcaatcgaaactggaaagggtagaaaagagaagaaaaacaaaagaaatgaaagaactagtataataagtagaaaagctacaaacatggtaaatattaactatatcaataatacttttcaatgtgaatggtctatatgcaccaatacagaagctgagatcaacaaagatttaaagaaaagatcaaactctatgttgtctgcgagaaatccactttaaatataaagacaaagataggttaaaagtaaatgaatgaagaaagatatatcgtgacaacaccagccaaaataaagttggagtagtttattacactaagataaggaaggcttccaaataggtaatattatcaaggataag

SEQ ID NO: 151528 - DNA, 581 bp, Homo sapiens
agaaggaggagtaggatgggagcagacaggttgcctccccacctggataactgagtgtggttttctgcagttcttaaaattgtcagctcacacatactacttacttacttacttacttacttacttacttatatatgtctgtaagtacgtgacagagtctcactgtggcacccaggctggagtgcagtatyatgatcttggcttactgtaacctctgcctcctgggtccaagtgattcttgattctcatgcctcagtctcccaggtagctggcaatacacgtgtgcacagtcacacctggctaatttatttcattttattttatttgtattttagtagagatagagtttcaccatgttgcccaggctggtctggaactcttgagctcaggcagtccgcccacctcagcctcccaaactgctgggattacaggcgtgagccactgcccccaaccaactcacacatactttaagtgggactttatttaatatcttcatatcagcgatagaacttgatgtggttttccatacatgtacacacacataataaatatcatccctttgacaatactataagaattag

SEQ ID NO: 151529 - DNA, 609 bp, Homo sapiens
gaggagtaggatgggagcagacaggttgcctccccacctggataactgagtgtggttttctgcagttcttaaaattgtcagctcacacatactacttacttacttacttacttacttacttacttatatatgtctgtaagtacgtgacagagtctcactgtggcacccaggctggagtgcagtattatgatcttggcttactgtaacctctgcctcctgggtccaagtgattcttgattctcatgcctcagtctcccaggtagctggcaatacacgtgtgcacagtcacacctggctaatttatttcattttattttatttgtattttagtagagatagagtttcaccatgttgcccaggctggtctggaactcttgagctcaggcagtcygcccacctcagcctcccaaactgctgggattacaggcgtgagccactgcccccaaccaactcacacatactttaagtgggactttatttaatatcttcatatcagcgatagaacttgatgtggttttccatacatgtacacacacataataaatatcatccctttgacaatactataagaattagtgcctttatcattggatattctcttaaaatcat

SEQ ID NO: 151530 - DNA, 660 bp, Homo sapiens
tgataaatagctccctgttgctggaaaggaaggcctcttttatttctttctacatttttgagcaataataaatgagttctgcattttcatacatgggtgtatgtgtgtgtgtgtgtgtgtgtgtataatgcagaaatccatttgcagtgtttatgtatacatatatacctcagtatatgtaaatatatgtgaaaatactttccaagactttaagcatagaatctcttctcataagccagcccaggcacatcttactcaacaattcaagcaaaacctttggatctgtcagaaacagcttataggtctgcattaggtgattaattgccaggagaatctggttctatattttgttacatataattattttcttttctaaaggtgttcttttattaagctcccaccataaaagaggggaaaataagcacrcgtcttacatgcctgatgtttagcacttcttacaaaagaaagaggaaaactttaacataatccactgataaaagcatatttgtcttggcttcagacagttttctcctcatttttaccaaaactttaataatattttaacttgcttagaaattagtcttgggatagcagtatggaataatggaatatactttggttatacaatctgacggtataaaattaaaccttagttcacat

SEQ ID NO: 151531 - DNA, 577 bp, Homo sapiens
atcttaagcataccctctaatccattcccagtacaaccactgggaaagtctgccctacatgtgaccacagtaaaccttttcrcctcccaggaatggtttgtgcactgcttttcttctttgcttataatattcattctgccttttcacagtttctcaatctggtaaatttcccctccttgtcatttaaagcccggctcatttggatttgggaaatgtttctggaatttttttaagaatatgtgaagctctttgtttccaattaaagccttatcttaaatcaattaattttgactcttagaaattctctttccattttctgacccatttgtaataacttaattttaaggttacacctactgtaccaataatgattttgtttttaaaaatacaaataaaaatctcccttccttggctttttggaaacagtttctttcccccgtaagttatattgcccatggtttcataaatacacatctcaaatgggttacttatgtaaagggtgtgtgtgcttacttgcgtgcgtgtgtgtgtgtgtgtgtgtgtatcactactactaatactaacataaatatatata

SEQ ID NO: 151532 - DNA, 586 bp, Homo sapiens
cctctaatccattcccagtacaaccactgggaaagtctgccctacatgtgaccacagtaaaccttttcacctcccaggaatggtttgtgcactgcttttcttctttgcttataatattcattctgccttttcacagtttctcaatctggtaaatttcccctccttgtcatttaaagcccggctcatttggatttgggaaatgtttctggaatttttttaagaatatgtgaagctctttgtttccaattaaagccttatcttaaatcaattaattttgactcttagaaattctctttccattttctgacccatttgtaataacttaattttaaggttacacctactgtaccaataatgattttgtttttaaaaatacaaataaaaatctcccttccttggctttttggaaacagtttctttcccccgtaarttatattgcccatggtttcataaatacacatctcaaatgggttacttatgtaaagggtgtgtgtgcttacttgcgtgcgtgtgtgtgtgtgtgtgtgtgtatcactactactaatactaacataaatatatatatcattactacccacttagctat

SEQ ID NO: 151533 - DNA, 556 bp, Homo sapiens
gggagtaagtgattggtgtcgcatgctgctgatagattaaatagattgagaactgaggattgaccataggattagtgaccttgacagagcaattcagtgggggagtgttcagaagtgtcatttcaatgggtttaaatgagaatgggaagagaggaaatagaaaatggaaaatgaagagagctcttccaaggagagttgctaatgggaatgaaagcagatatggagacaaggaagggactagattacatctrtaaggtgagaaattacaacgtgtttttatggtggtggtaaagcttgactcaggtaaaaggaaatggaaccccatgcataaatagaaggattgatcttggcagcacagatacttcatctattgaaacaggaaagaaagttgagtatgtacatacaagtagagggaaaggggtagactcaatggtgatagcatgttgaaagttcttctctgccacatgaacaaactttctttccagtgcttaaacaacacctgcagtatccttctcatatggtcatttgcatattatctctacagctgtcttatgtt

SEQ ID NO: 151534 - DNA, 567 bp, Homo sapiens
ttacaaaataggaaataatgattcatgggttcatcactttctagttaataaaaggtatttgcaaggctgggcatggtggcttatgcctgtaatcccagcactgggaggtagaggcgggtggatgacttgaggtcaggagtttgagaccagcctggccaacatggtgacactccgtctttactaaaataatacaaaaattagccaggcgtggtggtgcaagcctgtaatgccagcacttcgggaggctgaggcaggagaatctaccttaacctgggaggtagaggtttcagtgagccgagatcatgccactgcactccaggcaggacaacagagcgagactctgtctcaaaaaaaaaaaaaaaggtatttgcagatgtyataatagaggatatacagtgtagtgctcaaggttctggagtcaggccgtttagcttcaaatcccagctccactttttcctatccatgggaccttggactcattttcctggtttcatcatctgggcctcattttcttcatctacaaaaatggtgggagcagaggactctcatggagtttgctgtgaagct

SEQ ID NO: 151535 - DNA, 562 bp, Homo sapiens
tgattgtgtgcactgtaattattttcttccagtttgtggcttattttttcagttcatttatggtgtatctgattggtcaaaaaattgttttcgcatttgccaatttggcaatgtttacatcaatggtttgtgattcagtcttagaaaattatctactattaagcattacttgtaaaatatatctgtaatatttagcccttaacttttttaactagttccagcgtgcaaggtaatattcaggtcttgagtagaccccaaattattattattattattattatttttgagacagagtcttgctctgtygcccaggctgcagtgcagtggcggtatctcggctcactgcaagctctgcctcccgggtcacgccattctcctgcctcggcctcccgagaagctgggactacaggcgcccgccaccacgcccggctaattttttgcattttttagtagggacggggtttcacagtgttagccaggatggtctcgatctcctgacctcgtgatccacctgcctcggcctcccaaagtgctgagattgcaggtgtgagccaccgcgccc

SEQ ID NO: 151536 - DNA, 548 bp, Homo sapiens
taatactcaaaataagaaaaaggtgggaagtcatttttctatttttatggcttcctgcttgagggaagrcccaaaattaggtagaaactgacaggcctgctatctttaaaagtcgggatgaagacttcagggtgaacacagtagctagaatgtaacaggaaacatctgggataggataagtacatggaggaatatcttcacattttgaaaacaagttctgcccaaatctctgcatgacccctgcattattcaggtgtatagtagaatctaaggagccaaactaagaacaaaatatgtaaacagaagttttacctgcttcccaccacagaagagactgagactgaagtttgagttcagctaaagtgactccctattaaaacttaaaaaatcaatcaattaatcaaatcagtacacttcaaaagaatataatggtatctgaaatctacccagtatatcattcacaatatacagaatgcattccaaaattacctggcatgtaaggaaataggaagcttcatttcacgtgtactcaaaacgaagagaaataa

SEQ ID NO: 151537 - DNA, 487 bp, Homo sapiens
gagggcctccatatcaccactcttaatccattagagctctgcagaacgctaaagatcgaaaatcaaagtccttgtttcactataattttccagatggcaagactagtgtatcacaaagactaatttatttttcatagttggtagcttgatgtgtattgcagatgggtctggaagctaggtctcttgattagttcctgtgtgcctggaacaacatgtccttgattccaaaagaaggcctgctgcaggttatagytaaatgcaacccacatcaagtagatgtgaacatactatgcaaataaattccaatcgttctttaacctggggtcctttattgacgtggagtcttcgtgcagaataggaagatgttgtctgcatggttctagacatctcagggtgatttcccattcatatagaaatcaaaacgatctacattatttcaagaaggtaaatgggcttccaaagtgtgttcaaacaacattgacagtct

SEQ ID NO: 151538 - DNA, 551 bp, Homo sapiens
gcagaactgtgaaccaattaagcctcttttctttataaattaccgattctcaggtatttctttatagcagtgtgagaatgaactaacacatatacagtgttgaatttatcrttttttatcttagctgactatcaccttccaccttatctagtcgcaaatccagaatctggatttttttttttcctgttcttcactgcctaaagggtattgtgtcaaaggttgtacctttgtgatcatgaacctacctctccctctttggtactccctactaatatttcaacataccgcatcattttagacagttttcattatctggatatattttcattctatcagtatatgaactcaaggttggaaatggtgatttatccatctgtgattttcctaaagaatgaatcttgtaaaaaaaaatagcacctattaactactggagaattgtatccaatcttcattcttaattctcttgactccaagcgacttatgagcagcagttgtcattgggagatttagaatgactgaagaatgttaacagatattttcactacattgag

SEQ ID NO: 151539 - DNA, 628 bp, Homo sapiens
agattatgctgtttggcagaaattcaggtaaatgatctcctacaaaacttagatggaatcttgtttcaaaatcaaaattatacatattattttgtaaacatttagaataaatttgaatattgtttaaatgttagataacatgaggaaattattgttaattttttaaactgtgataatcatattattattacaaggaaaaggtcatgtatttcttaggagatgcaactgaactgtctagggttggaatgttttctgattatgatgcaatcacgctgcaaaactaattaaatgaraaattttataggcccaactgcctaaaaataaacaactacattcaacaactcctgtgttaaagggtaaatataaaccccagaataactaagttacttattaatcaaataaagttcattctctagatgatcataggaaacatagcagtaaaatcatctctaaaatttgaatgctaatagagtttattttgtaaactcatttattgtttttatatccttctaatatttcttttttattgtctattttttaatttttaatttttgtgtttacatagtaggtacatgaggtacatgagagattctgatataggcatacattgtgtaataatcacaacaga

SEQ ID NO: 151540 - DNA, 471 bp, Homo sapiens
aaaaatgacctgatttgagcccttcgtgctaagaggattgagagaaatgtccttaacaaatccaaagccttataccaatttcagaagttgtgctaatagcaggcagaagctgcaaatgaggctaattaagagtggtccactataaattacaatgatccatcttttggtgtttgttcttaactgagattagactggtgaactgaaagattgaaagaggaaatactggagactattatcattaaatttttcaaatatttgatggtggcattaatacatgaacttcctcctcagatgagatattgctcccaatataaactcctrgatgggaatgtggggtgggctgttgccttggctttcacttttacccttctacaataacggctcttactttacaggtcagagaaacaacatgaaagttctgccagctggtaaatatattcaacccaaataaactaatcaggaagcatatta

SEQ ID NO: 151541 - DNA, 537 bp, Homo sapiens
tttcttggtaaatttaaatgcctattagggtacatttagccagtaagatgacctttctaaataataaagaggtggaaaaacttgtttaatattcaratgatttgaatcagtgatatcagtattatcaaatatctctctggcaaatatttatcaaatgtggcctatatggaggcagagggactgcagaggaatttttgtttttgtttttaattatatatttattttcttatttatgtatctgctgacttacaaacacttttagcacaaggggtgtgtttggcgcactactttgagtcgcctgtgtctagtgcagtgtctgatacatggtagaatattaatcaattagttttatgatactaaatttctttgagcatgaaataaattataactgtatgtatattcaccaagccataaactctatcacatggaaggacacataagtagtacataactaaatattattattttctcagtgtttagatatatatttctggttttaaaacatttttatagaatttctactgtatctacaaaatt

SEQ ID NO: 151542 - DNA, 536 bp, Homo sapiens
aaggaaaatgatataggtaagaaacttgaatcaaataatataactgcattagagaaggaattaatcaagctaaaataaaatcttttagatttttttattctatattgatttaaaatttagtttgttgaaagtcatgatattaacaatattatagcatcagatgattataacacatgaataagtgaaatgaataacagcaaagccataaggaatgggcrggaggaattgggaatataagctacctgcactgcatataaagcagtagagtgttatttgaatgtagagtcagagaagtttaaaatgtaaactttaaactctaggaactctgataaattttttaaagtaaaattgatgtgctaaaaaaagagttataaaggcatcttatgaaatgctcaatgaaaacaagagataaccagaatagaggaaaaactgataaaaaaattgcaatgactaaaaaatatttgcaaacaatggtagatattagtccacctatataaataatttagtgttaagggtctaaatacgccaattaaaaa

SEQ ID NO: 151543 - DNA, 536 bp, Homo sapiens
aaggaaaatgatataggtaagaaacttgaatcaaataatataactgcattagagaaggaattaatcaagctaaaataaaatcttttagatttttttattctatattgatttaaaatttagtttgttgaaagtcatgatattaacaatattatagcatcagatgattataacacatgaataagtgaaatgaataacagcaaagccataaggaatgggcaggaggaattgggaatataagctacctgcactgcatataaagcagtagagtgttatttgaatgtagagtcagagaagtttaaaatgtaaactttaaactctaggaactctgataaattttttaaagtaaaattgatgtgctaaaaaaagagttataaaggcatcttatgaaatgctcaatgaaaacaagagataaccagaatagagraaaaactgataaaaaaattgcaatgactaaaaaatatttgcaaacaatggtagatattagtccacctatataaataatttagtgttaagggtctaaatacgccaattaaaaa

SEQ ID NO: 151544 - DNA, 634 bp, Homo sapiens
atggcattattgctaaaaatcacagccttgtcaatctgttttatggaagtcctgacattcattgagaagtggggtccccaaaattagaattagagacatgtggagagggatttaaaggatggtgagcatttcaaacctttaatccctccaagatttcttgctaatgaatcaattatttcttccatgtctgataaggttgtccccacctcttttaggccactccctcagcttccacttccctcacccattattttcttgaagtctgtaaatagcatttgatctcagcacatgctcagatgggacaatacaaggaaaattcatataaaggcatactaaaagaatcagaaaactttataatccatattaacaaaaacctagagaagctgtgcaggattgaattctgaagttcttttgcaagaagaaggtgtcataattttattttatagttgactgtatttgtgtatggatgtgtgtttaccagaaattttagacttagtgtgtaaccttgcttggttagccatggttctaatggtttgctcatcatgtttataaaaccttgtccatgataaayaaagttcagttaccataatttctaggcaaaacatagccaaaaaaaaaaaaaccagggcctgaa

SEQ ID NO: 151545 - DNA, 627 bp, Homo sapiens
agtaatttatttcactgccagaaagtatattgctagctgtattgcctggtctgaacatgaataccatagaaggagtgcaaggtcactgacaaccatcaaaacaaatagaagagcagtgagaatgaarccatggtgctatcttcgtatttatagtgatcttttattgctgttgacatagtcatgctaccagcgtcctttttatttgagagaaagaaaggtaacatgtgttttagtaaatgagacacagctatgtttgggtctattattctttctcctggggctcaagaagctactcaagctgtgcatttgtggtttatcccaccatctgctattcaaatgtttcctattaaccatgaccaccagtggtttaacctttcagtatctttcaaacatttcattgacaggccaaaaaaaaaaagtaactgggatggatgcacaaaatccattttgaggcctgtattgttcagctaatagatctgtcatcaattaaatgagggcgtaagttagatattttgcatggccagatacatttctctgttctgaatctgtctatctacattgctaaaagggcatgaaatagtttccaccggtggtattttattaccactgagctgtaaaattttacag

SEQ ID NO: 151546 - DNA, 627 bp, Homo sapiens
agtaatttatttcactgccagaaagtatattgctagctgtattgcctggtctgaacatgaataccatagaaggagtgcaaggtcactgacaaccatcaaaacaaatagaagagcagtgagaatgaaaccatggtgctatcttcgtatttatagtgatcttttattgctgttgacatagtcatgctaccagcgtcctttttatttgagagaaagaaaggtaacatgtgttttagtaaatgagacacagctatgtttgggtctattattctktctcctggggctcaagaagctactcaagctgtgcatttgtggtttatcccaccatctgctattcaaatgtttcctattaaccatgaccaccagtggtttaacctttcagtatctttcaaacatttcattgacaggccaaaaaaaaaaagtaactgggatggatgcacaaaatccattttgaggcctgtattgttcagctaatagatctgtcatcaattaaatgagggcgtaagttagatattttgcatggccagatacatttctctgttctgaatctgtctatctacattgctaaaagggcatgaaatagtttccaccggtggtattttattaccactgagctgtaaaattttacag

SEQ ID NO: 151547 - DNA, 560 bp, Homo sapiens
aatgatatacttctaagtaacagatgagtcaaataagaagtctcgagaaattttaaaatattttgcaccaaatgaaaattaaaaatacaacatcaaaatttgtgggatccaggaaaagcaataattagatggagatttatagtactgaatgcatatattagaaaaaatggaggctggacacagtggctcatgcctgtaatctcagtactttgggaggttgaggcacacaggtctcttgagcccaggagttcaagaccagcctgggcaacatggtaaaacctcatctctactaaaaatacacaaactagctggcggtggtggtgtggacctatagtctcaaccacttgggaggctgaggtgggaggatggttgaatctgggagataaggttgcagtgagccaagattgtgccmctgcactccagcctggatgacagagcccaaccttgtccaaaaaaaaaaaaaaaaaaaaaaaaaagaaataaataaataaaagagaaggaaaaaagaaggatctaaaatcaataatctaagattccaccttaggaaactagaaaaagaa

SEQ ID NO: 151548 - DNA, 499 bp, Homo sapiens
cctttgtatttccacttcaactactgtaatgtttcctttgttacctcatgcctggggtatttgaaatagcttcctacttatcttcctgtttctagtctctcacataccacctggtatcagatcaatcttacttaagttacacttttgtaatattaagttcctgttaaaaccaaaactaaacaaacaaaaacttcaatcatcattcttctttactactttcagaatgtggtgccagagggatcaaatatagagacaayggtacctaagattatacttcacaatcaaactagatagtgggttaatgttagtgtgcaagtctgcaacttatttaaagacattccaatttgcctttctataaaactacataaactagcttagatcaccagaacagaaataaccacttctacagtaactcctctgaattgttttattatttatttaaatattcactgttctgcaattattctaaaatatattcgtaagaaaacatgaataaata

SEQ ID NO: 151549 - DNA, 628 bp, Homo sapiens
gaagtgttgatggaaaaccatgtgaatggctgcctacttaccagcctcatcttatcccattctccttttccctccttatattacagccatgcaatcatttcagtgcttcaaatttcacagctccttcccatgtcacaggagccacatgcattttcctcttctagcatgttcccctacctgtccctacctcagttactttattcccactcatccttcatgcctcaatttaagtgtcaagtcctggttgatacttagaaatggtgactaaagacaggattgccccccgcccacaactcctttttcctataagaaatcattcaaaaacaaggagaaagaaaaaccagaaatactaacrttatctcccacaactttagcaggtagatgtaactttgagctgtaggaagggaggaagaaatgccagatacaggcaagataaagtggaagtgcaaaaagacactctgagatgacttttaaaaaaggtagtatttaccgtattcttacaatgccacatgtacatgcattatctgcatgccttttcagggattgacctcctgtattagccattacagcactcagtgagataaatgctattatgattagccctttactgcagaaatagagtcatgca

SEQ ID NO: 151550 - DNA, 585 bp, Homo sapiens
gaaggaaccattagggatcataccaggtcaagatgatttcactggtgaatcctaccaaacttttaaaaataggtaattccaatgccattaaactgttccagagcaagaaaaagaagaaaagtttttgaattgtttttataaattaccataaaaattattctaaaacctgataataaaaaaagaaagatatatacagaccaatctcacttactaatataaatacaaaagttctaaataaactgttagcaaaggatctggcagcatattaaaaggatactacactgtgacacaatatttggaaatctgttaatacaatttatcattatatgtcaaaagaggaaaaacacctatgttcaattccataaatgctaaaaattaaatwgtaataaacagctatcatttttgacaaaaaactgttattaaaacaatagatgactctttccttgagataaaaataaatgtatatattgaataaaaatgtatggggctgtactaaaagcattcctattaatgaacaggataaaacaagtatgtctaatatcactgctattatttaacattttttcagcaagtatcatccaatgt

SEQ ID NO: 151551 - DNA, 334 bp, Homo sapiens
catcttacataactaaaacttcataccctttgaccaatgccttcctatttctccctctctccagccctggcaaccaytattctactctctgttactataagtttgactcttttatattaatcatataagtgggatcatgtagtatttgactttctgtgtctgccttatttcagtttgcataatgactttcaggttcatacatgttacaaatggcaaaatttccctcaatttaaaaactgaataacatatttatatatgtcatatagatatacatttataataatacacatacacacgctacattttcattatctattcatccatcaaaggacat

SEQ ID NO: 151552 - DNA, 616 bp, Homo sapiens
tcctaatccaacctaattccctttctttaccagtaaactgtattaattggttttctgaaaccgaaatattaggactaccaagtggaaaataatttgttgtaagccttctaaacactgtgattgtctctagtgatttttcttgcaggaggaagagcatccacgaaactgtctgcaccctgaatacagcctgtaaaattaccctgtcctggccaacgtaagaggggcaatcrgcaagtggtcatgattatcaacaagaaataaacaatgaatagattagagcctacaatactaagcagtcttactgcaaatacactgcactttgccactctaagatggcacacattaaactttccattgtggatgaatttacatctacagctttaaaggaagagtctggagaagcatagcagcttctggggcctctcctcttgggcaacgctttccatacacttacatgttaggcattcaaaagagaagaaaggaagtgacagggtgtgaataatcctggcggagattttcctgtggcccccaaattttgtaaatataacaaaattgtttgaaaacagtagcagcaatcaccagccccaatcaaaatcatttctggcggcaaatcatt

SEQ ID NO: 151553 - DNA, 567 bp, Homo sapiens
actgctgctgatgttgtgaatgctttaratcaacaggcacttgcttctatcctcagaacatacggggaggagaagcatgccaagaaaatcgcttcagcaattgttcaggcacgcagcatctgcctcagcagcttgccaacatcgtcgcaggtgcatttcctctctctgctatttatgcacgaaaagacttgctatagcgacctacccatattgccaccaagactttccaggctcttcgcatatttgtgaacaatgagctcaatgaactctacacaggactgaagacagctcaaaagtttctgagacctggtggtcgccttgttaccctctccttccattcactacaggattgcatcgtcaaaagaactcgcttgaaatagcatgacagaaaggtttaacctaagtgttagacagtaagtgatgaaaacattgcaattgagttcagaccacgaaaacacagaaggcggctctatgagaagagctcttttaatgtgggaattgatatacaagaaggtacttagtccataagatcaggatgtacaagataaccccagagggcgctcagcc

SEQ ID NO: 151554 - DNA, 567 bp, Homo sapiens
actgctgctgatgttgtgaatgctttaaatcaacaggcacttgcttctatcctcagaacatacggggaggagaagcatgccaagaaaatcgcttcagcaattgttcaggcacgcagcatctgcctcagcagcttgccaacatcgtcgcaggtgcatttcctctctctgctatttatgcacgaaaagacttgctatagcgacctacccatattgccaccaagactttccaggctcttcgcatatttgtgaacaatgagctcaatgaactctacacaggactgaagacagctcaraagtttctgagacctggtggtcgccttgttaccctctccttccattcactacaggattgcatcgtcaaaagaactcgcttgaaatagcatgacagaaaggtttaacctaagtgttagacagtaagtgatgaaaacattgcaattgagttcagaccacgaaaacacagaaggcggctctatgagaagagctcttttaatgtgggaattgatatacaagaaggtacttagtccataagatcaggatgtacaagataaccccagagggcgctcagcc

SEQ ID NO: 151555 - DNA, 500 bp, Homo sapiens
tgaagacctccacaagcccactctcaccatctctgctgcatcacaaatgaggtctgtcctcttcctttatgttcccagagctttatacatttgtctttattttaccctgtattgacttttctaaacttgcctagcctcccaaccctataaagctagagatcaataagctatattttcagtttttgatcaaccttcttctctgtctctatcacacacagtttccttctgcaattttcatctcactttcttctagatctacccagtattgcagactttgggcttgtttcttcaccttagtgttcaatttagcctttgaatcacttgatgcatttaactcaatttcactctgaagtggatctttctgcttcagtccaccttcattgtgatttcctagtctagcctgaactctsacctctagcacctaaatctaccttggatctactcgaatcccagtaggatagggatggaggtagaaaaggcagctaaggcatagctataat

SEQ ID NO: 151556 - DNA, 467 bp, Homo sapiens
tgttggagaagagatctggaatagtagtcaacttggacttgtgggatgcactatgcaaacaattagggagaaaaggaattggaaaatactgggtactcctacattatggaggcatctggaacactaaagagaggctccagctgggcgtggtggctcacrcctgtagtcccagcactttggaagacccaagtgggtggatcgcctgaggtcaggagttcaagaccagcctggccaacatggtgaaaccccgtctctactacaagtacaaaaattagccaggcatggtggtgcttgcctgtagtcccagctacttggaaggctgaggcaggagaattgcttgaacctgggaggaggaggttgcagtgagccaagattgtgccactacactctccagcctgggcaacagagcgagacaccgtctcaaaaaaaaaaaaaaaaaaaaaaaaaaaaaaaaaaagaggttccaa

SEQ ID NO: 151557 - DNA, 620 bp, Homo sapiens
atgatccacgaaacatcatatactttgttataattggaacttcttactgtccttgttttcacttggaagacccaagttaataattatataatgatcttgttttggttagaagataaaaccaagggatgtgttcagataacctagatgcttatcattctatagacatacaccttgaaagctctaagtaaacaaacatgtatggatgaataaaatcacctgaaactcaaaatttaagttgcctcagtggctgttttaggaaactgaaataaatttctttcagttcctgttagttyaaagactggttgacatatcagctagcacaacagaggcagctgggctggggatggtggtaactctcaattcagttcttactctcagccacctcagactttcttacctttgtttgcaaccaccttcctggtgctggagcaacaccattgcatagtcacagagtagggaccctgaagacagaccagcctggagccaaaccccagctttgtcacctataactctatgaccagggcagttgttcattctctgtaaacctgtttcctcacccataaaataaagtgtgatagtgcaaatcccatagagtggttttgaagactaaaggagataat

SEQ ID NO: 151558 - DNA, 550 bp, Homo sapiens
agcattttaaaaaatccttttttgcaggtagaggaaagatgaggtactaaaattggataycaagaactcctagtctccaatgagtaatcttgttgaaaaaaaataaaaaatcaataagatgaccgtacaactcaaacaatttctgctaaaccagataaatctccaataactgtgagaactttcagattatttttttttttaactaaagggcccaggtctttgaagttttttgttttttgttttttttttttccattaacacttgaaaaacagtacaggactccaaagtctaaatactgtttaagataatttcaaaaatgaaaagctgagacttaaaggcaaaccaactaagtgatcatatgcatgttttcttaactaatcatacactatagctgagcactccagagacacagaaagtttggagttttttttaaaaaaaaacaaacattttaattggattacaaagtccagttcactagctagaacattagcaaaagtcagtagatctgctttgttaatctacaaacttttaaaaattaactttataagtg

SEQ ID NO: 151559 - DNA, 550 bp, Homo sapiens
agcattttaaaaaatccttttttgcaggtagaggaaagatgaggtactaaaattggatatcaagaactcctagtctccaatgagtaatcttgttgaaaaaaaataaaaaatcaataagatgaccgtacaactcaaacaatttctgctaaaccagataaatctccaataactgtgagaactttcagattatttttttttttaactaaagggcccaggtctttgaagttttttgttttttgttttttttttttccattaacacttgaaaaacagtacaggactccaaagtctaaatactgtttaagataatttcaaaaatgaaaagctgagacttaaaggcaaaccaactaagtgatcatatgcatgttttcttaactaatcatacactatagctgagcactccagagacacagaaagtttggagttttttttaaaaaaaamcaaacattttaattggattacaaagtccagttcactagctagaacattagcaaaagtcagtagatctgctttgttaatctacaaacttttaaaaattaactttataagtg

SEQ ID NO: 151560 - DNA, 575 bp, Homo sapiens
cttttgactgtaatgtttgaaaattgaataaatagctaacaatgaatcctttaagtcataagtggtttctattaaaaaattatgtaattcctcccttaacccctgcttgcttatgtcatcttattattttagtaattatctttcacccagtagagcatgtgaatttatcttttctttcactgggtttactaaaggtatgagcagtaatcttaatgacctgtaatttaaacaaggtttaacgaaaagggtaacatgttgacctgagggatgcttttgacaccatctaatgtttactagaactttccaacctctaaccttttgcttcattttacagsgaatcatgcaagctacaatctgatcacccaaattgagccaatagaatgaatgcctggtgatcaatcagctggtgtgtcacctatgatctctgctttcaggaattaggggttcttcttaacacagttgaaaagcttccactcacaatggccccagccacagtgtcagataaaagtgcaccttcattagctagcaacatgaaagatgacggtggttaggtggggtagtgagtgctggtggag

SEQ ID NO: 151561 - DNA, 575 bp, Homo sapiens
cttttgactgtaatgtttgaaaattgaataaatagctaacaatgaatcctttaagtcataagtggtttctattaaaaaattatgtaattcctcccttaacccctgcttgcttatgtcatcttattattttagtaattatctttcacccagtagagcatgtgaatttatcttttctttcactgggtttactaaaggtatgagcagtaatcttaatgacctgtaatttaaacaaggtttaacgaaaagggtaacatgttgacctgagggatgcttttgacaccatctaatgtttactagaactttccaacctctaaccttttgcttcattttacagcgaatcatgcaagctacaatctgatcacccaaattgagccaatagaatgaatgcctggtgatcaatcagctggtgtgtcacctatgatctctgctttcargaattaggggttcttcttaacacagttgaaaagcttccactcacaatggccccagccacagtgtcagataaaagtgcaccttcattagctagcaacatgaaagatgacggtggttaggtggggtagtgagtgctggtggag

SEQ ID NO: 151562 - DNA, 572 bp, Homo sapiens
agggaaatggaagagaaggggaaagaaattggcccctaccatatgccaggtagtaggctacattcattatagaaatttaattcaataactacccactctcaaacattgcaatgtgggtattttgatccccatctaacagatgagaaaacagattggagttgaagatggaaatatacaactcactacgtgttggaattgagtccctaatacagaattagcctatctccaaagactttgctctatatacactaatatgaattggaaaaatatttatttatttgtaatattaactaaataaaaatataaatgagaagaaaatctgccaccaaacatggcaaaaaatttatgttaaactcaaagaacaatgatcctttccaagtactctctggtttatattcttttactgtgtcaaatgaaacctctggctcataatttttaaaacaaaagacacagattctccatggaaaatctatgtgtaaattaacgtcaccaattctttattgacttcatcacaaatgycatcaatgttattattttaaaaaaatagcaagttgacttgccacttataaaac

SEQ ID NO: 151563 - DNA, 589 bp, Homo sapiens
catcattgtgtctcaagccatgaaattttcaacaccattgttttctttttaataggatttgaaacttcggtgttggcaattccctcaatttatgttttctttggcctctgctcacattaaggctgtgcraaatacttaaagtgttgtcatgttccttttaatagaaaaatatgtttgctttttagctatagcaagattgagaagaatttaatgtattaatctcaatactattatcaatatgatatcgtttaattttactcacaattatcaataccttattttatttacttaattactcaattgcaaactgtaatccacaaactaatctcatgcttgaatagcatttgttgacttttttttttcaaataacaaaatatatattcaacctgtgaccttcctcttttccatagtttcatacatttaggatatctttattaacaaactatgttgatagtatacatttcttcttggattatcataaaaatgagtatcttaccttccacctccctttattttaggttctagatccatgaaatgctatatttagtcttttttcaagtaactaattgaaccttttaaaaacttgcaa

SEQ ID NO: 151564 - DNA, 638 bp, Homo sapiens
ttatgcattcatattactgataatgctgaatttctgcacccttcagataatggttagtccctggtgataattacacaacagatggttttcctgaagcagaacgacacatatcatgcaatttaaccatgaaggaaatggagagggcttataaaaataaatagagatagacamctgataagtgacttaatacacagcaatatgttgagtcagacacaaacattcattttcccatcattaatttggctgattttcatggaaatctcataggtgaggatgtaaacaatcctttcctgactgtgtccatcctcacaggctatgtgtacttgtgaaaatgaaatattttgttttaatctgcttttgccatggttttcaaaatacgatcttatctcttttaggttactgaagcatgaacactaacttattgatggaggggattcaaaagagctttcttttgttcatctggaaaaaccaaacgccctctttttaagtagctttattgaaatataatgcatacattataaaagtcaacatttatagtatataattcagtgctcttagtggtttcataccaagtggttttatattcacagtgttgtacaatcatccttactctcatttgcaacttcccaaaaagaaac

SEQ ID NO: 151565 - DNA, 638 bp, Homo sapiens
ttatgcattcatattactgataatgctgaatttctgcacccttcagataatggttagtccctggtgataattacacaacagatggttttcctgaagcagaacgacacatatcatgcaatttaaccatgaaggaaatggagagggcttataaaaataaatagagatagacacctgataagtgacttaatacacagcaatatgttgagtcagacacaaacattcattttcccatcattaatttggctgattttcatggaaatctcataggtgaggatgtaaacaatcctttcctgactgtgtccatcctcacaggctatgtgtacttgtgaaaatgaaatattttgttttaatctgcttttgccatggttttcaaaatacgatcttatcycttttaggttactgaagcatgaacactaacttattgatggaggggattcaaaagagctttcttttgttcatctggaaaaaccaaacgccctctttttaagtagctttattgaaatataatgcatacattataaaagtcaacatttatagtatataattcagtgctcttagtggtttcataccaagtggttttatattcacagtgttgtacaatcatccttactctcatttgcaacttcccaaaaagaaac

SEQ ID NO: 151566 - DNA, 674 bp, Homo sapiens
gtgagataatgaatacgttttatatcacatgtgcacaaaaaataaagaaaaatgaatacagaaatgctttgtaaaagcagagatagatagatggatggatagatacacagatgacaggggatgaatgcaaatggattagaaaaatctttgtggaatgactgaaatattccaaaattraagccatatttgcacatcactgtaaatttactaaaaataattaatgtttatacttaaaatggctaacttttatggcatgcaaattattcctcaatacatctgtttttaaaagattatttgaaaccttgcaattaatatttaaaaaataataaatctattcattaaaggcatttattgagtgcatagttcatgccaaaccctgtgctaatagttttagtcttacataagtataaaagtggttattaacttaaaagttttcagtacaatagaagattactgatgagcctgtcaaaaatattccctaattttatttatatttttttaatcaagtatttccatttacttattttcacctctggtgaaattcctcacatgttatacacattttccacattttctactactacctttaacatattaatcatcattattttaaatttcctggctgatagttccagcatctgagtcatgtctgagtcaggtcctattgattgttt

SEQ ID NO: 151567 - DNA, 674 bp, Homo sapiens
gtgagataatgaatacgttttatatcacatgtgcacaaaaaataaagaaaaatgaatacagaaatgctttgtaaaagcagagatagatagatggatggatagatacacagatgacaggggatgaatgcaaatggattagaaaaatctttgtggaatgactgaaatattccaaaattgaagccatatttgcacatcactgtaaatttactaaaaataattaatgtttatacttaaaatggctaacttttatggcatgcaaattattcctcaatacatctgtttttaaaagattatttgaaaccttgcaattaatatttaaaaaataataaatctattcattaaaggcatttattgagtgcatagttcatgccaaaccctstgctaatagttttagtcttacataagtataaaagtggttattaacttaaaagttttcagtacaatagaagattactgatgagcctgtcaaaaatattccctaattttatttatatttttttaatcaagtatttccatttacttattttcacctctggtgaaattcctcacatgttatacacattttccacattttctactactacctttaacatattaatcatcattattttaaatttcctggctgatagttccagcatctgagtcatgtctgagtcaggtcctattgattgttt

SEQ ID NO: 151568 - DNA, 674 bp, Homo sapiens
gtgagataatgaatacgttttatatcacatgtgcacaaaaaataaagaaaaatgaatacagaaatgctttgtaaaagcagagatagatagatggatggatagatacacagatgacaggggatgaatgcaaatggattagaaaaatctttgtggaatgactgaaatattccaaaattgaagccatatttgcacatcactgtaaatttactaaaaataattaatgtttatacttaaaatggctaacttttatggcatgcaaattattcctcaatacatctgtttttaaaagattatttgaaaccttgcaattaatatttaaaaaataataaatctattcattaaaggcatttattgagtgcatagttcatgccaaaccctgtgctaatagttttagtctwacataagtataaaagtggttattaacttaaaagttttcagtacaatagaagattactgatgagcctgtcaaaaatattccctaattttatttatatttttttaatcaagtatttccatttacttattttcacctctggtgaaattcctcacatgttatacacattttccacattttctactactacctttaacatattaatcatcattattttaaatttcctggctgatagttccagcatctgagtcatgtctgagtcaggtcctattgattgttt

SEQ ID NO: 151569 - DNA, 519 bp, Homo sapiens
tcagcccttgccccactccctctgtcaccacccttgtagtccccggtgtctattgttcccatctttgtgtccgcatgtactcatcattaagcacccayttgtaagtgagaatatgcagtatttggttttctgttcccacagtaatttgcttaggatgacgaattccttaaaaaaaataaaaataaaaataaaaaccatttagggtttacatggcaccaaatcaagcaccttatgtatcaacccttggaaaaatatgcatttgacagaatgaattacatccatagtattttggcaacatgcctcacaattatgtggcaagtaaaactaatgctagtcttcctgagccctgttggtttaatccaaaagatttaaaaatagcaaaagttctgcaaatcttggaaggatggttggcccaccaaaaccttaagaaatatatgctagtgtgcagatgtaagagggttgaaggaactgatccagagtctactaagtatctaagagaaaacagtgtaaaattgtaga

SEQ ID NO: 151570 - DNA, 459 bp, Homo sapiens
gcagcttgttttctctgcacagcctagcactcatttaactgactttaataatttaattaagttgaattaaattatctggtgtttgtaaacatgtctatattatttagggtcatctaaacagctataataaatagacctcaaaatcagaaagttcacaaaaaatagaaagctattyctcgctcatataccaggattgctggttgaaggaggctgtttccaccactggtttcaggtacccaggtccatggtgtttcctgccatctttaagaggttatttcttaaaaccacacatctacaatcatgtgatcattgacaaacctgacaaaaacaagcaatggggaaaggactccctatttaataaacggtgctgagagaactggctagcaatatgcagaaaattgaaattggatccctttcttacaccttatacaaaaattaactcaagatggattaaagact

SEQ ID NO: 151571 - DNA, 522 bp, Homo sapiens
actcctcacagtagttctaacatgttggaggtatttataaagctattaatcttttaaaatttctccccataaagtggttcacttttatacatccttgcaaaaaaagacatttttacaattaatgttattgccaacaaagcatcgatactagcttaggcttttataatwgttacaactgagattacatgttcttaaaataaagaatttcagaaagaaaatggattattagaccagaatctatttctagttgtaaaccaaaaagtatatgattgaatttaagaaggcatttaagttgaaattactatgaatggctgattttacatctcaaaaagtttagttggcttaactttacattgaaagtgaaataaataataaaataaaaaatatattattgacagcataaattattaaagtactaagcctgagagagaccaaagatatacaaaataatactattttataaaaactgtattctgtaaacatgagtaaagcagatctttcagaaattaacctacttccaaa

SEQ ID NO: 151572 - DNA, 452 bp, Homo sapiens
tttgcattctaaagaggtcctcagttgattcttatttaagttggagaagtaatgctcagagaagaccaggcagtacccggggaaaaatccttgttcaaccctggagcatggaaggtatctccttattcctcaggttcttttaggttcagaatgggagggtgwaccaaagtttgagtcctgacagtaatttcatgcccaggtcctcagtgtgaaaccctgtaccatgaaccacagaaagatgaggggtttcactaaacataagaacagttattatttacctcataatgcaaggtagtgatcagtattgttttatagcctctttgctggagtataactgtaaccctttctataatgaacgaaagggattatggaggttgccctatgttttctctatggaatctttgaggcttcttatttgttgattttgttttattttccttttgaaattaatt

SEQ ID NO: 151573 - DNA, 452 bp, Homo sapiens
tttgcattctaaagaggtcctcagttgattcttatttaagttggagaagtaatgctcagagaagaccaggcagtacccggggaaaaatccttgttcaaccctggagcatggaaggtatctccttattcctcaggttcttttaggttcagaatgggagggtgaaccaaagtttgagtcctgacagtaatttcatgcccaggtcctcagtgtgaaaccctgtaccatgaaccacagaaagatgaggggtttcactaaacataagaacagttattatttacctcataatgcaaggtagtgatcagtattgttttatagcctctttgctggagtataactgtaaccctttctataatgaacgaaagggattatggaggttgccctatgttttctstatggaatctttgaggcttcttatttgttgattttgttttattttccttttgaaattaatt

SEQ ID NO: 151574 - DNA, 371 bp, Homo sapiens
atctgggacccaatcaaaacacgttgtggttttgcttcccattaaatttaattcaacaatttattgagcttctatgtaccagagtctttgctaaacgcaaggaaacttaaagatgaaaaccatacaattcctaccttccacaagcttacacacctaggggagaaatgaggcaagaaaacacacagataatcacaccctgaggatgcttcccttccaggttctcactaataacaaacagctcaaaaaagcacagmtagtcctctgaattgtaggtcacccagtcttcctcccagaattatgggtactcaggtcaattaaagtcaattaaatttaacttaatgaacatgagtgacacagactaaactaaattg

SEQ ID NO: 151575 - DNA, 545 bp, Homo sapiens
tgagacaggggtggaggtttgtatatataatttacatgggcaaagatttatagcatgctgttaagttttttatgagaatctttgaaattgtaagaattaccaacattttttcatgtcaaatgtgactgtcaaaataacaacttcagaacttatctcctcccggatcctcctagcctagatcctagatgcatgcttggtcatgtaaccagtgctgcagggatttatgtgagaggagctcaatatcccagaaggwactagctaattttgactggttttacatttttaatattttttctttttttgaaccacacttttattccatttgttttttgtagctataaagaataagtctaaacccctttctcatagtagctcttcagatatttggaaatgcttttgtatctaccaaattctcttgctattactctatgacatatagcatcaccctctgcctttctttagtattttaatgttttctttaattctgggatatagaattaaagattcatgctgttgcaggtatggtaaaatctattcataatata

SEQ ID NO: 151576 - DNA, 624 bp, Homo sapiens
aagtgtgtgactcaaaaatagttctgaatcatttctatatactaatcatggtgctgttcaaaatgcttgaaatgttgttgactttggactttgttccacagctaatttaagaaccgtgaaacaaggtattgcattgtatcatattcaaacattgtcattgacacgaaggaaattttcagttgtctgacttcagattattttttctgaaaccttatgaatgaaatgaaatactgtggcagaacagaaaaagcatgacctttagggatagccttctgaattcttgttctgcttgatgaattagattatgctgtttaaaatcattgggcgttggtttcatcatctgagaaaagtagataatatttacattgaagttttgtcckgagagatttgttagacagtattgtaacaggaatgtatttgacacataataagcacttcataaaaattaattttccttattcccttccaataataaaatccacatttaaatagaaaagcactccatcaatagtgcattaacataaggagaaaattttaaaaatatatttagtaaaatatcctgaggaatggaaatgattctgaaattaatttaaatagcaacactcttaaccctggtaaattacc

SEQ ID NO: 151577 - DNA, 517 bp, Homo sapiens
cataaaatttatattattttgaagcattcagtattttgacaatatctaggtgattctggaaatggaaacatgtatttattttaatcatatcagaaaaaaggcagtcaaatatcttctgcatcatactgaaaacaaagaaattattaaaggtttcttctttaaatacattttaccattttgaaaacttaattaatcttcttctctatgtgttttacctcaaaattctttcaatattttcattaatagtttatgcatacagtttgggttttttttaaatacatacattatcktgtacatatgtaacttatacatacattgtccagcttttgcatattaattctaagaatcatatagactggcccacaaaatatttaaaatatctttacagattcaatatattttaacaaaatcttttatgtttgttattcagagtatgtatgcatatgctaatgtcattagagcaagccttgattgaaaatgtacttgctgtttagttagtggaataaaaatcccaaga

SEQ ID NO: 151578 - DNA, 586 bp, Homo sapiens
cagcactgtgagtcagagcatgcacgtaagaggcaaatttgatgaagcgggagtgaaacagtgatcagaatcaggagcatcagacttcacaacatcagagtcatggcctgggctgcagctctcttgggagggatttcagtcaacctgggaatgtggtcttgcacttcatgcaagcagccacactaggaaaggactgaggtaaaaaactcataggttcttgtttgatgtgattactcttccagggctgatgaataagggttgaaagcctaatagagaacagaacagtgaacttttgtttcttgcctattatatataggctgatgcaaattggtcttctttgygtttaattaaactatttgatctatagcaaccagtgtcgttatgaggaagtgtgttcacctgcttgattcattcaattactcagcaaatatttactgattatatgtgcaagaaattttgctgctgattctaagggatacgtaaataaagcagatatataaattgttttgtattcaaactctcagaaggtaatatataaacataaaaattatactgtattttttaataatacatgcaggaatatata

SEQ ID NO: 151579 - DNA, 312 bp, Homo sapiens
aaagtgatataaatgaaaaatgcaccaatgttaccttagcatcaggctgtttctatgtaaataatttatgaattttatctgtgatcagatggctcctttctgaatgagacagaatttgaacatgtttatctggggctaaaggcatgctgaaagtagaagaaatcaggccaataacaaaattcaagcctttcaaaattgtgttgacactgacataaatgtaaagactcatcaaagaragacagcaacaatagaagaagctgattttctccctaaatacacacataataagcaacattttaaagtaacatgtag

SEQ ID NO: 151580 - DNA, 591 bp, Homo sapiens
aggccaataacaaaattcaagcctttcaaaattgtgttgacactgacataaatgtaaagactcatcaaagagagacagcaacaatagaagaagctgattttctccctaaatacacacataataagcaacattttaaagtaacatgtaggctaacagtggaacagattccctttcttcactctaagctcactcgactgcatgacataagtatttccttttatatcacactgagaatttcactttttattcagatttggtgcatttctctctctgctaatagacatgggcagtgactaaatttctaagggtatgggtgtacacaattttgatgaygtgaatcttgcttttgcttattaatggctgataacttgacatattagtacagctcaagtataagcagcttttcaaatacctacagaaaatgggtgtagttaataaatgctactgttctagtaaaatcatctcatctctagtttttcaataacgcacttggtttgtaatatttagaaaacaattttgacagagatattcactcaacagtattattaaatgacttctagatgcccagctcctggcatacacaagataaat

SEQ ID NO: 151581 - DNA, 575 bp, Homo sapiens
cctgatctcagactctgggaggagggcttggggccagcagaggtggactgggctggaggatatccaggccccttgatggcatgctcaaatcctgggggaatgggacttggctggtgggcttgtcctcaggtgcccttgttatggtgcattcaggtgctcactatgataggggcagagtattccccaggcctcctgaagaaagcttaggtgggggcagtggtggctgccctagggatctgcctccagggatggcagggctgcttgcagtaggagtagcttactggggcagctgtggagctggtggttttctggtgcctccatcccacagcagcccatggaagtggaagtggcatttgtccttggagcatgtrgaagtttctggcctctcctcttactcctgcagcagcagaagtatcagtttcagggcacaaagtcctttggggatctgttttcagattggtgccagccgtgggcccaccacctggaaggacggggcatgtcttagtgggagaagtgtgggaaggcagctacgggcttacagtttctctatgtctgggtgccacaacagcccgaag

SEQ ID NO: 151582 - DNA, 609 bp, Homo sapiens
cataatattctacatatgtactatatacttaattgattttaaaagctagttaattcacataatacaagatgcttattaaaacagactaatgcttaagattaactaacatactaataaaaagccctgttcaaagccttagacaagttaactatatataagagtggttggttaaaaaataataatataaaagataggaatacttggaggatccaatgtaaactcagtttctttttggaaaataacatctcaaactgtatcactctacttacagagaagtaagatggccttattttcaaatttaaaaatagaattctttctttttcactttgtgtatttaaattatgattcaactgtactattacagaaatgtgttaagattaatgtaatttttctttgctttagcttttaatacttatatgtagaagcatataaaatgtgtgtgtacatttatttgacaatctttgtactttaaatcagaactattttcataacatgtctgagttcaatagttcatcaratatttgaattctgttcttaaagtggcacctagacaaattacagttactaaattttccagaaattaaaattaagcttttagggaaaatgtca

SEQ ID NO: 151583 - DNA, 572 bp, Homo sapiens
ctttattttcctaaatgctcttttctcagatataggtatggttccgtttctcaccttctttaagtcattgtttaaatctcacattctaaaatgagtcttttcctgaccagcctgattaaggtttccattttattaactgctatatccctacctctaaaaacagtgtctagattatagtagaacataatattttttgttgctgaattcatggatgaatgatgaatgagtaatgagttattaatttgcatttccaaaaagtaaattatatggagtcaagaggaagtggaaaacaaatacttctttgttgatatgccgaagagtgtgcattgatctattagagaaacatgaatgaaatctttggatatttaaagacttattgatattattttcactttatcaatttcttcctgttttgtttcattccatagcaagtatcttggcagctaggaggtatttacatctctctgtcatcactaatataaccaactggtrgtgtgaatgagaatagtgaatgcttacaggaggctcagttcttgagaagatattagttttatctatgtaaaaaagctgta

SEQ ID NO: 151584 - DNA, 507 bp, Homo sapiens
gtccacaaaactgaaagtttagggtagagcttccacatacagttataccaaagaccttggatagtcaaaagggtcatactgcttacctggagcaggggcaacatcagcatggagtaagaggacactctttggtgttaaggcattttctgttctcctgaggccatcttcccagagacagatccttttctaaagacattgaattaagctcacagtgggcttgactgtggacacctcaaataaattatgtgataatcacacaaattcagggaagctaggagaaagagcagtcactaatggtgtgtggattccagagtcgcattctcagctcttgatttacttttcagagaaaagtytaagcaaaaaaaaaaaaaaaaggggggggggttttaaaaatatttggcacaattttttctgcagttaagtgccaacattgagaatatacaaaaacttttcagctgagcaacaacacaatctcaaggcaaaagatcagttttatccataaataaa

SEQ ID NO: 151585 - DNA, 420 bp, Homo sapiens
aatctttggagggaggtaatgaagcccattgatgccttgatttcagacttgtggtctatagaactttgagaaaataaacttctgttttaagtcacctagtttgaggtaatttcttacagaaaccacacaaaattaataagggtggatacatttattactgtaaaataatttactagaggttaccagaatagcatctttgcttatggctacagtgaccagtgaatacaagagtagaaaaaagcccrtctttcatcaaatcatgactaaagatattatgtatcagggcactcttcgagggacccactgagaaacaaatattttaagttcctactcttgtgaaatttgcattctaggggatatcactaaatatcaatttttcataatagtacattgaactttgaaacattgttttaaaatatc

SEQ ID NO: 151586 - DNA, 556 bp, Homo sapiens
ggtctaaacctgagtgcctgtaaacctcaccactgatggctacagcactctgtttctcaaagtaaactggaaaggtggtctagaccgtaaggactgcaactattaagcaagtcctagtgctgaatttggcccagagatagtggaccaagggtggtgttgggggcacgtgacatcctgagacacaagctggagcagcctagggagtgctggcatcacccstaccctaattccaggctgcacagcttgtggctcgaaaaaagactccttccttttgctccaggagaagagaggaaagaatggggaagactttgtcttgaatctaggataccagctcagtcacaacaggatagggtattgctcagcatccggaggccccatttgaggctctatctcccagatgagatttctagacacaccttggtccagaagggaaactactaccttgaaggaaagaatctagtcctgacagtattcaacacctgctaaccgacgagcccttgggccctgaataaccagcagtgacacccaggtactacattgagggccttaggtgagc

SEQ ID NO: 151587 - DNA, 556 bp, Homo sapiens
ggtctaaacctgagtgcctgtaaacctcaccactgatggctacagcactctgtttctcaaagtaaactggaaaggtggtctagaccgtaaggactgcaactattaagcaagtcctagtgctgaatttggcccagagatagtggaccaagggtggtgttgggggcacgtgacatcctgagacacaagctggagcagcctagggagtgctggcatcacccgtaccctaattccaggctgcacagcttgtggctcsaaaaaagactccttccttttgctccaggagaagagaggaaagaatggggaagactttgtcttgaatctaggataccagctcagtcacaacaggatagggtattgctcagcatccggaggccccatttgaggctctatctcccagatgagatttctagacacaccttggtccagaagggaaactactaccttgaaggaaagaatctagtcctgacagtattcaacacctgctaaccgacgagcccttgggccctgaataaccagcagtgacacccaggtactacattgagggccttaggtgagc

SEQ ID NO: 151588 - DNA, 540 bp, Homo sapiens
gggaggaactgttccctaaggaaaaaaaatgcaagagagaaaccaaacaaactgataattactgtagttatcatcttatagttcaatgcctatgaatacccattctaataaagtggtacacattattccattatagtagagtaaatattcaagttttctaaacttaattatcttccttctgcacttactccctyacagtttttctcagactttcaggtccaaattaaaggaaattatgattttttttttccaaggcggtatatgctaatccattgcgtgccaagctaatagatttatatttcatctgtcaacctgttgtatacaaatagatgttcatgaacaagagagatataatcactatgaagcttgaaagtgattattctggtaaatctgaatagtatggatgaagtgtagagaacacaagtatggctttgtactaagaatgtgaggtggtaaatccaggcttaagatatagtcacagaagtggagatgaataacttttcttttctccctggaagaaagttttaactacacatgaat

SEQ ID NO: 151589 - DNA, 540 bp, Homo sapiens
gggaggaactgttccctaaggaaaaaaaatgcaagagagaaaccaaacaaactgataattactgtagttatcatcttatagttcaatgcctatgaatacccattctaataaagtggtacacattattccattatagtagagtaaatattcaagttttctaaacttaattatcttccttctgcacttactcccttacagtttttctcagactttcaggtccaaattaaaggaaattatgattttttttttccaaggcggtatatgctaatccattgcrtgccaagctaatagatttatatttcatctgtcaacctgttgtatacaaatagatgttcatgaacaagagagatataatcactatgaagcttgaaagtgattattctggtaaatctgaatagtatggatgaagtgtagagaacacaagtatggctttgtactaagaatgtgaggtggtaaatccaggcttaagatatagtcacagaagtggagatgaataacttttcttttctccctggaagaaagttttaactacacatgaat

SEQ ID NO: 151590 - DNA, 546 bp, Homo sapiens
aatgcattatatcaatcttctgctaatatgtcagatttactttagtaagagtagaatattccattgatgtgaagacagatacagaatcaaagagtaggtctctactcctaagtagagacattatcaaatccctgaagtagaggctcagctatgtgtaatcatttgtaaattaaaaagaggtaaatttcaggaaatgataagatcaaatattccyccctaaagggtaaacaagtttacagaactgtgactggcatactcagtattgtttccaggaatggaagcataatcagtcattatattcaaagcactctagactaaaacttggtgcaatctataaacaggaagtgatttggggaaatgtggataaacaagtgtccaaaaatgaataatgagaatgtcaagtcaggagggactaagaaaaaaactactcatcagggatatgactggagaaaaaagacaacatttcagaaaagtgttgggttattcaaaccctttataattcatggggaaaatggtctgcttgaatcagattaatattcactaaag

SEQ ID NO: 151591 - DNA, 523 bp, Homo sapiens
ttaatcttttttcaggttaaatattgtttaaaagattgataagtgaaatcctctcttaatatattgtaaatagatcaacatcttcatgaaatcttttagcttatttaattttttaacaatttcatggtgatatacacttctaatggacatataactgtggtagaattaactattgattttgaaatayggagtgatagttgataagaggtaagttaatggatatagttatataatgaccagttgagtaaatctttttgtacataaaagataacagattctacttactatcttgaaactacagaggtataaccatagttatgtgctttggggtatgattaatgagctctgtctttggctgcattaagaactgagtgaaagtttaactgccaaagaacacatgcatcactctaagaggaaactgtactgtttacaattcccttggagatagtagagaatctcaagaaaaataggcactgaaaagtcaatagttggatgtcttctaggtaaaatagtcaactaactg

SEQ ID NO: 151592 - DNA, 523 bp, Homo sapiens
ttaatcttttttcaggttaaatattgtttaaaagattgataagtgaaatcctctcttaatatattgtaaatagatcaacatcttcatgaaatcttttagcttatttaattttttaacaatttcatggtgatatacacttctaatggacatataactgtggtagaattaactattgattttgaaatatggagtgatagttgatargaggtaagttaatggatatagttatataatgaccagttgagtaaatctttttgtacataaaagataacagattctacttactatcttgaaactacagaggtataaccatagttatgtgctttggggtatgattaatgagctctgtctttggctgcattaagaactgagtgaaagtttaactgccaaagaacacatgcatcactctaagaggaaactgtactgtttacaattcccttggagatagtagagaatctcaagaaaaataggcactgaaaagtcaatagttggatgtcttctaggtaaaatagtcaactaactg

SEQ ID NO: 151593 - DNA, 602 bp, Homo sapiens
gtctacaaagggatcattgccagtactgcttttctacttgcctgtaaccacstttgggaaaggtctttcactgtcccaggttttaatgggacattaaatgggaatatcatggaaattcaagaaagtgttgctttcctaactcttgtgcttcttgaaatctattttttttccacctgcgtcaccccttagaaaaatgagtttgaataatgagtattcattgttgagtaatgagtgacatcttactgactgatcctttgctctccatgttgagagccacagttgctaaaagtattcattcttcaccccagacttcactttcagataattcctctaaagtactaagactggtttagatgggattggaggttgctttgcctctctaggacttgatgcttttagtgactggctttgctatcacccaggaactctcatgctggacttgagctcattcaccagacatactggtgtttacgcctgttcatttatttacacaaagttttagaaactgttgttaagttttggggcacaaaaagcaaaaagaatccccgagtactcaatgtgttatttcaggaaattgatctagacttccttccatctggatc

SEQ ID NO: 151594 - DNA, 602 bp, Homo sapiens
gtctacaaagggatcattgccagtactgcttttctacttgcctgtaaccacgtttgggaaaggtctttcactgtcccaggttttaatgggacattaaatgggaatatcatggaaattcaagaaagtgttgctttcctaactcttgtgcttcttgaaatctattttttttccacctgcgtcaccccttagaaaaatgagtttgaataatgagtattcattgttgagtaatgagtgacatcttactgactgatcctttgctctccatgttgagagccacagttgctaaaagtattcattcttcaccccagacttcactttcagataattcctctaaagtactaagactggtttagatgggattggaggttgctttgcctctctaggacttgatgcttttagtgactggctttgctatcacccaggaactctcatgctggacttgagctcattcaccagacatactggtgtttacgcctgttcatttatttacacaaagttttagaaactgttgttaagttttggggcacaaaaagcaaaaagaatcccckagtactcaatgtgttatttcaggaaattgatctagacttccttccatctggatc

SEQ ID NO: 151595 - DNA, 452 bp, Homo sapiens
tcttcctttcttctttccctctccctttctggagcccagactctgtgtcttctctaattcccacctttgtcttcatcagggtcacatgtgagctgtcttctgcatcctgccccygtgggatatgctttttccaggtcctgcattgggtaacgtggtccatttcagccgtggtgccaagttcaactgtccaactgcagctttgctggcaataaaactggcttccttagaattattatctggttcctggggctattttttacttggttcagaacccacagagaatcagtcatgattagttattgccctctctacccaaaggtccagaaacaaagcactctttttggttttgtatcaaccttgaaaaacatgagaagcaatggcctaaattaatacccaaataatatagtgtgttccacccattattcaacaattatactggtagttggtcactc

SEQ ID NO: 151596 - DNA, 595 bp, Homo sapiens
ttgtcaacattctggcaagaaccccaggaggtgacacaaaattacttttggggtagctcttagaagcctggaaaaagcaataactcaaacagagtgagtttgaaatgcctgaatttccagaggaaagaattcaaaattctcaggaagtggatacgttaaaatagatatattgtaagggaacggaacatcttccagaggattatattccaagagaagtcctaaaagatgtaccattcactaactgatgaatgcggccatcaaaaacattcaggagtgttttctatgagctaacagtgggagagtctgtcctaaaattgtgttgctgataacaatggggtgatggggcccaaaatagaggtcaggtagcatcacttaatagccagaagccagggatcatacttacaaccaccaataagatgggaatgtcccagaacccatagagagttatggggatagtaaataaaatatagtgctcctaarggcaaaatctgttggcagcctacaagagcaatgcttaatatattataaccatagaagaacaagaatggatgatcacgaggctgaggaaggtgccttaataaaatgtcatgacccc

SEQ ID NO: 151597 - DNA, 562 bp, Homo sapiens
ggaacaattgtccatcttggatgatctacttgggatcccaagtaggaaatagttttctggatctgaggtccccactcagaaatcagggcttgagtcacacacagataggccacagaacacaagaggtaaatactgagagtgagagaaatttagaataatagtgaaagagagagatagatgatggataccagttgtggactcacaaacatctgcagtacaaggatctgcagttcatcccactaacctcctcagaaggagaggtttaccctcagaagaagaggaccaccagagcccttgaagtgttggccttcacaaatggagcaagaagtgtgtctgaatggtgcaagaggtggacactgtcagacacagaaatgggcccaccagttcccctctcaagaatgaatgtgatgcccagatacccccagctattagatcctcaaaagcctcctctgcygaggtcacactcttgttggggattagctaataagttgttagctaataagttaacaactgagcgggacaatggtactaggatctggccacgttcatcaaatgcaaggtt

SEQ ID NO: 151598 - DNA, 561 bp, Homo sapiens
cttcaaacatattacttcatcattttcttgcatcaaataatgtgattcacaaatctgtcaattaaattayatattttttgtaagagagctattctttccagaagccttaactttttttttatctgttatgttcttaaattttactgtagcatatgtatgagtgggtgaattatttaagatagatcagctatggtgtggtaacccccaaacaccagtaacttaatacaataaagatttatttacttaccacacaaatttcaatgtaggtttacatggtctcttctccaccccatgactcaaacatctaggttccttccatcttcacaggttctcatctcaacagatggcctccttggttgcaatgaaagacaaagagagagattagagaattgcatgggatattgtcaatgactaattctaggagtgccttatatcaattctatctacaaaaatattgtaatcttattataaggaagggagaaatattattttcctttgtgtccaaatagaatactcctaaacctcatcccatcacagaatccagctcaaaccctagagtct

SEQ ID NO: 151599 - DNA, 448 bp, Homo sapiens
agaaaaatcaaattctattaaagttaatgttgagtgaggaccagctgaggaacccaaagaacttctcactttacaaagataggaacatttaaaaaaattgaaatgggcagtttagtggcaccctgataaggtggcatacattwtcctaaagaaagctaaatgaagccaaaacagagatctaaaaggaggggttttaggttgcaaacaaatgtgcgtgtcttaacatgggtgtgcgaactgtttggagttaaagaattagttattcatagatgcatatataacatactttttacaatgagttaactcagttgcacagaaaaatgtggagcctcctactggattggatgaattgactctataagtaaatcatactgtgagtcaatcacaaatttagctctaagcttcctagcaagcaacatgaaaacagacaacttttatcttaaatgat

SEQ ID NO: 151600 - DNA, 448 bp, Homo sapiens
agaaaaatcaaattctattaaagttaatgttgagtgaggaccagctgaggaacccaaagaacttctcactttacaaagataggaacatttaaaaaaattgaaatgggcagtttagtggcaccctgataaggtggcatacattatcctaaagaaagctaaatgaagccaaaacagagatctaaaaggaggggttttaggttgcaaacaaatgtgcgtgtcttaacrtgggtgtgcgaactgtttggagttaaagaattagttattcatagatgcatatataacatactttttacaatgagttaactcagttgcacagaaaaatgtggagcctcctactggattggatgaattgactctataagtaaatcatactgtgagtcaatcacaaatttagctctaagcttcctagcaagcaacatgaaaacagacaacttttatcttaaatgat

SEQ ID NO: 151601 - DNA, 560 bp, Homo sapiens
atttccaaaggacacacacaactattaaatggcacgtgggccttcatcagttagcaaggcccacacacactctttccttctacacattactttctacaatcattcagttttcttgaatgtctttttttgaattgctatagaaatgtatctcctaagacccacacccatctcaacctctttcaagccatgctttttctggcaaagggcctcatttgtagcttttattgcctcagttcttgatttattaccacaccctgagctgtcctgttgggtgaatggtctggcttttgatctcagtatgaacatcccatgactgcccttgtccatcttcagcaactcctttgttttctcaggattatcattcagaaacagataagcactcacacaaacacccaatttgcctgaatactcacattgagcttacatttaataaaacttcactcatgatatcaaacttgtacactctgtacraagctttagggagttgttgacttatcacataaggctttatttttaaaggagttttgtatcaaaatcactgaacgaggtaaaaatcagat

SEQ ID NO: 151602 - DNA, 576 bp, Homo sapiens
aagtcattggcttacttaagggacatgtttaaccaaaataatgataatcttagaatcatactgcttttatagtactcaccctatagaaagaacaagggaagtagaactgatggaaggatgagcaaattcagttaggacagttaggataatttgcaaaagttcttcaaaagctagaaaatttctttctttaaattatactttaagttctggggtacatgtgcagaacgtgcagctttgttacataggtatacaggtgccatggtggtytgctgcacccatcaacctgtcacctacattagggatttctcctaatgctatccctccgctagcccccccagcccccgacaggcctgggtgtgtgatgttcccctctctgtgtccatgttttctcattgttcaggtccacttatgagtgagaacatgcggtgtttggttttctgttcttgtgtcagtttgctgagaatgatgtttcccaagctagaacatttctaaaattcagttgatggtggggaacaaagagcaaaacacgctgagatgctgaactcttttttgtattcaatatcagatttgtcccca

SEQ ID NO: 151603 - DNA, 576 bp, Homo sapiens
aagtcattggcttacttaagggacatgtttaaccaaaataatgataatcttagaatcatactgcttttatagtactcaccctatagaaagaacaagggaagtagaactgatggaaggatgagcaaattcagttaggacagttaggataatttgcaaaagttcttcaaaagctagaaaatttctttctttaaattatactttaagttctggggtacatgtgcagaacgtgcagctttgttacataggtatacaggtgccatggtggtttgctgcacccatcaacctgtcacctacattagggatttctcctaatgctatccctccsctagcccccccagcccccgacaggcctgggtgtgtgatgttcccctctctgtgtccatgttttctcattgttcaggtccacttatgagtgagaacatgcggtgtttggttttctgttcttgtgtcagtttgctgagaatgatgtttcccaagctagaacatttctaaaattcagttgatggtggggaacaaagagcaaaacacgctgagatgctgaactcttttttgtattcaatatcagatttgtcccca

SEQ ID NO: 151604 - DNA, 576 bp, Homo sapiens
aagtcattggcttacttaagggacatgtttaaccaaaataatgataatcttagaatcatactgcttttatagtactcaccctatagaaagaacaagggaagtagaactgatggaaggatgagcaaattcagttaggacagttaggataatttgcaaaagttcttcaaaagctagaaaatttctttctttaaattatactttaagttctggggtacatgtgcagaacgtgcagctttgttacataggtatacaggtgccatggtggtttgctgcacccatcaacctgtcacctacattagggatttctcctaatgctatccctccgctagcycccccagcccccgacaggcctgggtgtgtgatgttcccctctctgtgtccatgttttctcattgttcaggtccacttatgagtgagaacatgcggtgtttggttttctgttcttgtgtcagtttgctgagaatgatgtttcccaagctagaacatttctaaaattcagttgatggtggggaacaaagagcaaaacacgctgagatgctgaactcttttttgtattcaatatcagatttgtcccca

SEQ ID NO: 151605 - DNA, 424 bp, Homo sapiens
tacaataagctaaccaaataacagaaagctattaataatatgtttcacaaagtcctttcatatatgttaattcccttaaacttgacagcagccttttctgaagcaaatgctggagagaactagaggagatcagaaaggctataaaagccacacacttaatactggggaaggcagtaatcagatctagacgtcttgatatctcaggatcttgctcctaccactttctcaagaggagaaatgaatgagctacagattctggccttaaaggctttggagagtattaaatgcaattattttcaaaagaggagataagtctgcccaccacaaatgtgagaactaaactctcacctaacacctactgggagtatatwagtcagagtttttcagagaaacaaacaataggatgtggatagatagatagata

SEQ ID NO: 151606 - DNA, 595 bp, Homo sapiens
catctgtcttccacagccaaattctacaaaactgcattgtaaatgcctacttattaaatgaataaacattgttcttcatgactttatcttcttgcctggcttcctttggccttatcaccatcaactcttattttcactcagtatatcaagcattacagtcctcaaatatgccatcttccagatccatctctatgcttgctttctacccatttaaaggaataaaaatgcacagatcataactatacaggatattgtggaaggaaactcactgaatcatcactagaagaagcactggactgaatagccctagctcagaaattattttccaaacaagagaggactgacagaagggttgctgagttagagaataatgacaacagcttggaaaagaagctctattccttccacagtctccattgtaacaggactgtaarttaattatcaatggtttccaagggttactagagcctacctaacaggcatgttgtaagaatataatgacatgtcaaatataacacacacagaacagtacctagcataaagaaatcacaaatacttgttaagagaacataagtgagagagaaaatatagacac

SEQ ID NO: 151607 - DNA, 675 bp, Homo sapiens
gagtatatctagcgtcagcaaggcctttgactaggtcccccttgatattcttacgtataattcattcattttgatatttgcagaaggctatggaggaatgttagtacaatttcgtgaatgaactaaatattatcaatcgtttgtgatcaatatccagcagagtgtcaaaagcctgctttcttacttctgtcctagctaattttctcctcaatgacacaatccagagagagaccatttctagggtggcataccttcacaaagagccaggatgcgattcagctctcaacaggggactgtgattagctgtttgcccaggaggaggcaagacaaaatgagacctggggacacgttaccagggaaggcacagtcagaagagaacagattggtgctcactcttcttccyggcagtgggactcctgtgtggatttttaatcaggtctatttttctcacccttatttcagaaaactttttaaagaagcttattgcatttataaaaatttcggcaatattctttcttgaaatactgagacaatttacctataaactgtgctttttgaccagaggatattggcatcatgtaaatgttagcaacaaacgttgtttcatgcagagaccagatatttttgtcttttgctattattggtttctcattataatgggaaaaaaagcaaggc

SEQ ID NO: 151608 - DNA, 584 bp, Homo sapiens
acctggatttgaaatgttggaaaataagtgtgattgggttttagttgtgtattcataaacagttggtgaggtgtttatgtctaggcagctcaaccctaaccctggagagggtcatgtgcttggcctcagagatggagaggacagggctcagtggccgcacctaaggcagagtagtgtagcaggccccttctgttgcagtcggtcactggagtgcccttcctctgggccagtgatggaggctgggcttctttggagacccacaatctttcaggacctccacttcctttccctgccacctgtgtccatgtatctggaatggggaaatggtaaggaaccctttactgtaaccctccaggaataggacaagaggtttcttcttcttmttattattattatttgagtcagagttttgctatggttgcccaggctggagtgcaatggcgtgatctcggctcactacaacctccgcctcccaggttcaagcagttctcctgccccagcctcctgagtagctgggattacaggcatgcgccccacgcctggctaattttgtatttttattagagacgggctccatgttggtc

SEQ ID NO: 151609 - DNA, 563 bp, Homo sapiens
ctcccccgtcatcttcttagaggatctgacttggtccaagttggctgataagagcatttccagggaggctggattaacaatcwtgcccattccctcgaggttacctctgcccaccacacattactcctggatatcagatccagaattttgcctattgtccctgctcaagggaatcaaatgtagcaacatttcctcccctgattcactcacaaatatcatcatcttcccactctgaccatgttttgagtatgtcctaatatgatgtttctcaaccttgagaattgcctgccaaagataccttaaaagtgctaaggctcttgacttgtgcagtatcattatataaatgctatggctatgagtcatagataattcatagatttattagccttgagttgtgggcagggagaaggcttgaaatggaaaacttagctctctttgcatttgccactgattatcaggaaaatttatttgaatttcaagatcagacacacctgatgcatctagaatctcttagttgtccactaaatatctgagtgaaaatgcagacactgtggtagtcatga

SEQ ID NO: 151610 - DNA, 429 bp, Homo sapiens
aggaacagtgacttcagacaaaaggactaaagaaatgcaaggaggcacagaagttcaaggcttcgtcatggagttgtgacagacaggtccggctggcgggccatctgggagcgtaggttgaaataggctggaaaggcatctgygtctggactttagcaggctttgaatgccaagaagagcagaagtgagaatttcagtaaagactttcaaacaggggagtggcataactacattttgtgattaaggaactaattctggagtcagtgtaaaggatggactggagaagagacagactggaagcagaggacctgtcaagaggccattgttgtcaacagtgtcggtgagaagctctatggaaacaaagcagatacgaacagggaagcaagcatgatctttggaaaaacatgtcaaggctggtagaaaaagctt

SEQ ID NO: 151611 - DNA, 501 bp, Homo sapiens
ctaggtttaaatatcaccccagcatctctactctctggcactacagcttcacttatcatctggtttcaccccactctgacatcatttcctgggtgtttgactgggtttagcagaatgacattgctgagtgcctggcctcaattcttatttaccrcctcagtttaccaccagatactatcttccatgaccaacctggggggagcttgattaatgtgacacttgattttggcatccttgagcttgttctgagccacaattaatacagctatcatagctcaataaaagagctcaatttcttctaacgtcacccccctagagcctgtgtctaaagtggaagtctctgtacacccatatttttataacttgggacctgtggacatggaaagaaatctgctgacacaggagtccatggacctcaataaagaaacactgtaaatttcagtcatcacttgacaccaacaatattgtgatcttgttataggttgaactgtgtttctccaa

SEQ ID NO: 151612 - DNA, 596 bp, Homo sapiens
tggctagctagaggtttgtaaaatgcatgaatcagtgctctgtaaawacacactaattggcgctctgtggctagctagaggtttgtaaaatagaccaatcagcactctgtaaaatggaccaatcagcactctgtaaagtggaccaatcagcaggatgtgggtgtggacaaataagggaataaaagctggcccagccagcagtggcaacccgctcaggtccccttccatgctttggaagtttgttgtttcgctcttcacaataaatcttgctgctgctcactctttgggtctgcaccacctttaagagctgtaacactcactgcaaaggtctgcagcttcattcctgaagtcaatgagaccacaaatccaccagaaggaacaaactctgggcacagttgtttgttttaggggagatccaccaaattcgtaacatgtttgaattgaaattttaaagattacaaaaacattttaattataaacattaagaaatttgtaggtaatttatgtatttcttaagtatataaaaactttatataaataaagttttggaagaaaaaactgttatacatcataaggtccaattaataaaacagaga

SEQ ID NO: 151613 - DNA, 606 bp, Homo sapiens
taaggccaccagctttgttcttctttttcaagattgttttggtgattcatagtttattgagattccatatgaattttaggaattttttctacttctgtaaaaaatgctactggaatattttaacaatattaagtcttccaatttatgaaaatgggatgtctttccatttatttgtgccttatttagtttctttcagcaatgttttgtaatttttagtgaagtcttctgcttttttggatagattaattcctaagtatttttattctactataaatggcctattttcttgattttcttttttggttgttttttgttaggttatagaaacataactaatttttgagtgttgattttgtattctgcaactttgctgaatttgtttgttttaacatttgtaatcttttggcttttctgcatataagattatgtcatctggaaacaaagataattttacttcttcctytcccatttggatgactttcattttatttcattttttgcctatttgctctggctagaactcatagtactatgttgaatagaagtggtaagtgtgggaatttttgtcttgtttctgattttagaggaaaaatgttcagtttttca

SEQ ID NO: 151614 - DNA, 599 bp, Homo sapiens
cattgacgccatctggtcctcgacttttcttttctttgctggaaagttttgattaccaattcaatctccttactatttatagggctattcaaatttttctgtttcttcataatttaatctttataggttttatstttctgggaatttgtccatttcctttaggttatccaagtttttggtggatgacttagttatttcaggctgctataacaaaatattatagaattaatggcttattgacaacagaaatgtatttctcatagttatggaggctgtaagtctgaaatcatggtgtcagcatgatcaggttctggtgaggaccctcttctgggtcatagactgccaatttctcattgtatgctcacataatagagaaacaaacctctctttcattattatgaaagtagcatcactttcataagggcactaatttatgagggctcaatccttatgacctgactaccttccaaagcccccaccttctaatactatcacgttgggggtaagtatgtcatcatataatttgaggggatacattcagtgcataacaatgtataattattcagagttgtctcttataatcctttttacttctgtgt

SEQ ID NO: 151615 - DNA, 599 bp, Homo sapiens
cattgacgccatctggtcctcgacttttcttttctttgctggaaagttttgattaccaattcaatctccttactatttatagggctattcaaatttttctgtttcttcataatttaatctttataggttttatctttctgggaatttgtccatttcctttaggttatccaagtttttggtggatgacttagttatttcaggctgctataacaaaatattatagaattaatggcttattgacaacagaaatgtatttctcatagttatggaggctgtaagtctgaaatmatggtgtcagcatgatcaggttctggtgaggaccctcttctgggtcatagactgccaatttctcattgtatgctcacataatagagaaacaaacctctctttcattattatgaaagtagcatcactttcataagggcactaatttatgagggctcaatccttatgacctgactaccttccaaagcccccaccttctaatactatcacgttgggggtaagtatgtcatcatataatttgaggggatacattcagtgcataacaatgtataattattcagagttgtctcttataatcctttttacttctgtgt

SEQ ID NO: 151616 - DNA, 599 bp, Homo sapiens
cattgacgccatctggtcctcgacttttcttttctttgctggaaagttttgattaccaattcaatctccttactatttatagggctattcaaatttttctgtttcttcataatttaatctttataggttttatctttctgggaatttgtccatttcctttaggttatccaagtttttggtggatgacttagttatttcaggctgctataacaaaatattatagaattaatggcttattgacaacagaaatgtatttctcatagttatggaggctgtaagtctgaaatcatggtgtcagcatgatcaggttctggtgaggaccctcttctgggtcatagactgccaatttctcattgtatgctcacataatagagaaacaaasctctctttcattattatgaaagtagcatcactttcataagggcactaatttatgagggctcaatccttatgacctgactaccttccaaagcccccaccttctaatactatcacgttgggggtaagtatgtcatcatataatttgaggggatacattcagtgcataacaatgtataattattcagagttgtctcttataatcctttttacttctgtgt

SEQ ID NO: 151617 - DNA, 616 bp, Homo sapiens
ctccaccaccatctccatcattattgttctcagctggtgaccttggtctctaatccactgagaaaatggaatcaaccactgagtctctaccagctcgatggtattctaacacttggctgctactgggatgagtgtggatcaactatttgctttcctagctaacgccaaacccttcacttgtctaccagaccctatcccccatcatcaactcaaaaatgctgcttctgttttctgattctttctcctgcttcaacatgttttccccactgtatcagattattcacactggcatacagaaatgttggatgtctttcaacatttattaaaaacttcmcttgatgccattttccccttaccattaagtgtgaagtcaggtgtagatactctttactgcgttgaggaagctccctctgttcttagtttcctaagggtttttacgatgaatggctgtgggattttgccaaatgccttttctgcatcaatagagatgatcaattgatatgaccttctcttttttcaatcttccacgtcttggcaaatggcaacttaatctctccagccactcaagttaaaaaactttagtgtcacagttgactttggtttttctcccatgttc

SEQ ID NO: 151618 - DNA, 584 bp, Homo sapiens
tatttcttcctttaattaatcaatatttgatttatgtatttcagtgctctgatgttaggtgcatatgcatttgcaactattatatctttctgataaaactctttcattattatataaagtccttctttgtctcttgtgacagtttataaattaaagtctattttgtctaatataagaatgagcacctttgctctcttttggttaccacttatgtgaaacatcttcttccatcctttcactttcagcctttatgtgttgtccacctccaaggtaagcatatagttgcatctttgtttttatgttgtagacagcatatagttgcatctttgtttttaaaaatccattcagccattctgtcttttgactgggragttcaatccagttagatttaaaatatctactgttaggaagagatttactattgccattttgttaattcttttaactttgtctcataagtattccatccctcttttcctctcttgcagatttattctgtgtttcattaaatttttttttggattggcatgctttgatttatttctatttttcttttgtgtaccttctataggtatatttttgtg

SEQ ID NO: 151619 - DNA, 584 bp, Homo sapiens
tatttcttcctttaattaatcaatatttgatttatgtatttcagtgctctgatgttaggtgcatatgcatttgcaactattatatctttctgataaaactctttcattattatataaagtccttctttgtctcttgtgacagtttataaattaaagtctattttgtctaatataagaatgagcacctttgctctcttttggttaccacttatgtgaaacatcttcttccatcctttcactttcagcctttatgtgttgtccacctccaaggtaagcatatagttgcatctttgtttttatgttgtagacagcatatagttgcatctttgtttttaaaaatccattcagccattctgtcttttgactgggaagttcaatccagttagatttaaaatatctactgttaggaagagatttactattrccattttgttaattcttttaactttgtctcataagtattccatccctcttttcctctcttgcagatttattctgtgtttcattaaatttttttttggattggcatgctttgatttatttctatttttcttttgtgtaccttctataggtatatttttgtg

SEQ ID NO: 151620 - DNA, 559 bp, Homo sapiens
ctagaattaaaaatgctttgcacaccattattacagtattacagcattgtttttacctaaatatttacctttacagcaagctttctattttcttatgccttcaggttgctgtctattcttctttggtttcgacttgcaggacaccttttagcatttcttgtaatgcacgtctagtggtgatgaactccttaagcttttgtgtgtctgacaaaatctttatttcaccttcwttttgaagaacagttttgtcagttttgtcagatatatatttttggttggcaaggttttttcttttaggattttcaatatgtgatctcattctcttctggcctgtaaggtttctgctaagaaatctgctaattatcttatggtagctctgttgcacatgacaagttgcttttcttttactactgtcaagattttctctttgtctttgatttttaatagtctatttataatgtgtctcagcgtggtcctctttgggttcatcctagttgcagtcctttgagcttcttgaatttggatgtccattttgtttctcagatttgggatgttattt

SEQ ID NO: 151621 - DNA, 559 bp, Homo sapiens
ctagaattaaaaatgctttgcacaccattattacagtattacagcattgtttttacctaaatatttacctttacagcaagctttctattttcttatgccttcaggttgctgtctattcttctttggtttcgacttgcaggacaccttttagcatttcttgtaatgcacgtctagtggtgatgaactccttaagcttttgtgtgtctgacaaaatctttatttcaccttctttttgaagaacagttttgtcagttttgtcagatatatatttttggttggcaaggttttttcttttaggattttcaatatgtgatctcattctcttctggcctgtaaggtttctgctaagaaatctgctaattatcttatggtagctctgttgcacatgacaagttgcttttcttttactactgtcaagattttctctttgtctttgatttttaatagtctatttataatgtgtctcagygtggtcctctttgggttcatcctagttgcagtcctttgagcttcttgaatttggatgtccattttgtttctcagatttgggatgttattt

SEQ ID NO: 151622 - DNA, 545 bp, Homo sapiens
ttgttgaagctgagtgaggcctgtggctgccagctatcccccactttcctagtgacctgtgtgacacagcagagacagccataatccctcgggaacataatcccgttggcctggaaaccacacccccatccacaggccgggcactgtggctcacacctgtaatcccagcactttgggaggccaagacaagcagatcacttgaggtcaggagttcaagaccagcctggccaacatggtaaaaccccatctctactaaaaatacaaaaattaggtaggcatcgctaatgtaatagcacctgtaattccattacttgggaggctgaggcaggagaattgcttaaacctgggaggtggaggttgcaataagccgagatcacagctctgcactccagactgggtgacaaagcaagactctatttaaaaaaaaaaaaaaaaaaaawtaaggaccggatagattcacagttgaattctatcagacattcaaagaagaattggtaccaatcctactgacactatttcaaaagacagagaaagacaaagtcctc

SEQ ID NO: 151623 - DNA, 545 bp, Homo sapiens
ttgttgaagctgagtgaggcctgtggctgccagctatcccccactttcctagtgacctgtgtgacacagcagagacagccataatccctcgggaacataatcccgttggcctggaaaccacacccccatccacaggccgggcactgtggctcacacctgtaatcccagcactttgggaggccaagacaagcagatcacttgaggtcaggagttcaagaccagcctggccaacatggtaaaaccccatctctactaaaaatacaaaaattaggtaggcatcgctaatgtaatagcacctgtaattccattacttgggaggctgaggcaggagaattgcttaaacctgggaggtggaggttgcaataagccgagatcacagctctgcactccagactgggtgacaaagcaagactctatttaaaaaaaaaaaaaaaaaaaaayaaggaccggatagattcacagttgaattctatcagacattcaaagaagaattggtaccaatcctactgacactatttcaaaagacagagaaagacaaagtcctc

SEQ ID NO: 151624 - DNA, 545 bp, Homo sapiens
ttgttgaagctgagtgaggcctgtggctgccagctatcccccactttcctagtgacctgtgtgacacagcagagacagccataatccctcgggaacataatcccgttggcctggaaaccacacccccatccacaggccgggcactgtggctcacacctgtaatcccagcactttgggaggccaagacaagcagatcacttgaggtcaggagttcaagaccagcctggccaacatggtaaaaccccatctctactaaaaatacaaaaattaggtaggcatcgctaatgtaatagcacctgtaattccattacttgggaggctgaggcaggagaattgcttaaacctgggaggtggaggttgcaataagccgagatcacagctctgcactccagactgggtgacaaagcaagactctatttaaaaaaaaaaaaaaaaaaaaataaggacyggatagattcacagttgaattctatcagacattcaaagaagaattggtaccaatcctactgacactatttcaaaagacagagaaagacaaagtcctc

SEQ ID NO: 151625 - DNA, 593 bp, Homo sapiens
tggtagcagtactttggatgtgctggaagcacaccatattttttgttgctacttttttgcctaaatttccagctcctagactcaatttgatcactattaaaatgctttgggactctggggcttatgtccataggtttagcacaggctctgccagagagtacagctcagttgcaggttttatttyaaggcacataaattcataaaagattgatgtagaaataagaactactgctattaatttacaactgttatatatatttgctcttctccactgtccaagaaaccttcttcccttgaatagctgggagactgaaatcataatctgaaagtagctaaatgagcctgcacagagatcaaaatgaatgggattgttctaaggatttctccatgaggatatgacaaaactgtggagaatgacacttttcacagaagaaacttgtgaccagaaggctcatgcttcccaggtatggattcttcctgaagataatatatactaaacattatctgcataatttacaaagatattgcttttaatcttcacaacgaggctgtgagatagctatgttcaaaagcccaagttacagatgagcaaa

SEQ ID NO: 151626 - DNA, 593 bp, Homo sapiens
tggtagcagtactttggatgtgctggaagcacaccatattttttgttgctacttttttgcctaaatttccagctcctagactcaatttgatcactattaaaatgctttgggactctggggcttatgtccataggtttagcacaggctctgccagagagtacagctcagttgcaggttttatttcaaggcacataaattcataaaagattgatgtagaaataagaactactgctattaatttacaactgttatatatatttgctcttctccactgtccaagaaaccttcttcccttgaatagctgggagactgaaatcataatctgaaagtagctaaatgagccwgcacagagatcaaaatgaatgggattgttctaaggatttctccatgaggatatgacaaaactgtggagaatgacacttttcacagaagaaacttgtgaccagaaggctcatgcttcccaggtatggattcttcctgaagataatatatactaaacattatctgcataatttacaaagatattgcttttaatcttcacaacgaggctgtgagatagctatgttcaaaagcccaagttacagatgagcaaa

SEQ ID NO: 151627 - DNA, 578 bp, Homo sapiens
gtgacttgtagtgaagctgtatgaagaaaaaacccaatcagccagtcaagaagccaggttttcctttacagagctgtgtctaaagtaatgtaattaagttgatgtaatcagagcaattctacagagaacacactaggaagtcctgaaaggtcctacagagacctggaatcaactcctgacytcaagtgatccacccacctcggcctcccataatgctgggattacagccataagccactgcagccggcctgtttcttgaccttgctgcaggaacaccttggtatgcaggagtcaaacattagtcattatggcagttttacttcaagatggtattattcttgacatgcaactggctgttttcctacataaattttttttatccaatttagtgtcaatattgtcaacctaaatgacagaggaagctctctaaaagaaaaagacatttatttgggaatagaacattgccatgggaatacatgtgccatagtaaactatatgcatattcaaggaggattatgcatataggcttttaaagaaaaaatataggcatatatgcatataggcttttaaagaaaaag

SEQ ID NO: 151628 - DNA, 448 bp, Homo sapiens
agtgctggagtacccagcgcccccaccgcaggtgctggcccggttgctaagcccctcactgcctggggctggcagtgttggccagccgctccaagtgcagggcccaccaagmctgtacccacctggaactcgtgctagcccatgagcaccgcatgcagccctggttcccacctgtgcttctccctccacacctccccgcaagcagagggagctggctccagcctcagccagcccagagagggactctcacagtgcagtggcaggctaaagggctctcaaacgtggccagagtggacgctgaggccaaggaggcactgagagtgagcgagggccactagcacgttgtcacctctcaatcctcactctaaacaggacaccccacctgattttgggaatgtggccgatgactgctctagctacttcctgctagataagggtgaagaagggg

SEQ ID NO: 151629 - DNA, 448 bp, Homo sapiens
agtgctggagtacccagcgcccccaccgcaggtgctggcccggttgctaagcccctcactgcctggggctggcagtgttggccagccgctccaagtgcagggcccaccaagcytgtacccacctggaactcgtgctagcccatgagcaccgcatgcagccctggttcccacctgtgcttctccctccacacctccccgcaagcagagggagctggctccagcctcagccagcccagagagggactctcacagtgcagtggcaggctaaagggctctcaaacgtggccagagtggacgctgaggccaaggaggcactgagagtgagcgagggccactagcacgttgtcacctctcaatcctcactctaaacaggacaccccacctgattttgggaatgtggccgatgactgctctagctacttcctgctagataagggtgaagaagggg

SEQ ID NO: 151630 - DNA, 443 bp, Homo sapiens
gtgctggagtacccagcgcccccaccgcaggtgctggcccggttgctaagcccctcactgcctggggctggcagtgttggccagccgctccaagtgcagggcccaccaagcctgtacccacctggaactcgtgctagcccatgagcaccrcatgcagccctggttcccacctgtgcttctccctccacacctccccgcaagcagagggagctggctccagcctcagccagcccagagagggactctcacagtgcagtggcaggctaaagggctctcaaacgtggccagagtggacgctgaggccaaggaggcactgagagtgagcgagggccactagcacgttgtcacctctcaatcctcactctaaacaggacaccccacctgattttgggaatgtggccgatgactgctctagctacttcctgctagataagggtgaagaa

SEQ ID NO: 151631 - DNA, 636 bp, Homo sapiens
agaggaattattgactcattaatgagtctaagatcttacactagtttccagtgaccattcgatttttgtactccaagaattggagtgttgtggggactgctgcatttccttactaagcctygagcttttaaatgtttaacaatatcctgtaatcctttatgaggttcagccttaagggatattgcctttgataaggaaaactggtgggatcttttaacctgatttggactgggtgggcattttttgcccttccaaattgtccttccaatgcccagacttcacggttgattccctcctcaagtaagggacaacaattggctaacttgttccccatattcacgtagataatagctccagccttggataatatatccctccctaataagggtgtcggactttcaggcataacaagaaaggcatgtgaaaagagcaaagtctcccagttacaactgagaaggtgtgaggaatacctggttacaggaatctgggattcctcagatggtaacggaccttgaggacagctgtccaggacaggagattaacactgagaaggctgtgccagtgtccaggaggaggtcaatttcttggccttcaatggttaaacgtacccggggctcagtgagggtgatgacatga

SEQ ID NO: 151632 - DNA, 589 bp, Homo sapiens
aaggaaaaacagaaccaaaaattttaaaaaatggcagactttgccttaaatatcaataattacatcaaaagtaaataacctaaataaaacaattaaaagattgacagagcatttaaaaaaagaagaagaagaagaaaaaaacaagatctataggagttggggggaaggataattttatagtaggagacactgacaaattctacctcagtcagatgatcaaggctaatatcaatagtggtaagtccaaaagtaaacacaacaaaagcaaaaatcaacaaataggatctaattaaacttaagagcttctgaacagcraaagaaactaccaacagagtaaacagacaacctacagaatgggagaaaatattcacaaacaatgcatctgacatccagcatctataaggaacttaaagaaaattacagatgctggcgagggtgcagagaaactagtttacactcccactaacagtgggagtgtaaattagttcaaccattgtggaagcagtatggtgattcttcacagagctaaaagcagaactaccattcaacccagcaatcccattactggatacatacccaaaggaatata

SEQ ID NO: 151633 - DNA, 372 bp, Homo sapiens
gctgtgtcactgtggcatctaactctatgcttcatatacagcaggtgtgcaatcaatgaatgatctcaattggagagtcatctccacgagtgtgacaggtgaaacctaggagaggctttgcacaaaaagagcaaagtttgagggcagaactatagggagcmtatgtatgcatttagggatgagacatctagagatgtgagtcagagaggagaaaagaacagagtaatcgcaaagagagataatgctggggtaaggaggtcaagatgaaggcgagttttgataaaggagcagtaagtagaaaaggttgaaaatgcaaaatgaggacttgtattagtttcccagggctgccttcaaaaagtgtcataaactgga

SEQ ID NO: 151634 - DNA, 578 bp, Homo sapiens
aaagtggtaggtaaattaagagagcacaagcctaaagccagaagagatggggctgccctctcagattagctgggggtcttttcaaaggaaccaaaattgtcacattttggccagctttgtgaggccattcctcaagggaggcagagtggcatggtgagaaagaacccrggctctggagtcagacaagcttgggttcaaatcccagctctgcccactgtgtcacataaccttgagtaatttatctgagttccctcggctgtaaaatggacctgttaataatcctgccctcataaggctgagatgaggggcaagggggacaacacatggaaagtgttagcacagggcaggcctggcccctgatcagcattagcaactggccatatcttcctcttaacttcatcatcccagtgattaaaaagagggataatcatggtttatccctggaacccctttgagtcaaactaaacaagccctctactcaaaaaggaagactgagacctgctggggataggaagccaatggcttggggatgagggctgggtggtgggtaggcttggaaggtccagtgaaggaaggaa

SEQ ID NO: 151635 - DNA, 448 bp, Homo sapiens
aaggagctggtggcttcttggagagattgtgactataggatgccagagccatgtcataatgaccatgatttttaaaacccaaatttttttcatcaaagtgagtgaacagccacaaaagtaaccagaggagtagtatgatcagaattagttgttagggaaattgttcagatggaaggcagaaggataaaggttaaattctggctgagagaacaaagaaacaaggagacaggttaggaagccactataatatagataagcatttcttaacagtacaccattgaatcttgygctacatagattgttgtttcggggaaggggctgtcctatacattgtaggatgtttagcagcatctgtggccttacccactagatgccaataacccaagcccagttgtataaccaaaaatgtctccagacactgtgaaataccctcttggtgaaaacattg

SEQ ID NO: 151636 - DNA, 448 bp, Homo sapiens
aaggagctggtggcttcttggagagattgtgactataggatgccagagccatgtcataatgaccatgatttttaaaacccaaatttttttcatcaaagtgagtgaacagccacaaaagtaaccagaggagtagtatgatcagaattagttgttagggaaattgttcagatggaaggcagaaggataaaggttaaattctggctgagagaacaaagaaacaaggagacaggttaggaagccactataatatagataagcatttcttaacagtacaccattgaatcttgtgctacatagattkttgtttcggggaaggggctgtcctatacattgtaggatgtttagcagcatctgtggccttacccactagatgccaataacccaagcccagttgtataaccaaaaatgtctccagacactgtgaaataccctcttggtgaaaacattg

SEQ ID NO: 151637 - DNA, 580 bp, Homo sapiens
ttatgctgtcatgtattcatgcattcagtgagtacttatattatacccagagtctggttcccatagtatccagtccttcttaagctgttccaccaaatacagttctggtggggccaagccatgaaccctgctgccatggaaggagggcacagagaggaatccagttcctcccatgtgctctgggttggcccaacctaccagcaaaggcaaaacagcccatgcctggcagagaccagcgaccctgggggaggtgctgaccacaacagattttctttgaagccttatttttctttctaaaaattcatgtgaattttacattttamcccatataaaatctattttcactttaatttaataattatgtttctacccccactcccaaattttaaacaaaactggtgtttctaaaagatgtaacatttatcctatggcttcctgtactttttagtatacccccatatcctcccctcttcctaacgcccaaggatatatacaggtaccccggttggagaagcacagtttctagtatgtgggaggtaatttgagagcatttcgctggacagcagagttaataaaaatt

SEQ ID NO: 151638 - DNA, 442 bp, Homo sapiens
tattctcacaaccgccctagaacataggtactactattatctccattaaatgaagcttggaaggagtcaagctgcttgttcaaagctccatcatttataagcagcaaagctggagtttcaacccaggccactgtgtttggaaccacctatactgttagtcaccacaccatctaagacagagtgaacaggccttcaggatcagctgttagtggtcttgggcccctccyaacccctctacatgggcatgagttcctgtgaaattaatgaaggtccagtgtaaggtcaagagaaaggagccacacccagcaacagcctgcacctatggttacctaatctctctcttctcctatccccagagtccacaaccagctcactgcatgcctcctttctgcccttgctccagttgtaatgaatgctgtttcactttaggtttctctaaagt

SEQ ID NO: 151639 - DNA, 442 bp, Homo sapiens
tattctcacaaccgccctagaacataggtactactattatctccattaaatgaagcttggaaggagtcaagctgcttgttcaaagctccatcatttataagcagcaaagctggagtttcaacccaggccactgtgtttggaaccacctatactgttagtcaccacaccatctaagacagagtgaacaggccttcaggatcagctgttagtggtcttgggcccctcccaacccctctacatgggcatgagttcctgtgaaattaatgaaggtccagtgtaaggtcaagagaaaggagccacacccagcaacagcctgcacctrtggttacctaatctctctcttctcctatccccagagtccacaaccagctcactgcatgcctcctttctgcccttgctccagttgtaatgaatgctgtttcactttaggtttctctaaagt

SEQ ID NO: 151640 - DNA, 557 bp, Homo sapiens
ctgttggaggattattttgctccacacgaagacaggagagcaaagtattaaccaacaggatgtggagtgcagcagtcccacggagatctgttaactctgtgactctgagcatgtacagaacataatctctgagcccattctctcttctgagagaaaaaataaacacacctattcaatgtttttgctgcttaataagtgataatctctcttattactaaacatggggaaaaggtcttatttaaaaatattctgtttataggagtcacacagtggaatggataatactgagaagaaaacatttttccccttcctgattctgagatctcataggtaayatttgctacattggtatctctccattccctgtccttgctttccttttgctgggaaatcattgcatctgaaaaaaaaaaaaaaaaaaaaaaaaaagtaagtgtttccctagccatcatattcagagaaactaaaagttttttaaagtgagtgagttactttgtggtatttaaaattatacatgcttattacagaaaactgagaaatagaattatctcaaaaga

SEQ ID NO: 151641 - DNA, 585 bp, Homo sapiens
gtgataaattctatgtcaggaaatgcagggtgctatgggaatcttaggaaggtcacataactattttaacaagtgaaagaaggccagttatttagctttagtaggaaacaaagctctccttaataaaatataaagtaagtgccatattgtgggtttgaagatttctttgttctatatgatatatattttctgtgctgagaagaggatagtacactaaaaatcgatatgtcttgtaactcagtgttttatggtcaacttataacaccttcaacttatagaagaattaagattatcttctaaggcaggctttccaacatttagawgcatgcatgcatatcctagcttccagatacctgcatccatttccctatggctggttatttttttctgaaacggattttttttccagccttctgacagtgtagtggcagaaatacataggttcttcatgctgtgtttttactttccattttcgcaataaaactatatcactgcaaaggaaatcaaatctaatctgcaatatatttagcatgaaagcaataagaagcattaattcactccagaaagagcaaaatacagtcgggt

SEQ ID NO: 151642 - DNA, 391 bp, Homo sapiens
taaaacctacaactgtgagtgaaagatgaaaaaagaatttatatagaaaaaagaagagatagtatacagaagagaataggaacaagaaataatagaaggtggagggaaaagaagcagcccacaaaaaggcaggttctgaacacaagctttggaactacaattgggtttaaatcccagctccacgactagtcttacaaacatgagcaagttatttatcctgtctgagccaccattttcccaactgaaaaatggrgaaagatactaaaactcatggagtttgagtgacaattaagtgatataacataaaacacaaagcacagatcatgaccaaagtcagtatccaatatatgacgatggatctatagatttaggaagagagtgtatgtatata

SEQ ID NO: 151643 - DNA, 577 bp, Homo sapiens
gagtttgagtgacaattaagtgatataacataaaacacaaagcacagatcatgaccaaagtcagtatccaatatatgacgatggatctatagatttaggaagagagtgtatgtatatagagggtcgaacgccgtgcctggcttgcagtaggccaactcaataaatggtagtttcaaagaaaaactatgcttttctaaactgtgcagtgctggtgtttctcttagactgtaatgtcttgagaccaagtcaatagctagttaatttcagtgagtcttctttatgacagttgcaattctctacctgtagtcatactgcaggaaaggaatgtgcagctaaaagagttttccattaaagactgatgtcctggaagkgagatctacaaatcacttggaaagttcctggcaccatcacctgggtctggccatttacaatgtgtctgtaaatcttgcacagggaaaggatgagagtgtagggtttttttccccactctgacagacttgtttctataagatattaaggatactggtgaaagttaaggaaggccaaaaggaggtcagcctacccatgtggaagtgat

SEQ ID NO: 151644 - DNA, 577 bp, Homo sapiens
gagtttgagtgacaattaagtgatataacataaaacacaaagcacagatcatgaccaaagtcagtatccaatatatgacgatggatctatagatttaggaagagagtgtatgtatatagagggtcgaacgccgtgcctggcttgcagtaggccaactcaataaatggtagtttcaaagaaaaactatgcttttctaaactgtgcagtgctggtgtttctcttagactgtaatgtcttgagaccaagtcaatagctagttaatttcagtgagtcttctttatgacagttgcaattctctacctgtagtcatactgcaggaaaggaatgtgcagctaaaagagttttccattaaagactgatgtcctggaagggagrtctacaaatcacttggaaagttcctggcaccatcacctgggtctggccatttacaatgtgtctgtaaatcttgcacagggaaaggatgagagtgtagggtttttttccccactctgacagacttgtttctataagatattaaggatactggtgaaagttaaggaaggccaaaaggaggtcagcctacccatgtggaagtgat

SEQ ID NO: 151645 - DNA, 577 bp, Homo sapiens
gagtttgagtgacaattaagtgatataacataaaacacaaagcacagatcatgaccaaagtcagtatccaatatatgacgatggatctatagatttaggaagagagtgtatgtatatagagggtcgaacgccgtgcctggcttgcagtaggccaactcaataaatggtagtttcaaagaaaaactatgcttttctaaactgtgcagtgctggtgtttctcttagactgtaatgtcttgagaccaagtcaatagctagttaatttcagtgagtcttctttatgacagttgcaattctctacctgtagtcatactgcaggaaaggaatgtgcagctaaaagagttttccattaaagactgatgtcctggaagggagatctacaaatcacttggaaagttcctggcaccatcacctgggtctggccatttacaaygtgtctgtaaatcttgcacagggaaaggatgagagtgtagggtttttttccccactctgacagacttgtttctataagatattaaggatactggtgaaagttaaggaaggccaaaaggaggtcagcctacccatgtggaagtgat

SEQ ID NO: 151646 - DNA, 542 bp, Homo sapiens
ggctagttctagtatgtcgaaaatgtgtttctaatggaaggagagaaacattggctttctgtttccatgccatatggattttgcttcatattctggtatatgttggtctacctattggaaacgctgtatcatgctttgttgagcaaatttagttaaaattctgcttagatgacacattctgagaaccttttcttatcactcattgattaactatttcttcttctgtatgacttctgcccttcatagatatctcattgtaaaaatgtttacagtatgcaaatatgcactttctcctatgtgagtgtcatctcttggagggcaggggccagtggtttaaatatcttagtaactccagccccttgtctagaacctggctgcctgacacatcccaggcaaccaatgaatctttaattcattgagcttatgggtcattactggggcttgttttctgatcagtaacttccatctacatgcatacacacacacacacayacacacacacacacacacacacacacacacacataatgtatgatggggat

SEQ ID NO: 151647 - DNA, 609 bp, Homo sapiens
tgatcatgtcctctattgagttggattccaaatccatttgcactaattattttctacaaaaatcctaatgcataatgagcagaggccctagaagtcctctactgatttcaaattagttctttgcataacctagtagcaaaaagggatctaggcatgtatttttgatcttctattagtaaagtctagttgaaaaataaataaaagtcagctctttactttgttaacatttttaggattcttgagcaatgccctgcttgggtgttgtatgccatgtacatgcctgcacgcacccacacatgcacgtgtagtttcggggacyggacacacacccattgctctagcaacagtgagctcacacttcagaaatgggacctggtgtgggctgaatgtctttcccattacgcttataattcagataatttcatctgaaaaattcagaaaataaaagtattctctccttcaatcatccaattatccttgatttttcacttcctttgaaaagtatacagagagccctttaaatgaaaagatgggagaatcactctaataacttctcatttgagaaaatcctatctgggtcagtgtgaatcaggtttggaatggtgacaa

SEQ ID NO: 151648 - DNA, 609 bp, Homo sapiens
tgatcatgtcctctattgagttggattccaaatccatttgcactaattattttctacaaaaatcctaatgcataatgagcagaggccctagaagtcctctactgatttcaaattagttctttgcataacctagtagcaaaaagggatctaggcatgtatttttgatcttctattagtaaagtctagttgaaaaataaataaaagtcagctctttactttgttaacatttttaggattcttgagcaatgccctgcttgggtgttgtatgccatgtacatgcctgcacgcacccacacatgcacgtgtagtttcggggactggasacacacccattgctctagcaacagtgagctcacacttcagaaatgggacctggtgtgggctgaatgtctttcccattacgcttataattcagataatttcatctgaaaaattcagaaaataaaagtattctctccttcaatcatccaattatccttgatttttcacttcctttgaaaagtatacagagagccctttaaatgaaaagatgggagaatcactctaataacttctcatttgagaaaatcctatctgggtcagtgtgaatcaggtttggaatggtgacaa

SEQ ID NO: 151649 - DNA, 508 bp, Homo sapiens
aagaaaatattttattgtcagtgaatacactctgaatgcaaggcagcgtaggagagtcagtacaaaggcagattcaaagcataatgaattgttagtctctagatgtaatactacttcgaacttttcaatatattcatcatgctttcctgaaactcctagtctctaggtaaaagacaagatgggaaaaaagaggagaaagggattaacataaactaagcgtctattgatggcaagatattatgctaaacacttcaacaagtgactttatcagcccaacctctgtaagaaagtatagttattattctggagtcagcttgaacctggtttaaaawtatggctgtgccacttagtagctatagacatgagcatgtcactacagctctctagatcaaatgtcctcatctgcaaaatgggaataacaatagtacccactccacaggctgccgtctgggcatagtgagatggtacctgcctagcagaaggcctggcacataatacatacttaata

SEQ ID NO: 151650 - DNA, 508 bp, Homo sapiens
aagaaaatattttattgtcagtgaatacactctgaatgcaaggcagcgtaggagagtcagtacaaaggcagattcaaagcataatgaattgttagtctctagatgtaatactacttcgaacttttcaatatattcatcatgctttcctgaaactcctagtctctaggtaaaagacaagatgggaaaaaagaggagaaagggattaacataaactaagcgtctattgatggcaagatattatgctaaacacttcaacaagtgactttatcagcccaacctctgtaagaaagtatagttattattctggagtcagcttgaacctggtttaaaattatggctgtgccacttagtagctatagacatgagcatgtcactayagctctctagatcaaatgtcctcatctgcaaaatgggaataacaatagtacccactccacaggctgccgtctgggcatagtgagatggtacctgcctagcagaaggcctggcacataatacatacttaata

SEQ ID NO: 151651 - DNA, 508 bp, Homo sapiens
aagaaaatattttattgtcagtgaatacactctgaatgcaaggcagcgtaggagagtcagtacaaaggcagattcaaagcataatgaattgttagtctctagatgtaatactacttcgaacttttcaatatattcatcatgctttcctgaaactcctagtctctaggtaaaagacaagatgggaaaaaagaggagaaagggattaacataaactaagcgtctattgatggcaagatattatgctaaacacttcaacaagtgactttatcagcccaacctctgtaagaaagtatagttattattctggagtcagcttgaacctggtttaaaattatggctgtgccacttagtagctatagacatgagcatgtcactacagctctctagatcaaatgtcctcatctgcaaaatgggaataacartagtacccactccacaggctgccgtctgggcatagtgagatggtacctgcctagcagaaggcctggcacataatacatacttaata

SEQ ID NO: 151652 - DNA, 503 bp, Homo sapiens
ctaccaacaatttagtttccctcacctcggtaattgaccacatccaatgtggccacgtgtgcctcatggcctgattggctttgtaataaagtcagtgccttggtgtaagagacgaagttgaggatagcatactgagttacaaatttcccttgcaaccattaataattcattcttccattcatttctttaatgctactgccgttcctttgaacaacagcaataacaagccatgaaatagaagcctttccatcggtgctgaggactggagtgggcggtgggcacaggtgctcctgcactcagaggccttgctcactggtcaccagccactctgtccacagtctgtctccaactgtgggtgggcagaggtgtagggtggctgagtcaggtccyagtctgatgggtctcactgagctaaaaccaaggtgtcacagggctacattcctttctgggggctcctgggaaagctcatttccttgcttcttctagtatctagaggccaccca

SEQ ID NO: 151653 - DNA, 540 bp, Homo sapiens
accaacaatttagtttccctcacctcggtaattgaccacatccaatgtggccacgtgtgcctcatggcctgattggctttgtaataaagtcagtgccttggtgtaagagacgaagttgaggatagcatactgagttacaaatttcccttgcaaccattaataattcattcttccattcatttctttaatgctactgccgttcctttgaacaacagcaataacaagccatgaaatagaagcctttccatcggtgctgaggactggagtgggcggtgggcacaggtgctcctgcactcagaggccttgctcactggtcaccagccactctgtccacagtctgtctccaactgtgggtgggcagaggtgtagggtggctgagtcaggtcccagtctgatgggtctcactgagctaaaaccaaggtgtcacagggctacattcctttctgggggctcctgggaaagctcatttccttgcttyttctagtatctagaggccacccactctccttggctcatggctccttccccatcttcgaagcc

SEQ ID NO: 151654 - DNA, 582 bp, Homo sapiens
gagatgccaacagggaggtcagagggaggggtgccacagctgggcctgtgcctcaagagtcagagcagaatgggtggrtctgattcagaaggtagcagggatgtgaaatggagcctgctttccggtccctgtaaagaaagggaactccaggtggctcgtccccatgtgtggggttgttccccaatcacatggggaatcagaaagcaatctggccatgaggcaggggccagggagctgtggcttgtctggaagctgcacagcaagtccagtgtgcggttatttgtggaggcttgagggagaattgatggaaactgtggggggcagccccaaccccaagccacctggaggctgcctacttttgacaactacaatatccctgccaacaagctcaggggcaagggtgttaccaggtctgctctgtgcctgaaggacttcagctcagagaggctgagctcctactcagagtcacacagcactgctggctgccctgagcactggccacagccttcctgactccctttccagggctcccctcccagagtcctgccctcccactgcagttctcaggcctccccttaaggg

SEQ ID NO: 151655 - DNA, 616 bp, Homo sapiens
caattaactggtctttgtaaagcatttagcaaaagtcagcctgtcatagaagccttaatctagagagcacgtctaggggaacctgtcgtaaatgaaaagaagtgggggggaattgcctcccaggactaagcagagagtctgcaccacccaacccagtgcacgtgaattcccttgaacaatgctcctttagaccctcggcctcartgtgttccatgttagactcatccgcatttctctcaaaacagtttctgttaggattttcccattcccatggaggacactgtcattaacccgggctctcaagctcacaacctggaggcaaatgtgaccgagccctctcttttgtcctctgcattccaatcagtagatttgagtagattccaagttgtggcatttctcacacctgcttctttatagttgtcctcatcatcattctcaggtcttggagtctccagcatctgtcacctggtctatctccccatctaaccattctctgagacagagaagcccagactcccttcctggcctgcagggccgtggcaggcattatctcttctggcatcatctcacgccactggccactgatgctcttgctccagccaggagagatatcccc

SEQ ID NO: 151656 - DNA, 399 bp, Homo sapiens
caaacaccccatggtctgcaaggtctgattgactgtcttgctaggacctcatttccctctcctccctctccctggtagtttctgggtcacagcacctttccccccttctcagrgcctttgcacttgctattctctctgcgtggaatgttctctcccccacttcccctccactgcccatattttgatctttgcctgattctatcctttttgtccttcaggctcctcagagaagctttctctgttgccttgtgcaaagcagttcccaggctctctgtttattactttgttgtagcactcatcagcaactgaaatgatatgacttcggtgtttattgtccgtctcctctgccattcctctggaatggcagttccacaaagaccagggcctggtctgtcctgc

SEQ ID NO: 151657 - DNA, 404 bp, Homo sapiens
ttgccaacagaaccaaacaccccatggtctgcaaggtctgattgactgtcttgctaggacctcatttccctctcctccctctccctggtagtttctgggtcacagcacctttccccccttctcagggcctttgcacttgctattctctctgcgtggaatgttctctcccccacttcccctccactgcccatattttgatctttgcctgattctatcctttttgtccttcaggctcctcagagaagctttctctgttgccttgtgcaaagcagttcccaggctctctgtttattactttgttgtagcactcatcagcaactgaartgatatgacttcggtgtttattgtccgtctcctctgccattcctctggaatggcagttccacaaagaccagggcctggtc

SEQ ID NO: 151658 - DNA, 415 bp, Homo sapiens
gccaacagaaccaaacaccccatggtctgcaaggtctgattgactgtcttgctaggacctcatttccctctcctccctctccctggtagtttctgggtcacagcacctttccccccttctcagggcctttgcacttgctattctctctgcgtggaatgttctctcccccacttcccctccactgcccatattttgatctttgcctgattctatcctttttgtccttcaggctcctcagagaagctttctctgttgccttgtgcaaagcagttcccaggctctctgtttattactttgttgtagcactcatcagcaactgaaatgatatgacytcggtgtttattgtccgtctcctctgccattcctctggaatggcagttccacaaagaccagggcctggtctgtcctgctcctc

SEQ ID NO: 151659 - DNA, 404 bp, Homo sapiens
ttgccaacagaaccaaacaccccatggtctgcaaggtctgattgactgtcttgctaggacctcatttccctctcctccctctccctggtagtttctgggtcacagcacctttccccccttctcagggcctttgcacttgctattctctctgcgtggaatgttctctcccccacttcccctccactgcccatattttgatctttgcctgattctatcctttttgtccttcaggctcctcagagaagctttctctgttgccttgtgcaaagcagttcccaggctctctgtttattactttgttgtagcactcatcagcaactgaaatgatatgacttcggtgtttattgtccrtctcctctgccattcctctggaatggcagttccacaaagaccagggcctggtc

SEQ ID NO: 151660 - DNA, 400 bp, Homo sapiens
caaacaccccatggtctgcaaggtctgattgactgtcttgctaggacctcatttccctctcctccctctccctggtagtttctgggtcacagcacctttccccccttctcagggcctttgcacttgctattctctctgcgtggaatgttctctcccccacttcccctccactgcccatattttgatctttgcctgattctatcctttttgtccttcaggctcctcagagaagctttctctgttgccttgtgcaaagcagttcccaggctctctgtttattactttgttgtagcactcatcagcaactgaaatgatatgacttcggtgtttattgtccgtctcctctgccattcctctggaatggcagttccacaaagrccagggcctggtctgtcctgct

SEQ ID NO: 151661 - DNA, 380 bp, Homo sapiens
gaattcagaggttaggatatttttgttttttgttgttcttttttttgtttgtttgtttttgtttttgtttttgttttttgagatggagtcttgctcctttgcccatgctggagtgcagtggtacaatcttggttcattgcaatctctgcctcctggattcaagtgattctcccacctcagcctcccaagtagctggattacaggtgcccatcaccatgcccagctaattttgtatttttagtagagacaggatttcaccatgtgggccagactggtctcaaacttgtaatctcaagtgatccacccaccttggcctcccaaagttctaggattacaggcatgwgccactgaacccagccagtggctaggattttttaaag

SEQ ID NO: 151662 - DNA, 574 bp, Homo sapiens
aattgtacaaatctgtctcttaaagctagtacaaaatagctgaacagactctctaaaataataaactccttacttctaggaaggtttttgtaaaaataccagtaaataaggtgactaactgtgaaacacaatacagaatcttgttcatctttgtgaaaagaaaaatataagtaaaagaaatttcatttggaggattcataaaatatattagttacatcacaggatataaaggatctaaaatggtttttactgcttaattctgggatttttagctacccaactttcatactttccaatataaacccccttttcttaaccatccctgtatttactctccccagttgtgtgtgtgtgtgtktttttttaaactttatgttctggggtacatgtgcaggatgtgcaggtttgttacataggtaaatgtgtgccatggtggtttgctgcacctatcaacccatcacctaagtattaagcctggcatgcattaactatttttcctgatgttctctccaccccctgcccctcccccaacaggcctagtgtgtgttgttcccctccctatgtccatgtgttc

SEQ ID NO: 151663 - DNA, 505 bp, Homo sapiens
attttattcctttttttaaaaaaaaaaaaaaaaagcttaaagcaaaaatagcaaaacattcagatttgctatatcttatcatatagatagtaggtacatacgtgttcattatattattttctacttttctaaatgtgtgaaattttcatagtaataaaaatatgaaaarcaaaagttaattgcaaaacttcatactctgagttaattttgtttaaaataattgtgtgtgtgtgtgtgtgtgtgtgtgtgtgtgtgtgtgttactttgctaggattgccataacaaataccacaggctgggtagcttaaatgaagaattttttttcatatttttggaagctagaagtctgagatcaagatcagcagggttgtttcttctaaagcttctccttggcttgtagatggccatctgctccctatgtcatcatagggtctttcctctgtttgcatctgtgtcttaatctcttcttataaagaaactagccataatgaattaggccccaccc

SEQ ID NO: 151664 - DNA, 572 bp, Homo sapiens
aggattttaggaattttaaaatttgtaaccccatctattgaaaatccacatcatcagcaattattttctaagcataggttgggtgcacatttccccacttggtacttgggttatgtctagtgacctaaggaagcccagaacaaaatgtgatacgcattcatgcaagccaccctcagctgtcttccaggattactaagtattcagcactgtaaactcttacttgtttctttaaaattgttaaagcagaaatgccagcatgtcaatagcaaagtaatatccagatcatatattatttctttcaagaggctggaaaaaagcaccgygcatcccccaatgaggacaagactaatcacagagccagtgccaagctgtggagatttccctggagagctcatcttttcatcacatgtcacagcttctctcagtcaacatgctctccagagcagcttcccttccatccacaggcatcaccattctggggaaggagctctgtagcaaaatccagctaggagaagaccatcctggtacaacagtctacagtagcagcagactaagaaaacagagagagacac

SEQ ID NO: 151665 - DNA, 365 bp, Homo sapiens
gaattcatggtgactacctgccttgagtacttgagcaaaacaatgtggggtgccaacagcccacgtgtcgttccttctcatgctgtttgttgtcttcttcatccatccacatacatagytatgacaggctttggaagcatgagtgtgctcccacagatgtgtgcatacaccaacaccaacacaaacacacacacacacacacacactgacacatttagaaggaagagtgtcaatacagtttgtcagtctgcttttgaaattcctgcttagctagatccagatacataacccttatgatcacagaagcctgcaaaattttgcattattgcctttctcttagattgttcaggtgaggttaattctgt

SEQ ID NO: 151666 - DNA, 508 bp, Homo sapiens
tagcagagatcagcagagttgggaaggtgtaatattagcaggagctaataataatgttcacaatatttcatgaaygcttgctaagagttaggacctgtgcagagagcattacattcagtctgtcatgtcatcctcactttaatccgagaggttggtcctattattatataagagtaactcttataatttccacttataaggtggaaattaagagattaaattactttccaaggtcacagagtcagagagtcagagagttaggctgaatcctgggttctgccagcacagtctgtgtacctttggccttctaccatttttgtaacttccttcaaataagaagaaaacaataaactacaataaagtgaaaacaccttacccgtatgcctgatttccttgctcttgtgaatcctgagcctggccttttctgtttcaggactccgggtgtcattaaaagcatccatcacagaagagatatttccctaaagggccttcgttccctcacttgtaa

SEQ ID NO: 151667 - DNA, 508 bp, Homo sapiens
tagcagagatcagcagagttgggaaggtgtaatattagcaggagctaataataatgttcacaatatttcatgaatgcttgytaagagttaggacctgtgcagagagcattacattcagtctgtcatgtcatcctcactttaatccgagaggttggtcctattattatataagagtaactcttataatttccacttataaggtggaaattaagagattaaattactttccaaggtcacagagtcagagagtcagagagttaggctgaatcctgggttctgccagcacagtctgtgtacctttggccttctaccatttttgtaacttccttcaaataagaagaaaacaataaactacaataaagtgaaaacaccttacccgtatgcctgatttccttgctcttgtgaatcctgagcctggccttttctgtttcaggactccgggtgtcattaaaagcatccatcacagaagagatatttccctaaagggccttcgttccctcacttgtaa

SEQ ID NO: 151668 - DNA, 508 bp, Homo sapiens
tagcagagatcagcagagttgggaaggtgtaatattagcaggagctaataataatgttcacaatatttcatgaatgcttgctaagagttaggacctgtgcagagagcattacattcagtctgtcatgtcatcctcactttaayccgagaggttggtcctattattatataagagtaactcttataatttccacttataaggtggaaattaagagattaaattactttccaaggtcacagagtcagagagtcagagagttaggctgaatcctgggttctgccagcacagtctgtgtacctttggccttctaccatttttgtaacttccttcaaataagaagaaaacaataaactacaataaagtgaaaacaccttacccgtatgcctgatttccttgctcttgtgaatcctgagcctggccttttctgtttcaggactccgggtgtcattaaaagcatccatcacagaagagatatttccctaaagggccttcgttccctcacttgtaa

SEQ ID NO: 151669 - DNA, 508 bp, Homo sapiens
tagcagagatcagcagagttgggaaggtgtaatattagcaggagctaataataatgttcacaatatttcatgaatgcttgctaagagttaggacctgtgcagagagcattacattcagtctgtcatgtcatcctcactttaatccgagaggttggtcctattattatataagagtaactcttataatttccacttataaggtggaaattaagagattaaattactttccaaggtcacagagtcagagagtcagagagttaggctgaatcctgggttctgccagcacagtctgtgtacctttggccttctaccatttttgtaacttccttcaaataagaagaaaacaataaactacaatmaagtgaaaacaccttacccgtatgcctgatttccttgctcttgtgaatcctgagcctggccttttctgtttcaggactccgggtgtcattaaaagcatccatcacagaagagatatttccctaaagggccttcgttccctcacttgtaa

SEQ ID NO: 151670 - DNA, 575 bp, Homo sapiens
tcagatagatttgccataagtcagatatcctcgttcaaataatggactatgaacatcatccatcttggggagtcaagaagtacagaacttggtcttattaaggtgctctgttatgaggccctgtcactgatacaatgaattgtttttcaacagtgctgtggctgccaccataagtcttcagcttgaatgaaaaggcaattaagaaaggaacttggaacaagaaacccaaactaaatactcttctttttccagttytaacataattaaaatggtgtataactgccagctggctaaaactaaataaaaatgtgcaattaagggacaccagtgagaccagctatatctcaaaaaactctctttcctgctagtgccacttcattcttacttttctttcttgcaggagtttctgctaagctgtagtaaaccctgcaagtgggcaatggaaaggttgtatttcctgatttcccatttcacaaccctcaactactctagaggtggttggccctgagggatttcatgtacttcctgctgctttgcacagagccacagagcccattagtctgaaagtgttcaaa

SEQ ID NO: 151671 - DNA, 575 bp, Homo sapiens
tcagatagatttgccataagtcagatatcctcgttcaaataatggactatgaacatcatccatcttggggagtcaagaagtacagaacttggtcttattaaggtgctctgttatgaggccctgtcactgatacaatgaattgtttttcaacagtgctgtggctgccaccataagtcttcagcttgaatgaaaaggcaattaagaaaggaacttggaacaagaaacccaaactaaatactcttctttttccagttctaacataattaaaatggtgtataactgccagctggctaaaactaaataaaaatgtgcaattaagggacaccagtgagaccagctatatctcaaaaaactctctttcctgctagtgccacttcattcttacttttctttcttgcaggagtttctgmtaagctgtagtaaaccctgcaagtgggcaatggaaaggttgtatttcctgatttcccatttcacaaccctcaactactctagaggtggttggccctgagggatttcatgtacttcctgctgctttgcacagagccacagagcccattagtctgaaagtgttcaaa

SEQ ID NO: 151672 - DNA, 469 bp, Homo sapiens
agaattcttagacatagatatggcgattaattaaatgtctcattcagtgaacarattgtaataattgatgaaattgaaggcttatttaaatgctattcagaatctatatcctggacattttcagtagggatttaataaagagtgttttacaatttaccagacttgaattgttagagagaaaataaaagagtcatcaccttatatattaatcattagatttcatagttgatcatagttattttatttattaccattctctgcataaaatacagtattcaaatgcatatagacagtcacatgtattcaggggcttgtaacctaggaaaaggaagctcggtttctctgtgtgccctttgtttactttcatgaacccaaagatgcatttctaattatgtggggacatcacccaataatgcaactgctgttaaaaggtcacaaattaaatggcaaaaccgaaggcaacatggag

SEQ ID NO: 151673 - DNA, 532 bp, Homo sapiens
ctgtttaaataactcaacaaaactgtacattttgacccagaagctgtttactcaggtaacccaaatgaaagtatcatcagcattattagcagcatcatcattaaaatgtcaaatctatcatcattaaaacagcaagtctcatgagttttgaaaagattgtgagagaggagacatttagagattttctattgcaggacatacaatattttaattgaccccaaatataaccttggtttattgagatgttagcactacttaatataagattatatttcattatgaatagcccttgctggttcagagctattctgaatatgcataactagacatcttcttgcagatygaaactaatacattaatccgtacctttgaatacaatccttcagctaggtacttgtcaccttactgagggagggtccctgctcgatacttgtccacaaagggattttgaaaacttggtcaaatgccatgggaaaatccaggtacaatttatctacaaattcttaatctacaaacaataccaagaacagta

SEQ ID NO: 151674 - DNA, 419 bp, Homo sapiens
cctgtagccactctgtccagcagcaatgtcctaactgttctagcctagacctcatgtctgcgtgcagtggctgccgctgctttaatacttttagaggcccgcaaaatargtagaggcctttcaaacagggtctgagaaggccaccgcagtcatttcttccgttctgtcaaacataattcctcagtttagccttcccacctcaatacagtttgataacagacgaacctttattagtcaaatcagccaagcagtttttcaggctcttagtattcagtgaaacctttatatcccttatggtcctccatcttcaagaaaagtagaatggactaaaggtcttttaaaaacacacctcaccaagctcagccaccaacttaaaaaggactggacaatacttttaccgctttcccttctcagaattc

SEQ ID NO: 151675 - DNA, 407 bp, Homo sapiens
gaatttttacacaagagccaggaccacaccctgtagccactctgtccagcagcaatgtcctaactgttctagcctagacctcatgtctgcgtgcagtggctgccgctgctttaatacttttagaggcccgcaaaataagtagaggcctttcaaacagggtctgagaaggccaccgcagtcatttcttcygttctgtcaaacataattcctcagtttagccttcccacctcaatacagtttgataacagacgaacctttattagtcaaatcagccaagcagtttttcaggctcttagtattcagtgaaacctttatatcccttatggtcctccatcttcaagaaaagtagaatggactaaaggtcttttaaaaacacacctcaccaagctcagccaccaacttaaaaa

SEQ ID NO: 151676 - DNA, 407 bp, Homo sapiens
gaatttttacacaagagccaggaccacaccctgtagccactctgtccagcagcaatgtcctaactgttctagcctagacctcatgtctgcgtgcagtggctgccgctgctttaatacttttagaggcccgcaaaataagtagaggcctttcaaacagggtctgagaaggccaccgcagtcatttcttccgttctgtcaaacataattcctcagtttagccttcccacctcaatacagtttgataacagacgaacctttattagtcaaatcagccaagcagtttttcaggctcttagtattcagtgaaasctttatatcccttatggtcctccatcttcaagaaaagtagaatggactaaaggtcttttaaaaacacacctcaccaagctcagccaccaacttaaaaa

SEQ ID NO: 151677 - DNA, 419 bp, Homo sapiens
cctgtagccactctgtccagcagcaatgtcctaactgttctagcctagacctcatgtctgcgtgcagtggctgccgctgctttaatacttttagaggcccgcaaaataagtagaggcctttcaaacagggtctgagaaggccaccgcagtcatttcttccgttctgtcaaacataattcctcagtttagccttcccacctcaatacagtttgataacagacgaacctttattagtcaaatcagccaagcagtttttcaggctcttagtattcagtgaaacctttatatcccttatggtcctccatcttcaagaaaagtagaatggactaaaggtcttttaaaaacacacctcaccaagctcagccaccaacttaaaaaggactggacaatacttttaccrctttcccttctcagaattc

SEQ ID NO: 151678 - DNA, 557 bp, Homo sapiens
ctagaacagaaaaaacgcccaaaatatgcatatgtaaattcatcccatctcacagttatctctgaggaattcatgatttattatacaatactgcctctgtattgaagttaattacatacrtgcattatctcttttactagattgggaaagtctgagagggcagagaaaatacttattgtttctttacttctaggaacaagctgaagagtataaccatgcatacacacactcacactgtatgtccaaagcctagcacagaacctttcctattattgtaataactttagttgagtagcactcttaaccatcaaaaacaaaaaaaagttttcaaagatttaacaaaagcaagatgtacaattgtcaatacagattgtgcccaatattttcaaatatagctatgtagatattgatgcatacaaaggagataggtagataacaccagaatgttaatgatactcattctgagtggtagaatcggtttttttaattcacaaaaatttgaagtctttaaaaaatgaacatgtatcatttttacagtcaggaaaatatttctaaaa

SEQ ID NO: 151679 - DNA, 584 bp, Homo sapiens
cccggctgcgcccccggccgccgccaccatctcggctgcgggccccggctcgtccgcggtgcccrccgcggcggcggtgatctcgggccccggcggcggcggcggggccggcccggtgtccccgcagcaccacgagctgacctcgctcttcgagtgtccggtctgctttgactatgtcctgcctcctattctgcagtgccaggccgggcacctggtgtgtaaccaatgccgccagaagttgagctgctgcccgacgtgcaggggcgccctgacgcccagcatcaggaacctggctatggagaaggtggcctcggcagtcctgtttccctgtaaggtaagcccagggacagcccacgtacctccgccggtgacctcagggactccggtatccgccagcccactcgcaggcccggagaggcgggcggcatctctcatttaaaaaaaaaaaagaaaaaatgtttacacttcgtccaccctccctcaagcccactttgggtgtaggtctgggttgacatttaccgagtaataattgttaatagacaattaacagattaattggcatttgctgatcgttagaacatcgt

SEQ ID NO: 151680 - DNA, 518 bp, Homo sapiens
agagcccacatctcaagagctgccactgtttgcctgaaagaccacctcccagggccttgatttcctcatctatacaaatgagagatgaatctgcttgacttctaaggacctgtagcttctagcattctatgaaaagaagggaggctatctggaatgttattggatgccctctatctgccagttactttgcaggggtcagcttttactrgtttgcctttttttttttcagatgaggaaactcatgcctacagagtggttaaatgtgaagtgacttgtcaaatcacacagctagtaagaggaccagtccaagcacctgcatctcaaaggcacagatgttttgtcctacaccttactacgtagggatttcgaatctgagtgtatactcaagattctgaatcataactcaaggttgacaccagtaacaaaaccgtctggttggatgagttcaccagatgggcctcttatgggaccatcccaaaatgacaacatacatactcactatgaaattcattggcagg

SEQ ID NO: 151681 - DNA, 543 bp, Homo sapiens
gtctcactcacccaggctggagtgcaatggcatgatcatactcactgcagtcttgaactccgtggctcaagtgatcctcccaccttagccttccgaatagcttggactacaggcatgtgccatcatgcctgctaattatttttttttttttggtagagacagcatcttgctatgttgctcaggctggtctcgaactcccaccttagcctcccaacacattgggattacaggtgtgaaccatcatgcccagactgcagtgttttaggtggggtttggaagaagacaaaagaatttaataagatgttagtctacttactgacagatgttaagtttgactaaaatttaatgggctttccacagcacgtggaacttgcaagaaaagtctattctctactaacttcccctttttctattatccccagaatgaaacggtaattgaacaagaaggttaatggactcagagtattgaagtaaagatagatrgagagaaaaagcagcaagggttagttcaatgagggtatcgtcctttttcgttacattctt

SEQ ID NO: 151682 - DNA, 607 bp, Homo sapiens
attttgaatagattccctttttttcatacatttggtttataaaaagtcttgttcccatttttctgggaagctgtaaaacatcctcttgaatctcaacgtgctgcagagtataggaaaacctcaaagaccctgggacagagagaatgcttgtttaaatcgctactgtaccaggctggaaacatgagatcctgactgttccttttttctggagtgagagacaaaagctcaaagatgggagaggcaggggttacaagtcatgggtatggggcaagagctgtagacacagagcagccacggtgaactgcaaagtagatgcctggcaaaggaaggagagacacgagggacaaacgttrtctagacatcttctgctcaggagttcagacaattaaaatcagggactagagtaatatgtaaacctgaatgtagaagggaacgaggcccacctccttgaggtggccatgaggccaccatgaggaatatgtctaggaagaattctcttttgttgaatcatttctttcccctcttttcagaagctgcggcagatcctgtttggaaacacagtccatgtctttagctataactggaaaaaggcctatttcaggttcca

SEQ ID NO: 151683 - DNA, 430 bp, Homo sapiens
tctctgttgtcttgaaaaatcagaaagtctggcaattctagacaaaacatttattcatggcaaaaatccatgtcatgaatgggagccatgaagcaactgtccctttaaggtgaggcaagccctccagtgcccattcctcgggtaatacatctrtctagcatctgtagacttatgagtttgtaactcttactctgcctctcaggcactgtaaaaacccttcttcagcagtccccaggttgcagtgttcaaaccttttcatgcaggaattccaaaggtacagcctatcccactccaagactccagttcctccaaaatattgtccaggaatgctctagttgtaaaggtgtcctcaggacctccttgcaggccagatcttctcaggtgaccaaatttttctacacttgagtgagagtttttcaaaaaatttgtc

SEQ ID NO: 151684 - DNA, 484 bp, Homo sapiens
aatctgcttcaggcaaccttattagatacattctttgcactaaatgggtaacacacactttttctctatataatattcaaagtacaaagttcacaacagttgtacttcaaaaggaagatttactattctgacatgaagattataggaaaagctatttataaaatgcatataaagtttaatattcattttaactttttttttctgaaaaggcattaagcacatagccttatctctaaactaaacggawtaaacctaagctacctaacttctttaatctctagttatcctcccacatctattaattaaaaatacagtattttcaaacacttaaaatcttgcaaagactttgtagttgtaacttacctcattgattttaatctgtcgtagttcttcctcagctgcagtcagtggggcaggggaagattgtgacagcaagtattttttatatccatgtaatgatacatcttcctgtaagtacagaata

SEQ ID NO: 151685 - DNA, 642 bp, Homo sapiens
acaaaacattaaatctctgtagttttattttgcatttctttgactgttagtgccatggagcctcatttcatgtatttattgactattgagattttctcttctctgatatgcctgttcacaatatttgaccctttattaacgggtcatttatctctcagttactgagttataaaatttttatatcttgtttgtggttccttttcaattgtaggtcttgtatattactttcgctagtttatggcttgacttcaaactgtatttaatgatgtcctttgtcaaaatgaagctttacatttttaatctttcccttttgctttctgtaatttgtttaagaaatgcttcacaacacaaaagtcacccacatattttcataaattgtttttctaaagattaaattttttttacccttcaaaattctaatggacttgattttattagtatgaagtaaaaatttctgccccatctcccaaaataaaacagcaattttcccagtgccatttgtggaatagttttcttttcccscactagttggtgtatccatataatgacatcaatataagtttccgagctctatgttttgttcaacattgtacactctgaacaaatatcatattattatgaaattatgctaaatttggtatg

SEQ ID NO: 151686 - DNA, 536 bp, Homo sapiens
ctcaccacttaacccttaccattagtttgatcttaaataggctgttttcatataattataaatgtggaaccctcaagtcaacattttgaatgtttctgtttcctcattatactccagcattttaatcagaatatgttctcagctagagaacttggcctaatcattagttcttatgctctctctgccttttagtggactccaattgttttgtagatctgaattgacagcaattacataaagcagccagaggatgattagcttggaaagctgaattttgtcaagttaattaccagtggggcacactgactttgattcatgaatatggctttttacagagctcttaagatgttaatcagtcaacacttactttttayagtttaatggaaatgtcagaaggagagttgcagggaaaacccaggaacagagaccctggtgagcagtgaatcaccaaatataaaagaaacattcattttaaagaagtgttttcaggctacttgatcatgaaatgaacactcctttaactgctggagctgcaa

SEQ ID NO: 151687 - DNA, 591 bp, Homo sapiens
gaaggataacaatttcttgcaatgcattctaagtgtacagcatggtctgttccttcagcagttacacctggcttaaccagcccagcagcaatattcaacacttctctagcagcttagatacaagtcgcatcccttttgatcttcagatcagaaaaatttaacttgagaagtatctttaagagcctgttcagattcagacattcccaaggaatgatcagtaaaatcatctttgcctataacttggcaccagtcttgttgtcatcagtggataatgtggcctaagtttaccagtgtatggatattaacactggcccacgggtcagtgttaatatcaccttctacagtccagaaagacacttcttgcttttccttttcatcttttgctttcttatgtaataatttgtgagcagctcaattttctttgaaatattctgtgagcagaattrcaagccttggatgcccagttgatgcaggtaggacaatagagattgacctggggactccagccacctgtctccttggccaccatgctgcctgcctactgggggagcactcacccggaaagaggaggaggaggacgcttgtgcatca

SEQ ID NO: 151688 - DNA, 398 bp, Homo sapiens
aaatgtaaaatggtttgatttggtaaacattgttggtgtttagagccattccaaatcccacttctcatctgccttcctttcctatagaatgtggatagccaacatttttgccaagtccttacaagtagggtctagttctacccagtgagatattaacagaagtcrctaggtagtatttccaggagagctctggaagaagtcttacagagcttactactagttgcctttttttaggtcctctacccttccccttgttcctgcctggatatggtcacttgcccaaaggcttagcagtcatcttcaacatgagaatgaaaccacacgcttaggatactatggagcgggacaggcagggagaaaaagcagagatacttaagaatgtcctggagttaatgcac

SEQ ID NO: 151689 - DNA, 398 bp, Homo sapiens
aaatgtaaaatggtttgatttggtaaacattgttggtgtttagagccattccaaatcccacttctcatctgccttcctttcctatagaatgtggatagccaacatttttgccaagtccttacaagtagggtctagttctacccagtgagatattaacagaagtcgctaggtagtatttccaggagagctctggaagaagtcttacagagcttactactagttgccyttttttaggtcctctacccttccccttgttcctgcctggatatggtcacttgcccaaaggcttagcagtcatcttcaacatgagaatgaaaccacacgcttaggatactatggagcgggacaggcagggagaaaaagcagagatacttaagaatgtcctggagttaatgcac

SEQ ID NO: 151690 - DNA, 459 bp, Homo sapiens
tgttttttaatatcaagttcatgcaaaagttcatgcrgttacttttgcaccaattaataaaaaaaattagtaatgttaaatgaaggcaaaaaaaatcctgctaatgcggctatcctatgcataaacgaatctgttttgttcttttctcccattaatactcttggcatcattatcattttctgagataagagttaccagttaacagagaagtgttggcactaaagttactacttagggcagtggtacccaaaggaggctctcaaaaaagcagtaccaccatcacctgagagcttgttaaaatgcaaattatcagggcccactccagacctaatgaattagacttttcgatagcggggtcaaggaatctgttttaacaagcaattccagtgatattcaatgtacatttatgcttaacaatcatgggcttagaggaaatctaaaacaaacgaaattcagttc

SEQ ID NO: 151691 - DNA, 565 bp, Homo sapiens
acacatactgttccacttttcttcatgaagtgcccaaactgcttgactttcttgagtttattaatgtttaaagtgaaaatctgctttttgaaaatccaaaaatctttaatatgtgtctatctgtgaagaattttcaaacagacaagatgctaagtcaamttccaattgtaagttctttaagtagagaatgctattttctgaataacacaaacaaaaaataaaacagctggtaatcattcccatctcacaccacatagatagtcaaagaataaaataagatctttccagtgatcggcagaatcccagttacccaccagggaggtcacttgacctaatcctgttcctcttagcagtgagaaatagagaagagcgtaatttcataatacaggggaaaaaggtatgattctgtcattaaacaatagatttgaccaaagcactaaatgtggaaaagacatatgactctatttttcagtggttctcatagtaataatgcacaggggttttggattggacatttcatttacttttttgtttattgtattgggaacatatagagttccttcat

SEQ ID NO: 151692 - DNA, 565 bp, Homo sapiens
acacatactgttccacttttcttcatgaagtgcccaaactgcttgactttcttgagtttattaatgtttaaagtgaaaatctgctttttgaaaatccaaaaatctttaatatgtgtctatctgtgaagaattttcaaacagacaagatgctaagtcaaattccaattgtaagttctttaagtagagaatgctattttctgaataacacaaacaaaaaataaaacagctggtaatcattcccatctcacaccacatagatagtcaaagaataaaataagatctttccagtgatcggcagaatcccagttayccaccagggaggtcacttgacctaatcctgttcctcttagcagtgagaaatagagaagagcgtaatttcataatacaggggaaaaaggtatgattctgtcattaaacaatagatttgaccaaagcactaaatgtggaaaagacatatgactctatttttcagtggttctcatagtaataatgcacaggggttttggattggacatttcatttacttttttgtttattgtattgggaacatatagagttccttcat

SEQ ID NO: 151693 - DNA, 492 bp, Homo sapiens
aagaggaggaggaggaggaggagaagaaacaaagaaagaaagaaatttggctacaaaagagaagaaggagaaatgactgtggtcattagttgggggtgcaaaagtttaaggagagttttcgtttgtttaatttcttctgcattgtttttaagataaagagagttagccaagcataaatcctgacatcaggaagtcaataragagggtaaggtttaggatacaaggaagaagtgataatgaatacagtgaggtccctaaaaatgtgaagggatataacccagaacccaagaggagaaagaagacttgaccaaaattggctttactttttctctacaataaattgggtggaagagattttgaaactacagaccagtaattctgaaaagggaagagaaaaatgaaagaaaaacatagctagaaaagttagtagagaaacataacccaaaagtttgaaggcaggagaattctagaattgacagggaaagactgaaa

SEQ ID NO: 151694 - DNA, 495 bp, Homo sapiens
tgccatctaggactttcagagctaaaaaggagaagtcaacacctgggttcaaaatttcaagacaggttgactttcttgttagtagctaatgtagcttctgactttaatctgaagccaatactcatttagcattctgaaaattctagggcacttaagaattacgctaactctactctgcctgtgctctgtaaatagaacaacaaagtctggatgtagcatatctgtttacagcatggtttactaaatattttaagcccactgttgagacygactgctcagaaaaaaaacaatcttttcaaaatattactgctcattgacaatgcacctggtcacccaagagcactgggggagatgtatgaagagactgctgttattttcatgactgctaacataacatccattctgcagccatgaatcaaggagtaattctgactttcaagttttttttatttaggaaatacctttcataagattttagctgcatagatactaatt

SEQ ID NO: 151695 - DNA, 471 bp, Homo sapiens
ctggctacaggagtgtccacccagctggcatccatgtctcagtgtcaacttgcatcctgcttgtgtctcagtctctgtcctagcagtgcttgcttcctggcagtggccgctacagcccacacctcacttgcttcttagccttggctgtaggaacattctcggcttgctcctcagtcccatcagggacagcccaagtttccctaacacctcagactcaacgctgcygcaccccaggacaacagaaagcctgtcaaaagctaggtttaaaaatggcaccttgctgtagccacttaggtctcagaaagggtgtgggacccagtgcaagctccctccctggagcagttccttctttctgcagtctattggcaactccctatgatagtttcaggggttgagaataataaggggttctcctatagtcaggactgcataattccatgatagtgatgtgggccattggatgtgtcttgc

SEQ ID NO: 151696 - DNA, 471 bp, Homo sapiens
ctggctacaggagtgtccacccagctggcatccatgtctcagtgtcaacttgcatcctgcttgtgtctcagtctctgtcctagcagtgcttgcttcctggcagtggccgctacagcccacacctcacttgcttcttagccttggctgtaggaacattctcggcttgctcctcagtcccatcagggacagcccaagtttccctaacacctcagactcaacgctgctgcaccccaggacaacagaaagcctgtcaaaagctaggtttaaaaatggcaccttgctgtagccacttaggtctcagaaagggtgtgggacccagtgcaagctccctccctggagcagttccttctttctgcagtctattggcarctccctatgatagtttcaggggttgagaataataaggggttctcctatagtcaggactgcataattccatgatagtgatgtgggccattggatgtgtcttgc

SEQ ID NO: 151697 - DNA, 568 bp, Homo sapiens
ttccttttctcattgtttatgcaaagaatgaaatcaacaaaattacgtctgcattgtgcctaagtaaacagaatgtgcttacttacaagatggagtagcacacatttgtattccatcatgcctctggcatcaatctcaacaaaagtgaaaagaaggacaattctagctgcttytaaatttcccttacattctaggagctgtgccaagtgaaatcttgcagtttaacctaaccaaaaagaaaaaaaaaaaaaaagtaaaagaacaaaaacaaaaacaaaaagaagtttgcacttaatctagtaagcaagctcacacacactgttctattatttataactaatcccaatagtagccaataaatttctcattttatactaaaaactctagttacataaatttttcagtgtttctgaaattatgagaatacaacacaaatatccacttccctctgaagaaggggaaccaactgtcaaattgtcagtatatgggtttctccagaaaaattcctattttctgcatagcactggtgatgctaggatggaggaacaatgctgctatgataggttca

SEQ ID NO: 151698 - DNA, 627 bp, Homo sapiens
agctatgatagattaggttagattactcagaaaaaatgcctcaaaagcttctaagtcataattgatctgatacttgattaacattcagttcaaaattaaactcagctatacaagtagcccgccatgcagcaggagcaacawccttgcacaaaaggagtacccccgggaaacctccccaccaccccttccccacacagggagaagtcagggtaggcgatgagggcatgggctgggcccagagatccaggacagcagcagccagaagattggctgagtcttgcagtcagctgtgggaatggtgctctctcttctggccgtcatattgctcctcaccaggaccctcttcagtgggctttgcagaaggagacaggaaggagagccattgcagtacccacagatttgggagtccattacatagccttggctccagattcctaagactaagccatactcagcaaagcagggctttttgtctcctttgatcccttccgtgtccccatattccagaatctttgtgcctagcccagagaatatgtttgataaatgtttgttgaatgtatcagttgtgatatctttatactgagttaatgaaaaaccctactccacatctataatattccttatttc

SEQ ID NO: 151699 - DNA, 627 bp, Homo sapiens
agctatgatagattaggttagattactcagaaaaaatgcctcaaaagcttctaagtcataattgatctgatacttgattaacattcagttcaaaattaaactcagctatacaagtagcccgccatgcagcaggagcaacatccttgcacaaaaggagtacccccgggaaacctccccaccaccccttccccacacagggagaagtcagggtaggcgatgagggcatgggctgggcccagagatccaggacagcagcagccagaagattggctgagtcttgcagtcagctgtgggaatggtgctctctcttctggccgtcatattgctcctcaccaggaccctcttcagtgggctttgcagaaggagacaggaaggagagccattgcagtacccacagatttgggagyccattacatagccttggctccagattcctaagactaagccatactcagcaaagcagggctttttgtctcctttgatcccttccgtgtccccatattccagaatctttgtgcctagcccagagaatatgtttgataaatgtttgttgaatgtatcagttgtgatatctttatactgagttaatgaaaaaccctactccacatctataatattccttatttc

SEQ ID NO: 151700 - DNA, 582 bp, Homo sapiens
aaggcctctgggcctgtgatgggaggggctgccatgaagacctctggcatgccctggatacatttttcctgttgtcttggcaattaacatctggctccttgtttcttatgcagatttcttcagccagcttgaattctcctcagaaaatgggttttattttctattacatcatcaggctgcaaattttccaaactcttatgctctgcttcccttttaaacataagttcccattccaaaccatatctttgtgaatacataaagctgaatgtttttaacagtacccaagtcacatcttgaatgycttgctgcttagaaatttcttttgccagatacactaaatgatctctctcaagttcaaagttccacagatctctagggcaggggcaaaatgctgccagtctctttgctaaaatagaaagaataacctttattccagttccaaacaagttcctatctccatctgagaccacctcagcctaaacttcattgtccatatcactatcagcattttggtcaaagccattcaacaaatgtctgggaagttccaaactttcccacatcttctttcttccactgagccct

SEQ ID NO: 151701 - DNA, 582 bp, Homo sapiens
aaggcctctgggcctgtgatgggaggggctgccatgaagacctctggcatgccctggatacatttttcctgttgtcttggcaattaacatctggctccttgtttcttatgcagatttcttcagccagcttgaattctcctcagaaaatgggttttattttctattacatcatcaggctgcaaattttccaaactcttatgctctgcttcccttttaaacataagttcccattccaaaccatatctttgtgaatacataaagctgaatgtttttaacagtacccaagtcacatcttgaatgccttgctgcttagaaatttcttttgccagatacactaaatgatctctctcaagttcaaagttccacagatctctagggcaggggcaaaatgctgccagtctctttgctaaaatagawagaataacctttattccagttccaaacaagttcctatctccatctgagaccacctcagcctaaacttcattgtccatatcactatcagcattttggtcaaagccattcaacaaatgtctgggaagttccaaactttcccacatcttctttcttccactgagccct

SEQ ID NO: 151702 - DNA, 511 bp, Homo sapiens
taggattttaaagacagaagtgtcagcaccacacaatatacccttgtaataaatctgtacatttaccccatgaatctaaaataaaaatggaaatttttaagaatcttgtatgaatgtacctaattttgtttctccattcatcagttgatgggcattgaggttctttccaagttttggctattgtgaacagtgctactaagaacattcatatttaaggttcaaaaagagagagaaatggcacagaaggctgaagaatttgaagacattatattcttaaaagagtcaaatataaacaaaatgttttcaaagtataataattcatggtcagtaatactttatcwttaatatttattttcagcactttctcattattcagagaacttcaatgtggcttccaggatccagccatggataattaatgctgtattcagcatacattttttcacttcttgttagatagaaggaatagttcaaaaggaatcaagtataatcagccaataaccccaaaccc

SEQ ID NO: 151703 - DNA, 511 bp, Homo sapiens
taggattttaaagacagaagtgtcagcaccacacaatatacccttgtaataaatctgtacatttaccccatgaatctaaaataaaaatggaaatttttaagaatcttgtatgaatgtacctaattttgtttctccattcatcagttgatgggcattgaggttctttccaagttttggctattgtgaacagtgctactaagaacattcatatttaaggttcaaaaagagagagaaatggcacagaaggctgaagaatttgaagacattatattcttaaaagagtcaaatataaacaaaatgttttcaaagtataataattcatggtcagtaatactttatctttaatatttattttcagcactttctcattattcagagaacttcaatgtggcttccaggatccagccatggataattaatgctgtaytcagcatacattttttcacttcttgttagatagaaggaatagttcaaaaggaatcaagtataatcagccaataaccccaaaccc

SEQ ID NO: 151704 - DNA, 553 bp, Homo sapiens
gttatttcatttccagggattttatgcttctcgatcccagcccaaggtaagtatccatcctttagggtcctctccaggtatagaatcagtgattattttgtatgaattatcactattctgtaccgttcctgtgcttggtatagtgtggctgctctacatcaatatgactgatagtcaaaaaagttctataactagccttcatttaggatgtagaaagctgcaaagaatattgcttctaccataactatgaaaaaactgaataaactagaaaataatgattttattgtttgtcagagagctcagactacaaggtaatcatgtaacccataagtcaaaaagggacaagttcctccaaggaaaagcagggcacacaaactgtctcattagtggtggagtatgggagaaagaagtgccacactagggacaatatgtgtgtgattgagacttaatkagctaaaattttaaagatctgcagaggccatatgggctaccatgtcaatctgaaatagctcaggacatctgacaaaaagaaaagctttaatcacttgcaggc

SEQ ID NO: 151705 - DNA, 553 bp, Homo sapiens
gttatttcatttccagggattttatgcttctcgatcccagcccaaggtaagtatccatcctttagggtcctctccaggtatagaatcagtgattattttgtatgaattatcactattctgtaccgttcctgtgcttggtatagtgtggctgctctacatcaatatgactgatagtcaaaaaagttctataactagccttcatttaggatgtagaaagctgcaaagaatattgcttctaccataactatgaaaaaactgaataaactagaaaataatgattttattgtttgtcagagagctcagactacaaggtaatcatgtaacccataagtcaaaaagggacaagttcctccaaggaaaagcagggcacacaaactgtctcattagtggtggagtatgggagaaagaagtgccacactagggacaatatgtgtgtgattgagacttaatgagytaaaattttaaagatctgcagaggccatatgggctaccatgtcaatctgaaatagctcaggacatctgacaaaaagaaaagctttaatcacttgcaggc

SEQ ID NO: 151706 - DNA, 654 bp, Homo sapiens
tctagctttctttaaatatatacttacttgtagttacccagagattaatatatttgaggctgattgtgaattaaagaggaacaartgtatacagtctggaatgtaaagaccttgtgatgtctgtgctagtcaatgtgtattgtagaagtgtccctaacaaaaacagagaaatcagttatcctgcattgccattcagcttaaattaggattgtattgtaaaagtgtccctaacaaaaacagagaaatcagttatcctgcattgccattcagcttaaattaggattctgatattaatttgaaagtttaattaagcttagaagtttagcctattctaaagtaacattttaatttctctatgattctagcctttgatgattgttcactgaagacacaaacagtccccaaaatccaagtgaacagtaaaacagacaggcaaacaaaaaaccctctaactatggagaaaaaaatgttaaatttaaaataatacaagtaaaataactgaaatataaatactcatacaagcaacagctaccaaccagtagatttttaaaaaaaccttaccttttaaagtatttaagctgatctatctaagaaataaaataaaaccaaaatatgttttaatgccacatgtccacaaccaaactgagaaccagg

SEQ ID NO: 151707 - DNA, 614 bp, Homo sapiens
attgtgaattttgatacctgtaacggtgctgaaatcaatttccctgtagatacaagggatgactatagggatagccagtagtatatgaaagrtatttagccttgccaatatataataatgtaaaacaaaaccaaaaaatgaggtactattatgacttatgtatttaacttatttaaacatatattataatttatcctatatatgtgtatatgcacacacatctatagtgtaccaaatattgtgaagcatagaagaacatgagggctttcatactggtggaatatcaactgataactttctgaaggtaatttaacgatatgaagcaaagtttaaaaaatttgattttcataacagtgaataatagaaacaatataaatttccaacaataggagatgaattaaattataatatatccttatattaaaatgttatagaacaattaaaattcataatattgaagaacatgtaagcatatttgatgttgctccagacactgtcaaatctatgtgcaggttataaaatagtgtgaaatatatagtctcaattttctaaaatatctgttacaaaaaatgcatcagaaaaataatgatatggtttggctatgtcgccaccca

SEQ ID NO: 151708 - DNA, 504 bp, Homo sapiens
ctaactgtccaagtttatcacttgtcactcccgccccacaccttgtgttcgttccaaactcaatagaaagactcaggacacaactggtccttgcccaaccccattgcttgtgaatacctcaactggttagaaaactgtcccaattattcwccctagacatccttcacaacaagactcagacatttcttctttaatgaagcctcccattcccccggcctcaacctgcagaataatttgtcctgctcgccgcattcccataatacagttttcatatatttaactcattacctactgtaaggtaacagaatttaattactggctattccatcttgcttacttaataataatctcatccagagtagggattgggtcttactcattattgtatcattgtctcatccaatattagttgctcatccaccatatgctaatgcttcactcagtgcctggcatatttgattaatgattgaggaggaaaattatcatagcaccatgaatcacttt

SEQ ID NO: 151709 - DNA, 464 bp, Homo sapiens
acaaaacgagtcttttttaataaaagaataaataaatttaaatgtattgaacttttattgttgtatgtcatgtagggtaattttgtatacatgttgcattttacaagacttaaatcgtgtaattttatatacatcttgtagggtaattttatatacattttataaggtaattttatatatattatgcattwaattcttgtaagtagccctctgccttagccagttcgagctgctattaacaaaatatcttatcttgggtaatttataaataatataaatggatttgtcatagctctggaggctggaaagttgaagattgagatggtaccagatttggggttgagtgagagcccattccaaacagacaatttctcctggcttctctctcatgaggcagaagtatgaaagaaacatgaacattgagtccctacatgtcaaaagagatggaacagctcagcagcctt

SEQ ID NO: 151710 - DNA, 596 bp, Homo sapiens
tctctgtggggttagactaagctagtctgcgcgtgagaccacattttgcttagctttattccttatctaccctgcttcctaaatcccctctcggagagagctctcaataaatattyttaaaagcagtcccatttaaggattggcttctgaagaatctgacctaacacaatacaacacttggagttattttcctctccaccttcacatgcaggatccaagaccgcttttttctccctacccaacagtagagcccagcagtagaaccactcgtcagaatcaatgcaagaagagacaagtggtggcagtggataagttgaaaagatagaaggatgagcctgaaaaggattcagaggggaagccgcctgccatctgccttgagtgttctcagcatcaggaactaaaaccttaaatcttggatggaaactcaagaaaaagatgtgcatgccccaaaacccaccaccttatgaaatcaatactggctgcattgtgtttcttaaactcgaaggaaaggattgagaaaatagtctctgggctactctacagaaaactgactggctgacagatcttttggtggcaaaattctggaggatgcaacc

SEQ ID NO: 151711 - DNA, 568 bp, Homo sapiens
gactggctaaatagtatagttgaactatccatagaattttaaacatggatatgtctaatgattgtttttaagttgttaacataagcacaatttaagctcatttcctcttctcaaatttgcattagtcggccaatcacacacacacatacacacacacacacacacacacagagactcacacacatgaaatatgtgaaatgggtctatttttaagatatgctaactggttgcctggaggaaactggaaccaagatgggagccttttttaatagaataaaatagttgattttttttttgccttggcctattaccaatttttaccaacccttttaacttgcaagataatacaaggttcttgaacagttcacattcacctgcttgccatttattaggccaagaatgctccctccacctgcaatgctcttccctgcagatactcaaatgtttaatgccccttcaccttaggactccatktaaataggagaccctccccactatttaaaatcaacatatcccctatgattatgccagtccctgtcctcctaccatgttttatgtttcttaacag

SEQ ID NO: 151712 - DNA, 567 bp, Homo sapiens
gaacacattggcatgcaggagttaaacatcagtcgttgtggtagtttcgcttcaggatggcatcactctttctacgcaataggctattttcctacgttatataataattactgtacacatttatcargtacatagtgatgttttgaaacatacaatgtatagtgattcaataggttaataagaagatctatcatcttaaacgtttatcatttctttgttgggaatattaaaatcctccttcctggtatttaaaactatgtattattgttagctatagtcatcctatagtcctataaaacactagaacgtattcctcctatctagctgtattttgtatacttttacaaacccctatccttcccagcctctggtatactctgctcttctttttacttctatgagatcttctttttttagtttccttatatgagcgagaatatgtggcgcttaactttttgtttctggcttatttcaggtaccataatgtcttcctttccatccatgttgtagcaaatgacatttcattctttaaaaaaaactgttatggctaaacagtattccattgtg

SEQ ID NO: 151713 - DNA, 633 bp, Homo sapiens
agtagagctttgttggatgatccaagaggaaccatctaacgcggactatgagaaggaactagttgcttttcataaagatgcaaataacagcaagatgctgttacagttgttttgaattagtcacacaactttgcatctggaaacacggtttagaactatgaaaatgccctctactcttgatagttgatattaggatattaatttctatttgctctgaaacatgttttaaaaaacagcaactctaaagaaaggaagagttacagaagagagaaacagggatacacagacagagtcagaaacagagacagagataaagagatccagccagctgtacataagattccctacattacaattacagatacactaattaagttttaggagtaattaatcacataaaacattaatgcaagaactgaagttaatttagaaacatcttatctttgtttgtcctagaaaagcatagtttctcttcagatttgtttatgttgttggaattttcttccttttagaatagayattactttccaaatcacctttagagatgcatgtcttaatttattgttccccagtattaggataaatgaatgacttgaggggtagattagagctatggactcaccaaaaatcaca

SEQ ID NO: 151714 - DNA, 516 bp, Homo sapiens
aaacccttcaccagtcagttcatctagagattctgtgtgggccatgtaacagaatctctggagagactggtttggtgtctggattaatatttgagcaggtctggcacctggaaaaacagaagctggccakgcaccatggtctactgcagtggacctttagtctgggtctgcagaagcaggcctggaggtgggatccacaaagaccagcctgaagcctggatccatagcaaccagctagaagctgcagtggacctgggacctgggtccatgatataatagtaggcttgggtctttggtcctggatccacaaagtctgtcctggatcctggatctgtagcagtggtcctggagcttgggtccatgaggtcagcctggtattgggatgtactgtagcagttctggaccctgggtttgttcaagtaaatctgtagtgtggggttccaggggctggcctggacactggtgtcatgggaaccagtctggagctgggcagacctggagtctgagtctatgtgg

SEQ ID NO: 151715 - DNA, 594 bp, Homo sapiens
gagtaagtaccatttaaattcttcctgggcctggccgggtgcgggctcaggcctgtaatcccagcactttgggaggccgaggtgggcggataacgaggtcagaagatcgagaccatcctggctagcacggtgaaaccccgtctctactaaaaatacaaaaaattagccaggcgtggtggcgggtgcccatagttccagctactggggaggctgaggcaggagaatggcgtgaactcaggaggtgtagcttgcagtgagccgagatcgcgccactgcattccagcctgggcgacagagagagactctgtctcaaaaataaataaataaataaataaataaataaataaataaataaataaataaaataaaataaataaattcttcctgggccaggactgacctctaaaatagtttttaaaatattttaaagagaaaataatcacctatatataaaaaagaggtgtgaataagttgtaatccacycattcagatctacagaaagtggatgttagaaatttaacagaagtaagcaaaatagaatgaaaaccacttatttcctctaggtaacaatcttgtctctgtaataatatggat

SEQ ID NO: 151716 - DNA, 594 bp, Homo sapiens
gagtaagtaccatttaaattcttcctgggcctggccgggtgcgggctcaggcctgtaatcccagcactttgggaggccgaggtgggcggataacgaggtcagaagatcgagaccatcctggctagcacggtgaaaccccgtctctactaaaaatacaaaaaattagccaggcgtggtggcgggtgcccatagttccagctactggggaggctgaggcaggagaatggcgtgaactcaggaggtgtagcttgcagtgagccgagatcgcgccactgcattccagcctgggcgacagagagagactctgtctcaaaaataaataaataaataaataaataaataaataaataaataaataaataaaataaaataaataaattcttcctgggccaggactgacctctaaaatagtttttaaaatattttaaagagaaaataatcacctatatataaaaaagaggtgtgaataagttgtaatccactcattyagatctacagaaagtggatgttagaaatttaacagaagtaagcaaaatagaatgaaaaccacttatttcctctaggtaacaatcttgtctctgtaataatatggat

SEQ ID NO: 151717 - DNA, 558 bp, Homo sapiens
tgcaatgtctcaaatcttcagcttgaatttgccatactacacatttacacacattccattgaccaaatcaagttacatggcaagcccaatgtcaatgggcagaaaagtacactccttctgtaagacacttcactgcctatggtaatgtrcacaaatgaagaaatagtgagcacttgaaaacaataatgcaatctatccccccgcccctgcaaccaccacatatacacacctttttttttgttgggtgatatagaccatgtttacatgctgttggaaatcatgcagtagatccattaattgtagaaaaaagcctctgaggaggtgaggttgctttcttagggataagaatactatattattaacaggaggaaaggtatagagagagtacggatactgaaaggttggtatgcttgccatattttttatatgatgactttttgattctaaattttggttctgtttttgcttcccaataacgtctaagatcaaggtacctggggagtatattttctgaaatttgaatatttagacatcttttgttgcctgttgccttcaaca

SEQ ID NO: 151718 - DNA, 558 bp, Homo sapiens
tgcaatgtctcaaatcttcagcttgaatttgccatactacacatttacacacattccattgaccaaatcaagttacatggcaagcccaatgtcaatgggcagaaaagtacactccttctgtaagacacttcactgcctatggtaatgtgcacaaatgaagaaatagtgagcacttgaaaacaataatgcaatctatccccccgcccctgcaaccaccacatatacacacctttttttttgttgggtgatatagaccatgtttacatgctgttggaaatcatgcagtagatccattaattgtagaaaaaagcctstgaggaggtgaggttgctttcttagggataagaatactatattattaacaggaggaaaggtatagagagagtacggatactgaaaggttggtatgcttgccatattttttatatgatgactttttgattctaaattttggttctgtttttgcttcccaataacgtctaagatcaaggtacctggggagtatattttctgaaatttgaatatttagacatcttttgttgcctgttgccttcaaca

SEQ ID NO: 151719 - DNA, 558 bp, Homo sapiens
tgcaatgtctcaaatcttcagcttgaatttgccatactacacatttacacacattccattgaccaaatcaagttacatggcaagcccaatgtcaatgggcagaaaagtacactccttctgtaagacacttcactgcctatggtaatgtgcacaaatgaagaaatagtgagcacttgaaaacaataatgcaatctatccccccgcccctgcaaccaccacatatacacacctttttttttgttgggtgatatagaccatgtttacatgctgttggaaatcatgcagtagatccattaattgtagaaaaaagcctctgakgaggtgaggttgctttcttagggataagaatactatattattaacaggaggaaaggtatagagagagtacggatactgaaaggttggtatgcttgccatattttttatatgatgactttttgattctaaattttggttctgtttttgcttcccaataacgtctaagatcaaggtacctggggagtatattttctgaaatttgaatatttagacatcttttgttgcctgttgccttcaaca

SEQ ID NO: 151720 - DNA, 558 bp, Homo sapiens
tgcaatgtctcaaatcttcagcttgaatttgccatactacacatttacacacattccattgaccaaatcaagttacatggcaagcccaatgtcaatgggcagaaaagtacactccttctgtaagacacttcactgcctatggtaatgtgcacaaatgaagaaatagtgagcacttgaaaacaataatgcaatctatccccccgcccctgcaaccaccacatatacacacctttttttttgttgggtgatatagaccatgtttacatgctgttggaaatcatgcagtagatccattaattgtagaaaaaagcctctgaggaggtgaggttgctttcttagggataagaatactatattattaacaggargaaaggtatagagagagtacggatactgaaaggttggtatgcttgccatattttttatatgatgactttttgattctaaattttggttctgtttttgcttcccaataacgtctaagatcaaggtacctggggagtatattttctgaaatttgaatatttagacatcttttgttgcctgttgccttcaaca

SEQ ID NO: 151721 - DNA, 250 bp, Homo sapiens
agaatgggggaaactcctagaagtcatttcataacttcacttcacagcattaattttctgtatctacataaagaaaagaggtctaattgactcacagttcttcaggctgtaaagaaagcatagtggtttctgcttgtaggaggactcagraagcctcccaattataccagaaggccaagcggcaatgaaatgtttcatatggcaggagtagaagcaagacagagagaggaaagaggtgtgatatcctgtt

SEQ ID NO: 151722 - DNA, 549 bp, Homo sapiens
ctcatctgggtcaaggctgcagtctattttgcctataagtctctgacataaaaagcaagttcactgcttctagggtacaatgatggtacaggcattgtgtaagctttccatatccaaaagaaagacattttccagaaagcttcttatttctctctgagacctcctcagtctggccttcactgtccatgtttctgtcaggatttttgtcacagccattgagccagactctaagatggtccaaaagttttctcatctatctgtcttcttttgagccttccaaactyttccaatctccttccattacctggttccaaagttgcttccacatttccaggtatctttatagcaatattctaagtccccatttgccattttctgtatgatttactttgaaaaagaggtttaattggctcatggttctaagcacagtgcttctgcttctaggaggcctcagaaatctttcaataatcatggaaggcaaagaaagaatcagttgtctcacatggcaaggggaaaacaaggagagtagggaggggacatagagttttc

SEQ ID NO: 151723 - DNA, 549 bp, Homo sapiens
ctcatctgggtcaaggctgcagtctattttgcctataagtctctgacataaaaagcaagttcactgcttctagggtacaatgatggtacaggcattgtgtaagctttccatatccaaaagaaagacattttccagaaagcttcttatttctctctgagacctcctcagtctggccttcactgtccatgtttctgtcaggatttttgtcacagccattgagccagactctaagatggtccaaaagttttctcatctatctgtcttcttttgagccttccaaactcttccaatctccttccattacctggttccaaagttgcttccacatttccaggtatctttatagcaatattcyaagtccccatttgccattttctgtatgatttactttgaaaaagaggtttaattggctcatggttctaagcacagtgcttctgcttctaggaggcctcagaaatctttcaataatcatggaaggcaaagaaagaatcagttgtctcacatggcaaggggaaaacaaggagagtagggaggggacatagagttttc

SEQ ID NO: 151724 - DNA, 377 bp, Homo sapiens
gtttgtatctattagcatttactatatgagagtttaaacctgaaaagttcagaatacaagcatgcaccacyatattttattaatgcccttagaactatgactcatgagcctttagcctatgaagttaggacaattcatttctctgaaaaagaatgctgggctgttctcagaaaagaaaactgaaaatagcaaatgatattgtcttattttacctcttggacatccttgaatgaaacagctactaaagggatactcggatcaaaattcagaactaatgttttgaacactatagtttgtgaatgtccagtgatcatgagcccttgacggggaaatgacctttcgagtttaacttttgcattttttgctcttttccttga

SEQ ID NO: 151725 - DNA, 377 bp, Homo sapiens
gtttgtatctattagcatttactatatgagagtttaaacctgaaaagttcagaatacaagcatgcaccactatattttattaatgcccttagaactatgactcatgagcctttagcctatgaagttaggacaattcatttctctgaaraagaatgctgggctgttctcagaaaagaaaactgaaaatagcaaatgatattgtcttattttacctcttggacatccttgaatgaaacagctactaaagggatactcggatcaaaattcagaactaatgttttgaacactatagtttgtgaatgtccagtgatcatgagcccttgacggggaaatgacctttcgagtttaacttttgcattttttgctcttttccttga

SEQ ID NO: 151726 - DNA, 377 bp, Homo sapiens
gtttgtatctattagcatttactatatgagagtttaaacctgaaaagttcagaatacaagcatgcaccactatattttattaatgcccttagaactatgactcatgagcctttagcctatgaagttaggacaattcatttctctgaaaaagaatgctgggctgttctcagaaaagaaaactgaaaatagcaaatgatattgtcttattttacctcttggacatccttgaatgaaacwgctactaaagggatactcggatcaaaattcagaactaatgttttgaacactatagtttgtgaatgtccagtgatcatgagcccttgacggggaaatgacctttcgagtttaacttttgcattttttgctcttttccttga

SEQ ID NO: 151727 - DNA, 377 bp, Homo sapiens
gtttgtatctattagcatttactatatgagagtttaaacctgaaaagttcagaatacaagcatgcaccactatattttattaatgcccttagaactatgactcatgagcctttagcctatgaagttaggacaattcatttctctgaaaaagaatgctgggctgttctcagaaaagaaaactgaaaatagcaaatgatattgtcttattttacctcttggacatccttgaatgaaacagctactaaagggatactcggatcaaaattcagaactaatgttttgaacactatagtttgtgaatgtccagtgatcatgagcccttgayggggaaatgacctttcgagtttaacttttgcattttttgctcttttccttga

SEQ ID NO: 151728 - DNA, 420 bp, Homo sapiens
tctgtattcatttagagatgaattacatttatttaatgataraatggagatacaatgggagggaagcaatgactgagatgagccacaaaaacacgtctagccttgagggttgcaatgaatattcccagccaaatgagtctgtttaatgagttttcatgcatgtaagtatatctgcttagctcaacctaattgaatttatagttccattcatggttatttcccaatactttgaaaaccaatatatatttccacatatttaaaaaaatcaccactccaatatttctgttgaatcagaccttgcattatgttgtttaataaagtatggtaagttttggcatgtatgatttttatcatgtaagaagcataatttcttagctaaaaatttagcctttgactctttagtagaaagttgagttctgt

SEQ ID NO: 151729 - DNA, 420 bp, Homo sapiens
tctgtattcatttagagatgaattacatttatttaatgataaaatggagatacaatgggagggaagcaatgactgagatgagccacaaaaacacgtctagccttgagrgttgcaatgaatattcccagccaaatgagtctgtttaatgagttttcatgcatgtaagtatatctgcttagctcaacctaattgaatttatagttccattcatggttatttcccaatactttgaaaaccaatatatatttccacatatttaaaaaaatcaccactccaatatttctgttgaatcagaccttgcattatgttgtttaataaagtatggtaagttttggcatgtatgatttttatcatgtaagaagcataatttcttagctaaaaatttagcctttgactctttagtagaaagttgagttctgt

SEQ ID NO: 151730 - DNA, 420 bp, Homo sapiens
tctgtattcatttagagatgaattacatttatttaatgataaaatggagatacaatgggagggaagcaatgactgagatgagccacaaaaacacgtctagccttgagggttgcaatgaatattcccagccaaatgagtctgtttaatgwgttttcatgcatgtaagtatatctgcttagctcaacctaattgaatttatagttccattcatggttatttcccaatactttgaaaaccaatatatatttccacatatttaaaaaaatcaccactccaatatttctgttgaatcagaccttgcattatgttgtttaataaagtatggtaagttttggcatgtatgatttttatcatgtaagaagcataatttcttagctaaaaatttagcctttgactctttagtagaaagttgagttctgt

SEQ ID NO: 151731 - DNA, 610 bp, Homo sapiens
gcatgtgtgcctgtgtgcgtgcgcgtgtgtatgtgtgtgtttgtcttgcttctctggacaggcctagcttctccactcatgggtgcccccaggtcctcatcactgtcaccttagagcattagagcctctataggtgctccccaatctctgccctccccacccatggtggtcctggggatgcagacagaggaggggcactgcatattgctgagagggctggcatcctctctaggtggaacacaggtcatttgtaaagttgtaggcctgccaagcaatattggattcaacacattttctcaccttctcttaccagccaccctccagggttccctgactcacctccctgcagatggaggcaaggaggctccacagtcaaaccccctgcctgaggtcacatagtggctarcaggccacgtactgactaaccgcccctgaccaggttcccagtaatgagtgatgaggcccctaatgaccactcctccattgaccaggtcccactgatcaagtccccactgaccatgtcttcctaaccaggcccgcacttaataggcctcatgggccagaccccactgaccaattttccactgagctggtccccactgacaaaacc

SEQ ID NO: 151732 - DNA, 390 bp, Homo sapiens
aatgaggaaaattctagcagtaatgtttaataatgaacttttgtcaaaaagcatttgcagcatggcaacaatctataggcagaacctcgttatttttcaaattggatacaaatggaagatcagatgccacaaccactttagcttcccgtgaagtcacatttggaatattatttatatctaaaaktatgtttaattagcagaagtgtgagctctgatttcaaaatttaatttatcaaaagagattatgaagaattcagtacttgtaaatagataaatgcaaatgttaccgaaaagtgtgggaatcctcgattcttttctaacttggaagaaataattcagccatttatatgtatagcaaggattaagtagcagagtttattgaaggaagat

SEQ ID NO: 151733 - DNA, 403 bp, Homo sapiens
  misc_feature (1)...(403): n = A,T,C or G
tcattntgcactttcatagtatggagacaacttgtttccttaaatntaatgagctaacctccgccaacttanaacttctcttctgtagctcccttacctctctcagccttcagacaactgaagagagttaaagcctttttctggattacagtttggcttaagggaatattgtggctggcttgatctttccaggccattcaaactttctccatatcagaaataaggctgtttggctttcttatcattcatgtgttcgctggagtagcacttttaatttccttcaagaacttttcttttgcattcacaaattggctatgtgttcagcacaaragactgagctttcagcctatcttggctttccacatgccttcctcactaagctataatcatttcgaactttttg

SEQ ID NO: 151734 - DNA, 608 bp, Homo sapiens
  misc_feature (1)...(608): n = A,T,C or G
aaagacctgaagtgagctcatgctattggagaaatggtttcaatagagttggtagtcacagggttgccacaaatcttcaatctgtaaaacacacaatatatgtaaacctcggtaaagtaaagcacaatanaatgaagagtgcttttaaatatatgtatacacatttagatatatttgtttttagcaactgcctagarctattactaagcaggtcacacaagatacatacagtgttgtttgttactcattttcatcacagtttatgctttgatggttctatcttgaatgcatatccatattaagactaaagacgcaaacaggtaatcatgtttttcacaaatcaagaaattatcaccagttaaaaaactgggtcatcatcaaaaacaacactttaacatctttcctggatattttagaaagttcattaattaatttcagaaattaatttaaaggtaagatgtcatttattttgagaaaattaaacactaagcaaaatgaaaaaatgtctagaaacaaacattgttctgttcctgaaaatggcagaaaagataacattatccaaatgtaagggaaaaagtctgcaaaaagcaggttttttccatatctaa

SEQ ID NO: 151735 - DNA, 560 bp, Homo sapiens
gaattccaaggaatggaaccttgggcatgcggtgagtgttatagctcaattagaagctgtgggtcatggaagagaaccggaaggagtttggctcaattaggatggacccrggcacttagctgcacaggaacaatggtaagcctctagtatgatcaggagtcacaatggtgcctcactggatcagaagcacagcagacaccctgccaaatctggaggggtggagtcaacagtgggtctgcaacagtggcattcagcagtggttgatggtgagcaaaagctcagcttgagctggaacaaacatggatcagaagagtgtgcagttgcaagatgtaacggagtgacaacagagctctcatacaatgggaggggacccaaagggggttgccactgccggctcgaatgccctgggtttatatcccgatcattgtccctccccttgtgctctcaggcaatagatgatttcactatttctttacctcctgctcttagactaattggtgagccctctttactacctgattggtcaggtgtgagctaagttataagccctgtgtttaaag

SEQ ID NO: 151736 - DNA, 385 bp, Homo sapiens
tgagtgttatagctcaattagaagctgtgggtcatggaagagaaccggaaggagtttggctcaattaggatggacccgggcacttagctgcacaggaacaatggtaagcctctagtatgatcaggagtcacaatggtgcctcactggatcagaagcacagcagacaccctgccaaatctggaggggtggagtcaacagtgggtctgcaacagtggcattcagcagtggttgatggtgagcaaaagctcagcttgagctggaacaaacatggatcagaagagtgtgcagttgcaagatgtaayggagtgacaacagagctctcatacaatgggaggggacccaaagggggttgccactgccggctcgaatgccctgggtttatatc

SEQ ID NO: 151737 - DNA, 497 bp, Homo sapiens
gctatagtatttcaaggaaacagagtttcttcttagatttgaatttgtaaactcttgagtccaaagttcctaaagtctttcctttcgggagactaacctcagggttctaggtctctggagaggagagttgcaataatagctctggctttgaagtggttttccgtttgaaaagagcatagtctgtataacatttgtgtcctgttcatagataaaaatttaagattttctttcttctttcttcttctttccttctcctcttcttctcctaatctcttttcatgtggagccaccactggagcaccaggaagtaggacaggtaaacttggggaaagcctttcataggaccttcaacattggcataacaataatcattatgatgaaggcgggatattgcttactgcrttaaccttggccttgtaaagaaacacaataaatctgaaacatggttgtcctcatgtcagttataatttcaggaagtgtgctttcttgcttcaaag

SEQ ID NO: 151738 - DNA, 497 bp, Homo sapiens
gctatagtatttcaaggaaacagagtttcttcttagatttgaatttgtaaactcttgagtccaaagttcctaaagtctttcctttcgggagactaacctcagggttctaggtctctggagaggagagttgcaataatagctctggctttgaagtggttttccgtttgaaaagagcatagtctgtataacatttgtgtcctgttcatagataaaaatttaagattttctttcttctttcttcttctttccttctcctcttcttctcctaatctcttttcatgtggagccaccactggagcaccaggaagtaggacaggtaaacttggggaaagcctttcataggaccttcaacattggcataacaataatcattatgatgaaggcgggatattgcttactgcgttaaccttggccttgtaaagaaacacaataaatctgaaacatggttgtcctyatgtcagttataatttcaggaagtgtgctttcttgcttcaaag

SEQ ID NO: 151739 - DNA, 497 bp, Homo sapiens
gctatagtatttcaaggaaacagagtttcttcttagatttgaatttgtaaactcttgagtccaaagttcctaaagtctttcctttcgggagactaacctcagggttctaggtctctggagaggagagttgcaataatagctctggctttgaagtggttttccgtttgaaaagagcatagtctgtataacatttgtgtcctgttcatagataaaaatttaagattttctttcttctttcttcttctttccttctcctcttcttctcctaatctcttttcatgtggagccaccactggagcaccaggaagtaggacaggtaaacttggggaaagcctttcataggaccttcaacattggcataacaataatcattatgatgaaggcgggatattgcttactgcgttaaccttggccttgtaaagaaacacaataaatctgaaacatggttgtcctcatgtcagttataakttcaggaagtgtgctttcttgcttcaaag

SEQ ID NO: 151740 - DNA, 497 bp, Homo sapiens
gctatagtatttcaaggaaacagagtttcttcttagatttgaatttgtaaactcttgagtccaaagttcctaaagtctttcctttcgggagactaacctcagggttctaggtctctggagaggagagttgcaataatagctctggctttgaagtggttttccgtttgaaaagagcatagtctgtataacatttgtgtcctgttcatagataaaaatttaagattttctttcttctttcttcttctttccttctcctcttcttctcctaatctcttttcatgtggagccaccactggagcaccaggaagtaggacaggtaaacttggggaaagcctttcataggaccttcaacattggcataacaataatcattatgatgaaggcgggatattgcttactgcgttaaccttggccttgtaaagaaacacaataaatctgaaacatggttgtcctcatgtcagttataattycaggaagtgtgctttcttgcttcaaag

SEQ ID NO: 151741 - DNA, 618 bp, Homo sapiens
atttatttttctgaaaagtgcctgatcttttaatttgactatcttatttttggattatgygtatgactcttatcaatttgtgggattttaaagtatattttggatggtgattctgtttttaaaatttttttgttactttcaattttgtgggcacatagtaggtacctcaatatatagggcacatgcaattttttgatatagccatccaatgtgaaataattgtagtttggagaatggggtatccatctcctcaaacatttatcttttgtgttactaactgatatggtttggctctgtgtctccacccaaatctcacctgaaatgtaataactcctatgtgtcaagggcaggaccaggtggaagtaattgaatcatgggggtggtttcccccatgctgttctcatgacagtgaatgagttctcatgagatctgatgttgttataaggggcttttcctgacactttgcgtggcacttctctttcctgccaccatgtgaagaaggatgtatttttccctttccactatgattgtaagtttcctgaggcctccccagctaagtcaattatatctcttttctttataaattacccagttttggacagttctttatagcagcac

SEQ ID NO: 151742 - DNA, 562 bp, Homo sapiens
taagttgaatatctctcaaaagaaaaaaagatatattctttttgaatcagagtctcaagttatgctttaacagttttagatcattacttttataggacacttcaaatatgacaacttatgttgtgttaagaggcttatgaaaaatacataatgcacaaatatatatgataataagtaaatttattataagaacaaagccttttatataaatgatatattcttagtagaacacaaagtgtggaaactccttagttttaggtgcattttttaaatcaaaactgaaggagaggaaaatcagttggtaaaaatcactcaacctgaaatgacttctctcacacttcaactcaagctcctattaaataagtgctctaaaacctgttgcctactctacacaccgtagttcattaaagtctcccagcaccatagtcctgagaacacagacagttcttttaagttatattaaaataaataaatactaaccagagagccaagatawtttagagctacattaacagcagtttgacttgaaccttaaagattgcttagttaaaatctctcccaa

SEQ ID NO: 151743 - DNA, 571 bp, Homo sapiens
tcattccaatgttacactcctgagattattttctctgagccttgtaaaaggtcttctttctgctaattcaatctcccaaaagcattttcacaatcaacaaatatgaatcatgctataacattttgctaaatctaataatctacattttctcagtcttggatatcactcacctgcaattaccccactgaaatggacttttgtaatttttacagaataagataaccagattatgttaattacagttggaaggcaggggccatgtgttgtgagctacagaacttggctatctagaagataatatgttaggggttgattatactgaggcttcctcgaaacctttataaaatgtggaaatactatttatccaccctgtgaattttgtgataaagttgaaaaagtcctgacctcagaatacttacatgtagacttctctcctcgtgttttttttacttatgtctattttcctcagttattaaggtatcataacttatkttattgagtagattaggtcttagaagccaataaatgtaatttttctatgtgaaataattatcctcactaatcttcattt

SEQ ID NO: 151744 - DNA, 593 bp, Homo sapiens
aaaacaagttattaactttcaagatactatggtggtacaggarttggataaacattccctttacaaaagggaaaagtcagccaaaagaagggacaccaatactcatgcaagtctgaaactcagcagagcagatattaaatcttaaagctccaaagtaatctttggctctatgtcccacaccctgggtgcatggtgtgaggggtaggttccaaagacttaggaagctctacacctatggctttctgagtgcagcccacatggctgctgtcatggatttgactctgatatatgcagcttttccaggctgagggtgcacattgctggtggctctaccattctggggtctggagggtggtggccccattcccacagttccattaggcagtgctctggtagggactctgggtgtgagctcccatcttggctcccctcagcactgccctagtagaagctccctttagggattctgcctgggcacctaggccctttgatacatcttctgaaatctatgtggaagctgccatgcctccttcactctcgtgttctgtgtgcctgcaggcttaccaccacttggaagccaccaagctatggct

SEQ ID NO: 151745 - DNA, 555 bp, Homo sapiens
catctgtgtcatcacaaatggcaggatttccttcttttataaggctgaatagtgagtgctccattgcatatctacagtggtgcatcatttaatgacggggagctttccaaaaaatgcatgtttaggtagcttcatcattgtgtgaacatgatagagtagacctccacaaccagatggtatagcatactacacacctaggctatgtggtatagccacttgttcttaggctacaaacctatacagcatgttacagtactgaaatagtgtaggcaattgtaaaacaatggtatttgcgtatctaaacataattaaacatagaaaaggcatagtacaaatacagcataaaacattaaaaagggcccacttgtgtagggcacgggccatgaatgtagcttgcaagactggaagttgctctgggtgagtcagtgagtgagtggcgagtgaatgtaaaggcctaggatattacagtttacattttttttaatttsttctttcaataataaattaaacttagctattattattcaacaataattaaccttagtataactttat

SEQ ID NO: 151746 - DNA, 558 bp, Homo sapiens
atgaatgtactacttgttgataataatatttctctcctatatgaaccacataaagcaataattaaaactctaagttagtgggcacacattgtgtaatatgacatcagctcaaaaagtggaaaggaaacaaactatacaggagcaaagattttgtataccacgaattaagtttatattaattctaactagattgttataaataggatgtttattgtgatccccgtggtaattgctacraaattaagttttaaaatatagtcaaagaaatgagttaaaatggtatgttagacaatgtctatttaatacagacaaaggcagttttgaagaaataaaggaacaaaaaagacaaaaggcctgcgaatgtaaatagaaagttaggaagaattatgcccttttgaatgagattttaaactacttggaattagtaaagcagaagggtacacaaaggttacaggagtaaggccttttggctttttctaaattatctcatttttttttcttgacctgcattgtctttttaaatctagaaatctcttaaaagtaaatacatcatcttcc

SEQ ID NO: 151747 - DNA, 536 bp, Homo sapiens
aatatgagcacttccactgaaaataatctcagctgtcttcacaggaatttaaattatgccaaaaccttgctcaagaaaaaagaaagcatgcttggcaatgccacacttattttctcagatatctcttttgtttaatgtaatcagaaaccagagaaaagaagaggtggcctaaaaatgaaaagaaatatttgatagaaatttgaattctctaaatttgtttccawaaatataagtcaggaatctgggggcatgccaacagcatatataaatatggaatgagatctatggtgatatttatctttttcctagcatttttaggatatactgaaatcagataatttgaacaaaggggagattgattgcagattattgtaggcaattatagcaaggaggcagagggaatgggcagtactttcagagagccttgagaacagtggcaccaaggtctgtggaataattaatgcattacttgtaattaaaacattatttgtaatgctgctacaaatctgttcttgtagcatcatgaatgtacaagc

SEQ ID NO: 151748 - DNA, 536 bp, Homo sapiens
aatatgagcacttccactgaaaataatctcagctgtcttcacaggaatttaaattatgccaaaaccttgctcaagaaaaaagaaagcatgcttggcaatgccacacttattttctcagatatctcttttgtttaatgtaatcagaaaccagagaaaagaagaggtggcctaaaaatgaaaagaaatatttgatagaaatttgaattctctaaatttgtttccaaaaatataagtyaggaatctgggggcatgccaacagcatatataaatatggaatgagatctatggtgatatttatctttttcctagcatttttaggatatactgaaatcagataatttgaacaaaggggagattgattgcagattattgtaggcaattatagcaaggaggcagagggaatgggcagtactttcagagagccttgagaacagtggcaccaaggtctgtggaataattaatgcattacttgtaattaaaacattatttgtaatgctgctacaaatctgttcttgtagcatcatgaatgtacaagc

SEQ ID NO: 151749 - DNA, 595 bp, Homo sapiens
aagcttgtcgcttgatcttctcaactacacacattgaacagrgtgtaataaatccatgtttatttgaaacatttttaataagactgttgcatcaccacacagcttcccctcatcatcactaccaccgccaccccacccaccccacacacataggcaaactttttttgttaattgtactttgctcttcaattcctagttcattactttgacttccgttttgttcttggcttgtttgtggtttgtttactgctttttgttttgggggaactatctgggctggttaaaaaaaatgtgttttagtgtcagacatgacaaaaacctgctgcaacatttatcagctgtgttattttcttattgctcctataagaaattaccacaaactttgtgatttgaaccaacatgaatatctatctagagcgctggaaatcagaaatgcaaaatggttttcactgggctaaaatcagagtctcaaaggactgcatttttttctggatgctccaggaaagaatcttcctttgcctttttcactttctcaaggccacctgcattccttggttcatgtcctcttcttccatcttcaaagccagcagtgtag

SEQ ID NO: 151750 - DNA, 359 bp, Homo sapiens
cgtagccttcagcagagtctcacagtcaacttgcagtaacgagccggaaggaaatctggtgaataaatagggccttgccccaatctcttaatttcctgttaatgtttcccactagctaactccaactggaaggcaacagggccactttgatacagtcactgcrggtcaatgctggggcatagcatatagtgaagagcagcacagtgtgtgtatcagggatccagcagagaagcacgaggatggagagacacacacacagagatttatataaatatatataattgatattcatgtgtaatttgagggtattaatttatataagtataaattaatataaatataatttatttataataagc

SEQ ID NO: 151751 - DNA, 559 bp, Homo sapiens
tatgtatttgtatgtgtgtggttattgaaaaaaacacttatgtatcctttggagacatattgaggcacaaagcactttgaaccctgtacactttgtctctctcctttrcaattcccattacaggctgacccagggaaagctgaggggtggagagatctcataatgcggaacattcattggctgtattgcaactcttcctcatccccttcctataaagagctgaccattgtggaagcatgccaatgacctccagatctctgtggccaggatagtcatggatttagcagtgctgagctattttgatggtgtagttagcagtaggccaaaaccagacgacgtgagctcctgtggtttacagcaagagcctctgggaatctgttggaagaaagctgagtgttgggaagaaagctcaggcagggtttgcataatgttctctggaatgtgtctagacttgctggctcctttcttctagccctcctgggctcctagatcgattgtattcccattatctcaagtagcagaagatgttccatataaatgctaaaccatcacagctgta

SEQ ID NO: 151752 - DNA, 559 bp, Homo sapiens
tatgtatttgtatgtgtgtggttattgaaaaaaacacttatgtatcctttggagacatattgaggcacaaagcactttgaaccctgtacactttgtctctctcctttacaattcccattacaggctgacccagggaaagctgaggggtggagagatctcataatgcggaacaytcattggctgtattgcaactcttcctcatccccttcctataaagagctgaccattgtggaagcatgccaatgacctccagatctctgtggccaggatagtcatggatttagcagtgctgagctattttgatggtgtagttagcagtaggccaaaaccagacgacgtgagctcctgtggtttacagcaagagcctctgggaatctgttggaagaaagctgagtgttgggaagaaagctcaggcagggtttgcataatgttctctggaatgtgtctagacttgctggctcctttcttctagccctcctgggctcctagatcgattgtattcccattatctcaagtagcagaagatgttccatataaatgctaaaccatcacagctgta

SEQ ID NO: 151753 - DNA, 414 bp, Homo sapiens
tccccagtttctacccagcttaccccccctgcaatacaatcttcaagccttggctccttgcccagggccttagaactgataacctagtactttaacagctggaactgggtctacaacaacataatagatcaggatgaaaacaaattcagtaaattaaagggaggcgtatattcctatagtggcaaatgrgggcaacgagcaaatgtccttccactttgtttccaaaacccatctacagaggagaaagaaagagatatatacaagaaaaaacagcgtaccctattcctttaaaagccagggtaaatgtaaaacctataattgataaatggaggtcttctccatgaccctataacactccaatactaccttgttgtcagtgtaaacaagggcatagcctgaaagcactgagaccac

SEQ ID NO: 151754 - DNA, 553 bp, Homo sapiens
ctagtaattaatattaacattgatacttattattaayattaataattaatgattaataattaacattattactcctaataccacagggggtgtacacctacctgtgatattgttcctaacatccgttattgttcctagtatctggagggggagaggatgataataattccagtattgcaggctggattcactcactctgtgatattgttattaacatcctggcagggagagggtgacattactccccatatggcaggaggtgtacacccaccctgggatattgttcctgatagccatggagggcagaggctgatattactcgcaatatcgcagaaggtctacatccaccctgtgatattattcataatattcaaaggccgagaggttgatattactcccaatattgcagaaagtgtacacccccgtgtgatattgttcttgatatccagaaggggagatgatattactcctcatatctcaggaggtgtacacccattctgtgatatctttcttcatatgcagggcgggaggagaggttattcccaatatcgca

SEQ ID NO: 151755 - DNA, 553 bp, Homo sapiens
ctagtaattaatattaacattgatacttattattaacattaataattaatgattaataattaacattattactcctaataccrcagggggtgtacacctacctgtgatattgttcctaacatccgttattgttcctagtatctggagggggagaggatgataataattccagtattgcaggctggattcactcactctgtgatattgttattaacatcctggcagggagagggtgacattactccccatatggcaggaggtgtacacccaccctgggatattgttcctgatagccatggagggcagaggctgatattactcgcaatatcgcagaaggtctacatccaccctgtgatattattcataatattcaaaggccgagaggttgatattactcccaatattgcagaaagtgtacacccccgtgtgatattgttcttgatatccagaaggggagatgatattactcctcatatctcaggaggtgtacacccattctgtgatatctttcttcatatgcagggcgggaggagaggttattcccaatatcgca

SEQ ID NO: 151756 - DNA, 553 bp, Homo sapiens
ctagtaattaatattaacattgatacttattattaacattaataattaatgattaataattaacattattactcctaataccacagggggtgtacacctacctgtgatattgttcctaacatccgttattgttcctagtatctggagggggagaggatgataataattccagtattgcaggctggattcactcactctgtgatattgttattaacatcctggcagggagagggtgacattactycccatatggcaggaggtgtacacccaccctgggatattgttcctgatagccatggagggcagaggctgatattactcgcaatatcgcagaaggtctacatccaccctgtgatattattcataatattcaaaggccgagaggttgatattactcccaatattgcagaaagtgtacacccccgtgtgatattgttcttgatatccagaaggggagatgatattactcctcatatctcaggaggtgtacacccattctgtgatatctttcttcatatgcagggcgggaggagaggttattcccaatatcgca

SEQ ID NO: 151757 - DNA, 553 bp, Homo sapiens
ctagtaattaatattaacattgatacttattattaacattaataattaatgattaataattaacattattactcctaataccacagggggtgtacacctacctgtgatattgttcctaacatccgttattgttcctagtatctggagggggagaggatgataataattccagtattgcaggctggattcactcactctgtgatattgttattaacatcctggcagggagagggtgacattactccccatatggcaggaggtgtacacccaccctgggatattgttcctgatagccatggagggcagaggctgatattactcscaatatcgcagaaggtctacatccaccctgtgatattattcataatattcaaaggccgagaggttgatattactcccaatattgcagaaagtgtacacccccgtgtgatattgttcttgatatccagaaggggagatgatattactcctcatatctcaggaggtgtacacccattctgtgatatctttcttcatatgcagggcgggaggagaggttattcccaatatcgca

SEQ ID NO: 151758 - DNA, 563 bp, Homo sapiens
ggtctgtacaccttctgtgatattgggattaatgttatcctctcccccactgaatattagaaacaatatcacagacatatcacaaacatagcaaagctcctaagctcacgctctttccagtctgtttttaaagacaggcccacacctgtgtaaagtctttaactcatgttggattgatccagttagctctccttggtgcttttgtatctactattccctgcctctctctgtcatgtcttatctccttcattctccagcactttagtaaaatccttttcatcaagcagcttagcttcatccctgtgtttcccaatctcagcatgattgacatagtgggacagataattcctttctgtagggagctgtcctgtgcttgtaggatgttcagccacatccctggactccacccactagataccagttgtgacaaccaaaaatatttccaggtcttgctaagcatcccgaggagmgcaaaattgccctcagttgagaatccctgctctggtgtatctttccctacatatcaaaaaaatatatttcagaggcttccttgaaaaccatag

SEQ ID NO: 151759 - DNA, 589 bp, Homo sapiens
tcagtcaatctgaatatgtaattgcttacttttgtttcttctttcttaataattgattatgtgaaagatgaaagaaacaatgtgaaactgactctaaactctaatgcctaacaaacaatcagacactatacaatgacactgttttggcaacctggccactgaacacatgattggcactatgaaagaactaaatattttaatttaatttaatttcactttggaaattaatacagaacttcattattagaaaacatttaagtatgtttggaataacgtaattgtgtgaatatacaacttttaagttttataaaatataaatacagattaagtatttctgatgaraattttgaatccaaattgagatgtactttattataaactgggtatccaagtcttggtacaaaaaagcagacgtgcactatctcatgagtcatttttaagttgatcacatgttgaaatgacaatatttttactagattaagtaaaataacttattaaaattcattgcattttttttactttttgtattgtgaccacaagaaaagtttaagtgacatttgtggctggcattatatttctgttggacagt

SEQ ID NO: 151760 - DNA, 511 bp, Homo sapiens
tttggctacataaaaagcaaagcctattccttaaattagtcctttaagagagtgactatcaagccaaataatagaagatatttacaayccatataactaaaaaatggttcataattaataaataattcatcttataatcaataatgaaaaaagtcctctagaacaatgataggcaacaagtttgaacaggcattttgtaaaagggaatatccatgtatgccttaaatagacaacaaagtatgtattactactttttaaaatagtagttgggaaatgtaaaataaaaccacaatgagattccagtagacttcacgagaagggctgagattttatgaactctgacaatgtcaagtattagcaaggatacagaacaatagaaactttcatacagatttggtagaagtataagaattctcaccatgcacacacaaaaaattaactatatgaggtgatggatatgttgatcagcttgattgtggtaatcatttcaacaatgtaaatgtatatcaaa

SEQ ID NO: 151761 - DNA, 511 bp, Homo sapiens
tttggctacataaaaagcaaagcctattccttaaattagtcctttaagagagtgactatcaagccaaataatagaagatatttacaacycatataactaaaaaatggttcataattaataaataattcatcttataatcaataatgaaaaaagtcctctagaacaatgataggcaacaagtttgaacaggcattttgtaaaagggaatatccatgtatgccttaaatagacaacaaagtatgtattactactttttaaaatagtagttgggaaatgtaaaataaaaccacaatgagattccagtagacttcacgagaagggctgagattttatgaactctgacaatgtcaagtattagcaaggatacagaacaatagaaactttcatacagatttggtagaagtataagaattctcaccatgcacacacaaaaaattaactatatgaggtgatggatatgttgatcagcttgattgtggtaatcatttcaacaatgtaaatgtatatcaaa

SEQ ID NO: 151762 - DNA, 275 bp, Homo sapiens
cacctgcctctccctgcaccccagctgtccaccctgcctgttctctcacttcctccatcctgtccagcaggatgggatgggcagggggacagcctgtgtgcacatttcatggcaagcaggagtgacacatcatccctgggaggcgccttgsttcctccaaaacccggccccagaactctgtccctggggtggttttaccaaatcccaaacccagaactgtggttgtggttcaggggtcagcgcccgctggttctacaatgtcgccaaggactttg

SEQ ID NO: 151763 - DNA, 501 bp, Homo sapiens
tgcccaggctggtctcaaactcctgaactcaagcaatccacccaccttggccttgcaaagggctgagattacaggtgtgagccaccatgyctgggcaacattgagattgatttaaagaaattgattagggctgggtgtggtggtgcacactgcttatctcaacactttgggaggcagaagtggaagattgacttgagcccaggagcttgagaccagcctgagcagtataatgaggccttgtctctacaaagataacaataaaaacattagcatggcatgatggtatgcacctgtagttccagctattcaggaagttgaggtgggaagattgcttgaggtcaggagtttgagaccacggtgagccataatcaggcccctgcattctagccctgggttgacagagtgagactcagtttcataaaaagagattgataagaaactcttgatgcaactcattataattttaaatggaaactaattcttgatattaccttagcagtg

SEQ ID NO: 151764 - DNA, 501 bp, Homo sapiens
tgcccaggctggtctcaaactcctgaactcaagcaatccacccaccttggccttgcaaagggctgagattacaggtgtgagccaccatgcctgggcaacattgagattgatttaaagaaattgattagggctgggtgtggtggtgcacactgcttatctcaacactttgggaggcagaagtggaagattgacttgagcccaggagcttgagaccagcctgagcagtataatgaggccttgtctctacaaagataacaataaaaacattagcatgrcatgatggtatgcacctgtagttccagctattcaggaagttgaggtgggaagattgcttgaggtcaggagtttgagaccacggtgagccataatcaggcccctgcattctagccctgggttgacagagtgagactcagtttcataaaaagagattgataagaaactcttgatgcaactcattataattttaaatggaaactaattcttgatattaccttagcagtg

SEQ ID NO: 151765 - DNA, 501 bp, Homo sapiens
tgcccaggctggtctcaaactcctgaactcaagcaatccacccaccttggccttgcaaagggctgagattacaggtgtgagccaccatgcctgggcaacattgagattgatttaaagaaattgattagggctgggtgtggtggtgcacactgcttatctcaacactttgggaggcagaagtggaagattgacttgagcccaggagcttgagaccagcctgagcagtataatgaggccttgtctctacaaagataacaataaaaacattagcatggcatgatggtatgcacctgtagttccagctattcaggaagttgaggtgggaagattgcttgaggtcaggagtttgagaccacrgtgagccataatcaggcccctgcattctagccctgggttgacagagtgagactcagtttcataaaaagagattgataagaaactcttgatgcaactcattataattttaaatggaaactaattcttgatattaccttagcagtg

SEQ ID NO: 151766 - DNA, 501 bp, Homo sapiens
tgcccaggctggtctcaaactcctgaactcaagcaatccacccaccttggccttgcaaagggctgagattacaggtgtgagccaccatgcctgggcaacattgagattgatttaaagaaattgattagggctgggtgtggtggtgcacactgcttatctcaacactttgggaggcagaagtggaagattgacttgagcccaggagcttgagaccagcctgagcagtataatgaggccttgtctctacaaagataacaataaaaacattagcatggcatgatggtatgcacctgtagttccagctattcaggaagttgaggtgggaagattgcttgaggtcaggagtttgagaccacggtgagccataatcaggcccctgcattctagccctgggttgacagagtgagacycagtttcataaaaagagattgataagaaactcttgatgcaactcattataattttaaatggaaactaattcttgatattaccttagcagtg

SEQ ID NO: 151767 - DNA, 325 bp, Homo sapiens
gtttaaattttagtctttgaagtggtttatgcacgtttctggaatcaagatttaacgtggacttggattggatattgaatatttttgatttgtctacttttctctccatagggagcttatagcttcattgcactgtgtgtggcatttgggtcctgtttggcagcaatgactgcctttctgtttagtgtctgtgtgctatgaagattgcacacaggggtccaratgcatcctgttttgagaatgtcaatggatacaccagctgctgctttggatttcacccattggtggtagttgacctgctgtttggaatgcagacaatttaagt

SEQ ID NO: 151768 - DNA, 325 bp, Homo sapiens
gtttaaattttagtctttgaagtggtttatgcacgtttctggaatcaagatttaacgtggacttggattggatattgaatatttttgatttgtctacttttctctccatagggagcttatagcttcattgcactgtgtgtggcatttgggtcctgtttggcagcaatgactgcctttctgtttagtgtctgtgtgctatgaagattgcacacaggggtccagatgcatcctgttttgagaatgtcaatggatacaccagytgctgctttggatttcacccattggtggtagttgacctgctgtttggaatgcagacaatttaagt

SEQ ID NO: 151769 - DNA, 325 bp, Homo sapiens
gtttaaattttagtctttgaagtggtttatgcacgtttctggaatcaagatttaacgtggacttggattggatattgaatatttttgatttgtctacttttctctccatagggagcttatagcttcattgcactgtgtgtggcatttgggtcctgtttggcagcaatgactgcctttctgtttagtgtctgtgtgctatgaagattgcacacaggggtccagatgcatcctgttttgagaatgtcaatggatacaccagctgctgctttggatttcacccattggtggtagttgaccygctgtttggaatgcagacaatttaagt

SEQ ID NO: 151770 - DNA, 325 bp, Homo sapiens
gtttaaattttagtctttgaagtggtttatgcacgtttctggaatcaagatttaacgtggacttggattggatattgaatatttttgatttgtctacttttctctccatagggagcttatagcttcattgcactgtgtgtggcatttgggtcctgtttggcagcaatgactgcctttctgtttagtgtctgtgtgctatgaagattgcacacaggggtccagatgcatcctgttttgagaatgtcaatggatacaccagctgctgctttggatttcacccattggtggtagttgacctrctgtttggaatgcagacaatttaagt

SEQ ID NO: 151771 - DNA, 354 bp, Homo sapiens
tggttgggacaggcagcatgaacactgacacaggcactttcaggctctctttgtggcctaatggctctcacaattggggctgggttccaagggaaaacagtctgatatagggaagccacatggtatccctttctctacattctactcattagaaggaagtcagtaaggctggcccatattctttgttttaaatgggatgaatgtagcttctcttttgttttaattgacacatatatacataawtatgggctatagggtgatatttttatacatgtatatagtgtgtaatgatcaagctaactagcacatttactacttcaaccatttttcatttctttcaattgtgaacattca

SEQ ID NO: 151772 - DNA, 609 bp, Homo sapiens
agggcagggtcactgtgcagccacgttctttgctgcagcaaaacaaaagtaaccttggctcctgtttgcagtaagtccctccttttcatctgagagcttcttaatctgatccttactgtctattttcctatgagccttctgatcacaagtatttaacaattctttacaaagatccaaactttccctcatctccctgtcttcgaagtcctccaaactctcccaaactccatctgctacccccttctgaacctgcttctatattatcagctatctttgtcgcaggctggcaatgtggtaaaggaagacaagcccattttctggggaaaaattcaaggaggcttcagatacttgagtgaaaagaagctgagtgctgattgccaagacattagggagaaggccttgaagayacttaatagatccactttgcagtcataattttctccatgatcataaagaaaacaggtttaattggttaatgattctgcagactgtaaggaagcatagtggcttctgcatctgacaggactcaggaagcctcccaatcataccagaatgtcaaagggcaaggagatgtctcatatggcaagagtaggagcaagacagagaaag

SEQ ID NO: 151773 - DNA, 585 bp, Homo sapiens
aattcacgtcctttgctgggacatgaatgaagctggaaagcatcattctcagcaaactaacacaagaacagaaaaccaaacaccacatgttctcattcataactgggagtagaacaatgggaacacatggactcaggaaggggaacaccacacaccagggcctgtcagggtggggggctaggagagggacggcattaggagaaataactaatgtagatcatgggttgatggatgcagcaagccaccatggcatgtgtatacctatgtaacaaacctgcatgtctgcacatgtaccccagaacttaaagtataattaaaaaaaaaagaaatttgcttttaattaagcytttaatcatagaacttgtaaagaaaatcctttcgaatcttttactaccacatcatagctgggacaaactgctgacgttctaaaagtaacacaaatatcaaacagaaagaactagacttaggaatcaaactcaggttactgtagtgaacagggcagaatcttcacattaggtcaccaccagtactccttcactttggccttggctagcaaaagaatggcctttttatgtagatgagaca

SEQ ID NO: 151774 - DNA, 212 bp, Homo sapiens
taaagagtcaaaggctatatttttagctaagaaattatgcttcttacatgataaaaatcatacatgccaaaacttaccatactttattaaacaacataatgcaaggtctgattcaacagaaatattggagtggtgattttttwaaatatgtggaaattatttttttgttttcaaagtattggaaataaccatgatggaactataaattcaaa

SEQ ID NO: 151775 - DNA, 342 bp, Homo sapiens
ttaaaaagtaaaactttcgtctaggtaaagatcagaactccaactagcacttaactcactggaaatatcttaagagtctcaaaattcactgctttgaatccctgacaagtataaaaattttatactgaaaacttcatgctattcaaaacattaaaacagaaacatctgacttaaagcttacatttttaaaatcttttttatgcttctaaatttgtttttattcaaatayggataccaacaataacatttatgtcaatgccttctgttcaatattgaacaaatagaattaggaataagaataatgtgagtacttccaatcattgaatgtacttatttccagta

SEQ ID NO: 151776 - DNA, 438 bp, Homo sapiens
acactagcaacaagcctctaaagttaaaacagaaactgacactttaaaaagtaaaactttcgtctaggtaaagatcagaactccaactagcacttaactcactggaaatatcttaagagtctcaaaattcactgctttgaatccctgacaagtataaaaattttatactgaaaacttcatgctattcaaaacattaaaacagaaacatctgacttaaagcttacatttttaaaatcttttttatgcttctaaatttgtttttattcaaatacggataccaacaataacatttatgtcaatgccttctgttcaatattgaacaaatagaattaggaataagaataatrtgagtacttccaatcattgaatgtacttatttccagtatcccattaaatgtacctgctctcaatgtctgtacatccttttttgtactgctc

SEQ ID NO: 151777 - DNA, 438 bp, Homo sapiens
acactagcaacaagcctctaaagttaaaacagaaactgacactttaaaaagtaaaactttcgtctaggtaaagatcagaactccaactagcacttaactcactggaaatatcttaagagtctcaaaattcactgctttgaatccctgacaagtataaaaattttatactgaaaacttcatgctattcaaaacattaaaacagaaacatctgacttaaagcttacatttttaaaatcttttttatgcttctaaatttgtttttattcaaatacggataccaacaataacatttatgtcaatgccttctgttcaatattgaacaaatagaattaggaataagaataatgtgagtacwtccaatcattgaatgtacttatttccagtatcccattaaatgtacctgctctcaatgtctgtacatccttttttgtactgctc

SEQ ID NO: 151778 - DNA, 519 bp, Homo sapiens
ttatactgaaaacttcatgctattcaaaacattaaaacagaaacatctgacttaaagcttacatttttaaaatcttttttatgcttctaaatttgtttttattcaaatacggataccaacaataacatttatgtcaatgccttctgttcaatattgaacaaatagaattaggaataagaataatgtgagtacttccaatcattgaatgtacttatttccagtatcccattaaatgtacctgctctcaatgtctgtacatccttttttgtactgctcctttcacagcatgatcttccacttcagtgctaggctgaatgggttttaaaagaaaatgattcataaatcatatatattttatacaacatggagttagtgattcaaaaatatacataattaattacttwcaaggaaggatgttttgcaggaggccctacaaagcaaaggggatatgtcatcaattatatgtaagtatgacagggccaaccaaacattcatgcagtgttactattgagttgaatt

SEQ ID NO: 151779 - DNA, 515 bp, Homo sapiens
aatacagacaccaaaggaaatggtcaagaaaaagaaaacagaaaggggtcgggggwggggagcgtagaattcagacacttccagaggctccacaattgtctctgaggatctctaagaagcctgtctgctctctaggaagtcagcccgctccccgccaaacctgcactctctcccaggttctggtctggctgcataagatcctcaggcaagggtggccccagagggctagtggctctcctgagctcttcccacaggaatccccgctctgcagacaggacacagtggctttctcatgggtgacatggaattatgagcccaagcatgccagtgacatccctgctcatggagctgtagccctgttgcgggccacagggcactgccccccatgggaccttgagtgggctgggtgctaccttcagagggtctggaggatccagcacagaagcccagccagggatgactgacacctggccctggcccctggctcagaaaccctccaaccatgccaccatcca

SEQ ID NO: 151780 - DNA, 344 bp, Homo sapiens
taacaggatatcacacctctttcctcgttactgtcggcgactactcctgccatatgaaacatttcattgccgcttggccttctggtataattgggaggcttcctgagtctcctacaagcagaaaccactatgctttctttacagcctgaagaactgtgagtcaawtagacctcttttctttatgtagatacagaaaattaatgctgtgaagtgaagttatgaaatgacttctaggagtttcccccattctcttggctattagcactgagcttttttcaatgcaaatattggaggccatcttgatgtttccccctgataatggacttttcttcttttaccacatt

SEQ ID NO: 151781 - DNA, 344 bp, Homo sapiens
taacaggatatcacacctctttcctcgttactgtcggcgactactcctgccatatgaaacatttcattgccgcttggccttctggtataattgggaggcttcctgagtctcctacaagcagaaaccactatgctttctttacagcctgaagaactgtgagtcaattagacctctwttctttatgtagatacagaaaattaatgctgtgaagtgaagttatgaaatgacttctaggagtttcccccattctcttggctattagcactgagcttttttcaatgcaaatattggaggccatcttgatgtttccccctgataatggacttttcttcttttaccacatt

SEQ ID NO: 151782 - DNA, 344 bp, Homo sapiens
taacaggatatcacacctctttcctcgttactgtcggcgactactcctgccatatgaaacatttcattgccgcttggccttctggtataattgggaggcttcctgagtctcctacaagcagaaaccactatgctttctttacagcctgaagaactgtgagtcaattagacctcttttctttatgtagatacagaaaattaatgctgtgaagtgaagttatgaaatgacttctaggmgtttcccccattctcttggctattagcactgagcttttttcaatgcaaatattggaggccatcttgatgtttccccctgataatggacttttcttcttttaccacatt

SEQ ID NO: 151783 - DNA, 241 bp, Homo sapiens
tcattgtttgcataaattgaatgaatacataagaaaaacgtatgtacataataaaatatatagataataaaatctggaaacagataaaaayattccctttttacttctgaagaggctaaaagttcaaagaagataacaatacactcaataatgataaaaaatagaaagcgagaaattatttttaatattgtaagattcatattcccctcttcccaaggattattcctttactaataaactt

SEQ ID NO: 151784 - DNA, 241 bp, Homo sapiens
tcattgtttgcataaattgaatgaatacataagaaaaacgtatgtacataataaaatatatagataataaaatctggaaacagataaaaacattccctttttacttctgaagaggctaaaagttcaaagaagataacaatacactcaataatgatwaaaaatagaaagcgagaaattatttttaatattgtaagattcatattcccctcttcccaaggattattcctttactaataaactt

SEQ ID NO: 151785 - DNA, 241 bp, Homo sapiens
tcattgtttgcataaattgaatgaatacataagaaaaacgtatgtacataataaaatatatagataataaaatctggaaacagataaaaacattccctttttacttctgaagaggctaaaagttcaaagaagataacaatacactcaataatgataaaaaatagaaagygagaaattatttttaatattgtaagattcatattcccctcttcccaaggattattcctttactaataaactt

SEQ ID NO: 151786 - DNA, 598 bp, Homo sapiens
ttttaaacgcacacttagttaactgaagtgttttaggtaaagaacataattctttatttttctttccagctgttgctgtgttggacacttgctcccatctactttcttctctagaatccactggtaagccatatctaacaaagagaatatttaaccataaartcttaaggaaaaattgtatgatttaaaggattataaaactttattaccaggctatttacacgttttaattgtttctcacaaaatatataacattacaacatttactgaagtaggatatttttgtatcatatgtatgaagataatttatagggtattttaaatgatgttttttaacctccttaagttttaagtggatcttgcaaatgaaaaccagtattattgagtttgacatactcaaattgcccaaatgtcagctgtttaaacaaccacgtcatcgatactttagtaaaggttagtaaaggtcatcaaaggcttatttgcattttacagtttttattacttaggagacttaaggagtacctgccaggtttgtccatactaatgttatgattttctttttgtagttcaaccgtattttgtatggagatactttgag

SEQ ID NO: 151787 - DNA, 539 bp, Homo sapiens
tcaggcattagttacttatcttgatgctctccctcctgaccccaacaggctccagtgtttgttgttcccctccccgagtccacatgttctcatcattcagctcccacttataagtgagaagatgcagtgtttggttttttcttcctgcattagtttgctgaagatatcagctttgggttcatccatatccctgcaaagagcatgatctcattcatttttatggctccatagtattccatgtgtgtatatataccacattttctttatcccatctatcactgatggacatctgggttgattccacgtctgtactattgtgaatagtgctgcaatgaacatacaaatgcatgtatctttatagtagaataatttatwttccaacgtatggtaattttaaatcagttttggtattaaaaatcacgtaattttggaaaatattgataatggaaaaacccaaattctgccaaaatatgtggagaaaatagaaggtaaatatattttttcagactttaaatgcctcaggctcttagttaatcttc

SEQ ID NO: 151788 - DNA, 380 bp, Homo sapiens
atctatattaaaggacatatcacagcaaattgcagacagagtgaactttcaaagcctcaggcctcattgtttcattcataatttttaaaaatcttaaaatctttcaaaagactaaaagcgaagcccaaattcctcaatatggcatacaaggcaccccagctctggcccctggtcccctcctcagcctcacctctcaccactcccctcctcctgccccagccattccccagcctcgctttgtactcgccttttccagcctatctgcctgtatttcagttctaccaatggcctcgtatctcttccaaccaaaacgtttgtttttctcctgartgaaaccaccatgcccaaaaatggcctccatttggttgacttctacacat

SEQ ID NO: 151789 - DNA, 515 bp, Homo sapiens
ggcagtcgcctgactgtgagtacactagcaatttgaaaacaataaatctgcagtgagaagtagaattcatcatactaaatatcattttcctaaattcctcmtttcaattctgttaaaaaggcctcttattattcgaattaaaattgtcaaaataccgcttcaaaagtagagcagagaaagagagacaagcatcatccagttttatctttcaatctttttgaagctctatatttacctaatcactctcgtgagaagggggttgctttgcaaaaagctttctttggagaaatgcattaaatccttcaagcaatcagggctatttttgtctttctatattagacacaccccaacaagtatggcagtctgctgacatcttcatcagcctgtttcttgcctctttgttatggcagcagagggtgaagcatgttcttctgcacccctgaccagcccaagcatcttttaaagtttctaattaaatcatggctgcttatgcccttggatatttgtcatttgca

SEQ ID NO: 151790 - DNA, 515 bp, Homo sapiens
ggcagtcgcctgactgtgagtacactagcaatttgaaaacaataaatctgcagtgagaagtagaattcatcatactaaatatcattttcctaaattcctcatttcaattctgttaaaaaggcctcttattattcgaattaaaattgtcaaaataccgcttcaaaagtagagcagagaaagagagacaagcatcatccagttttatctttcaatctttttgaagctctatatttacctaatcactctcgtgagaagggggttgctttgcaaaaagctttctttggagaaatgcattaaatccttcaagcaatcagggctatttttgtcyttctatattagacacaccccaacaagtatggcagtctgctgacatcttcatcagcctgtttcttgcctctttgttatggcagcagagggtgaagcatgttcttctgcacccctgaccagcccaagcatcttttaaagtttctaattaaatcatggctgcttatgcccttggatatttgtcatttgca

SEQ ID NO: 151791 - DNA, 431 bp, Homo sapiens
tgttcctctggcatccagaacaaaaggatcccaagccccatggatgtctgccctggggctcatgccctggggcttaccaggcttggagcctgggtcactttctgtttggaagtgaggcagccacaagrcccctcttgttccctctgggacacctgccctgaatatagtgcattcagatggacccgtgacctgtcctgaggtttcacgtccacactcagtctcctggctctgtgggaggagcgctaggccaggctgggatgagacagagctcctgccatggaagtctggcacagactgtcctggatgtccaagcaatacctattgccttgtgatatggtttggatctgtgtccctgcccatatctcacatggaattgtaatcgccgatgctgggggtggggtctggtggaggcgattgtatcatgggggcag

SEQ ID NO: 151792 - DNA, 459 bp, Homo sapiens
tccagaacaaaaggatcccaagccccatggatgtctgccctggggctcatgccctggggcttaccaggcttggagcctgggtcactttctgtttggaagtgaggcagccacaagacccctcttgttccctctgggacacctgccctgaatatagtgcattcagatggacccgtgacctgtcctgaggtttcacgtccacactcagtctcctggctctgtgggaggagcgctaggccaggctgggatgagacagagctcctgccatggaagtctggcacagactgtcctggatgtccaagcaatacctattgccttgtgatatggtttggatctgtgtccctgcccatatctcacatggaattgtaatcgccgatgctgggggtggggtctggtggargcgattgtatcatgggggcagattgcccccttggtgctattctcatgatagtgagtgagttc

SEQ ID NO: 151793 - DNA, 589 bp, Homo sapiens
ccagacctactgagtcagaatctctgggagtggtatcgtgggatccaaatttttagcaatattgattttaacaatatgtaatgcaccctgaagtttgagaacatgtactttttcttacaggtgattttatgtagagaattcaactgacaagaaggtccctcgtgcccttaaccttgtccccacccctttggggccctcagtgctttacttaccagtcctctctgccctcaggcaggagcaggtgctccggctttggactcagggawtctgccaaacattttccgccatccctgaacttcctgttcttcccagaaaccttggcacaggcaaaggacagtcagagagtggcggaggcatatgcccagttggaagaacttggaagcagaccccatgtgcagactctgagtcagccctctctgctggggaaagcagcaggaagttcagtgagtcagcgctgccggtgacagcgggtgccggcctggggcagccaggaagacaggcctccgaagcgtctctcctggcttagaggatagtggcttggaacctttgccctgccgcctaacacacaatgcttgcgtatagtatggtc

SEQ ID NO: 151794 - DNA, 172 bp, Homo sapiens
aactaaaactgaaactgggtaatttataaagaaaagaggtktaattggcacatggttctgtgggctatccaggcttctgtttctggggaggcctcaggaaacttacaatcatggcagaaggaaaagaaaagcagtcacattgtcacatggccagcatgagagagagagaaca

SEQ ID NO: 151795 - DNA, 542 bp, Homo sapiens
tcttctagctctagcaatacttgaggttccttggcttctagttgcgtgactgtcttcttcctgtgtgtcttctgtttgcatgtgtctgtctttatgtccaaatttcctctttctakgaggaaataagtcatattggattagggctcatactaataatctcattttaccttgatcacctctgtccagattctgtttccaaataaggtcagattctgaggtattggggtttaggagttcaatatattcttttttgggggatgggacacaattccacctataacaattggtattcccaaaggttctgacctcagccccttttgggtcttgtctttctccccaagtaatcttatctagttgttgactttaataacaactgtagtgtaatgaaaagaacatggtgtttggagtcagactgtcttacattggaccctggctatttcactttttggtgagtttagcaatgtagacatcacagatgtttatttatgcaggtctcagagtggtataatacacgtcaaatcccccagtgtgttctcccacag

SEQ ID NO: 151796 - DNA, 517 bp, Homo sapiens
tctccttggcagctgtattctggagtctggatgttgttctgtaaagatctttaataaaatattgtacaaagacagaaaaaaaaaaaagaatgatgcagtggactttggggtcttgggggaaagggtgggagggggtgagggataaaagactacaaattgggtatagtatatactgctcaggtgatgggtacaccaaaatctcacaaattgccactaaagaacttattcatgtaaccaaacacgatctgttcctcaaaaacctttgaaaataaaaaaaattaaaaaaagaagcctttccttatttagagtcctttcccacaatttgggctatgtgtcccaagcatctgctaatcaaatattatgagattacttgtaccatagtacttatcatactgaattgtatagatctgyttctctgttcgtctccataattagacctcttgttttcccagtatttagtatagaaattagcaacctttttctgttttagtaagtgttctaggatttgcagaccata

SEQ ID NO: 151797 - DNA, 558 bp, Homo sapiens
tttaaaagtctttattaattcattgattttataaacatacattgattctctactcgctgacaagcattatgctgaatagtagggatgaaaagatgaaaaagattacctttctgccctaaatgagctcaccaaccagacacttaagtggataattttaatacaatgtgccaagtgcatcagctgttgggagacaattctccatgggtggctcccatttctgcactttccaagcaaaggcattmacatatatttcgttccagattagctgttcaggaatgtttttatgtcaaactgccttggaaggtagaaatagtgtctctttccagggcagaaggcaggtttgttttctcactaggataataaagatattttttctttccagggtaaagtttgagcaggtttgctggcatccttttgaaaacatggaggtttccaaagtttgagattcttccgttgtgccacaaaccccctctatgtgcatagaaggggaaagttgatattccatgctgagagaatcaaggtatgaaacagcatagtatgaatgcataagtataaacg

SEQ ID NO: 151798 - DNA, 650 bp, Homo sapiens
ggccaggtataaacttacttcataataatcatttagctaacaattttacaattatagctcttgaaaagttatgccagtttttgaacaaatctttctttttcagtagagaaatcttttcccccaagatccactaaataaatacacataagacatgatatagtaatattacagtttcagggagacatggtcacccatgtacttgactagccagagaatatcttataggacacatttgaattaaacatcacatttggatgaacccaaacacttcttaagtaagttgaaaagaaagtatcagtctattatacatatatgtatgtgctagtttcatcatgggtttatgtattactacatgtggtctcaagtcaggcctttattttgccctaaaggtatgctatcagttacaaagtaaagtttgagtgcaaggttatcagaarcccaaaaaggctgctgaaggattggtttagaaaacgggtcagaaggaagattgcaccttccgaagaatgattcaattgcaccccacccacctccatcattccctacccactcctaagtctttcctttctccattggcaggtataataaacctttattttttgtagaaattggacttacttatttttgcattcttgttgttgagttatatacac

SEQ ID NO: 151799 - DNA, 613 bp, Homo sapiens
gcttgctcaccttcactctgttttcctagcacctggcaatcaataagaagcaggtaagtccccagtatacgcaattgacaccattgattccattagaatgatgaaagctgctctacctaaattctaattattctagaasttcagggtctgagccgcagcataaatgcaaaagtagaatctaagagattcttagatttgtggagatattagccacaaacgaagactgtatccaagcaccgatatttattgtttgctaaataaagagtgcaagtttaaaatcagtaagatcatttctttaaaagttatttagttatttatttgaatctttactgagaagtcagttcattctgaccttttcataaattaaattaaactagcactggctaaaaggtgatgggaagaaaaggtgaaaaggttagtgggtcgttgtcgtttttattgcacagaaatttctgaatggagcttcagccaaaatattgcaaagattcaaaatttaatttcctgggaccagcaaaccaatttttgatggtaccataaagacttccaaaatgagagttaatttaattcattgtcatccaaatcaaaattgtgaaagtatataaaaaagcaatca

SEQ ID NO: 151800 - DNA, 326 bp, Homo sapiens
cagtacattttctccaagtaataattttcctttctccaagtttcatgtatattgctacaacccagagtaatattttctcagtagtatatttttacttgttttgttagcataagatgctgctctaaatacatatatttaatattctggtatgtttttaaaaatagtcttatttcctttcattgagactttgaaagagcacctttatgcatrtaaaaaaagaaaagaccctaaatacaaaaactaacatagagagtatgtaaaattgttatatgaatataataaatgctgctttaactttgaaataacaccaaccattaacaaattga

SEQ ID NO: 151801 - DNA, 571 bp, Homo sapiens
gttattttaaagtgggttagcaaatctttttagtgttaatggtgcatgccatgattatgcacattgaagtgaagcagtgtgcttggtcactattgtgttgttcttgtcatgtgaaggaactaaaattcaaacaaccaaaggggacagttgagtcctatgtaacaatatattatgtgttttcttttttcaagtataaaaaacgagcacttggactctatgtatgtaaggaayttatatgttttctggttcttttgaactgctcaacctttgttagctagtgttattataaggtttaaggcatttcttgtccatttttcatgtaccattgggagttgttcatgctattgaaatacagtttgactgtactcctggtgtacgtagcatctgaaagtagctatctatccaggaagtaccttaagccctagaaagctgtagttcagcatgctcttaattttggtaattcattatgtggtgtgtatagggcagaggattagatgccatccctgtccccttggactcatagtaagagcatcagattagtgatttccagaaaataaacaaaacacacctt

SEQ ID NO: 151802 - DNA, 627 bp, Homo sapiens
atggcaactacaggttttaaataggctcaaacttttttgtgtatatgtacagtgatacactatggcaaaatagctctgtctatgtgttccaaaattccacaaaatataaatatctttgtcttcatcatgtaaaaaataatagtgtttacaattgttgggtaaagtttttagtgcatttaaaaaatgaactcagattcagatgtaaaattccagcgctrtcatttgttagttacttaaccttaaatcagcttagaaatttccccctgagcctcagttttctcatctctaaaatgatcatgacacataaattacacagctctcgtaagcaatgtattaatatatattaagcacctaccattgtctaagaaacaatgtaagtgaacaacaaataatagctctcattgtttttctacaagttgctttccttttcttaatcttaaatattaggattatccaatctattttgtgtgtgtgtatgcatgtgtgtgtgtgtgtgtgtgtgtgtgtgtccagccacccttacatagcaaaaaccattggctttctttatattttgattcatttttagaaatatctatatcatgaacaatgattaagctttgctcttaaaggtttttgattatagga

SEQ ID NO: 151803 - DNA, 627 bp, Homo sapiens
atggcaactacaggttttaaataggctcaaacttttttgtgtatatgtacagtgatacactatggcaaaatagctctgtctatgtgttccaaaattccacaaaatataaatatctttgtcttcatcatgtaaaaaataatagtgtttacaattgttgggtaaagtttttagtgcatttaaaaaatgaactcagattcagatgtaaaattccagcgctatcatttgttagttacttaaccttaaatcagcttagaaatttccccctgagcctcagttttctcatctctaaaatgatcatgacacataaattacacagctctcgtaagcaatgtattaatatatattaagcacctaccattgtctaagaaacaatgtaagtgaacaacaaataatagctctcattgtttttctacaagttgctttccttttcttaatcttaaatattaggattatccaatctattttgtgtgtgtgtatgcatgtgtgtgtgtgtgtgtgtgtgtgtgtgtccagccacccttacatagcaaaaaccattggytttctttatattttgattcatttttagaaatatctatatcatgaacaatgattaagctttgctcttaaaggtttttgattatagga

SEQ ID NO: 151804 - DNA, 640 bp, Homo sapiens
gcagaggacaggagacaaagtctaaagcccacccaaagtgggtcattttagagactaaaagcctgtatcctcagtgaaggagtaaaatggtaaaaatccattgtgcaagaaagcaaggcaagactcctgacccccagaaactgtgaaacaataaatgtgtgtaattttaagttactaagtttgtggtaatattgttctgaaacaatgataactgatagctaatacagatcctcaaaaacttgagatacaggaattatcagacataaaattataaaaatattttaatatagtaggaagaaataaaagatcaaattaaaatataaatgaggaacaagtgaccttgaaactgagtatacagaattgaaaaatgaatagaacatctaaatgaaaaataaaaattggtattaaaaacttaacgaacagcctaaacaatagacatagctgaaaatggaatttgtggcctacaagaagcactgaaaattattcaarataaacttatcatgactcctgctgttgactctgcctggaatacttttcttcaggtggccacatggcttgctccttcatttctttcagatttctgctcaaataataccttattctggagccctttcctgaccatgtattataaaacagcaac

SEQ ID NO: 151805 - DNA, 621 bp, Homo sapiens
acaagcgtgagttaccatgcccagttgaacaattacttcttgaatgaaagaatgcatgaaagggacacagaaaaaaagggggggaggtgagaaaacatgaaaaggagggcaggatatgaaacacagcgctgtcagacatactatagctgtacttatttactgactgccttgcctcattcaaatgtgagacctctgagggaaggactcagacggaattattcactgctgtatctccagtgtctgtaaatcagtgcccagcacatagtgagcactctataaatatggctaaataaaacaatacgtgaaaagtctaatatctatctaattagaattgtgggaggagagagagaatgagggagaagcaaattttgaagagtgggaatttccaaaattgatgaaagattctactccttaggttaggaaaacccaaggaatcccaagtgaacaaacggaaatctcactaaaggcccatcatcatgggagtgagatgatcttataatcagctccacagtaaagacagattccttacaaaggaatgacaggcatagttgayttctcaatagcaagaatggaaaccaggagacagtggaataatatcttaaattattaaaagaaaacaat

SEQ ID NO: 151806 - DNA, 454 bp, Homo sapiens
atttgaaaacccttgatgttcaaagcatgcatttagtacamagcacaaaaataggaaatggtatgttaaaacaatgaacaagtgagagctgcctacacaaaactgaatcaagtcaaaaaaaaaaaaagaatttaaaatctacattgataagataaaattttcaacatgaaataaaatttgtatcacatttctccccaaattaacttcctttttaaaataaacaattcgagctcacattcacaaaaagttaccttaatctggatttttccctcagaaagcacttaacatgaaaatattaaactctaatcacttctatattaagaaaggcccacagttagcagaaaaaaaaaatgagtttccaggagacactgagggtatctccccagtatctatttcctctctcctgtggcttacagtaaccaggcaatacaggtattgaccctatccccagctc

SEQ ID NO: 151807 - DNA, 454 bp, Homo sapiens
atttgaaaacccttgatgttcaaagcatgcatttagtacaaagcacaaaaataggaaatggtatgttaaaacaatgaacaagtgagagmtgcctacacaaaactgaatcaagtcaaaaaaaaaaaaagaatttaaaatctacattgataagataaaattttcaacatgaaataaaatttgtatcacatttctccccaaattaacttcctttttaaaataaacaattcgagctcacattcacaaaaagttaccttaatctggatttttccctcagaaagcacttaacatgaaaatattaaactctaatcacttctatattaagaaaggcccacagttagcagaaaaaaaaaatgagtttccaggagacactgagggtatctccccagtatctatttcctctctcctgtggcttacagtaaccaggcaatacaggtattgaccctatccccagctc

SEQ ID NO: 151808 - DNA, 587 bp, Homo sapiens
cttagttaaataataagtgccacaagaattaatagatttcatgccacccagagatcagaaataaggtgaaaaaaacagtttccttccttttccatggagtaattagatatataagtgaggacatctatggttttaagaaattgttagatatggttaaatgcttgggggcsggggagaggatgagaagaagaatcctcccaaagctgtttacctttaccaacctaggaaaagatcttgtcaatctctgctaaaaggtgtgttaggggaaaataaaataaagacaaataagcaaatgtgttttaatactcctgaaaaaactaatagtcagcaagatagtcagtattataattacttgtgctgtcacaaacagggcttccagcagtgcaaaatgagtacaccttactgaattactgaatgttataaaatgcttaagtattttgcagaattcattttccccatttacggattgtcattgacaaagtgaaataaaatgaaacattacaccccagagtgtcaactcaggttgttcttagtggaaaagcaaaatacaaaattttataatagaatgtgagaattatgcctaccat

SEQ ID NO: 151809 - DNA, 534 bp, Homo sapiens
atatcctctttctgtagttttgaccttcaaattatgtaactgtattgcctatttaaaaagtatttaattkagaaattattgttgaaataagttcccaatatagtgattatgtgttctgcatcacaactcaggatgcccactctgtttattaaagcagagtaaaaaacacaggtcggaattttaaaactcaggcctatgtaacaaagccagaaattttacaatggagaatcagaggttatgcaataagatataattcctaggtttaggtagtaggcttgatctcaaaataaggcttgttatccagaaagtaacccaacccccttcatagacctctttgggatgctttgaaaacttctgaccccagaaaaaatgcacaaacacaaaacataatttttcaatggttcatgcatgtttcaaagcccatccatggatgtcaataaatttagctgccaatacatttacattgctctcctatttaactggagatgaatttacatacctgaaacaactaaataaccatacagtggtattaaa

SEQ ID NO: 151810 - DNA, 397 bp, Homo sapiens
gaattcagaattgaacatttagtactacgtaatagtaagcttttgtctcaacacagtaagcattcacctgtcaaaaaactgacaggcgaaggtccacaaaaaggatctgtgcagagtttagctctcttcacaaagacattaagaggaccttaagtcctatttcttttgagtcctatttcttccttcaggttagtatcaatatgatctgagaagataatgtaatctctgtttccctgtgtgtaaaattagaaaaataatacccacccctaagaaattatttgaagctgaattgaaatttcacatatggaaatgcttggtaaactgaacacastggtactaaagctcaagagataaggtcaagaaaggcaatcaaatattatatgtaatgcttagctaa

SEQ ID NO: 151811 - DNA, 551 bp, Homo sapiens
tggcgcgccaccggaagggcgttatcctgggggaactgagagtggaaactttcctcccsggaaaggaagaaacccgactggagaaaggtattagcgggactgggaagtgggccctaaggatttttaaagatttttgaaataaaagattatttgttcactcaaagttccaaactacatcactactactaccaccctaaaataagaaaaaaattgttttttgacagttaggctcactcagtctaaaccgcagcccccgaaattgggaggaaaacagctgtgctgaattaactagggatctggggccgaccatttgaaagtctgctcttcttccaaagagagtttggggccttgcctgctggactcttacatggtaagagagtgagtcacccaaagagagaggcagcggggagacaggaaagtggaaatacaaagatgccttggaaagctaatttggttcacgttacatttcagtcaccttaggttcatgagtcaacatttcggatgattcaggctttctgggagtcaggaagccccatagtcattggtttgat

SEQ ID NO: 151812 - DNA, 587 bp, Homo sapiens
tgttttcttcaagtttgtagtgctctgttctataaaggtcaaagccattgtgacattcccggaattctgcttgcagcattcaggtacagagacgctaaataaatcagatcgtgtgtcctaggtacatatttctgcctcaacagatatcctctgttgtggcaggtcaaaagacaaaaccaaattacaggaatcaccatcatgcattagcatctgggatccagggtatcagtaactgcagctcaggagatgagaggctagcaacataactgacagaaaaacttgaatgagacatttaaacagaaaaacaaaagtccarctcaagatttttcacattaggattgattcttaaacagatatgccaagttccgcctacacttccaaacagaatatgccctttgctgccatttcacttcttaaaatagtctctctaaaacacctaatgtgcctcaattagaaatatgaatgtgtattaaaatgtaagggcttgtgcatgaagaatgcgaaaagggagactgagtatgaaaaagagggcggaacaggccttgacacagagaagcttcctcatctctgttagtcacaccgtgaga

SEQ ID NO: 151813 - DNA, 587 bp, Homo sapiens
tgttttcttcaagtttgtagtgctctgttctataaaggtcaaagccattgtgacattcccggaattctgcttgcagcattcaggtacagagacgctaaataaatcagatcgtgtgtcctaggtacatatttctgcctcaacagatatcctctgttgtggcaggtcaaaagacaaaaccaaattacaggaatcaccatcatgcattagcatctgggatccagggtatcagtaactgcagctcaggagatgagaggctagcaacataactgacagaaaaacttgaatgagacatttaaacagaaaaacaaaagtccaactcaagatttttcacattaggattgattcttaaacagatatgccaagttccgcctacacttccaaacagaatatgccctttgctgccatttcacttcttaaaatagtctctctaaaacacytaatgtgcctcaattagaaatatgaatgtgtattaaaatgtaagggcttgtgcatgaagaatgcgaaaagggagactgagtatgaaaaagagggcggaacaggccttgacacagagaagcttcctcatctctgttagtcacaccgtgaga

SEQ ID NO: 151814 - DNA, 572 bp, Homo sapiens
ttttgtctccaaaattcagaatatcctgcagtgatttaatcctttaacaaaaaaagttcttacataacaaaaattccagggatggttaattgttgatatttgttcaactgctcaaagacctagtctctagctgagcagatgttattatggagcaaaaaaagcaggtggaatggaagttagcagtgtcagaatctgcaacataccttatcaatgcagactaggaagagcatcaccatttataactgtattaatgcactttaagagcttgttgcttctctgggtattgtattacatgaytgatactgtatctacctgtatcatagaagcaattccactgcaatgtaatttcctatatatgcaccccgttggcttttgcttgttgaatattgaaaccgagtcttatttgtgatcacatccctgtattattctgggtcatattacatatgtgctcaagaattgtttaaaggatcaatgaatactaaatatgttctaattttaggagcaaaattttcacttgtgagaaattacttcttagaaaatttccatttgcagcacatttgtttttgtttatg

SEQ ID NO: 151815 - DNA, 572 bp, Homo sapiens
ttttgtctccaaaattcagaatatcctgcagtgatttaatcctttaacaaaaaaagttcttacataacaaaaattccagggatggttaattgttgatatttgttcaactgctcaaagacctagtctctagctgagcagatgttattatggagcaaaaaaagcaggtggaatggaagttagcagtgtcagaatctgcaacataccttatcaatgcagactaggaagagcatcaccatttataactgtattaatgcactttaagagcttgttgcttctctgggtattgtattacatgactgatactgtatctacctgtatcatagaagcaattccactgcaatgtaatttcctatatatgcaccccgttggcttttgcttgttgaatattgaaaccgagtcttatttgtgatcacatccctgtattattctgggtcatattacatatgtgctcaagaattgtttaaaggatcaatgaatactaaatatgttctaattttaggagcaaaattttcacttgtgagaaattacttcttagaaaatttccatttrcagcacatttgtttttgtttatg

SEQ ID NO: 151816 - DNA, 521 bp, Homo sapiens
tcagccccataggagcaatggcagaggaacacgcaggacttaggagtgagctgtatcacttgaatggagctggaacttaattgtagcttcattaaatagatccaaactaaggctagctacattttctaagtatcacatttcccaagtcttcattttcctcattagaggggtttcagttgctcacaaaagacycagcagatgcctgaacaattcattatactcttgtacacatctggcttaatcaattttgtaaaatgaagatgtcttgtccaactttacatgtagaacagataaaaactttctttcctactggaaaatatatttggggcctgcttacatcctgattcacagaatggtccccttacttcctgtctaccttatatctgaatacctctggttcacagagtaacaacacctttcagaaatgttgaaatttttttttcagggtaaggcatttagattgggagacaaacaaacaaacaagcaaaagaatcaattcatcctccccaccctcaccaagg

SEQ ID NO: 151817 - DNA, 523 bp, Homo sapiens
aagaaattattgcctatggtgtggaaacagtcttattaatattaaccactttttggcattaaccacattaacaatgataaccacttctcaatgtggctaactaccaagtgatctttaatgtttctaataaaataagtcaagaaatacaaaacattgtaggtcttactgaacccttgaacaaaacaaataagcaaacacaaaygcattttaaaggcttgctggtaggaggtataccagtgttgaatgtgttggacatgatagaaaacttgctgtgtgttttgtacgtatatcatacattgtgagatatcagatgaaagctctggagagagaaagtagttgtgaaaatataaattgaaaacacagtgaaatacgatttttttccttttaaatttccaacacaaggaaactagtttttagactcttgagtatgatcacacacacacacgcaaaccctacttctacatctgaaattatgcattaatttggctagctacctgaaaaaaatacaggcagtcaaaggttt

SEQ ID NO: 151818 - DNA, 567 bp, Homo sapiens
atgtaagttcattgcaatggtgtgggcaacagtgaagtatcctggtttatatctactctctaaagaaatatatacagcagtgtctctctcctgcttcctcttatggtcctagatttttgctttaaatattcaagtttatgaagtaccaatttccggcataaaatatgctatcaggtaggatgactgagttgactagagtctggtaaaatacaggcttgcttttcttcccaaaccactcttaggctgagtgttattagtcaaatgtatctgtattcttgatgtacgtgctgtgttgtstgtaacttgagagtaatatgcaaacgaaattaacaataggatttattaaaataattaaacatgttaatgtaaaaaactataaattttctctgatgtgatttgaaaatatatggctgaaaaatttattctgagttaaaatatgcgttactaattctatttgctaatgaaataattattcacctaattgtgttagaccatctatgtcaaaaaccctgcatgcccaattatatcctgcatttttatatgtttcaaaggtataaaacaccttgg

SEQ ID NO: 151819 - DNA, 480 bp, Homo sapiens
tttagttactccttaagcagctatgctatctgatttccaattttagttccaatttgaggaattaccccttcccataataaatgtaagtaaaagcactataatcattattttattttctrgggtatctgtctagcttgggaaaagaaaaactgagaagttctaaggtaagctgtaaacatcaatcgtataggtttataaagtcatcctataacatgtctaatacttgtaataacagaatcagattgtgcacagaaaatactcattcggttttcaaaaagtacttttcacccgttttgtctaatgtctcatctctatcttatcctacacagaaatgtggactttctcaaggttgagctcttcttcgaaaacacacacacagagagagagagagattgttatctaggaaaaaaatagaaatgaaagaaaatagaaatatcaccaaaattgtggtttcaaatagagaccaacttaaacccttcc

SEQ ID NO: 151820 - DNA, 536 bp, Homo sapiens
ggactttctcaaggttgagctcttcttcgaaaacacacacacagagagagagagagattgttatctaggaaaaaaatagaaatgaaagaaaatagaaatatcaccaaaattgtggtttcaaatagagaccaacttaaacccttccatagtttttacaatcaatcataaaagcagttcttttacttactttctcaaaaagggttggaatagggagacttcccaggaatctaagcaaacttcaagcaggattatagtcctgtttcccacatttgcacaaacttccttcacgatgatttgactttgcagcatcaggattgtctggcagagcaaacaaagccagagttggcacaggtatctccctagctctggaatgagattagagatgaaagaaatatcaacatccaccaaagccagtgaaagcaaatctaaactttctcctaccaccaaacaaacaaccacagccacatcttaaaaactacaatcggatrgctgatttggccccacggtcctgaagtggcttcttgtatatcttagtc

SEQ ID NO: 151821 - DNA, 473 bp, Homo sapiens
cttttgcacacaaccaaagaatactagtgaattaagagttaagacctgtcactcattcttaaatagataacgacctgggccaggttcattgaattatagttagttcaatgaacgtaactctaaagttctcagtgctagaaaaataatacgagaaaaggaagacagtacttatgcttagggcatttaccacacagttaagattaayccacacacaacaattacagttcccaggtgtaaaaagaactcagaaggaatgcattcagtatccaagcaatgagttctcttgtcacccacctggtttcccaagtctaaacctgaaattcattttttaattacctcttgttctcaccccatacatctaattagtcacaactcattcattgagaaaatatttattagcaagccatgttcattgtgcttattctatatctcttgtttctctccattcccaaagctactactttaatttagcc

SEQ ID NO: 151822 - DNA, 473 bp, Homo sapiens
cttttgcacacaaccaaagaatactagtgaattaagagttaagacctgtcactcattcttaaatagataacgacctgggccaggttcattgaattatagttagttcaatgaacgtaactctaaagttctcagtgctagaaaaataatacgagaaaaggaagacagtacttatgcttagggcatttaccacacagttaagattaacccacacacaacaattacagttcccaggtgtaaaaagaactcagaaggaatgcattcagtatccaagcaatgagttctcttgtcacccacctggtttcccaagtctaaacctgaaattcattttttaattacctcttgttctcaccccatacatctaattagtcacaactcattcaytgagaaaatatttattagcaagccatgttcattgtgcttattctatatctcttgtttctctccattcccaaagctactactttaatttagcc

SEQ ID NO: 151823 - DNA, 468 bp, Homo sapiens
acattatgctcagttgcaatggcaagggaagagaaaaactagagaaatgtgcaaggaatttttattgcctctaatcagaagacaaaattcctttcagctcacatagtctcaccttgcaagtgggccataaaatgtataggagtgaacagaatacttaacactactrttgccatcactgtaaatttgtattaattatctcagctaagcttatgtagaaagtgaagttcttaagtctagaactgccgttttacacattggagcattactacctgtagagaaaaattgaggacagtacctgcctgtcctagcagacccacttatgtcacctgctgtcagaccagatggaaagcagcatgaataggagcatgatcttagaatgtgaaggccaagagcccaggcatactaggagattccctccttagcacagataaaagcctgccgctcatggatgtgagctaagctgaccaa

SEQ ID NO: 151824 - DNA, 415 bp, Homo sapiens
cagcacggcaggtctgcgatggyggcaaacagcagtggtggaaggcgagcgaaagctcagctcaagctgtaacaaacacggaccagaagagtgcagttgcaagattgaatagagtgaaaacagagctcccatacaaagggaggggacccaaagagggtagccattccggcttgaatgcctgggtttctatcccgatcattgtccctcccgctttgctctcaggcaatagatgattggctatttctttacctcctgtttttgcctaattagcattttagtgtgctctctttactatctgattggtcgggtgtgagctaagttgcaagccccgtgtttaaaggtggaagcggtcaccttcccagctaggcttagggattcttagtcggcctaggaaatccagctagtcctgtctctc

SEQ ID NO: 151825 - DNA, 425 bp, Homo sapiens
gtctgcgatggtggcaaacagcagtggtggaaggcgagcgaaagctcagctcaagctgtaacaaacacggaccagaagagtgcagttgcaagattgaatagagtgaaaacagagctcccatrcaaagggaggggacccaaagagggtagccattccggcttgaatgcctgggtttctatcccgatcattgtccctcccgctttgctctcaggcaatagatgattggctatttctttacctcctgtttttgcctaattagcattttagtgtgctctctttactatctgattggtcgggtgtgagctaagttgcaagccccgtgtttaaaggtggaagcggtcaccttcccagctaggcttagggattcttagtcggcctaggaaatccagctagtcctgtctctcagtatgaacaccatagagtgt

SEQ ID NO: 151826 - DNA, 527 bp, Homo sapiens
gttttgacatcattaatatgccagtaattcaaatgaggtaatattgtttccaagtcacacataaacataaagtcaaaaacacttacctaacacatatacattgactacaaacccaaggtaaagttcagaaacacatgggactaaccttacactgaacaagatcccagtatgtttgtattaattcattttttaaaaaatgtttactcattatctctctatatagagttttttgttttgtttgtttgtttgttttgacagggtctcgctgtgctgccaagactggcatgctttggcatgatctcggctcactgcatcctcaagctttcaggctcaaactatcctcctgcctcagcctcccaagtagctgggactacaggtgcacatacacctgactttttttttttttttttttggagagacggagtttcaccattttgtccaggttrgtcttgaactctggactcatgctatcccccaacttcagcctcccaaagtgctgggattacagttgtgagccactgtactcg

SEQ ID NO: 151827 - DNA, 509 bp, Homo sapiens
agacaggttgtcccagggcacaacaggagtttgaattttatcttctaaatgactaggaagctttgtttgaagcgccaaaggggcaaacaaactcatacaacaaaaatgtcatttttgaaatttgtggaagatggactacatgaaacatgccgtatgtttctttattctttattgtatccctttcttttgacttagcattttctgtagtattttctatgtatttctataaaatataattatcattttaatagaaatacaccattttaccagtataacaagaaaattggtttgtttgacayatatatacacacaatatatatatattatgcagacattcattcacatatacatatctgcatgtctttcatgcatttttacatagtttaaaaaggcatataaaacataatgctctgtaaacattttaataagttaaaagtatatcataaaaatttaccaggactttaaagtttcttctcagggcatttttatgcaacatagcactaaatcat

SEQ ID NO: 151828 - DNA, 615 bp, Homo sapiens
ccccagtagtgagtaaatgtgagttattataccaccaccactatcatcatcattattgtgagttatagctaaatcaattttactcaagtattgttaaaaatattttatatatgtttgccttggattgtctaatttttttgaatgatttatgtctttgactcatttattaatcagaaaaattcatttttcattgtgattattttcttaattattttagatttcttggggaaccattgagcctatatattaacacttacattaatatctaccagagaatgaatgaggaaaaaagaccttttgggtttaatacatattgcattcaaatggcacttttctactcctcaaatgattcacattaaaaatgatatattattcaaagtgcyaattgagataataattcaagactgtaagactatcacaatttgtaaaaatataagtaaaggcatatattgattgctctaatgtatgaatgtttgtgtgtatacatataaatatagctatataatgtagtctacaaaaaataagtataggacaaaaactaaattatttttcatttgtaatttttacttctcaatatatgcatttccctcttctctaagaaaaggaagtggaaac

SEQ ID NO: 151829 - DNA, 622 bp, Homo sapiens
gggctgagcttcagaggccaaaatattcatgagatatgcacaaaatagtggacagaatggagyaggaaggtacagtggaggcagacagaaagactgaggctgtagtgtgccaggttttgaatgccaggctaaggctgacatgaaggactggaggaatctaataagatctgtgctctaagaaggtgactgacttgagcatatagataaggaagttacaggaggaaaagggaccagttagaagtctcgggttataattcaggcaggaaataatagtagaaaaaaatgagaaatagaggacaactacagtgacttacagtggctaattagatgtgacaggtgagagaaggaggcgagttaatgatgtcaccagttttcttatccagtgcttccattttcttgttttctggaatatctttcacagtgtatttcatatatttagtatacctctaaattatctagtttttccaacacagcatagagagaaaaccaggatattctttatttgctgcaagaaagaaatttgcttaatcaagtgtagattatgaatacaaaagataagattaatgtcaagaataacgtatgtgatgacttaacaaaaccatggtgaagtaagttcaggatt

SEQ ID NO: 151830 - DNA, 598 bp, Homo sapiens
agatctggagggatggaagtcagcgacgggtctgcaacggcggcaaacagcagtggtggatggtgagcaaaagctcagcttgagccgtaacaaacayggaccagaagagtgcagttgcaagattgaatagagtgaaaacagagctcccatacaaagagaggggacccaaagggggttgccgttgcaggctggaatgcctgggtttatatcctggtcattgtccctcccgctgtgctctcaggcaatggatgattggctatttctttacctcctgtttttgcctaattagcattttagtgagctctctttactatccaattggtagggtgtgagctaagttgcaagccctgtgtttaaaggtggaagtggtcaccttcccagctaggcttagggattctcagtcagcctaggaaatccagctagtcctgtctctcagtgccccctcccaacaggaaaatacaaatgctgttggggaggttggccgaggaccactgtaactgcttcctgctgaattggagcatagtaggggttgtgcagttgagatttccttgggaggggtgccttcaatgtcattaacattggagcatgggctagcagg

SEQ ID NO: 151831 - DNA, 568 bp, Homo sapiens
tctgcaacggcggcaaacagcagtggtggatggtgagcaaaagctcagcttgagccgtaacaaacacggaccagaagagtgcagttgcaagattgaatagagtgaaaacagagctcccatacaaaragaggggacccaaagggggttgccgttgcaggctggaatgcctgggtttatatcctggtcattgtccctcccgctgtgctctcaggcaatggatgattggctatttctttacctcctgtttttgcctaattagcattttagtgagctctctttactatccaattggtagggtgtgagctaagttgcaagccctgtgtttaaaggtggaagtggtcaccttcccagctaggcttagggattctcagtcagcctaggaaatccagctagtcctgtctctcagtgccccctcccaacaggaaaatacaaatgctgttggggaggttggccgaggaccactgtaactgcttcctgctgaattggagcatagtaggggttgtgcagttgagatttccttgggaggggtgccttcaatgtcattaacattggagcatgggctagcagg

SEQ ID NO: 151832 - DNA, 599 bp, Homo sapiens
acgggtctgcaacggcggcaaacagcagtggtggatggtgagcaaaagctcagcttgagccgtaacaaacacggaccagaagagtgcagttgcaagattgaatagagtgaaaacagagctcccatacaaagagaggggacccaaagggggttgccgttgcaggctggaatgcctgggtttatatcctggtcattgtccctcccgctgtgctctcaggcaatggatgattggctatttctttacctcctgtttttgcctaattagcattttagtgasctctctttactatccaattggtagggtgtgagctaagttgcaagccctgtgtttaaaggtggaagtggtcaccttcccagctaggcttagggattctcagtcagcctaggaaatccagctagtcctgtctctcagtgccccctcccaacaggaaaatacaaatgctgttggggaggttggccgaggaccactgtaactgcttcctgctgaattggagcatagtaggggttgtgcagttgagatttccttgggaggggtgccttcaatgtcattaacattggagcatgggctagcaggctggtccaggggtcctcagtagatct

SEQ ID NO: 151833 - DNA, 421 bp, Homo sapiens
ccctgtaattcattgcccaatcaaacactctctatttaacttcccttttgtattacatatgaactaatctgagctatttaaggtctggaagtgggggaatatggattcaattctgctttcataaaagaatctggttctcattcagtttattttctaatctctttattattctttaatttcactttttgcctaaatattatgaacatgtgttataaaaaataagccttcaacgtttaggaaagatagcctgacaaaagatttcctgatcatctgtgtattattacagagtcttgcccctccagccagtgtgatcttggataatgcagcttgctggtttgtttcccgtgctstattttttggattgctgtgtgaagctctcagtctgagctaaccatgctctcgattctaattctcaattcct

SEQ ID NO: 151834 - DNA, 599 bp, Homo sapiens
acgggtctgcaacggcggcaaacagcagtggtggatggtgagcaaaagctcagcttgagccgtaacaaacacggaccagaagagtgcagttgcaagattgaatagagtgaaaacagagctcccatacaaagagaggggacccaaagggggttgccgttgcaggctggaatgcctgggtttatatcctggtcattgtccctcccgctgtgctctcaggcaatggatgattggctatttctttacctcctgtttttgcctaattagcattttagtgagctctctttactatccaattggtagggtgtgagctaagttgcaagccctgtgtttaaaggtggaagtggtcaccttcccagctaggcttagggattctcagtcagcctaggaaatccagctagtcctgtctctcagtgccccctcccaacaggaaaatacaaatgctgttggggaggttggccgaggaccactgtaactgcttcctgctgaattggagcatagtaggggttgtgcagttgagatttccttgggaggggtgccttcaatgtcattaacattggagcatgggctagcmggctggtccaggggtcctcagtagatct

SEQ ID NO: 151835 - DNA, 568 bp, Homo sapiens
tgggacaaatgaatgaatccctgttgggaaaaaagaacctgctgcatatcatccatattttattttattattattttttttgagatggagtctcactctgtctcccaggctggagtggagtggcacaatctcggctcactgcaacttctgyctcctgggttcaagcgattctgctacctcagcatgcccagtagctgggattacaggtgcatgccaccacacccggctaatttttgtatttttagtagagacggggtttcactatgttggccatgctggtcttgaactcctgacctcaagtgatccacccgcctcggcttctggaattacaggtgtgagccaccgcacccagccatgatccatactttaatgtgggttctggattgcttcctaggccacgtgtttaacatgccacatgatgatgcaaagcagtgtgccagccttaatggtgtgaaccaggattcccacatgatggcgtcaatgctttccaacctggaccacagccagccttggtctccttgcagtgcctacatgattacatcatttctggataatggtcatggtgaga

SEQ ID NO: 151836 - DNA, 571 bp, Homo sapiens
ttttgggacaaatgaatgaatccctgttgggaaaaaagaacctgctgcatatcatccatattttattttattattattttttttgagatggagtctcactctgtctcccaggctggagtggagtggcacaatctcggctcactgcaacttctgcctcctgggttcaagcgattctgctrcctcagcatgcccagtagctgggattacaggtgcatgccaccacacccggctaatttttgtatttttagtagagacggggtttcactatgttggccatgctggtcttgaactcctgacctcaagtgatccacccgcctcggcttctggaattacaggtgtgagccaccgcacccagccatgatccatactttaatgtgggttctggattgcttcctaggccacgtgtttaacatgccacatgatgatgcaaagcagtgtgccagccttaatggtgtgaaccaggattcccacatgatggcgtcaatgctttccaacctggaccacagccagccttggtctccttgcagtgcctacatgattacatcatttctggataatggtcatggtgaga

SEQ ID NO: 151837 - DNA, 596 bp, Homo sapiens
ggttggcaaactgaatctgcagaacaaatctgacccattatttgtttttgcaagtagtttttttagaacacagccatgtccattcacttactcattctttatggctagttttgtgctacaacagcacagttgagcagttgtgacatagatggtattgacaggatagttattgacaggattgacaaagttgcaaatatttaccatttggctttttacaaaagaagtttgccaaccactgatgtatattattagatacattagtaacaaatgacatcataaatttctttctttttarcaatcatgtataccaaggatataagaaatacatctcattagaaaaaaatcttctattcagccctcttgcttcaccttcctctagaacaaaatcttattgccaaataatttaagaaaataattcggtcttcagattcaatatttgtgcctcaggtttccttcctaggaatgaattcccacttcaaaaaacagacacacacattccaaaagtgttcttttatttctagtaacatatattgtataaatactctattttatatgcacttccacaaaagcgatataatttaaaagtttttttcatt

SEQ ID NO: 151838 - DNA, 518 bp, Homo sapiens
gtgtggcagcagcacatgcctatggttctagctactccaagaggctgaggtaggaagatcatttgagcctgggaggttgaggctgcagtgagctattattgtaccactgcactccagcctaggcaacagaatgagacactatctcaaaaaaaaataaattacattaataargaaagatacacttaacaagagtttggacatgttagaaaagaagggcatatattcagaagctaaagcctcatatatattaaaagatgataaccagagacaaggtatgactgtacgctaatttcacaaatggtatatatatttttactgctatactgaggtgagatcaggatatgagaaaaaaactcaggattttctattaggtatgagacaagttatattattgagggcgagtgagaatgagctgaggttgggaacttaaaagtaaaatgaatccttgtgtgataacatctgcgggacaaacactagagggtcaattagagataggcaaaatactagtgaagcatcaa

SEQ ID NO: 151839 - DNA, 600 bp, Homo sapiens
ctcagcaagatttttatgtatctaacattgaaagaaaggtgcaagttttatttgagattactttaaaaaatcctaagagaactgaattatccctcagcaacttgcctcacataagcaatttattcacaattacgttgattatcccttgtcagacttccaggaatttcacttaaattcacactcccatgcatattctgaaaaatgatcttattcaaattgctaaataagggaaacaatgtccttaaaaataatttttaatagggcagaagatgtatatattggtctccttgggctgctaccacaaaacactacagatcaggtggctgatctatataatcaatataaatcaatataaatcaaaagaaatcaatataaaaattgatttcttacaattttagaggtggggcattcccagattgacgggcaggtagattcagtgtctggtgaaagtctgcttcctggctcataaatggccatcccctagctaagcaytcacataaaggaagaagggcagggcccacctggagcctcttttataagaactctacattcatgaggactccattctcatgacctaatcacatcccaaaggccctacct

SEQ ID NO: 151840 - DNA, 509 bp, Homo sapiens
tagcataacagcacactttggctagtcaaaaaggtcttcaggtcgtggagactgacaatggattgtttcagactgaatgccaaggctatgtggatgggaagccaaaaatcttccagatacaatcaaataaaatgtttaactatggctaactctggcagcattcactaataaaagggaggtcctacagctggaaagcccctttgggtactggccccagcatatacttcacttgagtgttccttttgtcccttttgtcaggattaccagcaacaccaccaactttggatgaggctctttgyagcagcatgtcttgaaagcattcaacaagtcgtggttccagtactacctttaaaattttagaggctgctaacccaataaaattacagatgtctgcaatctccatgcctgcaggttagagtctgtggcaacacaaaacttccagtggggtgcacaagcctcttgaatttaaacacataaattgcctgaggcagccagaagatatacccctt

SEQ ID NO: 151841 - DNA, 369 bp, Homo sapiens
agatctatttaatatcactgtgaaaacttatttaagagtttaaatacaatatatcctatgtaatgtggctatattaatattttcagatagtttaggcagaactgtactgactctgtcattgtctgaatgctctctttcmaaatactggagaaaggttttactattaaccgtttatttattttatgtggtcctacaatatttctcaacttatttatttctttagtagtcatcattatatatataatattatcaaaatatgcttttcaagtactgtatttctgtgtttggggatcctccatctataatatgtacttaaataatgacatttctcagttctatctttcatggaaatttctataacctctattt

SEQ ID NO: 151842 - DNA, 351 bp, Homo sapiens
tatttaatatcactgtgaaaacttatttaagagtttaaatacaatatatcctatgtaatgtggctatattaatattttcagatagtttaggcagaactgtactgactctgtcattgtctgaatgctctctttcaaaatactggagaaaggttttactattaaccgtttatttattttatgtggtcctacaatatttctcaacttatttatttctttagtagtcatcatyatatatataatattatcaaaatatgcttttcaagtactgtatttctgtgtttggggatcctccatctataatatgtacttaaataatgacatttctcagttctatctttcatggaaatttct

SEQ ID NO: 151843 - DNA, 551 bp, Homo sapiens
ccattttgggcaggctggtctccaactcctgacctcgtaatctgcccacctcggcctcccaaagcgttgggattacaggygtgagccatggcacctggcctgcaggatcttcttttaagcaaaggagatataaatacacttaaaacatcattgttagaattagataaactgggatatataatgggtttaggataaacctggaatataagcatctgaaatgtaaataagtttcaatagttaatacaacctaaaattctatataatttcacttagaatgatggtctttatttaaaaaaaggattactaactcacagtatctggacataaataacaaggctaactgaaagttcatatataataactgtgtgtgtgtgtgtgtgtgtgtgtgtataaatcctagatgtagctgataagtaattgattcatctgcaatggctcaaaaaagttaatacattttgatattttttgatcttacaatatattattgagaaaattaaataacatggccacaaatgtttcaatagagaaggacttcaaaatttccgagtgga

SEQ ID NO: 151844 - DNA, 584 bp, Homo sapiens
taaacaaatagctctgagtaaccatttatgtgtgatgctgagctactactggagataaaccagtgaataagacaataatcttgtcttgaagaaacttatggtccagaagaacttaggtaaatgcagtaatgcaccacataatgatgttttggtgattaacagaccatataaatgatggtggtcccataagattgtaatagagatgaaaaatttctggcccctagtgatgacatcatagccatcataatatcatcatagtgcaatacattatcacacatttgtaatgatgctggtgtaaaacaaacctactgtgctgccrgttgtataaaagtatagcacatagtcaggcatggtggttcacgcctgtaatcccagcactttaggaggctgaggcgggcagatcacctgaggttaggagttcgagaccagcctggccaacatggtgaaatctggtctgtattaaaaatacaaaaagaaaaacaaattagtcaggccaggtggcgggcatctgtaatcccagctactcaagaggctgaggcaggagaattgcttgaacctgggaggcggaggttgcagtgagtcga

SEQ ID NO: 151845 - DNA, 452 bp, Homo sapiens
tattatcaagagaagccaatctgaaaagactacaggctgtattattcccactgcatggcattacgataaagccaaaaccatggagagagggaaaagatcagtcrttccaaggggttacggaggagagaatgctgaataggcagagcacagaggatttatagggcagtgaaagtgctctgtttggtagtataatgttggattttacattatgctaatgtccaaactcatagaatgtacaacatcaagagtgaatcctaatgtaaactatgggctttgggtaaatatgatgtgttagtataggctcataattgtaagaatgtaccactctagtggggcacattgataatgacaaactaaagggtataggggaaatctctatgccttgcccttttactctgaacctaaaacttctctaaaaacatcttcagaaaacataatgttcaaatcataaa

SEQ ID NO: 151846 - DNA, 523 bp, Homo sapiens
tcctgccaacctctcttcactcttcaaaatcagttgcctcctgctggtgtcagacacattgtccctgtcatttttatgtgctctgtcatctatctagaatccttgatagttaactctttacatatttggcccactttcataggttaattctgttcacatgtgtcccttcctaagacaggtctgcacaagatctttatccaaaaagtcaatytatacaacttcatttatgttccctttatagcacctttcaccagaattcatataattccttgtttattgtttcttttctcccaacacatggttatttaaatgtttggggtctggagtgatttaatcttgttgtgctctgtatcttcatagctaagaaatgtgcctagaactaagtaggtgctaatacatatttattaaatacatggttgaataaattaatacaccctacttttttatattgttagatgtttacttatttagttataaagtttgactttataatttagttacataaattgcctgattatttttt

SEQ ID NO: 151847 - DNA, 450 bp, Homo sapiens
ttgttaggtatttgcattatgcaaatgttaaaatgcaaatacggaacctcttttatgattttgattcttaaacactgaaaagtaagaagaaataatttctgaagaaatttgctttataaatttctcaaaggtaatctcagctgttgcttgcaactgccactaattcgagttttcatttaaaaaaagtcctctattaatctctggacacactgtataaccaatttagttactgatttaagaatgtttttcttgcagcatacagaatttatatgcaaaatgtgtgaaattatcatttctcctccatttttcaaagactataggcgtttaagtacatatttagtcatttttgtcatcagttcactcaaacatgcttctttttcttcagatcttatcactacatatgatacataagktctatgggtgtgggcttaatattggaccagggaaaga

SEQ ID NO: 151848 - DNA, 579 bp, Homo sapiens
ccatcactatcaccatggtgcggcctgagccaacatcacatctcatgtggatccatgcaatggcctcctaacaagtctgcttctgcactccactatcaagagcagctagaacaagcctattctcttgagcayggtgttgatctgttcagaatactacaatggctccccattgcacttgagctaaacgacccatgcatgatctctctcccatcctcacctcatcttcttttcttcttctttttttttgagacggagtcttgctctgtcacccaggctggagtgcagtggtgtgatcttagctcactgcaacctctgcctccctggttcaagcaactctccctcctcagtctcctgagtagctgggattacaggcacatgccaccatgcctggctaatttttgtatttttttagtagagatggagtttcaccatgttggccaagctggatctcgaactcctgaccttgtgattctcctgcctcggccttccaaagtgctgcgattataggcatgagccaccaggcccagcccctcacctcatcttctgctccacatgtacacactcctctctgctctctag

SEQ ID NO: 151849 - DNA, 579 bp, Homo sapiens
ccatcactatcaccatggtgcggcctgagccaacatcacatctcatgtggatccatgcaatggcctcctaacaagtctgcttctgcactccactatcaagagcagctagaacaagcctattctcttgagcacggtgttgatctgttcagaatactacaatggctccccattgcacttgagctaaacgacccatgcatgatctctctcccatcctcacctcatcttcttttcttcttctttttttttgagacggagtcttgctctgtcacccaggctggagtgcagtggtgtgatcttagctcactgcaacctctgcctccctggttcaagcaactctccctcctcagtctcctgagtagctgggattacaggcacatgccaccatgcctggctaatttttgtatttttttagtagagatggagtttcaccatgttggccaagctggatctcgaactcctgaccttgtgattctccygcctcggccttccaaagtgctgcgattataggcatgagccaccaggcccagcccctcacctcatcttctgctccacatgtacacactcctctctgctctctag

SEQ ID NO: 151850 - DNA, 585 bp, Homo sapiens
taacattaaccatcacaagtccactctttgtcaacttgacacccgtatatacctctttaaaccatgtttattctcagaataaatacaataacaatgtcatacttctgcctaawgtgatagaactatcctgcgtatggccaaaagtgcattaaccctttcctcaaaaaggatgcaacgttcttgggtgatgtttactcttttccttgatgtcttacaacttaagtattatgaaataaaattaacaatgcttaaatactatgatacagagccaatactttacatgttatatgataaggggataagagagggaagaaaacaaagacattatacaaacatacatatccataacaaaacaaactcatgctcataacaattgcagttctctttttacataacaggtcatacagtcttagctgctttttataactactttcatccactaccattctgtatttcttgtgttctcaggaagcatctcagctggtcatggtttttcacctggtagagtgactctaaccttcattcagaagggtctgtgttgttagtactctggctggagttgggttgttgtcattgtaaagtcca

SEQ ID NO: 151851 - DNA, 452 bp, Homo sapiens
cttgtggtcatagaacatactcaatatcatttgaattcttataaattmattgtgactggctttatggttcataatattatctatctttgtaaaaattccattgcagttgaaaagaatgtatagtctgctgtaggtgggtaaagtatcctatgaatatcagttaagccacattcattgatagtgttatttaaatcatctatattcttactgattttctctctacttattctatcaattattcagaaagggttattaaaatctccaactaaagtcatggatctatctatttttccttgcagttctatcagtttttacgtcaattattttgaagctctgttattaggtaaacatttaggacttttgtttgttcctaataaactgaccctttactattacggaattacctttttatacctggcaatatgctatgctctgaaagctactttatttga

SEQ ID NO: 151852 - DNA, 339 bp, Homo sapiens
cattcttatgactttgcacactcacagcttggctcccacttacgagtgagaacataagatgtttggttttttattcttgagttacttcacttagaataatagtcaccaatttcatctaggttgttgtgaatgccactattttgtttctttttatggctaagtggtatcccacggtatatttataccacaatttctttatccatttgttgattggtgggcatttgggctggttctatattcttgcaattgtgaattgtggttcttatatgcagcagaattgagtaactkgtttatcaatatgattatatatttgcccttacatagagtatgcaacattga

SEQ ID NO: 151853 - DNA, 452 bp, Homo sapiens
tgtctttttgttacattcataataaataagaatgctttcctggaggctcagccattaagggaggtgatggggcaggaaataggagttcttctcttggattctgtttataatgcagtcaaacaagggtaaggaggcttagctaaagctttttttgggtggggtggggtggtgggactagcaggcaaatttgtactaataattaaccatgagcctgtcaatttctcgtctattgtgcgaaaaagtgtctcttggcataagcataataatagcaactcccatttatgtagcatccactgcttaccagacagggtaccaggaactttacagacatgatttcaagctgccacagcaaaattgtgggtgagtattatgtaatrctctgagagtctctgagagggcacacaaggggtgcatagctagtaagtgtcaataccaacatttaaacccacagg

SEQ ID NO: 151854 - DNA, 534 bp, Homo sapiens
tgtaggaatgtttagcttactgcctgggtcacactaaacgctcartaaaatgttgataaataaataggcgatggccatgacagacaaaaggtgaataatctaaaaataggtctgaagatcctttgagatacatcttatgagatcaattttccaccaggatcacaatgttcccaatttagcagaatactcttaaggagagagaaaaaaaataaacaaaacatctcaagagggtgagattgcatgctctgggcagaaacaattttgaatcctgtgctttgtcaacaatgcccggcacgttcgtggtctctctataaattgcaaagtctccggtcatcataataatgctagcaatcaacaacctcacatgcctaaaaggttctctgttttcttttaaatgatgctgattggaaagcaggctccatctctatttctaggaagtctatgaagtctttcccaagcacagttgacaaattatagcacaaaacttgcaggttagaattaaggatttctgaaaggaagtggcaaacagttttc

SEQ ID NO: 151855 - DNA, 596 bp, Homo sapiens
aacttgctttatgaataattttctttcttcctcctagctcctataccacattttcatgaaggcagtgactgtatttcattacaataagtgctcctacttattgggcatgtaccaatatgcttaccacttcttataaattttctctaaacttataaaaaatcaataagtaggggttataattctcatttttacacatctcttccagcacatagaaagctatggctaggcgaatgaatggataggtggaygggtggatgaacaggtaaatgggatggatggatggatggataaatgaatgggtggatgagtgaatatacagatggatagatggatattgaaaacatccagttgacccaaatccaaaatattaccttccttcatcaggagttccttacccccacaccaaatcaggaagtgggagatgatatcagttataaataagccttcctctactgtagaaaattcatattgccccaaccttcaggtttagtcagatgaaggtaatatcctcaaaataaagaataagtgaatattccataggtttcttaagcaatgcaaaccagtgaaaaggctttaggggaacaaaacctgcctca

SEQ ID NO: 151856 - DNA, 477 bp, Homo sapiens
atccatgcacctaaatcttaatgatgcttcagcatatctagggcatagcgtccatgccataatwtcttccagagacccatttctttctctttagctgaggaaggagggtcaaggatattcccaaccaaccagtatcctgtcagcatcaaatgtcactgatttgtttaaaacggaagagacacattgactttataaccccccgtaaaaacacagaaacttttgattgtagacaaaataaattcaatttaatgcctgtacccagatatttagtttatttagaagaaaaatgaaataaggtatatagagtttacacagtacacaattacacaggacactagagtgcctgccagcggggtgaaagacaatgaggttcgagttgtctggagtcacaattaatttactttgtttttcagtaggacactgtgagggagaaggtgttaaggttcaattggctatttatcatctctgtggagttat

SEQ ID NO: 151857 - DNA, 477 bp, Homo sapiens
atccatgcacctaaatcttaatgatgcttcagcatatctagggcatagcgtccatgccataataycttccagagacccatttctttctctttagctgaggaaggagggtcaaggatattcccaaccaaccagtatcctgtcagcatcaaatgtcactgatttgtttaaaacggaagagacacattgactttataaccccccgtaaaaacacagaaacttttgattgtagacaaaataaattcaatttaatgcctgtacccagatatttagtttatttagaagaaaaatgaaataaggtatatagagtttacacagtacacaattacacaggacactagagtgcctgccagcggggtgaaagacaatgaggttcgagttgtctggagtcacaattaatttactttgtttttcagtaggacactgtgagggagaaggtgttaaggttcaattggctatttatcatctctgtggagttat

SEQ ID NO: 151858 - DNA, 468 bp, Homo sapiens
cttccaaaacagatgttactactctacgtcttggaaaactgagtcctaaattcaaatttgattcacatcctaggttacctgcacmatgttcatggactacaccaagcaggaaccaatcagtagttccatgtattaaaatgtcctagaggcaccatcctgagcttttgccagaattgtcattttaaacattttttttctcctttcctcataaatatatttatacttggtaggaacttcatctcaatctttatttcaggaaatatacctatactgaagtagattaacataagtatgagatcatcatcaacaaagctactatcccatcactaccctggacaattttatctttatgttttttatgatagtgtcaggtttttctgaggatactcagaactggagccatttgtgagacagcctaaatttactcaagacaggcgtctataaggaaacaatggattttaaaaaaat

SEQ ID NO: 151859 - DNA, 565 bp, Homo sapiens
gacaggcgtctataaggaaacaatggattttaaaaaaattaaaagtatcaatctagaatgtacatgatttaataatctgagtattrtgagattcataatgaaagatagccttcttctgtcatatttctttgtctataaagccctattatcaaacttttaaatgtctcccattgtattcctacataataagcttgtagtaatgtttctagagttatcaatatcagactttgttgacttcctactagaaagaaaaaaaactcagcaatttgcttaggtcttctatatttctttaaagctgtaactaaataggaaatcacacacataccacttagtaaatattttttgcatgagtgaaccctcaatgatgcagtgaaagattaaactttaaaggttaagccagttaaggaggcatatttgatgtggcagcacagtgaaatcacctagagatctttaaaaaatacccatggcttactcccattcccaaacattattattcaaaacatctggagtatgacttgaaaactggaatttataaaagctacccaggtgattctaaatgtgcact

SEQ ID NO: 151860 - DNA, 565 bp, Homo sapiens
gacaggcgtctataaggaaacaatggattttaaaaaaattaaaagtatcaatctagaatgtacatgatttaataatctgagtattatgagattcataatgaaagatagccttcttctgtcatatttctttgtctataaagccctattatcaaacttttaaatgtctcccattgtattcctacataataagcttgtagtartgtttctagagttatcaatatcagactttgttgacttcctactagaaagaaaaaaaactcagcaatttgcttaggtcttctatatttctttaaagctgtaactaaataggaaatcacacacataccacttagtaaatattttttgcatgagtgaaccctcaatgatgcagtgaaagattaaactttaaaggttaagccagttaaggaggcatatttgatgtggcagcacagtgaaatcacctagagatctttaaaaaatacccatggcttactcccattcccaaacattattattcaaaacatctggagtatgacttgaaaactggaatttataaaagctacccaggtgattctaaatgtgcact

SEQ ID NO: 151861 - DNA, 565 bp, Homo sapiens
gacaggcgtctataaggaaacaatggattttaaaaaaattaaaagtatcaatctagaatgtacatgatttaataatctgagtattatgagattcataatgaaagatagccttcttctgtcatatttctttgtctataaagccctattatcaaacttttaaatgtctcccattgtattcctacataataagcttgtagtaatgtttctagagttatyaatatcagactttgttgacttcctactagaaagaaaaaaaactcagcaatttgcttaggtcttctatatttctttaaagctgtaactaaataggaaatcacacacataccacttagtaaatattttttgcatgagtgaaccctcaatgatgcagtgaaagattaaactttaaaggttaagccagttaaggaggcatatttgatgtggcagcacagtgaaatcacctagagatctttaaaaaatacccatggcttactcccattcccaaacattattattcaaaacatctggagtatgacttgaaaactggaatttataaaagctacccaggtgattctaaatgtgcact

SEQ ID NO: 151862 - DNA, 565 bp, Homo sapiens
gacaggcgtctataaggaaacaatggattttaaaaaaattaaaagtatcaatctagaatgtacatgatttaataatctgagtattatgagattcataatgaaagatagccttcttctgtcatatttctttgtctataaagccctattatcaaacttttaaatgtctcccattgtattcctacataataagcttgtagtaatgtttctagagttatcaatatcagactttgttgacttcctactagaaagaaaaaaaactcagcaatttgcttaggtcttctatatttctttaaagctgtaactaaataggaaatcacacacataccacttagtaaatattttttgcatgagtgaaccctcaatgatgcagtgaaagattaaactttaaaggttaagccagttaaggaggcatatttgatgtggcagcacagtgaaatcacctagagatcttwaaaaaatacccatggcttactcccattcccaaacattattattcaaaacatctggagtatgacttgaaaactggaatttataaaagctacccaggtgattctaaatgtgcact

SEQ ID NO: 151863 - DNA, 617 bp, Homo sapiens
tattacatacagcaaatagctgtgagtcatagactcttactgaggagaaattaagaagcccaaagtcatgaagggagacaaaagtaattttcagagagtaatttcagagagtaattttcggtcttggcacctgtaactatagcaaacactaaacacagctcaactcctatctaattaacatgaaccctcaaactaaaggattatttatgtccatttctattacctgatatgacatatatggctttaaataaacaaaaaagattacaagatatgccccccaaaagaagaaaaatacagcctgagagacaaagcaattattggaaygaaactgagatataagacagttgttgaaattatcagacagggaatttaaagtaactatgattaagatattgagttctaatagaaaaagtagataacatgtaagaacagattaatggaagaggataggtggaaactctaagagataatatgaaagaaataatagaaataaaagaccctaaaagaaatgaataactcctttgatgggttcattagagtagttggcacaaaagaaacaaggatgagtgggttggaagacaggtcaatagaaacttttcaaactgaaatgcaaagag

SEQ ID NO: 151864 - DNA, 517 bp, Homo sapiens
gaggctggtgatgtgcccctttttggaaggtagccaggaaagagctgatgagatatttgagcaaatacctggataaaacaagggagtaagccattcagacatttggaggaagagaatttcaggcagaaagacagtaagtgctaaggtgggagatggtgctgtgtttatgaaactgcaaagagatcactgtagctaagttggcatgtgggarcatacccctgccttattggtgttggtgaatacaaataaaatttgaagacagaagacaatttacttctgtgttagaaaattcaaatatataccatttgctgatatttcagtaaaatattcaaattgacaatacaaatatattgctatgtagttaatcttccttcctaacattgacatcattctttattagtcttatctgggacataaaagctgagcataacagcattaatatgtgcaagtttatctcttgaccagtcttggtcacatattactacttagtttctaataatgttttattgttaaattt

SEQ ID NO: 151865 - DNA, 358 bp, Homo sapiens
cccgcctaggcctcccaaagtgctgggattacaggcatgaaccaccgcgccggcaacatgctgttttaatgagcgcctgggtgcaggcgggctgaggcctaatggcgtcagccccaagtgaggagggggcaaaggttttatagtctcctggaaacaggaggtgtcctattctgaggtaackgctacgttgtacctggatggcctctttctctatcttcacgggtacgtgtcttcctgccagggtcggtgtcttcttgccggctctcttcctgcttctgctaccttgctgacgcacgctgctgacgcaagtggccttgcgtcttccggctgggcctgagaagggaggagtttttcatct

SEQ ID NO: 151866 - DNA, 358 bp, Homo sapiens
cccgcctaggcctcccaaagtgctgggattacaggcatgaaccaccgcgccggcaacatgctgttttaatgagcgcctgggtgcaggcgggctgaggcctaatggcgtcagccccaagtgaggagggggcaaaggttttatagtctcctggaaacaggaggtgtcctattctgaggtaacggctacgttgtacctggatggcctctttctctatcttcacgggtacgtgtcttcctgccagggtmggtgtcttcttgccggctctcttcctgcttctgctaccttgctgacgcacgctgctgacgcaagtggccttgcgtcttccggctgggcctgagaagggaggagtttttcatct

SEQ ID NO: 151867 - DNA, 358 bp, Homo sapiens
cccgcctaggcctcccaaagtgctgggattacaggcatgaaccaccgcgccggcaacatgctgttttaatgagcgcctgggtgcaggcgggctgaggcctaatggcgtcagccccaagtgaggagggggcaaaggttttatagtctcctggaaacaggaggtgtcctattctgaggtaacggctacgttgtacctggatggcctctttctctatcttcacgggtacgtgtcttcctgccagggtcggtgtcttcttgcyggctctcttcctgcttctgctaccttgctgacgcacgctgctgacgcaagtggccttgcgtcttccggctgggcctgagaagggaggagtttttcatct

SEQ ID NO: 151868 - DNA, 512 bp, Homo sapiens
caaggttcacaccaaggtccacctttcccttgctgttcttagccaatagctgagcaaggcaggggaatgagagctgggccactcctactcagcagkactcctctaatggggagcctttgatctgtgctccccattagcctggccaagagtctcccagagccctgcttccgtttgaggcttctcccatccaacccccctttccctcttctgctgtagtgaagtctgaaggctcttgctcctgcctcctactgctccttctccacttttttcttcactgatgttacttctaatacatttcttgcacatagttgggactcagaaaagaataccccaaaatgaaggccttggaagcagcctcagaagccaagtttttctctgaccttctcctgcccttctgtctgtccgttccattctcccccaaggctagccatagaaaggagaatccctcttccctaaggcagagcatagaaaccagaacctcctttccctaaaggcagttgtaaaacctagaa

SEQ ID NO: 151869 - DNA, 512 bp, Homo sapiens
caaggttcacaccaaggtccacctttcccttgctgttcttagccaatagctgagcaaggcaggggaatgagagctgggccactcctactcagcaggactcctctaatggggagcctttgatctgtgctccccattagcctggccaagagtctcccagagccctgcttccgtttgaggcttctcccatccaacccccctttccctcttctgctgtagtgaagtctgaaggctcttgctcctgcctcctactgctccttctccacttttttcttcacwgatgttacttctaatacatttcttgcacatagttgggactcagaaaagaataccccaaaatgaaggccttggaagcagcctcagaagccaagtttttctctgaccttctcctgcccttctgtctgtccgttccattctcccccaaggctagccatagaaaggagaatccctcttccctaaggcagagcatagaaaccagaacctcctttccctaaaggcagttgtaaaacctagaa

SEQ ID NO: 151870 - DNA, 619 bp, Homo sapiens
aatgccaactatgtgtcaagcacagtctgataatgtggatagtaccaattttagtttccatataagaaaattgaagcctaagaaagaataaaaaatttacccaaggtcacacaatgattatccaatttcaagttgagagctccttcaggtacataaagtacattttaccgttatgtgttagtgtttgaatttgttcttcatgaacattttgtgggatgaagcctttgtcaatactagaagagtaatgctttatgaggtagaagtttgccaggagcaccaagattatttgcatttggatgtgtgggtgggagaactcaagaacatctgctgcccctccatgggccagtgcacagcactataaaaatgcaaaatgttcttttttttcttttttratgaacaaccagtcccaaaggaatcacggaagggataaggcagactttaaattgaaccacaaaatcatttcaaagctaattagaagctacaaatttgggggaaaaaatttcaatgcagtgttcattaagcaaggaaagaatgaactggcaggctgtgttccatccacagacagaccatattagctagcccagcaccgctcacacttttgtttgactagcgcgggctt

SEQ ID NO: 151871 - DNA, 489 bp, Homo sapiens
ctactgcttactaactgatgtcagctatttttgaaacagtgataaaaagctctgcagatattcaatgttatcacagattattaaggaatgtagggtgatcaggaatggttctcgctgttaagtactgataacagtgagctacattaggtcagccagataagttagctacycaatgacaaggttaagactttgcattttgttaaccgtggaagagtgaagaagaggagaagatgcccaagccaggtgagctgtctcagtttgttggaaagcctggcacgcaggaccaccaagcgtggtgtgcagagagatggttgtgttggtgaacagcagtttgaaggatttcctagcgaaggttagaaagtgtttctgaaaaacatagcccacctgcaatctatggaagcatcgctaagactaattatttaaaaatggagtttatgcttcccactccagaatgactcaactaaaatctctgaaattacagctcaggaa

SEQ ID NO: 151872 - DNA, 490 bp, Homo sapiens
cctactgcttactaactgatgtcagctatttttgaaacagtgataaaaagctctgcagatattcaatgttatcacagattattaaggaatgtagggtgatcaggaatggttctcgctgttaagtactgataacagtgagctacattaggtcagccagataagttagctacccaatgacaaggttaagactttgcattttgttaaccgtggaagagtgaagaagargagaagatgcccaagccaggtgagctgtctcagtttgttggaaagcctggcacgcaggaccaccaagcgtggtgtgcagagagatggttgtgttggtgaacagcagtttgaaggatttcctagcgaaggttagaaagtgtttctgaaaaacatagcccacctgcaatctatggaagcatcgctaagactaattatttaaaaatggagtttatgcttcccactccagaatgactcaactaaaatctctgaaattacagctcaggaa

SEQ ID NO: 151873 - DNA, 491 bp, Homo sapiens
ccctactgcttactaactgatgtcagctatttttgaaacagtgataaaaagctctgcagatattcaatgttatcacagattattaaggaatgtagggtgatcaggaatggttctcgctgttaagtactgataacagtgagctacattaggtcagccagataagttagctacccaatgacaaggttaagactttgcattttgttaaccgtggaagagtgaagaagaggagaagatgcccaagccaggtgagctgtctcagtttgttggaaagcctggcacgcaggaccmccaagcgtggtgtgcagagagatggttgtgttggtgaacagcagtttgaaggatttcctagcgaaggttagaaagtgtttctgaaaaacatagcccacctgcaatctatggaagcatcgctaagactaattatttaaaaatggagtttatgcttcccactccagaatgactcaactaaaatctctgaaattacagctcaggaa

SEQ ID NO: 151874 - DNA, 458 bp, Homo sapiens
tgctcatgtgaaagcttgaaaaacactgaaacagtggttcccactttagaattttctgctgccccatcctccattagagatttgaaataacgacccattgggcctcaggaaagtcatgaactgatttgaaaaacagcttcaccaacttcatgtgtaccaaaacaggggtcttttattaccttcgagttgttgagcttggtaagtcaaaaattccctgaattatataaaaaatgtgcagtgtttgtgtatttttctggagtgaagacctttaactttcatctgattttcaaatgcttttctacctccctcctgaatctaagaatcactgctctaaaggaatcaaacwaatccaattgcaaataattaattctattggaaacttatttttcaccaaccactgagaatgcttgtaaatttaaagtagacttctaatctaaatgtatttttatttttggcaa

SEQ ID NO: 151875 - DNA, 566 bp, Homo sapiens
aagctacaattcataaacaaaaatagaaaaagaagaggaaaagaaactcaatgaatcctacctcatttacaccatcacagcaataccaataagggatccatactaaagcaatagagcaattcagatgtgaggatattattaaaaaatggcccaaacctttgaaatcttatggtcatccatgcagtaaatgacttacttttatgtgaaaataaatctacacaataactttagggtcagattttatgtgaaaataaatctacacaataactttagggtcagatgcgatacgattttaaagaaaacaattattctaccttgcttatccaagttaatgaaatgaggtaaatgtgccattcttcagctgattgtgcactgaatgcatatattagaaaaaaggaaagatctaaaatcaatcatccamgtttctactctgggaatctaaagaaataagaaaaatataaatttaaagccaacaaaggaaaattaaaaataaaaattatagctttaatagacagtaaaatgatagagaaaaatcaatgaggcaaaaatttggttatttaaaaagc

SEQ ID NO: 151876 - DNA, 566 bp, Homo sapiens
aagctacaattcataaacaaaaatagaaaaagaagaggaaaagaaactcaatgaatcctacctcatttacaccatcacagcaataccaataagggatccatactaaagcaatagagcaattcagatgtgaggatattattaaaaaatggcccaaacctttgaaatcttatggtcatccatgcagtaaatgacttacttttatgtgaaaataaatctacacaataactttagggtcagattttatgtgaaaataaatctacacaataactttagggtcagatgcgatacgattttaaagaaaacaattattctaccttgcttatccaagttaatgaaatgaggtaaatgtgccattcttcagctgattgtgcactgaatgcatatattagaaaaaaggaaagatctaaaatcaatcatccaagyttctactctgggaatctaaagaaataagaaaaatataaatttaaagccaacaaaggaaaattaaaaataaaaattatagctttaatagacagtaaaatgatagagaaaaatcaatgaggcaaaaatttggttatttaaaaagc

SEQ ID NO: 151877 - DNA, 491 bp, Homo sapiens
gctggcacctgccccggccccgccatggggggtgccccgggagtgaggctgcccaaaagtggtgtgtgcttacaatcctgtgaccataaagttcagaggatgggaaagatagagatgaatgctggagaaagagagaaaaggaaatggccgcaaccagacagtgtgaaggggatggggtaggaaaaggcagaacaagaggctggggggtcaggttgaaaggtccygggaaagcaataaaagacgtcgcagccccagagtatgtgtgaaacgcaagaaggaagcagaccccacgtgcaggccgtgaggctcagcgctcagtcttagccgcagccgtggtgcaccttaactttcactctgctctgcaccctttctccctccagcccccagcgtgcacccctaaaagaatcgagctgcaaattcctgacagacccctcacaagctgctcagatgctcgggggtagggttaactagagaattggggggaagggatc

SEQ ID NO: 151878 - DNA, 611 bp, Homo sapiens
aaaaggaagcaaggaaggggtgtggagtcttgtagtgttggggcagagaactagtggttaatgagaagtgttgcttttttggatattaggatagacaggtgaggggtgacctgggagccctggtttcttgtggtgactgacttaaagaggggtacagagaataataagatccatactgagggtgcaaagcagagtggtggggaagcaaggaaagttcaggaggtggagaggaggcttgccaagactgctcagagtttggggaccccatctcactctcactgttaaagatctgggtgtctagaggtagggttgttctattcagaacacacagagcttctggtcttccttctgacaactggattgaggtgtggcaatagatgatgagagggcaagttgaattctaggcacacsctgagatgctgacatttctcttcagagctggctatggaggtatagagaaggttgggggtgggggcacacttactcaggcactcaaagatctgggactcagtagcaggccctgggctgtgagatatctctctgggtagttccagatcttagcagcactgtgtgctttggggttccaagtccctggaatgttatgtggacat

SEQ ID NO: 151879 - DNA, 598 bp, Homo sapiens
ggacacgaagtgaagtatttggattaatgtgatagaatcagaaacatgcaggctgggcgcggtggctcatgcctgtaatcccagcacttttggaagccakggtgggtggatcaactgaggtcatgagttcgagaccagtctggccaacatggtgaaaccccatctctgctaaaagtacaaaaaattagctgggcatggtggcatgcacctgtagtcccagctactcgggaggctgaggcaggagaatcacttgaacccgggaggtggagactgcagtgagccgagactgcaccactgcattccagcctgggcaacaaagtgagactccgactcaaaaaaaaaaaaaaaaagtggtaatatttgtatttctctctcaagactcctcatttttaatctttactgtcgcttagtgcttataccttgattgtgtctgctgcctaagagagaaggtcctacagcagacagtgcccaaagaacaatatttccaaaagctaggtgatctcctttcaatccacattaataaaaatgttctttcagaacatttgtctcctatgaacctcagcagaaagaagtttccaaaaacacgacttcccctgaa

SEQ ID NO: 151880 - DNA, 593 bp, Homo sapiens
aggacacgaagtgaagtatttggattaatgtgatagaatcagaaacatgcaggctgggcgcggtggctcatgcctgtaatcccagcacttttggaagccagggtgggtggatcaactgaggtcatgagttcgagaccagtctggccaacatggtgaaaccccatctctgctaaaagtacaaaaaattagctgggcatggtggcatgcacctgtagtcccagctactcgggaggctgaggcaggagaatcacttgaacccgggaggtggagactgcagtgagccgagactgcaccactgcattccagcctgggcaacaaagtgagactccgactcaaaaaaaaaaaaaaaaagtggtaatatttgtatttctctctcaagactcctcatttttaatctttactgtcgcttagtgcttataccttgattgtgtctgctgcctaagagagaaggtcctacagcagacagtgcccaaagaacaatatttccaaaagctaggtgatctcctttcaatccacattaataaaaatgttcttycagaacatttgtctcctatgaacctcagcagaaagaagtttccaaaaacacgacttcc

SEQ ID NO: 151881 - DNA, 570 bp, Homo sapiens
ttgttcctgttgagtcttttacattgacctgttccttgggtctactgacctcctgaagtagtaaaaggcattttgctcaaggtggtatgagaaaatttaggaataggatttttaggccaggaaataaagayacctaaataagaagggtcaatcatgaataaagaacagacctaacaaaaagaagggaaatagcaaacataggccttaacttatactacagaaatattcttgattaaaaacaataattgtgttcataattctgctaaaaataacttataagtattgtttacttaccatgcaccaggctaacatttaaaacaggtaaaatagaggataaagttaaccaaatgattagatagtatttttctaaaatacacaatggctgaaaatagtctgcttttgcctaatgtatttcctcagtcacaatctcagaatcatagtatatagcacagtattacagttaagccagtccactccagaaagtactgtaaccaaacttttccactgaaaaattctcaaaagactacaaattgctttggtaatatagtccagtgattcacaaccccaaca

SEQ ID NO: 151882 - DNA, 449 bp, Homo sapiens
acatggctgagaacaattaaagacctgtgtagatgaaagatattgggaaactcaataaaattgatccaaagattcaatacagtcctaatcaaaattctatcaggttttttctaaaaggtaaaaacttgattataatatttatatggaaataaaagagacatataacagtaaaaacaattttgaaaaagaacaaagttgcagggcttgcaatatttatttgaatatttatagttatatttttcagaacagtgtgcactagcctaaggatagacaaataaaatagacagcccartaatggaccattgcatatagggtcaatttattttttacaaagataccaataatttgatggggagaggacagtcttttcaacaaactatgctggaacaactggaaatccatatgggaaaaagtgaaactaaacacttatctcatactacacacacaaa

SEQ ID NO: 151883 - DNA, 452 bp, Homo sapiens
aagtatatttcttggcaatccactctagtttaaaacaccatgaaaagccttggttattatatctttcactagctaacaagccaggtatcttataacatttgtgacattgacaggagtttagaaatgaatactgtgtaaggtttcattttgatgcaktgtagttctctttagtgtggtatcgtgtgctcacaccatcgtcgtgaaataccatggcaacttttaaaaattattatatttatgtagaaatgttaaaaaaaattaaaacaccttttgaaaagatgaacagaaaaattagcttcttgatttctaattcatgtgtcgcgagtctttgctttttaggacttgccaaatgtttgtcttcccaattttctagttaggtgtaaagtaaaggggagtgtttggtataaaagtttatagagttttaatggcaaggataaagcattgttggtttc

SEQ ID NO: 151884 - DNA, 452 bp, Homo sapiens
aagtatatttcttggcaatccactctagtttaaaacaccatgaaaagccttggttattatatctttcactagctaacaagccaggtatcttataacatttgtgacattgacaggagtttagaaatgaatactgtgtaaggtttcattttgatgcagtgtagttctctttagtgtggtatcktgtgctcacaccatcgtcgtgaaataccatggcaacttttaaaaattattatatttatgtagaaatgttaaaaaaaattaaaacaccttttgaaaagatgaacagaaaaattagcttcttgatttctaattcatgtgtcgcgagtctttgctttttaggacttgccaaatgtttgtcttcccaattttctagttaggtgtaaagtaaaggggagtgtttggtataaaagtttatagagttttaatggcaaggataaagcattgttggtttc

SEQ ID NO: 151885 - DNA, 452 bp, Homo sapiens
aagtatatttcttggcaatccactctagtttaaaacaccatgaaaagccttggttattatatctttcactagctaacaagccaggtatcttataacatttgtgacattgacaggagtttagaaatgaatactgtgtaaggtttcattttgatgcagtgtagttctctttagtgtggtatcgtgtgctcayaccatcgtcgtgaaataccatggcaacttttaaaaattattatatttatgtagaaatgttaaaaaaaattaaaacaccttttgaaaagatgaacagaaaaattagcttcttgatttctaattcatgtgtcgcgagtctttgctttttaggacttgccaaatgtttgtcttcccaattttctagttaggtgtaaagtaaaggggagtgtttggtataaaagtttatagagttttaatggcaaggataaagcattgttggtttc

SEQ ID NO: 151886 - DNA, 452 bp, Homo sapiens
aagtatatttcttggcaatccactctagtttaaaacaccatgaaaagccttggttattatatctttcactagctaacaagccaggtatcttataacatttgtgacattgacaggagtttagaaatgaatactgtgtaaggtttcattttgatgcagtgtagttctctttagtgtggtatcgtgtgctcacaccatcgtcgtgaaataccatggcaacttttaaaaattattatatttatgtagaaatgttaaaaaaaattaaaasaccttttgaaaagatgaacagaaaaattagcttcttgatttctaattcatgtgtcgcgagtctttgctttttaggacttgccaaatgtttgtcttcccaattttctagttaggtgtaaagtaaaggggagtgtttggtataaaagtttatagagttttaatggcaaggataaagcattgttggtttc

SEQ ID NO: 151887 - DNA, 499 bp, Homo sapiens
ccacaaatttagagaaaagagtattaaaataataaaaatatattatttttctttcttttgtgaaatttgtaggtgttagctttcttatatctgtaatttgctgtaatttattttcttgttttaaataaatatttacattaatatcttttatggactgtattgcgtatccccaaaattcatacattgaagccctaactcccaatgtgactatattttgacatacagcctataaggaggtaaagttaaataaataagtttataatggtgaggccctaatccattaggactagtgtcactgtaaaaagagaracattagaaatctctctcccctcctcttcctctccctcctccttactcatccccacccaccattatgtgtgcacagaggaaaggccacataagcatgcagcaaggaaacagctgtctgcaacccaagaagagaggcttcaccagaaaccaaccctattggcaccttgatcttggacatctagtctctaga

SEQ ID NO: 151888 - DNA, 524 bp, Homo sapiens
aagcttggggcagggagaggcgtgcgccattactgaggctttagtaggcggctttcccctgacagtgttgaggaagcccacaagttcagactgggcacaactcaccacagcacacmaaaatggctgtggccagcagagcctctctagataccttctcactgggcagggcatctccgaagaaaaggcagcagccccagtcaggggcttacggataaaattcccatctccctgggacagaacacctcggtaaaggggtggttgtgggtgcagtttcagcggacttaaaaacgttcccaccgccactgcactcccgcctgggccacagagcgacactccgtctcaaaaaaaaaaaaaaaagttcccacctactggctctgaagagagcagtggatctcccagcacattgtttaagctctgataagggacagactgcctcctcaagtgggtccctgactcctgtgcctcctgactgggaggcgcatcccagcaggggttgacagacacctcatacagtagagctccag

SEQ ID NO: 151889 - DNA, 571 bp, Homo sapiens
aggatttttgtgcctatgttcatgaaagatattggcctggagttttctttttttcttgtgtcactgccagattttggcatcaaaatgatgctgacctcagagaataaattagggaagattcctgcctcaattttttggaatagtttctgtagaattgataccagctcttttttatacatctgatagtattcagctatgaagccatctggtctaaggttttttctggttggtaggttttttgttactgatttaatctcagaactcgtataacataattttatacatagttactatagaaaatttggaaatccasaagaatattttttaaatgaaaacaatcattcataattcctccacccagaagcagacacacttaacattttgcatattttcttccagatatttttctatataataatctctttgtaaccttaaaaatgtgctgacagaaaattctataaactgtgttttgcctacattctacgttataattgctttcttgtgtcattaaaagttctttgtaaacactctagtggctacataatgttccatactaacaacctacaataat

SEQ ID NO: 151890 - DNA, 553 bp, Homo sapiens
ctgcaatggcagatctagtctttctcacatcatatcactctgactcttttttcttcttcacaagtccatctctgtctcaaactttccttgcaattaattgcatccacttggataattcaagataactttctcatgtcaacatctttaccttggtcgcagctggtaatgtgtttgcagtttccgaaggtaaaggtgtcagtatctttgggaggtcgttattctccctcccgtttgtgtctttatgaatatcccctttcatcagaatwaaatacctctctttttctctgctgatctctcacttgacatatcttagctaataatcaaatatctacgctagccctcttatgctttttgtttgtataacactttccattcatttacttttaacctgtctgcatttttatgtgaaattaaaatgtgtctttttaggcagcatatgatagaatattgctttctcattgactgtaaatctccttataattggagtgtttaacaagcagtcagtaattaacagggtcagggaataaatattttactttttctgggctacata

SEQ ID NO: 151891 - DNA, 481 bp, Homo sapiens
tgcctttaattctccttagacataatggtgatttgtaaatgcattttctcctgtagcataaaagagagagttagcagtatcagatacattctaaggttatggttacattaaataatcccataacacagaatcatgttacttatttacatgctgtccatataattaatagatgtgtgctttattgagtaattcttatctcaaattctctgaatataacagtggatrtacattctctatatataaagtgattttactagcatgattggttagatgtataggatgaggtaaataagatgtgaacataatttaaacatataaagaagcttatttcagtaaacacttagaaattagaaaaattccttggtcatagcagacacacattttatatctgtgattaaaatcttgtcttatgaccctgacttttacactcaccatagtacatttaagccaatgaaactttaaagaagatggctcatttgca

SEQ ID NO: 151892 - DNA, 583 bp, Homo sapiens
tctaatgcaagcaaaagtgtgtaatcctcaaatctgggtaactgggatatccctcacttcaaacagttatcatttctttgtgttgagaactgtacgagtctgttctcacgttgctaataaargcataccgtagactggtcatttataaaagaaaaagatgtaatcaactcacagttccacatgggtggggggaagccttacaatcattgctgaaggcaaatgaggagcaaagtcatgtcttacatggtggcaggcaagagagtgtgtgcacgggaattccctttaaaaaagcatcagatgttatgagacttactcagtatcacaagaacagcactggaaagacccactcccatgattcagttacctcccaccaatccccttccatgacacatgggaattatggtagctacaattcaagatgagatttgagtagggacacagctaaaccatattgggaacattctaagtcttatagctattttgacatatacagtaagttattgttaactatagttgccctcttgtgctaccaatcactacgtcttattcctcctatctaactgcaattttgtacccattaacc

SEQ ID NO: 151893 - DNA, 636 bp, Homo sapiens
tcaattattatatttgaagacgttrttaagtatacttatttgggtattctttcttgagatgtcaaatgacattttccattattttaggcaaatatgttttaatgcagaagtttacttgttatgatcaagggcaaaagttctatgaatcaatttatttgtaatttcttaatcacaactgtgctagggagtacaattttgaaattcacctttgaaatccaaatcttgtctgtaaacaatattgcaacaaattttctacactagtttaacaatatttcttattaattcaaaatggaaggcattctaacatttctaaactacaatctagggaatcttctttgactttctgataatgaagcaagtgattaacttacctgcccattcataattttaaattaactgtagctttttattttaactctcatatttcaaatatacaaattttaccaaaagtaacccactatctcttattactgatgcatctgcttcacatctgtctctctcattctctctttaagaaagggaatcaagctttctttttaaacaccttcttggggttaccctcattcgtcaaacagaaattattctgagacctgttaaaaactgtaaggaagactagtcattattactaacacaata

SEQ ID NO: 151894 - DNA, 636 bp, Homo sapiens
tcaattattatatttgaagacgttgktaagtatacttatttgggtattctttcttgagatgtcaaatgacattttccattattttaggcaaatatgttttaatgcagaagtttacttgttatgatcaagggcaaaagttctatgaatcaatttatttgtaatttcttaatcacaactgtgctagggagtacaattttgaaattcacctttgaaatccaaatcttgtctgtaaacaatattgcaacaaattttctacactagtttaacaatatttcttattaattcaaaatggaaggcattctaacatttctaaactacaatctagggaatcttctttgactttctgataatgaagcaagtgattaacttacctgcccattcataattttaaattaactgtagctttttattttaactctcatatttcaaatatacaaattttaccaaaagtaacccactatctcttattactgatgcatctgcttcacatctgtctctctcattctctctttaagaaagggaatcaagctttctttttaaacaccttcttggggttaccctcattcgtcaaacagaaattattctgagacctgttaaaaactgtaaggaagactagtcattattactaacacaata

SEQ ID NO: 151895 - DNA, 636 bp, Homo sapiens
tcaattattatatttgaagacgttgttaagtatacttatttgggtattctttcttgagatgtcaaatgacattttccattattttaggcaaatatgttttaatgcagaagtttacttgttatgatcaagggcaaaagttctatgaatcaatttatttgtaatttcttaatcacaactgtgctagggagtacaattttgaaattcacctttgaaatccaaatcttgtctgtaaacaatattgcaacaaattttctacactagtttaacaatatttcttattaattcaaaatggaaggcattytaacatttctaaactacaatctagggaatcttctttgactttctgataatgaagcaagtgattaacttacctgcccattcataattttaaattaactgtagctttttattttaactctcatatttcaaatatacaaattttaccaaaagtaacccactatctcttattactgatgcatctgcttcacatctgtctctctcattctctctttaagaaagggaatcaagctttctttttaaacaccttcttggggttaccctcattcgtcaaacagaaattattctgagacctgttaaaaactgtaaggaagactagtcattattactaacacaata

SEQ ID NO: 151896 - DNA, 636 bp, Homo sapiens
tcaattattatatttgaagacgttgttaagtatacttatttgggtattctttcttgagatgtcaaatgacattttccattattttaggcaaatatgttttaatgcagaagtttacttgttatgatcaagggcaaaagttctatgaatcaatttatttgtaatttcttaatcacaactgtgctagggagtacaattttgaaattcacctttgaaatccaaatcttgtctgtaaacaatattgcaacaaattttctacactagtttaacaatatttcttattaattcaaaatggaaggcattctaacatttctaaactacaatctagggaatcttctttgactttctgataatgaagcaagtgattaacttacctgcccattcataattttaaattaactgtagctttttattttaactctcatatttcaaatatacaaattttaccaaaagtaacccactatctcttattactgatgcatctgcttcacatctgtctctctcattctctctttaagaaagggaatcaagctttctttttaaacaccttcttggggttaccctcattcgtcaaacagaaattattcygagacctgttaaaaactgtaaggaagactagtcattattactaacacaata

SEQ ID NO: 151897 - DNA, 538 bp, Homo sapiens
actttttaaatacccactcatacaatttgcctcaattttccctgtactataaatactcaacacttttcatacctgcatatcccaacacagtattacaagctggaaaaaggctgtttctcatcatttttatatcttagcaaagatacatataattttctagaccatttctgcttcgtgggtctttagctcccctgtcaccagacttacctttaatgaaaatatccatagtgttttattaatcatctggtgattgatatacgttaaagattcatcacagtctgacacatgattttctttgattttttatagaaaaggtatcatatagaaaatatactattcctggtactgttttaattattttttttacaaaatccatactctatcaatggtttatggttgttgcagcattgtatattttatcccacactgggaaggtgttttrataagactcctgattttgcttaaaaagcgtaacattttatcaacatttccaactctgtttctcctatacattattttatcttaataacttctgtta

SEQ ID NO: 151898 - DNA, 547 bp, Homo sapiens
cctcttccactgtcctacaaaagtgctaggctgctaggcaacatattatcttaatgaaactatatttaggacttttattctttgcatttcattaatattttaaaacatttgctatatcataggattagtactaaatgtctgttgcaggtcctcagaaaagtggagtttatgagaaatgaacactatggatatttccaaagcacagtaaggcagagtggctcgtacaagatatgctagtattagaataataggactagctaatatgttaattaatagtgtgttatgtgtccctgagtcctcaatttccttagttataagataagagggtttaaagaagagactgttgggamctatttatactcaagcatttaaagatacttttattcaagcgtatccacattctccagagatgccctgggatttctgaattattgtccatgcatgacagcataggtatttgtgtgaaacaaatgaaaaccgaaattaagattataattcatatatgtttatgttgtaaaacctcactgaaaatagttttaaaaaccat

SEQ ID NO: 151899 - DNA, 436 bp, Homo sapiens
tctcagttggagtttagaggtctctctgagtgcggaggtagtgctaatagtacagagaagtggatattggctatagttcacaggccacagtgccagacaggactkaatggcaaagtgaggattccctgagatttgcagtgattaaccctggagcctccagatgagtactgatgagtgcacccatgagaggaaagtaactgaggccagggaaagaactgtgcaaaagaattggaaggaacaacttccaagctcaaacagagcaaacaaaagttcatactctcatgagccagaataaaatcaactcctaatgcatgacagataaagaattcagaaacattcttatctcatgggtggggcaaagaaagtccagagctattctgatcaaacttaacaaagcttaaaggcacagactgaaggattaaactgtttccaagta

SEQ ID NO: 151900 - DNA, 561 bp, Homo sapiens
atataattggaagctaagtgcatacttctaaatgtttcatgggataaataataagtcaaaagggaaattacaaaacattttaaaatgaatggcaatgtatatgcaatatatcaaaacttgtgaaataaagttgaagtagacatatagggaattattcagcactaaatacatgcattagaagacaagaaagatttcaaatcagtattatcaggtttaaccttgagaaaacagaaaaaaagatcaatatacctccaaataagccagaaagataaaataataaagatcagatggcacgctgataaaataggaaaaggaaaaacaaatataaaatcaagaaaaaccaaaagctgtttctttgagagatcaatataactaataaaactctatccagtctgatcagaaaggaggcagacagagaaaaattcattattgataaaaaaaactcagtaatttaggaaaaggtcagtttctcaacytgattttaaaaatccctgaaaagcctatatctaaaaacatttgatattaaaagaatgaatgccctgtctcccaaagtttatggac

SEQ ID NO: 151901 - DNA, 469 bp, Homo sapiens
gcccacgcctccctttctccctccctgctctagtattctgcagtgtctatggttcccatgcggaggttcatgtgtgttcaaggattagcccttacttgcaagtgaaaatatgtggtattggttttcagttcttgcactagatcacttacgattatggtctccagcttcatccatgtcactgcaaagracatgacttcattctttttatggctgcatagtatttcatgttgcatatgtaatacattttatttatccaatccaatattgatgggaatctaggttgattccatgtgtgtactattgtgaatagtgcagtgatgaacatacacgtctctatgcctttttggtataatgatctatattcctttgggtatatacccagtaaagagattgctgggttgaatagtatatctgttttaagtttcttaagaagtctccaaactgctttccacagtggctgaactgactt

SEQ ID NO: 151902 - DNA, 602 bp, Homo sapiens
agggatagagaaaaaaactaagtaataattatgaaataaaatatctttgtgattgagataatcacatatttgcacaaaataattaaaaattaaagaaatctttccagaagttatagaccgcctcctgtatgcaaatctctacagtataccttaaggttataaaatatcacctttttccttgaaggattaatggtgttatctgtgagataatgtcacacataaatggataatttcaagtcagtgtgaaaggtacattgttaaagaggctgttggaatggagttggtttctggatcagctggaaaagttctatcaatatcttcaaagataygtggatgacttttggccaaggtaaggacattggaatttatgatggaccagaaagtttcctggcaacctccaaagtcattttctgcactgatagtttggactcaacctaaacaatttgtgaagcttggctaaattacttaaagaactctacctgagagtctctttgaggtgcctcatttggatcttcgtggttcaaggtgaacatacacatcatcttgtttgcaaatagggcccctggaaatcttgtgcaggggattgtctctcacaggtctga

SEQ ID NO: 151903 - DNA, 597 bp, Homo sapiens
tcatcttgtttgcaaatagggcccctggaaatcttgtgcaggggattgtctctcacaggtctgacactttgcattctttttctggctgcaccatatccttttttttaagaatagggcatttacatgactatacagtcagccctctgtatccccaggttctgcatctgaggactcaacgaagcagggatcaaaaatatttttaaaaatcatttaaaataccaatacagcaataaaaatagaacaatttttttaaaatacagtgtaacactatttacacagcatctacaatgtattaagtattataactaatctagagctgatttaaagtatatgggaagaatgtgtgtaggctatatgcaaatactatgcctttttacataaagggayttgagcattcatggatttggtatcccatggatgttggtcctacaaccaacttcccatagataccaaggaacaactgtactttgtgaagcctgctgagtcctttcaaatacttaagcgttgaaaagtttacagagtggacctagtactatgagatctcatgggaagaaatcttgcaataaggcaggtcatatttagaattgctttctagtt

SEQ ID NO: 151904 - DNA, 638 bp, Homo sapiens
tcgatttcagatgtcatattattctgaaattttagcacagtctaaatcaaaatcatgaagacaatttgaatraaagtacttttctattatctatatggatctttccataatatttagaacttgtagataaccttgaacgtactgccccagaataataaacataattcacatcaatactaagtttacatatagtgataccatagaatcatgtataaattatacagaatttgaatacagcaggatgtactccttcatttacttagtactgcttataatgtattcatcttttcttgacactagagcaaaggtctgcaaaccttttctgtaaatctccaggtactaatgattgtattttttttaggctaacgattgtacatttttttaggctaatgattgtatattttttttagccacagcttctcaactatgcctccaaagctgccacagacagtatgtggtgaacgggcataactgtgttttgattacaacataggggtaaagggcagtgaatttgccctgagatccctagattgcaaaatcctaatgtagagcttacaggttctcaaaatagttgttgaatatttggggtcaaaaattcaaatttctacaactagacacatagattcagatttttaaaa

SEQ ID NO: 151905 - DNA, 638 bp, Homo sapiens
tcgatttcagatgtcatattattctgaaattttagcacagtctaaatcaaaatcatgaagacaatttgaatgaaagtacttttctattatctatatggatctttccataatatttagaacttgtagataaccttgaacrtactgccccagaataataaacataattcacatcaatactaagtttacatatagtgataccatagaatcatgtataaattatacagaatttgaatacagcaggatgtactccttcatttacttagtactgcttataatgtattcatcttttcttgacactagagcaaaggtctgcaaaccttttctgtaaatctccaggtactaatgattgtattttttttaggctaacgattgtacatttttttaggctaatgattgtatattttttttagccacagcttctcaactatgcctccaaagctgccacagacagtatgtggtgaacgggcataactgtgttttgattacaacataggggtaaagggcagtgaatttgccctgagatccctagattgcaaaatcctaatgtagagcttacaggttctcaaaatagttgttgaatatttggggtcaaaaattcaaatttctacaactagacacatagattcagatttttaaaa

SEQ ID NO: 151906 - DNA, 638 bp, Homo sapiens
tcgatttcagatgtcatattattctgaaattttagcacagtctaaatcaaaatcatgaagacaatttgaatgaaagtacttttctattatctatatggatctttccataatatttagaacttgtagataaccttgaacgtactgccccagaataataaacataattcacatcaatactaagtttacatatagtgataccatagaatcatgtataaattatacagaatttgaatacagcaggatgtactccttcatttacttagtactgcttataatgtattcatcttttcttgacactagagcaaaggtctgcaaaccttttctgtaaatctccaggtactaatgattgtattttttttaggctaacgattgtacatttttttaggctaatgattgtatattttttttagccacagcttctcaactatgcctccaaagctgccacagacagtatgtggtgaacgggcataactgtgttttgattacaacataggggtaaagggcagtgaatttgccctgagatcccyagattgcaaaatcctaatgtagagcttacaggttctcaaaatagttgttgaatatttggggtcaaaaattcaaatttctacaactagacacatagattcagatttttaaaa

SEQ ID NO: 151907 - DNA, 613 bp, Homo sapiens
aatccgtaagaatcgctagaacccgggaggcagaggttgcagcgagccaagatcgtgccactgcactccaacctgagctacggagaaaaactgtgccaaaaaaaaaacacaaacaaaaaaccaaacgacaaccaaaaaaacaaacaaactgctattctagatacttaagaattaaatggtaaaaaggaaataggtaagactaatacaggaagttcaagtctatttaatcatggaggtaatgagtagaacaaacccatggattctgatctctttctatgtagtrtgatttttatacaggagttcaacacagaaaagatgagatcattctgccttttagacattggtttattttataaagattttttttgtgccgaagggattaagaaacacatctacagaggcatctatctcaggtctttaatcattatgggtttacatttgtttcttacaatttagaatcctgccaggatagggtagatgactttagtatttatttttaatccacaataatgactatgatgtcaataaaaacaaaataatagcagtacttagcttgtacatacaataaaatgaacacttttctaagaagaagtatctcaaaaataaaactcca

SEQ ID NO: 151908 - DNA, 613 bp, Homo sapiens
aatccgtaagaatcgctagaacccgggaggcagaggttgcagcgagccaagatcgtgccactgcactccaacctgagctacggagaaaaactgtgccaaaaaaaaaacacaaacaaaaaaccaaacgacaaccaaaaaaacaaacaaactgctattctagatacttaagaattaaatggtaaaaaggaaataggtaagactaatacaggaagttcaagtctatttaatcatggaggtaatgagtagaacaaacccatggattctgatctctttctatgtagtatgatttttatacaggagttcaacacagaaaagatgagatcattctgccttttagacattggtttattttataaagattttttttgtgcckaagggattaagaaacacatctacagaggcatctatctcaggtctttaatcattatgggtttacatttgtttcttacaatttagaatcctgccaggatagggtagatgactttagtatttatttttaatccacaataatgactatgatgtcaataaaaacaaaataatagcagtacttagcttgtacatacaataaaatgaacacttttctaagaagaagtatctcaaaaataaaactcca

SEQ ID NO: 151909 - DNA, 553 bp, Homo sapiens
ccaaacagctaaagaatatgcattactttcaagtacacttggaacacatcgcatgttagaccatatgctgaactacgaaataagccttaaaaaatataaaacactgaaatcttaaaaaatatattctcaaaccaaaagggaattaaactaaaaatcaattattttaaaatatctcaattttttttagtatctaaaaacagagaactgctaaatatctcaattgtcaaataaaaatcacgacagatccaaaaatatcttttgtttgtttgtttgttttttgacggagtctcactctgttgcccaggctggagtgcagtagcgccatctcagctcactgcagcctccgcctcccaggttcaagtgattctcctgcctcagcctcccgagtagctgggactagaggcgcgtgccaacacrcccagctaattgtttgtatttttagtagagatgaggtttcactgtgttagccaagatggtctcttatctcctgacctcctgatccacctgcctcggcctcccaaagtgctgggattacagacctgagtcactgccc

SEQ ID NO: 151910 - DNA, 422 bp, Homo sapiens
gcagttatagatgcagttctcagtagcgatgtcttggtgatggctgctttcttgctgtattctcacatgatagatatagtkaactgctctctggtttcttcgtgtggggtcactagttaatttccaaagtcctcacctccaaataccatcacactggaggttaagaattcaatatatgaattttggggtggcataagcattcggtccataacactctgtaataacccattctcgttcttggttaagcaataaattacatttgcttgcaattcttcctttcccaagtaagaaataaatttagtttttatatgtgtgtgaattatgatttctttaaattaggctaataacctcaaaagtagtccactgtaaattattttggacttttgaaattctttaattttatgaaacttttcaggagtttt

SEQ ID NO: 151911 - DNA, 422 bp, Homo sapiens
gcagttatagatgcagttctcagtagcgatgtcttggtgatggctgctttcttgctgtattctcacatgatagatatagtgaactgctctctggtttcttcstgtggggtcactagttaatttccaaagtcctcacctccaaataccatcacactggaggttaagaattcaatatatgaattttggggtggcataagcattcggtccataacactctgtaataacccattctcgttcttggttaagcaataaattacatttgcttgcaattcttcctttcccaagtaagaaataaatttagtttttatatgtgtgtgaattatgatttctttaaattaggctaataacctcaaaagtagtccactgtaaattattttggacttttgaaattctttaattttatgaaacttttcaggagtttt

SEQ ID NO: 151912 - DNA, 546 bp, Homo sapiens
actgacactctacagatcatcaagagagaatattaacaaagatattcaggacctaaactcaacattggatcaaagggacctgataggtatctagagaaatctccacccaaaaccaacagaatatacattcttatcaccacatgacactgactccaaaatggatcacacaatcaaaggtaaaacactcctcagaaaatgcaaaagaactgaaatcataacaaacagtttctcagaccacagcaaaccgtttctcagaccacaacacaaacaaatgcaaaatcaagactaagaaattcactcaaaaccatacaattaaatggaaattgaaaaacctgctactgaatgactttgggataaataatgaaattacggcagaaatcaagaatttctttgaaatgaattagaataaagatacaacatagcagcatctctgggacacagctaagacagtggtaagagggaaatttatagcactaaatgcccacatcaaamagttagaaagatttaacgagcctaacattacaagtaaaagaactacagaacaaa

SEQ ID NO: 151913 - DNA, 409 bp, Homo sapiens
cagggaagtttataacaacaaatatctatatcaaaaagtagaaaggtttcaaataatctagtgatgcacttcaaggaattagaaaagtaagaacaaaccaaactcaaagttagcagaagaaaataaataataaattgtatagtagaactaaattatattatractagaaaaacaatagaaaggatcaatgaaacaaaaggatggttctttaaaaagattaaactgataaaccattagctagactaacaagaaaagaagagagaagaccaaaaaagaaactcggaaataaaaagggagaccttacaattcataccgcagaaattaaaaggatcaagatcaacagagactacagtgaacaacactccatgctaacaaactagaaaacctaaaggaaatggattaatttctg

SEQ ID NO: 151914 - DNA, 409 bp, Homo sapiens
cagggaagtttataacaacaaatatctatatcaaaaagtagaaaggtttcaaataatctagtgatgcacttcaaggaattagaaaagtaagaacaaaccaaactcaaagttagcagaagaaaataaataataaattgtatagtagaactaaattatattatgactagaaaaacaatagaaaggatcaatgaaacaaaaggatggttcttyaaaaagattaaactgataaaccattagctagactaacaagaaaagaagagagaagaccaaaaaagaaactcggaaataaaaagggagaccttacaattcataccgcagaaattaaaaggatcaagatcaacagagactacagtgaacaacactccatgctaacaaactagaaaacctaaaggaaatggattaatttctg

SEQ ID NO: 151915 - DNA, 409 bp, Homo sapiens
cagggaagtttataacaacaaatatctatatcaaaaagtagaaaggtttcaaataatctagtgatgcacttcaaggaattagaaaagtaagaacaaaccaaactcaaagttagcagaagaaaataaataataaattgtatagtagaactaaattatattatgactagaaaaacaatagaaaggatcaatgaaacaaaaggatggttctttaaaaagattaaactgataaaccattagctagactaacaagaaragaagagagaagaccaaaaaagaaactcggaaataaaaagggagaccttacaattcataccgcagaaattaaaaggatcaagatcaacagagactacagtgaacaacactccatgctaacaaactagaaaacctaaaggaaatggattaatttctg

SEQ ID NO: 151916 - DNA, 631 bp, Homo sapiens
ttattccttcatacctgcaagtgctgcttaagaatattattttcaccaggcacggtggctaacatctataaccccagcactttgggagggkgaggtgggcagatcacttaaagtcaggagtctgagaccagcctggccaacatggcaaaaccctgtctttactaaaaatacaaaaattagctgggcatggtggcatatgcctgtaatctcagctactcgggaggctgaggcatgagaattgcttgaacccgggaggcagaggttgcagtgagccgagaccgcgacactgcactccagcctgggtgacagaggaggattccatcttaaaaaaaaaaaggaacttggaaatattatttataaatttgggtactgtactaaaattttcctatgctgtatgttttgttcctgtgagtatttatagatatttgtgttttgattcacattttctatttcctctttatgacagctttatatgaatgttgcctgtcttttttggttattttaaaacatctcattctctcacccatcaataataattcttctatgtatttattgtgagagattttcatggttcacaaagttacttaggttatgaataccctatttgtgaagacaatgtagtggagtgtta

SEQ ID NO: 151917 - DNA, 631 bp, Homo sapiens
ttattccttcatacctgcaagtgctgcttaagaatattattttcaccaggcacggtggctaacatctataaccccagcactttgggagggtgaggtgggcagatcacttaaagtcaggagtctgagaccagcctggccaacatggcaaaaccctgtctttactaaaaatacaaaaattagctgggcatggtggcatatgcctgtaatctcagctactcgggaggctgaggcatgagaattgcttgaaccckggaggcagaggttgcagtgagccgagaccgcgacactgcactccagcctgggtgacagaggaggattccatcttaaaaaaaaaaaggaacttggaaatattatttataaatttgggtactgtactaaaattttcctatgctgtatgttttgttcctgtgagtatttatagatatttgtgttttgattcacattttctatttcctctttatgacagctttatatgaatgttgcctgtcttttttggttattttaaaacatctcattctctcacccatcaataataattcttctatgtatttattgtgagagattttcatggttcacaaagttacttaggttatgaataccctatttgtgaagacaatgtagtggagtgtta

SEQ ID NO: 151918 - DNA, 554 bp, Homo sapiens
tttttgtgaataacataattaattatttgccccattagcctttgagaattaggattaagtttcaggaaaaataggcaggattttcttatatgggctttatatcagttgaaatgattccaactaaaaggaatagcagaaaacacacctgtggtattttagctagcaagacaaccctgatagtacagattaaggcaggcctttgaaatgacttaatccaacagctctggcttccttttgctggaggtcttttcagcttttattctcctcctggtgtagcttcatctaaaagctagtaagaaacagcagaaaaaatgacagttcttgtgcatggcaaaatcatgtctggaagaaatgagatggtctttccctgtggcaaaaaaaaattaagaatggaaaagtctttccccagaactttccaacaagtttcttcttgtatcttattgtttgattaggataacatgcttcttccaaaatcaactcctgccagccctgcagtgtgattcattcattggcttagatgagagttcctgaaraaaatgattgtcagggggaat

SEQ ID NO: 151919 - DNA, 386 bp, Homo sapiens
gaattcattttgattggttgacaatgacaaaaactgtattgttttttatttgatgagagactcaagtagatttagagagccgtgagtaatcttacagaamacttcatagcacattttagagagagtggtgcttcagaaacaagggtcctcatccacttttttccatccattccttctcccacttttagtataatttaaccaacgtatatttatttttgtatttattacttcaatgagtttgtgtttagtaacttaaatagtatacttgaggtaatatatttaataaggtagtcgctaccttcaaggagcttacagacggctataggagaaagacaggtatattggtaggggcattattgatggttccattaaaggcaattaacaga

SEQ ID NO: 151920 - DNA, 399 bp, Homo sapiens
gaattcattttgattggttgacaatgacaaaaactgtattgttttttatttgatgagagactcaagtagatttagagagccgtgagtaatcttacagaacacttcatagcacattttagagagagtggtgcttcagaaacaagggtcctcatccacttttttccatccattccttctcccacttttagtataatttaaccaacgtatatttatttttgtatttattacttcaatgagtttgtgtttagtaacttaaatagtatacttgaggtaatatatttaataaggtagtcgctaccttcaaggagcttacagacggstataggagaaagacaggtatattggtaggggcattattgatggttccattaaaggcaattaacagaaatggtttttata

SEQ ID NO: 151921 - DNA, 546 bp, Homo sapiens
ctggcagtcatgaaacccacctggtagcttgagctgagcacagccttccaggtggagtgggcaaaaagggtccagcaagcccaagcaaaactcgagcaaaagcaccaccagccacagaggtttctagccagaaaaatgacaccactatattagcccgtgttcatgctgctgataaagacatacccgagactgggcaatttatacaagaaaaacgatttcatggacttgcagttccacattgctgggaagcctcacaatcatggyggaaggtaaggagaagcaagtcacatattacacggatggcagtaggcaaagaaaagagagcttgtgcagggaaattcccatttttaagaccatcagatctcataagattattcactatcacaagaacagcaaaaagaaagacccactcccatgattcaattacctaccaccaggtccctcccacgacacaggggaattgtgagagttataattcaagatgtgatttgggtgtggacatggccaaaccataacaataccaaagatcccataacacaatgatat

SEQ ID NO: 151922 - DNA, 546 bp, Homo sapiens
ctggcagtcatgaaacccacctggtagcttgagctgagcacagccttccaggtggagtgggcaaaaagggtccagcaagcccaagcaaaactcgagcaaaagcaccaccagccacagaggtttctagccagaaaaatgacaccactatattagcccgtgttcatgctgctgataaagacatacccgagactgggcaatttatacaagaaaaacgatttcatggacttgcagttccacattgctgggaagcctcacaatcatggtggaaggtaaggagragcaagtcacatattacacggatggcagtaggcaaagaaaagagagcttgtgcagggaaattcccatttttaagaccatcagatctcataagattattcactatcacaagaacagcaaaaagaaagacccactcccatgattcaattacctaccaccaggtccctcccacgacacaggggaattgtgagagttataattcaagatgtgatttgggtgtggacatggccaaaccataacaataccaaagatcccataacacaatgatat

SEQ ID NO: 151923 - DNA, 603 bp, Homo sapiens
tgaagggcttgccttggactggctaagtttctctactagaggacgtagctcctttggaagtggtcccttttccatgaaaattttctttttgattagtaagtccatcttccttcctcattctgggattagggtcaataaaaktcccaatgttaattgatcttaggtgctatatgatccctatggtttctctagacttttcctacaagttgtaaatacacctagtactcaactttccttgagttacactagttttattacattatctgttttctgtttcaaccctgagtgatgcagtacataaaaatggcattggattgtagcatggatgtcgtagctgtacttgacaataacactctcagcacgtgatgggggttgaagcctaataggagtgtgtgtatagggaaaatgatgtaggaaacaagcagaaacagtaggacataattttagaatgttttgctataaagggaggaggccattgtggtagtttctgaagagggtggcatgtggtaaaggaaacattactgaaaagaggaacaaactgaaataaatttcaaaaacattatattccttacagcaataatatttttcatacatggtacccag

SEQ ID NO: 151924 - DNA, 557 bp, Homo sapiens
gttgcctgtgctttccttctcccatgccaccayatcttttacaccatcaaagtcttacatgaacacaccctgagaagttttgtgagtccatccaatcatcagactccatgtaactgatgtatacaaaaaggccatgagtgtcctgctttggctgtacctcaacatgggtgaaaggaatatagtcgatgtcccctagctctttgctcttaaatgcctgggcttagccttcaaacctgcagtcagtcagaggcataattgaggagagcaattagggttataattgaggtgatcaattagggttatcaaccctatcagttagggttgtctatgaggataaccctgcccccaccttcatgaacctttcttcggcatcaattttgctcctttctggatcctcttggaccccctcgtggattgtgtaaattttacctcctaaaagttttgaaatgtaagtgcagtatgaaatgtaagtgcagtattttttaaatagcatcaaaactactctaactaatcttaaaatcagtttttaagttattttctgtgccattacagcccat

SEQ ID NO: 151925 - DNA, 557 bp, Homo sapiens
gttgcctgtgctttccttctcccatgccaccatatcttttacaccatcaaagtcttacatgaacacaccctgagaagttttgtgagtccatccaatcatcagactccatgtaactgatgtatacaaaaaggccaygagtgtcctgctttggctgtacctcaacatgggtgaaaggaatatagtcgatgtcccctagctctttgctcttaaatgcctgggcttagccttcaaacctgcagtcagtcagaggcataattgaggagagcaattagggttataattgaggtgatcaattagggttatcaaccctatcagttagggttgtctatgaggataaccctgcccccaccttcatgaacctttcttcggcatcaattttgctcctttctggatcctcttggaccccctcgtggattgtgtaaattttacctcctaaaagttttgaaatgtaagtgcagtatgaaatgtaagtgcagtattttttaaatagcatcaaaactactctaactaatcttaaaatcagtttttaagttattttctgtgccattacagcccat

SEQ ID NO: 151926 - DNA, 449 bp, Homo sapiens
tttttcatcttctttctttttatttctcagtttactcagtaaatcagtgtagaactatctaactctctgggtggctgcacataagaaatgaattataaataaatattcagaaacaacttagaaaacaatcacaaatattgaaatacacagtgttatttaatgtatcatcacaaatatgtattattatgtttttctgggagttagacgtctttgggtatactctgggctgtgtgaaaccttgaagtgtttttctattrggactcaagtaagcaataactagaaatctatctggtaaagttgaatcatgattaatacaagtacaacagacctttctgtagttgttttgctgtcagttcacgtttttaagtactatatatacattctgctctcttagaccttatggctgcattgttgaccactatgctctgaataaagttaaaaactacagc

SEQ ID NO: 151927 - DNA, 534 bp, Homo sapiens
agtgatataccaactttacaaattaacagtagacagagccaagactctaacccaagtgtatcctgcccgaaagcctaggattccaaccacaaataaacctacacatttattatccctgggtacagttgacagacctaatgtggtccccatgattcctgccccctggtgttcatacctacaatagtcctccagatgagaatgcagagccccatgacattgatcacattcttgtgaaaccctgagcagagaaagtacytaagctgtgctcacattcctgccacagaatctgtgagataataactttttatgctgataaggtcctagtaatttgttatgcagcaatataaggtaaatataaaatgattatatctattacattcatgatgtgaacacttaagataattttttatttggatagataattttttataatctcctttaaaagataatttaaagagctaacatgagggaaatggaagaatagacagagcatagacagggattttagggaaatgaaactattttgtgtgatac

SEQ ID NO: 151928 - DNA, 534 bp, Homo sapiens
agtgatataccaactttacaaattaacagtagacagagccaagactctaacccaagtgtatcctgcccgaaagcctaggattccaaccacaaataaacctacacatttattatccctgggtacagttgacagacctaatgtggtccccatgattcctgccccctggtgttcatacctacaatagtcctccagatgagaatgcagagccccatgacattgatcacattcttgtgaaaccctgagcagagaaagtacctaagctgtgctcacattcctgccacagaatctgtgagataataactttttatgctgataaggtcctagtaatttgttatgcagcaatataaggtaaatataaaatgattatatctattacattcatgatgtgaacacttaagataattttttatttggatagataattttttataatctcctttaaaagataatttaaagagctaacatkagggaaatggaagaatagacagagcatagacagggattttagggaaatgaaactattttgtgtgatac

SEQ ID NO: 151929 - DNA, 630 bp, Homo sapiens
agtaaatctatttctgattgtgatactctgaamaactatgtgtccctcactgagcagttgttgatacaccggtgtaagaaacattaaacaaaacaccattgcataagtaattttcaaactgtagaagatgcatcaatgcccggacttactaagccacatatctatagagtaggttctactggtaagtgacacataagttcttggtgtcactgatctgactcatattttcaatgaacttttgttttagaacagttgtggaattacagatcaatgaagaaatgagtgtagagagttctcatagattccacaatcatttctcctatcattagtatttgatgtatgccatgtcttataactagtgaattaatattgataagttattacctaatatccaaattgtattcagaattcattagtttctgcctaatgtcatttttctgttctaacatcctatgtaggagacacattacatttagttgtcatatcttttgttgttgtttgtttgctgcctagtttcccacttccaacttatttgtagagatgaaaacttttttcattcacttatcacccacacaactgcagaaggctgtgttacatatcactgctaccttctaaatcaaacctgagtgc

SEQ ID NO: 151930 - DNA, 371 bp, Homo sapiens
cctgagaaagcttagtactacttttatgtttcaacttgattggggcagtaggtgcccagatatttggtcaaatattctggatatgtctgtgagggtggttttggattaggttaacatttaaatcagtagactagactgaagaatgcagatttccctccctaatgtgagtagtaggactcatccaagcagttgaagaccagaatagaacaacaacaacaaaaacctgaccctcccatgagtaagaggggagtcctcctgactgactaccttgwactatgacatcgacctattctgccttcagactgaaactgaaacaagtctttttgggtcccaggccttctggtgttcagcatggaacttacaccatcaac

SEQ ID NO: 151931 - DNA, 531 bp, Homo sapiens
tcttgcttctgctctgaccatgtgatgtgtctgctcgcacttcaacttctgcaatgactgtaaatttgctgaggcctccccagaagctgagtaaatgcaaacatcatgcttcctgtatagcctgcagaaccttgatccgattgtacctcttttctttataaattacccagtctcaggtatttatttatagcaaggcccaaacagtacccaatgcacaatgtacacagtgccatacccattagattggagaaggagactaaaggattgttcccaaaaagctgtcacatgcacttgataacttggcatcaacctaccagctctaaatctaaagatgaaacagaattaatttagaatacaggatgtaagaaaggagccagggaaggaaagcctgcaggcagaaggatcataggcaatawattgtttgttatggtggatatctctctcctaggttgggaagcaggttaggcataagatgtaataagaaaaatgttggcagaggtgaggggttgaaataatagcttgtctgcaagt

SEQ ID NO: 151932 - DNA, 356 bp, Homo sapiens
gtcacttgctatggaagcctgaaaaatttaacagatatttaagtcttaattagtttttattcagaatccccaaactaaaaakgatatgctctgtaacctcttatcaaggacccacttgtacaagggcctcttgccagatagatgtcttagaaagacatttagcccgaaagccacatggttgccaacaaatgttttattttatttctttggtctcatatctaataatcccttactcattttgaattccttttattttttttttttactatatcttttaagtagaaggcttttaaagtgtgtcatggagacagaagcccatacttacctcctgagcatctatggaaaattaagagttg

SEQ ID NO: 151933 - DNA, 274 bp, Homo sapiens
cccaccttatttattttatatatcattgttagttctatctttctaaaccactatttgtcttgagctcttcycttgctcaaaagtattttatccaatagctttttatctttatgacattagatttcaagatattttgtaggtccagagagatcccagcactcatacttgagtatgagtctaaaagccaaccccctccccaccccaagatgttgttttgccaaagaaaatgtttctttcagatacaaaaaaaaaaaaaaaaaaaaaaattcagtct

SEQ ID NO: 151934 - DNA, 569 bp, Homo sapiens
caaccttctcccattaggacaattcaagtaacaaattgatcatgtgcaatgcatttcatgggtcaagagatagtatgtgtcatataagcactactgtcagaaaaccttccctggagagttaatatatattcactgcaccaatgttcacagtgctttgagttggcaaatagactcacattttttttttgcccaatatattctatgacgatgaatcctaagttgaaactgatttttaactgcatagagatatttgttcatgaaaaggtatgtttaggggaaaatgcaattttagtcaaattaaaatattaattcagtatagaagttataccatttaaaataaagatgaattacaatattatagaattaaaaaggactttcctaaaatgaaactcttttaaaataattgatartgcaaattctgctaaattgttcaagtttgtaaattattcctaggaaataagatatatattttttcctaaggaaaaactaactcttaaagtgctttagtatgttgcaaaagatatttgctaatttgaatatcaattgctatgcttataaagaaattctgg

SEQ ID NO: 151935 - DNA, 530 bp, Homo sapiens
tatagagatagtatttcttatacctattgaatggagttgtcactatcatttttttagactccatgtaaatactgttaatagtcaggatattggcatcaaatagggaaatacataaagagtattgttcttacagcaagagtaaaggcagagattttrtgaaccgatttcagcccttgagctaatatcctatagtactcataatcattctcagacaccttgagtatgataatatttggtttggttttggtctaaactgtgatttcttgttctaaactatgattaattcaactatgattgaattaattgtctttgaatcacacattaaacaaagtaaaataaaaatttagcaattatttgttaaatggcagttcactgcatatctttccacttcatgtatttattcatttaatggatattttttgaatgtctaccatttgcaagctttggtctagggccccagttgaacatatactacattgtttcattgtgtcttctatgtcctcaacctcatactccagcccagtactcaa

SEQ ID NO: 151936 - DNA, 570 bp, Homo sapiens
aataaatacttagctatatcagtatcagcaaataaaaaagagacaattgccaatgtacaaaagaacagcatagactttaaatgtatttatatggtcaggaatgtatactaattaattatcagaaattagtggaatattataattttaaaaggtgataactgtccaagtaatatcaactctttcatctttcactcaacacattcctatctacctttaggaggacaacaggatgagagttcgaattaagtatattcaaactgaatttacattaagtagaaagagtgatggagttaaatttagaaacataatcgtgttaaatgtacatgccaacctgtggggtaacatggacagccagaaaagaaatagaaaggcttttgactcactctcgttttcagcatgtagcttggatcttcattctgtactctamagggttagtcacacttgagtcctttgagaagaatatgccaagaagaaagtacttcagacagtatttcttaggggaaaggtcggtgaaggtaaacataaaaaggagaaggagctggtaaaagcctcccaaagttgggaataaag

SEQ ID NO: 151937 - DNA, 548 bp, Homo sapiens
ggtgtaggcctaaaactgtactggtagtcattgtgttctttaccacctcatgctcacaaaaataaaataccacttttatttaagaatattcttgatgaattatttaaaagtgttatttgatacaaaaattagccaggcgtggtggcgggagactgtagtcccagctacttgggaggctgagacaggagaaaggcctgaacctgggaggaggaggttgaaktgagccgagttcgtgccactgcactccagcctgggagacagagtgagactccatcaaaaaaacaaaacaaaacaaaaaaaaaaactgtgttatttgattaaacctcaatccttgtgtacatatcaatgttctgggtgtaggcacacagcacttctgctgcacactgaagtatgatggcagttccaaagaaaaccaattaggcaattatttgagttaagagctgaactagctgcttcttccatggaatagaattcttgaaataattgttaacaaaccgtagctacacaggcctgcatattgaacagacattttattaaaagttgaatga

SEQ ID NO: 151938 - DNA, 460 bp, Homo sapiens
tcaacttaacagacgtcagtttcaagatgacagagagtgacttagagggaagtgaacagtagtttggggaagtatagagacacattcctgaccagaataaytaagtttgaatttgtgaaatcagttaccattttcttgggaatctcattaatatcttaacaagaaaaactggtagaagacttttataatcaattattcattgagcaccttccatgtgccaaatgtttcataaactctcagtgatacagcaatgaataggacaaaggccttgtccttacatattttgtattgtcatatataaattccatagttaaatcgggtaaggtttttaaaaatcataaatgttacgtttattgaaaatgtaactgatcaaagactgatgacacaaagaaaatggaaagaaattggaaaagggagattagaatatagggtcaaattcagtaccacaatcagcatacta

SEQ ID NO: 151939 - DNA, 460 bp, Homo sapiens
tcaacttaacagacgtcagtttcaagatgacagagagtgacttagagggaagtgaacagtagtttggggaagtatagagacacattcctgaccagaataactaagtttgaatttgtgaaatcagttaccattttcttgggaatctcattaatatcttaacaagaaaaactggtagaagacttttataatcaattattcattgagcaccttccatgtgccaaatgtttcataaactctcagtgatacagcaatgaataggacaaaggccttgtccttacatattttgtattgtcatatataaattccatagttaaatcgggtaaggtttttaaaaatcataaatgttacrtttattgaaaatgtaactgatcaaagactgatgacacaaagaaaatggaaagaaattggaaaagggagattagaatatagggtcaaattcagtaccacaatcagcatacta

SEQ ID NO: 151940 - DNA, 540 bp, Homo sapiens
tctcatttatttggaaggtttctctttccattatgtacccattaccacacatgactgcttatctttagaaggggccacagtccagaggatgttggggaatggagttagacaatctattctcacaggttttccagtgtgtgctctgccaaaagccagattattgctagaccagtcttgtgcggcaaagcttacttgacattgacaatacgggcctccggaaaccatgctctcaaatacagtagacacccccgtgtactttatactaatatgttactggtttatgaagaaaatagtcaagttcctcttatttattgtyaaaaatcataaaataaaaactgtcaagaagaaaagctgtagagtcaaaccacatttcacagtaacacaatatttcatcctgcctaccactgtggctataagttttgaaatcagacaactcttggtttaaatcctttcatgcccacttattagctccgttcttttatacaaattaatgtttctgattttccatttattctttgccaaaataagaataaaaagacc

SEQ ID NO: 151941 - DNA, 584 bp, Homo sapiens
agcacacattagtctattaagagctgagaaacagtaaggctgtctttggttgacaagggttaaaaagtgagccctggacattttattaaaaacccattccatgtattagccacagggaaagatgttagagagcaccatgagccatatttgttcttcatcaactggggacattctctttacagtgctatactctctcaggaaaaagaacttggaaaaggttgagcatagattccttagggsaacagggctgggaaatgaagaggaaagataaggggaggtgggataattagttgaaattatatacttgaattgaatctgcaccttcagtgactgagcagctcccagaatctgttaatgctaactttttaaaacatttattttcagactgtttaatctaattttcctagatctcagtaaaaatcagaataattgtcaagcattcagtgtctgccaatcacagtcatataggcaactgtggctgagggctttgactcaaagttatagttataaaagcactgaaattacagtttagtctgtagcagaacctaccttggttaaatgatatatgctgtatgatgtgactt

SEQ ID NO: 151942 - DNA, 231 bp, Homo sapiens
aaagttgttattgattgcagtgatatgttcacatacttcataggattatcaaagacacaactgtcatgragacctaaaagaatatttcagaatttaggggacccatgacagtctagacctcagcccggatttaaaaacaagcaagcaaaaacgctgcaggaaatattgttaacatatcaaaagtattgaaaaagatagttattgccattgttatctttgaattgtaatagt

SEQ ID NO: 151943 - DNA, 231 bp, Homo sapiens
aaagttgttattgattgcagtgatatgttcacatacttcataggattatcaaagacacaactgtcatggagacctaaaagaatatttcagaatttaggggacccatgacagtctagacctcagcccggatttaaaaacaagcaagcaaaaaygctgcaggaaatattgttaacatatcaaaagtattgaaaaagatagttattgccattgttatctttgaattgtaatagt

SEQ ID NO: 151944 - DNA, 221 bp, Homo sapiens
ctgaatgaaagcctatcttttgagagcatggtttagtgactatttcaagcccaccattgagactctgtgctcaggaaaaaacatatcctttccaaatattactgcttatggacaatgtatgtgattattcargagctctgactgaaatgtagaagcagattaatgttttcatgcctgctaacacaacatccattctgcagctcatggatcaagaagaaatt

SEQ ID NO: 151945 - DNA, 474 bp, Homo sapiens
cccattgtaatctccaagcagggatgtgcctgcagccatgaaatcttaataaagatttattttcttagctgtttagtgttttgtgaatatttatatatgattaaaacagaagcatttcatagttcaccattaaagccaacatttcattagtctcagtcaatatatacaatatctctagtttctcctttgtcttaatgaattcaatttttatgactattatgtaaaagttgctttgctgtataatattaaagccttascatgtgaatgaaaatgaagggagtgaatcttatgaaatgtattaatgcatcctaaaatattatcactcctttaacatattagtgactttgaaactccaagttggctcatgtgataagaaagcaattagtgtgctaccaatgcaaatgttatggtaatacttttatattgaattactagctttgataaaaccctggtagtctccatttaataactaat

SEQ ID NO: 151946 - DNA, 593 bp, Homo sapiens
gaattttactgtatgagcatattttgccacaaagcaaataagaaacagtgtgtgttctttcttatttcaggtcagtaatataaaactgcatgtgcyagaactaatttaatcacatgcatattacaatgaaactaaaattctctttcgtcttttcaactttcttttagactaagatcctgttacacaccataaaaatatggccattattacactaaatgtgcagctatttgattacttatagatttatatttttaagccaatttaacttttaatattggggcatatcatttttaaaaggttgaatatatactttaatttctgtttgagttaatgctccatttttgttgatttaaataagtggcataccaagagctgaatttaataatctaatttatgaaaagtaaggaagaatatctgcaaatgatccaaatccatttaccctaaatatctcgtatattcaatcatttcacacatattcgttttagaaatacatatatatacaatccttatagaagctttatggtagacattattttccctgatttataaataaggatgctgagggtaaaaggattaagtaacttgcttgaagt

SEQ ID NO: 151947 - DNA, 624 bp, Homo sapiens
tgtagctttaagaaagtatctttataaaatgagactctgtgtccaaattaaggacaagatttttagtaaagagtgtagaattttttgggttgacatttcttgaattattgtaaacacattcaatgcatgtatttagaaattctgctattggaatcgttaagacttcattttgtatataatatgctgttgggtttaggtttgaatcagcaaaaaagcataaaagacctgggagatttagagacatttaaattaattgaggacttgatttgtctattaaaaaaaatacatatccccgttagggtttcttactctctcctttgttgattctcacagatatgttaaattggtatttcccattaattctgaaaaaagtttatagataayatttaaatgaattataaattgacttctggaattaacacgtataattttatatacattcaaaactagcattttagtacctatttagaaaagttaaaaaattaagaacaattcactattcatgtcaatcaccagataatggctaatagttattaaaatatctgtgtgcaattgttattacaaatgaaagtatgattttcatctactgaacacaacaaaatttataagaaaacaaaacaaata

SEQ ID NO: 151948 - DNA, 561 bp, Homo sapiens
ctgtccataccaatgctagtgtccaaaaacttgtatttacctttagtcgcttgtatttattttagttgctttctttggccccttctcaatttttgtccttctgctaattgagtaaaagtaatctggcatgactgagtggaccggaggctgaatgtggaaaattgccctagatactgaaaatgtttttcagggaaagttaaaggcactgattgtgctaaacaagcacacacagggaatatgttcattatttgccgctcctatatatgaatagatattttcagtggggtctgtagagatttkgattaacaagccttgttactgttaacaagcattgtatacctaattccaagtacattgttctgctcgttgacacctacacgtttgacttaaactgtcaaaggcaaggaatcttaccaggaaaaaaatgcaagtgcttctaattcattccctctctttccataacttgtcatgtttccatatgtccattgtatttataaactacaggatacagtttcttgatttttcaatacttaagttgttcctaaagaaactataaaataa

SEQ ID NO: 151949 - DNA, 561 bp, Homo sapiens
ctgtccataccaatgctagtgtccaaaaacttgtatttacctttagtcgcttgtatttattttagttgctttctttggccccttctcaatttttgtccttctgctaattgagtaaaagtaatctggcatgactgagtggaccggaggctgaatgtggaaaattgccctagatactgaaaatgtttttcagggaaagttaaaggcactgattgtgctaaacaagcacacacagggaatatgttcattatttgccgctcctatatatgaatagatattttcagtggggtctgtagagattttgattaacaagccttgttactgttaacaagcattgtatacctaattccaagtacattgttctgctcgttgacacctacacgtttgacttaaactgtcaaaggcaaggaatcttaccaggaaaaaaatgcaagtgcttctaattcattccctctctttccataacttgtcatgtttccatatgtccattgtatttataaactacaggatacagtttcttgatttttmaatacttaagttgttcctaaagaaactataaaataa

SEQ ID NO: 151950 - DNA, 248 bp, Homo sapiens
ggtagcaaaaaatctcagtggaggctcagaaagaggagatgtttggcaagcctcccaaattcatttcattgtgtcttcactactaaaagcaatccttctatttcagctgttgttaatagtaatrgaggagaggcagagcagtcagactcagtgcagggaaacaaaaataagtggaatggggacctctccccaccaagaggaactctgtccccaagctgagcgcacatttgttctctcctacacagaca

SEQ ID NO: 151951 - DNA, 485 bp, Homo sapiens
aaattacaccatgtgtttgcaataggaattaaaaaaaactgttttgtttctattcctactctcagtacagaatttaggtcacctctggtcacctaaatgtgtggagatttcaccccaccaacaactatcactccagaagacaatggtgtcctataattcagttaaattctgatactattttcctggagatggcataagatcccacaggttgagagctcagtcccacaagactgtcccctacttcaaatgccaatcacaagtagtaggttgtcacctacacttatgactgagtggctgtaaatcagggttcccatgactccctccttaggtttgattaatttgctaagacaattcacagtaatcagagaaacacatgaaatgattgattataaaggatattacaaaagattctgawgaacagccagatgatagagatgcacagggcaaggcatgtggaaaggagggtaaatcttccatgccatctc

SEQ ID NO: 151952 - DNA, 287 bp, Homo sapiens
aactcttaaattagaacattaaatgttaaacactttaagaaataaatgaaaaaacaaaaatatcattgtcagtcaacccactaacttcaaagctgacattcttaatttagatagtaaaaaactggatttaattttaaaaatgacttcayaccatatgcccaacattaaatgtttattattaataataaaatatatcagtagcagcagtcacttttagaaaaccagtgcaacttagataagtccaaatagaatgaaatatattagaacataatggaggagaagggaaa

SEQ ID NO: 151953 - DNA, 564 bp, Homo sapiens
aacaacttttaattactatgtgaaaggcacctttctaattaggatgatagagaaataaacaaaatagaaacaaaaaaatctcttttttcatggagattatgcttaacggggaggcaacggtgttctggcaaaccacctctccaaaataaaagccctcattggtagcatttgccaatttccatggtgtaaatactcccactatggataatcagctcgcaaaactcccaaatagttagcaattttcttttgcaaactagagtaagcaggctccctataccactggtgggagattagacaataaataagtaaaatatgtagtytgtaaatagaggtcaatgctttggaggaaaataaggcagggaaagggaatatttaagtgtttgggggtagagagagagtgcaattagaaatagcctagacatagagggcttcaacagggctgatcacacctcttatggtggagaagaatgagccaggagtgaaaacagcacagtatctctttggtctaaatagcatatcaaccaagaatattagttttagtctgtgtataagatgcctcagtct

SEQ ID NO: 151954 - DNA, 621 bp, Homo sapiens
atggtgatatttctgttaccattaaaaatggactggccaggcgcagtggctcacgactgtactcccagcagtttgggagtcccaggcagacggatcacctgaggtcaggagttcaaaaacagtctggccaacatggtgaaaccttttctccactaaaaaaaatacaaaattagctgagcgttgtggcaggtgcctgtaatcccagctactcgggaggctgaggcaggagaatcacttgaacgcaggaggtggaggttgcagtgagccgagatckcacccttgcactccagcctgggctacaagagcaaaactctctcaaaaacaaacaaacaaaaaacaacaacaaagaaaaacaagaaaacaaacaaaaccctagtaaatgtgacttgaaataaatgggcttcataaaatgttaatgtcctttggaaaagtaacccacccttgagaatttattctaaaactaatttaaaatacaaaaaaaggtattatctcagaagtgttaacagcatccaatttttttcaatagcaaacaagataaaaataaccaaactgctcaggagaataagaccaagtatttttgatataccaatatggtgaaagatttaatcattaaaaatgaat

SEQ ID NO: 151955 - DNA, 413 bp, Homo sapiens
gttgaatacagaaaagtaagaaatagctatgtatgtacattcctaaactacctgctctcagcagccatttctcatctgagagacaaaccttttcctaaatcatacaaagacccacccatgataaagagaaaagccttgtccatgttacagtaaagtagtacacatctgcaagcctctttcyagaactcttggcaccagttgtttcagaattcatgttttcagattttttaaaagtaatgtagcacatatactgtgtgttttataataccgccaattgagtctgtcacatcacctatagccaaacacattaacctttctgcaaagtctgtaagtagtcatttaggtcaaataaataaaggtcataagtagtctcatattcatttagatcagtttttgaagccaaatgagaaaac

SEQ ID NO: 151956 - DNA, 525 bp, Homo sapiens
cataactaacccagttccttcctataattactctggattacttagctgcaacatgcctgggtggaattgcaaaaggctgtaatatgtctrgttagaatattccagtgaatgttccctcatcatctagcacatgaccataaaactcaaaattacaaatggcttctcattaatatgtgtatgtaatcattgttcaactcagtatctaatatttttgagggaattatatctttgcattggtcacaaaaatatgtttcttgcttatcaaaagcatagaattagcctgggtaacatagtgagaccccatctccacacacacacatacacacactcacaaatacaaaaattaccacacatggtggtgcttgcctgtaatcctagcgactcaggaggctgaggtgggagaatcacttgagtccaggaggttgaggctgcagtgaatcctgatcatgccactgaactccattctgggcaatagagcaagaccctgtttcaagaaaaaacaaaacaaaaaaagaaaataaacaa

SEQ ID NO: 151957 - DNA, 525 bp, Homo sapiens
cataactaacccagttccttcctataattactctggattacttagctgcaacatgcctgggtggaattgcaaaaggctgtaatatgtctagttagaatattccagtgaatgttccctyatcatctagcacatgaccataaaactcaaaattacaaatggcttctcattaatatgtgtatgtaatcattgttcaactcagtatctaatatttttgagggaattatatctttgcattggtcacaaaaatatgtttcttgcttatcaaaagcatagaattagcctgggtaacatagtgagaccccatctccacacacacacatacacacactcacaaatacaaaaattaccacacatggtggtgcttgcctgtaatcctagcgactcaggaggctgaggtgggagaatcacttgagtccaggaggttgaggctgcagtgaatcctgatcatgccactgaactccattctgggcaatagagcaagaccctgtttcaagaaaaaacaaaacaaaaaaagaaaataaacaa

SEQ ID NO: 151958 - DNA, 525 bp, Homo sapiens
cataactaacccagttccttcctataattactctggattacttagctgcaacatgcctgggtggaattgcaaaaggctgtaatatgtctagttagaatattccagtgaatgttccctcatcatctagcacatgaccataaaactcaaaattacaaatggcttctcattaatatgtrtatgtaatcattgttcaactcagtatctaatatttttgagggaattatatctttgcattggtcacaaaaatatgtttcttgcttatcaaaagcatagaattagcctgggtaacatagtgagaccccatctccacacacacacatacacacactcacaaatacaaaaattaccacacatggtggtgcttgcctgtaatcctagcgactcaggaggctgaggtgggagaatcacttgagtccaggaggttgaggctgcagtgaatcctgatcatgccactgaactccattctgggcaatagagcaagaccctgtttcaagaaaaaacaaaacaaaaaaagaaaataaacaa

SEQ ID NO: 151959 - DNA, 569 bp, Homo sapiens
atttttgttactaaaatacaatatttttrctttttatctgttgataatctttaccctgtctggaagtagaatgcaaattccttttttaattcacttttctgaagtctgggcatagttaggatttatgaaagaaaaaagaaatcagatgctcagatgagaacttcttatttgtttttgatgcgaatcagtgaataaactaaaaatctggaaacacagaaaaagagctatgggcattaataccatttagagatatttaaattcaaaagataaatgatttaggacatgtttggaagggacatattattcatagatggtctcaattcattaggaataatattttttataggaattagattcctaaattaatttattgctgctcaagactgtgtagaactccacatccttttatatattttaaacctattaggtttctttataaaaagttcttcagtaatagaagaatggttaacataaacgtgttaagaaacaaaattttttttaaagattcaagataaagtttatattttatagtttccatttaagaagtatatctagtttatgttttcatt

SEQ ID NO: 151960 - DNA, 569 bp, Homo sapiens
atttttgttactaaaatacaatatttttactttttatctgttgataatctttaccctgtctggaagtagaatgcaaattccttttttaattyacttttctgaagtctgggcatagttaggatttatgaaagaaaaaagaaatcagatgctcagatgagaacttcttatttgtttttgatgcgaatcagtgaataaactaaaaatctggaaacacagaaaaagagctatgggcattaataccatttagagatatttaaattcaaaagataaatgatttaggacatgtttggaagggacatattattcatagatggtctcaattcattaggaataatattttttataggaattagattcctaaattaatttattgctgctcaagactgtgtagaactccacatccttttatatattttaaacctattaggtttctttataaaaagttcttcagtaatagaagaatggttaacataaacgtgttaagaaacaaaattttttttaaagattcaagataaagtttatattttatagtttccatttaagaagtatatctagtttatgttttcatt

SEQ ID NO: 151961 - DNA, 569 bp, Homo sapiens
atttttgttactaaaatacaatatttttactttttatctgttgataatctttaccctgtctggaagtagaatgcaaattccttttttaattcacttttctgaagtctgggcatagttaggatttatgaaagaaaaaagaaatcagatgctcagatgaraacttcttatttgtttttgatgcgaatcagtgaataaactaaaaatctggaaacacagaaaaagagctatgggcattaataccatttagagatatttaaattcaaaagataaatgatttaggacatgtttggaagggacatattattcatagatggtctcaattcattaggaataatattttttataggaattagattcctaaattaatttattgctgctcaagactgtgtagaactccacatccttttatatattttaaacctattaggtttctttataaaaagttcttcagtaatagaagaatggttaacataaacgtgttaagaaacaaaattttttttaaagattcaagataaagtttatattttatagtttccatttaagaagtatatctagtttatgttttcatt

SEQ ID NO: 151962 - DNA, 582 bp, Homo sapiens
caataaatggtgctgggataattgtcaagccacatatggaagaatgaaactggatcctcatctctcaccttatacaaaaattaactcaaaatatatcaaagacttacatctaagacctgcaaccataaacattctagaaaataacataggaaaaaaaaacacttttagatattggcttaggcaaagaattcatgacaaagaacccaaaagcaaatgcaacaaaaccaaaaataaatagatgggacctaataaactaaaaagcttctgcacagcaaaagaaataatcagtattttttagacaacacagagtgggaaaaaatattcacaaactatgcttctgacaaaggactaatatccagaatctacaaggaattcaaaccagcaagtacaaaaccaaataatcctrtcaaaaagtgagctaaggacatgaataaacaattctcaaaagaatatatacactctgccaacaaacatgaaaaaatgctcaacatcactaattattaggaaatgcaaatgaaaaccacaaagagataccaccttactcctacaagaatggccacaataaaaacagtcaaaaaacat

SEQ ID NO: 151963 - DNA, 621 bp, Homo sapiens
taagcaatcagatacttttttagaaaatatcattgtagagcaccatgaagtattagatttatgataaagacacatccacatgtgaaaatgaagcaacactgtccatcagcacaaacaattgctagaataccattattcctgggttttcatgagcacaagtacccaggtactgtcatgcttgctgtgctatagcaaaagagcagaagagataactgggctaatgagacagtctctgttctgcctttgagaggtaagttgaagagaagcatgtttgttttctcccagtttaatacatgatttttaccaagaatcctgaaagaaggggagaagacacaaattaagtttgggccaatgatgagtggaaacatgaccctggttgtggaagggatagttaagtgacttcccacaaatgttatcatcgcagacaatgaagcaaacatagtatattttggcagcatcttggggaagttgttacacttgtgtagtgagttaattagacaatattcttcttagtaaaattttcattgcatttrtctattaaagaatattgtgaaattagtaacataaatccaattatgtaatccctgagaaataaattaatttctttaataaaggaatcaa

SEQ ID NO: 151964 - DNA, 566 bp, Homo sapiens
ttttggtaagtaatattttagaaaagtttaaaaactcagttttattcttagattcctaggtctgggaaaaacctcctttcatayaatgtgtcaaaaacaacagaactaaaatatacaaagatggtaagtaaaataagaagttgaccaatcacagaacattgataaactaaaatattacagatttagacagaggttttaaaatttgggggaattaagaaacctgacaagcggtgaaatcccgtctccactaaaaatataaaaaattagccaggcgtggtggtgggcgcctgtagtcccagctcctcgggtggctgaggcaggagaatggcgtgaacctgggaggtggagctttgcagtgagccgagatagggccactgcactccaactccagcctgggcgacagagcaagactccgtctcaaaaaaaaaaaaaaaaaaaaaaaaaagaaacctgacaggaaaaacctttttgcttaatcaaggcactcatattttgttttaaacacgtcctcctgtttttcccttaatagaaaaggcaaacatctagacatcacatctgtctgaaag

SEQ ID NO: 151965 - DNA, 567 bp, Homo sapiens
cagcataattaaagttctgccctatcaaagaacaagtgtttagatacattctcttctgaactagtttaatgcttgttcatacccaggcacaagaacaaaactgttacaaaacaaaatmaccccagaataaaagaaaatgaaaggctcctcttccattctgggatgttggggggcaggtctggaagataagcaggaaggggagtaaagtcactgtttttatgtctggcattggcttgggttgtttgccaaatggaaactgggggagacctcaggaagcttccagtcatggtggaagttgaagcgggagcaggcaatttgcatggtgaaattaggagcaagagaattgagaggtgggtgccacacacttttaaatgacatagtattagtattactatctgaatagacctccttctcttgagcaggatttcttaaatcaatcagctgggaatctgcttaaaatgaagatttttggttcagtagaatcatgtagattcaacagaatttgttgggactccagatttcttatttctagcaaactcccagttgatgcccaggatgactgtatct

SEQ ID NO: 151966 - DNA, 597 bp, Homo sapiens
tggaccattctagagtatcattcattttatttatatatacatggatatctatattaatgttatattttttccacatatatttcataaattttatcttatgaattacagatctttcaaatatgatacctttcyaatattttctaaagcagtaatttgaaagaaaaattctttcaagaactttttagattttttttaaaaaaggaaaggcaactatggcgttataatcttaataggtacctgtgttaaaatgatttgaactgttgcctaaaattaactgtcttcttgcaagactgctttggagggtagcgttgattatatccatgtgatcatgtttacaacatattcctatataggtacttcttgtcatcttccatgaaacatttaaataagaataactgtggaacagttacatgacccctactaagatttgttgttattaataggtgatgaaagacccccatgtttctctaaattgatctatcttagtgtttatatttcaagggtgctttaagatgacaccatattgctttttttcctgatgcattagactagtcacagtagcaaatagatccttctggtgaagtcaagaattaattc

SEQ ID NO: 151967 - DNA, 597 bp, Homo sapiens
tggaccattctagagtatcattcattttatttatatatacatggatatctatattaatgttatattttttccacatatatttcataaattttatcttatgaattacagatctttcaaatatgatacctttctaatattttctaaagcagtaatttgaaagaaaaattctttcaagaactttttagattttttttaaaaaaggaaaggcaactatggcgttataatcttaataggtacctgtgttaaaatgatttgaactgttgcctaaaattaactgtcttcttgcaagactgctttggagggtagcgttgattatatccatgtgatcatgtttacaacatattcctatataggtacttcttgtcatcttccatgaaacatttaaataagaataactgtggaacagttacatgacccctactaagatttgttgttattaataggtgatgaaagacccccatgtttctctaaattgatctatcttagtgtttatatttcaagggtgctttaagatgacaccatattgctttttttcctgatgcattagactagycacagtagcaaatagatccttctggtgaagtcaagaattaattc

SEQ ID NO: 151968 - DNA, 609 bp, Homo sapiens
ctactatcatgagtaaagtggaaatagtggactgccttttctcatttccaaaatcaagtgaaggcttcaacatttatcactaagtataatatttcctataattccatgtagatactcttctcttcctgaagctttttaaaacattacaaatggaaatagattttgtcctatttcaaatttgctgagggctttgaaaaatcacaaattgagatataattttatcaaatactcttsctgcatctattgagataatcacatgatttttctgcttcattttataaatatggtggtttaaatctattgattttttagttgataaaccaatcttatattcctggaataaacccaacttgttcataatgtattatatttgtatgactcattggatttcttttgcttatattttgtttaggattttttaacttatgttcgtgacagagagtttactgatgttttctttttcttgtaatgtctctgacaggtttaaggatcagggttattttagcatcttaaaatatggctctaaaggctaccattatgtctatccatccatccatcgattcactaatcacacaaatattttttgagaggcaatatagcatagtggtt

SEQ ID NO: 151969 - DNA, 619 bp, Homo sapiens
gcagcctcctcagttgttgttccatgtctcctaatcgagtcacccttgatgagagagtggtatttccaacagaaggcaaatgagccaagacagaagctgctttccctctcagggaagttaagcaatcttaaaccaatcaatactacttccttggtcatagacatttataacagatttcctttaatccaaagggtttaggttccttcaacagacctcagaaagagactgctaagcctaaaaatctacttgcctacttgcaatgactgaaagaccttcctctcatttctcacctgctgccatgtatgtctatacccattacacttcttgctaagtgccattctaatagaaagcaggctaattgaagtcagaaaatatttatctagctcctgccatttccagccactgtactacatcctgggccaccacagttattaaaacaatctcttcccttaacaaccacttacggagagtccaccacatgctaggtgctaacagcacaatgggaataaaaataagagctcctacacatttaagggatgtatagcctaatagagaggatagatgtgcctagaaaaattcccaattatraaccaatagttcagcgatagaggtatgtata

SEQ ID NO: 151970 - DNA, 595 bp, Homo sapiens
tgctgcaacaaacatgagagtccagttatctctttgatttactaatttcctttcttttgggtrtacacccagcagtgggattgccagatgatatggtatcactattttcaggtttttgaggtaacttcaaactgttctccatagtggttgcattaatttacattcccaccaacagtgtatgagggttctcttttctccacatcctcgccagcatttgttattgcctgacttttggataaaagccattttaactgaggtgagatgatatctcattgtagcgtttgtatttctctgatgatcagtgatgttgatcactttttcatatgcctgtttgccattttgtatgtcttcttttgacaaatgtctattcagatcttttgcccatttttaaatcacattcttatacttttttcctgtagagttgtttgagctcattctatattctcgttattaatcccttgtcagacggagagtttgaaaatattttctcccattctatgggttgtatcctgactttgttaattgtttcttttgctgtgcagaagctttttaacttgatgtgatcccatttattcattttttgctttggttgcct

SEQ ID NO: 151971 - DNA, 583 bp, Homo sapiens
caatctgggcagtaatatcatgaaccttctcttcaaattcccattttatattacatttataagacagtgaaaaaaaaaggacatcttgtacccacatctctcactagatctctctcttctgagtaagacatcatctctacagtcatcttgtcaaataccatgtacatgcttttgaccctaactgactaagctagaatgattgcttaagcagagaaattgagagttgaggaggtttaccttgtatrtgagtacaatcctaacgtttaagccctgagtgtgtctgatatagtttgactatttgctctactcaaatctcatgttgaaatgtaatcctcagtgttggtggtggggccttgtgggaaatgtttggatcattgaggtggaattctcgtggatagtttagcatgatcctcttgatgctgtccttgtgatagtgagtgagttctcacaagatctggttgtataaaagcatgtggtacccccccagctctctctcctgctcctactcctctagccatgtgacgtgcctgctccccgctttgccttctgtcatgattgtaagtttcctgaggcctccccagaa

SEQ ID NO: 151972 - DNA, 583 bp, Homo sapiens
caatctgggcagtaatatcatgaaccttctcttcaaattcccattttatattacatttataagacagtgaaaaaaaaaggacatcttgtacccacatctctcactagatctctctcttctgagtaagacatcatctctacagtcatcttgtcaaataccatgtacatgcttttgaccctaactgactaagctagaatgattgcttaagcagagaaattgagagttgaggaggtttaccttgtatgtgagtacaatcctaacgtttaagccctgagtgtgtctgatatagtttgactatttgctctactcaaatctcatgttgaaatgtaatcctcagtgttggtggtggggccttgtgggaaatgtttggatcattgaggtggaattctcgtggatagtttagcatgatcctcttgatgctgtccttgtgatagtgagtgagttctcacaagatctggtygtataaaagcatgtggtacccccccagctctctctcctgctcctactcctctagccatgtgacgtgcctgctccccgctttgccttctgtcatgattgtaagtttcctgaggcctccccagaa

SEQ ID NO: 151973 - DNA, 633 bp, Homo sapiens
tttacaatttatttattgagggccaaccttaaactaatgtgctaagtgagagaaacatatattgcctgcatgcttcatagaatttttttagtaattatacgtgaaaattaagtgaaaaataatttataaaattattcattttattaaaacatattattgtcaatatttaaataaacataccagtaatatatctaccaaattatgttattatatattattaaatatgctttttataccaaataattatttaaaataaaaatggtagaaaatcctatcactgtgtttttaaaagatattttgctttggttactgatatcacatatacattgggcagtcaaaactgcagaatgccaactgtgtccagagccccattttaacagaaataaccacattcagttgacatcacaggtgggagagcrgtgaaagataatctgttccaactgtagccaatctgtaagctaactagtggataatagggtaattatctctccccagagcttgaactggagatacagagaattaagtcaggtgatagtggggatggaaggaaaaaaaagatatacaagaaagagtatagacaacatgagttgagttactgatctatgttgttgaaagagattctgaagtccaaca

SEQ ID NO: 151974 - DNA, 517 bp, Homo sapiens
ggtttcaacccccacagctcaagggttccattaaaaaagagaaatgaactgctgctgaaattagaagcaagagaacccactctggtcaaatccactgtcagatggaaaagctttgtgaagtgttagaaacggttgggcatggtggctcacgcctgtaatcctagcactttgagaagccgtggtggatggcttctcggccttttggctaagatcaagtgagaagccgtggtgggcagatcacctgaggacaagagttcaagaccagcctggccaacatggtgaaaccccgtctctactgaaaatacaaaaattagccaggcmcggtggcacctgcctgtaatcccagctacccgggaggctgaggcaggagaatcgctgcaacctgggaggcggaggctacagtgagccgagatcatggccctgcactccagcatgggtagcagagtgagactccgtctcaaaaaaaaaaaaaaaaaaaaaaagaaagaaactgagcgtacccatttccaaggaattc

SEQ ID NO: 151975 - DNA, 610 bp, Homo sapiens
ctcattcttcatgctccaatgctgtcttgcctcatttataatgactttatgttagtcaaaataaatgttttttcacttctgcccttatagcaaaagtaaaagccagatgaacatcgcatctttgctggacaatacttcaatacatttgtagctgcggttggcctcggtggactctattgtagagtgcagcttatgtcactgattttgaaacatctttatggtcagtgaaaagatcaagcattacctccagtgatggtaagaaccaaagagccagttccagtaacatccatgagtatgactcatacgtctgaycagttgatttatagtaaatctcccctgcatgtatcttgataaaagcagaactttcaggtttccttttttaacttaatgttccctaccaaggctttccttttcatacttttcagttgtcaaattattcaaatttatacttttgctcatttactatggatatgattgactacataattcttttaaaaagtcacctgcaaatatagttacctgacccaatttaatatacacatgaaaaaaataggtcatactctaaacattgtctcttcttgtcttttttcattaaattgcaaaagatttc

SEQ ID NO: 151976 - DNA, 610 bp, Homo sapiens
ctcattcttcatgctccaatgctgtcttgcctcatttataatgactttatgttagtcaaaataaatgttttttcacttctgcccttatagcaaaagtaaaagccagatgaacatcgcatctttgctggacaatacttcaatacatttgtagctgcggttggcctcggtggactctattgtagagtgcagcttatgtcactgattttgaaacatctttatggtcagtgaaaagatcaagcattacctccagtgatggtaagaaccaaagagccagttccagtaacatccatgagtatgactcatacgtctgaccagttgatttatagtaaatctcccctgcatgtatcttgataaaagcagamctttcaggtttccttttttaacttaatgttccctaccaaggctttccttttcatacttttcagttgtcaaattattcaaatttatacttttgctcatttactatggatatgattgactacataattcttttaaaaagtcacctgcaaatatagttacctgacccaatttaatatacacatgaaaaaaataggtcatactctaaacattgtctcttcttgtcttttttcattaaattgcaaaagatttc

SEQ ID NO: 151977 - DNA, 610 bp, Homo sapiens
ctcattcttcatgctccaatgctgtcttgcctcatttataatgactttatgttagtcaaaataaatgttttttcacttctgcccttatagcaaaagtaaaagccagatgaacatcgcatctttgctggacaatacttcaatacatttgtagctgcggttggcctcggtggactctattgtagagtgcagcttatgtcactgattttgaaacatctttatggtcagtgaaaagatcaagcattacctccagtgatggtaagaaccaaagagccagttccagtaacatccatgagtatgactcatacgtctgaccagttgatttatagtaaatctcccctgcatgtatcttgataaaagcagaactttcaggtttccttttttaacttaatgttccctaccaaggctttccttttcatacttttcagttgtcaarttattcaaatttatacttttgctcatttactatggatatgattgactacataattcttttaaaaagtcacctgcaaatatagttacctgacccaatttaatatacacatgaaaaaaataggtcatactctaaacattgtctcttcttgtcttttttcattaaattgcaaaagatttc

SEQ ID NO: 151978 - DNA, 553 bp, Homo sapiens
ggaagaagagtatcaaaaacactctttcacaatctaagtttgcagacaacttgaaagcaatgtccctgcactattaatagactgtaacctccccaaagtaagagaccatgtccctggcgtgtctgtactccacagaggakattcacggtgattgtttagttgaactaaggcagcgctggcccatgaactttctatgtaactcttcagagcatcccaggcatttctttgccagtagaggacactcaaagtttctagcaagttgatttccaaagtcataaactttctggacaatgctgtattcattaatcattgaaatgggatccatctttatctaatccctttctcctctcctaccaagtttcttggcagtttaaagcagatctggtaagtactgtacccaccacaaccactggattacatcccccatctggctttttactaagatttgtcatggtcaaatatgtggtattctattgagtgcgttagaaaattaagataaatgacaatagatttactctaacatcttttatactacaaacattatttgtaaaat

SEQ ID NO: 151979 - DNA, 566 bp, Homo sapiens
gaggtacgatctaatggtaataaactggggggaatttagcaaggcctgcttgttcagattttcctctgtgtctttgaggataaggatgttcctttcctctggatatagggagggtccatctaaaatgaggctttatgagctgcttcaagggaaaatgscaaagggaaggtgaggtgcttctgctgatttcttaaacaccaaggtaccatatttggaggtagcaggatctggattccatcaaccagcagaggcttactctgaggagtcaacaagagcatcagtatggaccagcagttccctcaggaagccaggcaatgggccagcctcccttccccaggccaagatgggctgagtccaaagcttacaaactaagtgtccatacaggcagagcaggtgacgtaactgagtgaggtggctgggtgtgaagcaatcaggagagcacgtggaaactgtagtgttcctgccctccaccccctatgccacctctctgcctaagcagattattaccacgtgggatggtggccagtgttgccagctcctctgattttcccacagaactcagaaac

SEQ ID NO: 151980 - DNA, 566 bp, Homo sapiens
gaggtacgatctaatggtaataaactggggggaatttagcaaggcctgcttgttcagattttcctctgtgtctttgaggataaggatgttcctttcctctggatatagggagggtccatctaaaatgaggctttatgagctgcttcaagggaaaatggcaaagsgaaggtgaggtgcttctgctgatttcttaaacaccaaggtaccatatttggaggtagcaggatctggattccatcaaccagcagaggcttactctgaggagtcaacaagagcatcagtatggaccagcagttccctcaggaagccaggcaatgggccagcctcccttccccaggccaagatgggctgagtccaaagcttacaaactaagtgtccatacaggcagagcaggtgacgtaactgagtgaggtggctgggtgtgaagcaatcaggagagcacgtggaaactgtagtgttcctgccctccaccccctatgccacctctctgcctaagcagattattaccacgtgggatggtggccagtgttgccagctcctctgattttcccacagaactcagaaac

SEQ ID NO: 151981 - DNA, 566 bp, Homo sapiens
gaggtacgatctaatggtaataaactggggggaatttagcaaggcctgcttgttcagattttcctctgtgtctttgaggataaggatgttcctttcctctggatatagggagggtccatctaaaatgaggctttatgagctgcttcaagggaaaatggcaaagggaaggtgaggtgcttctgctgatttcttaaacaccaaggtaccwtatttggaggtagcaggatctggattccatcaaccagcagaggcttactctgaggagtcaacaagagcatcagtatggaccagcagttccctcaggaagccaggcaatgggccagcctcccttccccaggccaagatgggctgagtccaaagcttacaaactaagtgtccatacaggcagagcaggtgacgtaactgagtgaggtggctgggtgtgaagcaatcaggagagcacgtggaaactgtagtgttcctgccctccaccccctatgccacctctctgcctaagcagattattaccacgtgggatggtggccagtgttgccagctcctctgattttcccacagaactcagaaac

SEQ ID NO: 151982 - DNA, 553 bp, Homo sapiens
agtttggattaaatcaggtgggaaatgggaacctgtgaaagaaacataaatgcttttataaaraaaagtaagcattttattcacatagctgagagtgactactcaatcattcatagtacactaaatatacaggacacccttaaaccactaaggaaagacagctggaaaataaggaatttcctcactgtcaatattggcgggtaaggcccaggatggtgacttgcacctgtaattccagctactccgaggctgaggcagaaggatagataacttgaggccaggagttcgaggctgccgtgagttatgattgcaccaccgcactccagacctgggggtggagccagctacaaggttgagcctgtgggcggggccaaccactgggggcagctgatgagggaggggccaatctctgggttgggcctctgggatgaagtcagtacctgggcaacagagcaagacccatctctgaaaaacagtaagtaaaaatactggtaggtaagactggagagcagcatatgcaacaggacaaacacggacagctctcttttcttct

SEQ ID NO: 151983 - DNA, 458 bp, Homo sapiens
gcaatatgcagagggtttagctctgaactgggcattgtggtgcttcctcaatgttcattgtgatcatcttccattcaggggtatcctgcatatctggtcactcatccctacctccagcaggaggtcytgaatggtccaagccattagggaaattcaagcatcttgccacagtgattggaccacacaggtgaagcatagccaatcagtacttggctttcccctaggattggttaggaatggaataatccgcaccacatctgggactgttgctgaagaatctagggcataaaagcattctttctccaggaagtgttggattcagacacgcatgctggaaccactgcagtgattttgataccatgggggaagccagcctgaggatggaatcaacacacaaaagaggcaaggcaaagagaattacagagaaatgaatctagagccttaataaaatcatgctt

SEQ ID NO: 151984 - DNA, 476 bp, Homo sapiens
gtctagctcaagctaatgttctaacaatcagatcttgacaagattagactttgcaatatgcagagggtttagctctgaactgggcattgtggtgcttcctcaatgttcattgtgatcatcttccattcaggggtatcctgcatatctggtcactcatccctacctccagcaggaggtcctgaatggtccaagccattagggaaattcaagcatcttgccacagtgattggaccacacaggtgaagcatagccaatcagtacttggctttcccctaggattggttaggaatggaataatccgcaccacatctgggactgttgctgaagaatctagggcataaaagcattctttctccaggaagtgttggattyagacacgcatgctggaaccactgcagtgattttgataccatgggggaagccagcctgaggatggaatcaacacacaaaagaggcaaggcaaagagaattacaga

SEQ ID NO: 151985 - DNA, 698 bp, Homo sapiens
agtctttacacacttgtgaaaaatcatttgtccctttaagtcagaatttatttatgggctattctattctattggtctgtttatccttatgccagtaccatattttgacaagttgtggttctaagaattttctatattctgtaaactgtcaaaattaatgggataatatctgattatttttaaatgtctaatggatctgtgattattccccatttttactttttatgattgataatttgagtttttgctgtttttcagcaatctttttaggaacttatcaattcattaacttttgaaaaatcatcttttggttttattaaagttcacttttgtatgtttgctttctatttctgtgatttatatttttaattgctctcatgtcttctcaattcactgttacaaaatattcttctattttctatggaaagttattttataaggtaactacaattttcaaatttcattacttgtaattttggtccttgaatttctaaaataactatataattcttagagaaacaggtatgttcctgaaaaagaagtgtataataattkacttgagttgtgcaaattataaagcagtaaagtatgtattaatgactaacactaattacaccaggtctattttctacatatttttcatgcttcaaatttcttcgtcagcactcagtgcagaaccatcctttgtttagtgattg

SEQ ID NO: 151986 - DNA, 580 bp, Homo sapiens
cgatgacattctagttgaggcaacagacagcaattgtcctccacatattgaaagtttcagtgatgttgagatgggagaaactatcatgggaaacatggaggttattatactagcctgactccagtgcaaaagcwtgctgttactattagaaaagagaaaagagacttgatggcttgtgcccaaacagggtctggaaaactgcagcatttctcttgcccatgttgagtcagatgtattcagatggtccaaaggaggctttgagggccatgaaggaaaattaaaggtgagggcgcagcaaacagtacccaatcttcttggtattagccccaagaagagaattggcaatacagatcaatgagaaagcaagaaaattttcgtactgatctagagttcctccttgtgtgatttatggtggtgctgttattgttcagcagatttgagtcttagaaggtggatggcacttgctactagccactccaggatatctagtggatatgatggaaagaggaaagattggattaaacttttatgaatacttggtgttagaagaagctgatcagatgttggatatggggtttga

SEQ ID NO: 151987 - DNA, 569 bp, Homo sapiens
tactttctgtgtctctctctctctacatgtatatatcaggaaaaaagaaaacacaaatagacaatatagttttaaaataataccatttgtttccatttcggttacaacagaataagatcatattagatgactgtatcacagaaaataagaattcaaaaagcaactccctgaaagaactagagagtgaacaaaagcaaacagattctggtgacaatttaggcttaaagagaggaggaggagagctgtacaatatactttccccgttttcataacttttatccttttttatttttttaagtgcacactggtgtcaaaagcaatgctagaaaaaaatccagcctctttagatggggaaaccatagtttcagaagagaatggaagaattaagaaaagaaaatttagaatggggtgacacaaattctatcagttacatccttgctgacttctgagccatgggtgtcctgaataaactcaaaacgactaagtcaaagacaaagtgtctaacattagactggagatgccatcccmaaaaaaaagtttgtaatacaacctcagtcaagataattact

SEQ ID NO: 151988 - DNA, 173 bp, Homo sapiens
tgaacatgctgacgcctctttctcaacaattattagaacaactagatatacaaattagcaaatatgtagaaaaattgaacagtrttatcaactgtcctggtgaaaattacaaaaaattatgcctaaaaatagtagagttcacatttctttcaaatgtacatggtacattacta

SEQ ID NO: 151989 - DNA, 540 bp, Homo sapiens
gtattcgcccacagaaaataatcagaagtatttattggagctaagatgaccaactagatgcagccaggaagaacttctcccaccaagaggccagatcatcaagtaggctcggatagtccaaacagatttttgaaaacaaggcactgagagtggacaaagggaggattcaaacctgrcctgaaaaggtagaaagctgggacaccatgcacatggttgcctagcaccaggactcattcctggccccaaggggatcttgggagaggggtgagtgaaataggcatagagtggcccactctcaccacagatccccagaatcctagttgcaggagaccccacgaccataatgaacatttgacatggcagggggaatgtcccagagagttggcaatgacagaatttcagccttcatgaatccaaaagattttggtatgtgaatggctgcagtggggcacagtaaagggtgccgatcccccaaagctctctgtactcatctaggtggctttagcctttgttatctgccagactgggacagaatagggc

SEQ ID NO: 151990 - DNA, 540 bp, Homo sapiens
gtattcgcccacagaaaataatcagaagtatttattggagctaagatgaccaactagatgcagccaggaagaacttctcccaccaagaggccagatcatcaagtaggctcggatagtccaaacagatttttgaaaacaaggcactgagagtggacaaagggaggattcaaacctggcctgaaaaggtagaaagctgggacaccatgcacatggttgcctagcaccaggactcattcctggccccaaggggatcttgggagaggggtgagtgaaataggcatagagtggcccactctcaccacagatccccagaatcctagttgcaggagaccccaygaccataatgaacatttgacatggcagggggaatgtcccagagagttggcaatgacagaatttcagccttcatgaatccaaaagattttggtatgtgaatggctgcagtggggcacagtaaagggtgccgatcccccaaagctctctgtactcatctaggtggctttagcctttgttatctgccagactgggacagaatagggc

SEQ ID NO: 151991 - DNA, 566 bp, Homo sapiens
ttgacatggcagggggaatgtcccagagagttggcaatgacagaatttcagccttcatgaatccaaaagattttggtatgtgaatggctgcagtggggcacagtaaagggtgccgatcccccaaagctctctgtactcatctaggtggctttagcctttgttatctgccagactgggacagaatagggctatcttgcccatgggacasggatagtatgatctgggtgtcccccatgcctgctggcctatcccagggtcccagcctgtctgccacctcttacagtgcagcctcagctgcccatctgcagggcttaccagcagctaatgccacaggccttttgccagcaaaacccacctaacagtcagagagcttctgcacataggtccctttgggcatgcacccatgcacagccttccccttccagtctgcactcacccatagcctccttccactgctttgatggctcatgtgcacatgcaggacccatcactgcccaccaccactggtgcaagcacacatacgggaaccactgcagcccaccacctccctggtgaaacagttttgc

SEQ ID NO: 151992 - DNA, 566 bp, Homo sapiens
ttgacatggcagggggaatgtcccagagagttggcaatgacagaatttcagccttcatgaatccaaaagattttggtatgtgaatggctgcagtggggcacagtaaagggtgccgatcccccaaagctctctgtactcatctaggtggctttagcctttgttatctgccagactgggacagaatagggctatcttgcccatgggacagrgatagtatgatctgggtgtcccccatgcctgctggcctatcccagggtcccagcctgtctgccacctcttacagtgcagcctcagctgcccatctgcagggcttaccagcagctaatgccacaggccttttgccagcaaaacccacctaacagtcagagagcttctgcacataggtccctttgggcatgcacccatgcacagccttccccttccagtctgcactcacccatagcctccttccactgctttgatggctcatgtgcacatgcaggacccatcactgcccaccaccactggtgcaagcacacatacgggaaccactgcagcccaccacctccctggtgaaacagttttgc

SEQ ID NO: 151993 - DNA, 571 bp, Homo sapiens
ctccaataacatccaagctgagagccaaatcaagaatgcaatcccactcacaataactaaaaaggataaaatacctaggaatacagctactcagagaggtgaaagatccctacaataagaataacaaaatacttctgaaagaaattaatggagacacaataaatggcaaaacactccatagtcatggattgaaagaatcaatatggtaaaaatggccatactggccaaagcaatttacagattcaatgctatttctaccaaaataccagtgacattctttacagaactaaaaaagctattctaaaattcatatggaaccaaaaaagaggaagaatagccaaaacaatcstaagcaaaaatagcaaagtcagaggcatcctactacccaactttgaactatactataaggctacagtaaccataacatcatgatactggtacaaaagcagacaacggaacaaaatagaaagcctagaaataatcccgctcacctacaaccatctgatcttcaacgaagtggatgaaaacaagcaataaggaaagaattccctagtcaacaaatggtgctgag

SEQ ID NO: 151994 - DNA, 552 bp, Homo sapiens
ccatgtgggtaagacaggtacaactaagcccaagagtttatgagcagtgggtgaatgctaggtggtctaagtctactgaaaacttaatgrttaacatcagatgggtcaggggagtaaagcaggtaggtaagtacaagaggttaacactgggaggttatggccaggaggttgaggccaggtgaatgaagctaggtgattaacaccagataggtaagagcatggcattaaagccaggtagtaaggtaaagacattaattgtagatagtattaaagctagtttagtaaggtaaagaagttaattgtagatatgtaagaccaggtaagtaaggtcagatgggtgaggtcaagatgttaaagctaggaggtcaaagttagatgaatcaggctaggttgttaacaccagattggtaacagcagaagttaaagccaggcaggtaaggccaattgcctgaggccaggtgggtaagagcaggaagttaagattgggtgtttgaggcctggtggttaataaaaccattaagtaaggcaggaggataggtccagcagttaaat

SEQ ID NO: 151995 - DNA, 559 bp, Homo sapiens
ttgatttcctgaaagtctgctccctttctggaaactgatgctgaagaaaaattgaataacctaataaagaccttgtttgttgacaatggtgaagtacagcaagaaccaactaagcagggaattactttagtcttccctgaaaaagaaaatcacaatgttgctggttcaattctattgtggtcaaygacaacaccacaatgaagttgcaaagtcaaaatgcaggtgatattcaagtgcagaagaaagaaaacatgaagttaaagggccaaataaaaggatgaaagagaagagatttaaaaatgataatgacacataaacttgaaaatgatgccacagaacaagaatgctacacaaatctcacttgtagatgtttaccaggcacactgaaagagtccacaatgaccaaccggagacaaagccacaaatataaatataaggaatctgcatatattattgacctcactgcctgacatggtttggctgtgtcctcattcaaatctcaatttgaattgtatctcccagaatgcccacgtgttgtgggagggacccaggaggaggt

SEQ ID NO: 151996 - DNA, 559 bp, Homo sapiens
ttgatttcctgaaagtctgctccctttctggaaactgatgctgaagaaaaattgaataacctaataaagaccttgtttgttgacaatggtgaagtacagcaagaaccaactaagcagggaattactttagtcttccctgaaaaagaaaatcacaatgttgctggttcaattctattgtggtcaacgacaacaccacaatgaagttgcaaagtcaaaatgcaggtgatattcaagtgcagaagaaagaaaacatgaagttaaagggccaaataaaaggatgaaagagaagagatttaaaaatgataatgacacataaacttgaaaatgatgccacagaacaagaatgctacacaaatctcacttgtagatrtttaccaggcacactgaaagagtccacaatgaccaaccggagacaaagccacaaatataaatataaggaatctgcatatattattgacctcactgcctgacatggtttggctgtgtcctcattcaaatctcaatttgaattgtatctcccagaatgcccacgtgttgtgggagggacccaggaggaggt

SEQ ID NO: 151997 - DNA, 559 bp, Homo sapiens
ttgatttcctgaaagtctgctccctttctggaaactgatgctgaagaaaaattgaataacctaataaagaccttgtttgttgacaatggtgaagtacagcaagaaccaactaagcagggaattactttagtcttccctgaaaaagaaaatcacaatgttgctggttcaattctattgtggtcaacgacaacaccacaatgaagttgcaaagtcaaaatgcaggtgatattcaagtgcagaagaaagaaaacatgaagttaaagggccaaataaaaggatgaaagagaagagatttaaaaatgataatgacacataaacttgaaaatgatgccacagaacaagaatgctacacaaatctcacttgtagatgtttaccaggcacactgaaagagtccacaatgaccaaccggagacaaagccacaaatataaatataaggaatctgcatatattattgacctcactgcctgayatggtttggctgtgtcctcattcaaatctcaatttgaattgtatctcccagaatgcccacgtgttgtgggagggacccaggaggaggt

SEQ ID NO: 151998 - DNA, 593 bp, Homo sapiens
ttgcggcagcaacaaaacaacttgccatcaaagccccagctggaaccctgaggctagttagtttctttcaagtacttcccatcttcctctgtattccttgactttctagtgcccttgatctaaaacccacattgcaaactcttccatctaatttatatcttctccttctcagacttatcattctctatctaattccacttctacctctttactgtaactacatagaaacccatcctatttcaaagaaacttctttgtaatatgcaacatcttgactattcccctttacttcttcaccctaactgtaacctttttctcctctaataataccattttgctcaaaaaagcctcaaaagaagctttaattctctgtatttttaagtgaggaggtacgttcatctttctcttgtttacccactgcagtttcattctcattatacttgatgctcatccaaaaagtcctccatacttgagtccctaaaaattgaactatactctrtgctctttatcttcatcactgtcgtcaactcacctctactcccttatgccacaattagtgagggctttggtatctggattgtaatctttccttcc

SEQ ID NO: 151999 - DNA, 550 bp, Homo sapiens
aaattaggaatgaaaatgcttattgttctcctcaatgggtatgctactgatttttaatcacagattttagaaatagaactgatcagtacctgtttaatgttttcctctgtgttaattcctggtcatctcctgcaagtgcttttggccccccttccctggataaattaagattttaaaactgtgggttttgtccacagtttttagacattgtctaaaaatggaaaagactgaaaattgtaataatattaatacagctgcaaggtgtttgcttaatgaaatatttagggtagaaaggtgacagtaggatttagaactgcacccagagcaaatacttagggtggaaaggtgacaatggtacttacaactgcacccagagcccccttatcagccatgtatataacataaaagcaatcacagtagactccactgccaaggtagaagcaataatatctgaagagttaayggacaaaaggaaccagaattccatctgtgagttaaaacttaatagtgagaaaactcttagtgagaaactggcagatttttttttatt

SEQ ID NO: 152000 - DNA, 573 bp, Homo sapiens
ggacctagccttatagtctgatggagtttaaaagccattattgttgtcattttctgcattatggactccagtgtaaatataaaggcacatatgattaattacacagaaaagcctgttcctacatagggctgtcacctgtatcaaagctttagaacatacttatatgtaaacatttgagaattgttaaaggacatctaatgatatgaaaggaatgtggctttgtgaagaaagtatatcaggcttcaaacataggctctgcaactgactaagctctgtgccttcatgaaatttacttcagctctttggctccaggtacctgaccataaaaaaaggtsgggggagcataagtcatgacatacatttctgagttttatgccttagagccttcatactctctgtttgcaactagagaaatagcatttttatgcgagtccttcatccactgtcataataagtagtccccgctatcacatttatttctttttttttgttctgcccatgaggctttatttttcttgtctctccttctggccactaattcctaatcactgggttttgtgactatatcttcct

SEQ ID NO: 152001 - DNA, 648 bp, Homo sapiens
gagataaaaggttattaaattaataagcataaggctttttgcaatttgacatagggcctgacacagacaggtgatacaacttcgaatacaaaaaattaaaggacattattctattttcttatgaaatttagaaaattgagggtgcaaatctttgattaaaaatttwaaaaatttacatatgctcttagatagctaaggcttgtgaaaatgctattttgtgtaaaagtccagtataaggagcacagcccaatagaatattaaatgtgaaattgtagttagataactttttcttgtgttccagttgaagtataatataaaacaaaaattggactttttttttttttttttttttttgagacagagtctcacactgttgccagggctggagtgcaatggcctgatctcggctcaaggcaacctccacctcctgggttcaagcgattctcttgcctcagcctcccaagtagctgtgattacaggtgcccaccaccacgcctggctaattttttgtatttttagtagagaccaggtttcactatgttggcgaggctggtcttgaactcctgacctcatgatcggcccgccttggcctcccaaagggctggaattacaggtgtgagccactgcgcctggccaaaaattggagtt

SEQ ID NO: 152002 - DNA, 452 bp, Homo sapiens
caattgtattgatcatattatttttgtccttcattctgtagatacgacatattgcattgatttacatgcactgagctatccttgcatccctaggataaatcgcactttgtcatgatgaatgatcttttcaatatgttgttgaatttgatctactagtatgtcattgaggaattatrcaataatgttaatctgaggtatgtagttttatttatttattttttgatatgccttttcctggttttgatatcagggcaatactggccttgtgagtgagtttggaagtattttctcctcttttatgttttgaaatagtttgagtagtattggtattagttcttctttaaatgtttgctaaaattcaacagtgaaactcttgggttttacacttttctttgccaggagattttattatggctttgatctcataatttgttacaggtctgtttggattt

SEQ ID NO: 152003 - DNA, 566 bp, Homo sapiens
ggccattaatttcagtaataagtcagttattttttaagattttaaggttctggttcccacagaaggatgccatctcaaccctatctttcaatatccaggagactttaaaaaattaagatacaatttacatgtagtaaaatttgctctttcagcataaagttcggtgaggagtgataaatgcatagtcatataatgactaacataaccaagatagaattacatcactccaaaaaaattttcttgtgcccctttgtagtcaaagaaataatagataattcacaacagcctggaaaaattaccacaagcattgcactctwatttgcctcagtttcaaatttgctgttttgaaactaatgaataaataattagtctccaacctattgctcctgacttctgttgtttcctcatactatttatgctaatttctaattttctttatatatttataagtttgaaagagtaaaatgcccattgcataatttattttatattaatatttaattatttgtttaaatattaatgagagaaataactttaaacatttcaaagaagttatattgatataa

SEQ ID NO: 152004 - DNA, 593 bp, Homo sapiens
gagaagtggcactctggccttttggattttcagcattttttcatggattctttcttatcttcatgagtttgtctagttttggtctttgaggctgctgtcccttggatagggttatagtgagggcttttttattgttgttgttgatgctgttgttgttgttgatgctcttctgcagggctgctgcagtttgctgggggttcacttcagtccctatccatctggttcattcccgcacctggacagcaaagatgggtgccttctccttctgagatctctgacctcaaggggcaacaacctgatgccagtaggatttcttctgtatagagtgtctggcaacacctgttggaaggtctcaccctattgggtggcatgggagayaggacctgtttaatgaagcactttgtcccttggtggagggtgtgtgctttgctggggggaaacccacttatctgggctgcctggattcctcagaactaccaggaggaaaggctaagcctcctggtttgcagagactgtggccacccctccccctaggggctcaggcccagggagatccaggttctgtcactgagcctctggctggggttactgga

SEQ ID NO: 152005 - DNA, 381 bp, Homo sapiens
aagtctatgattatggtttggtgagtcaattaaaatctatttgctgctgaaaagttcaccaaaatttcaaataaccatttataaagtgcttcacttttttttcagtcattaatatacaaatgagtgaataagttggatccaaaagttgtatgaattgtacatatttcattaaaaaactgcagggacaatttgaaagtgcyatccattagccaaagcaaacatgcactagtttttctgttagatttagtggtaaataaaataagtctattttctttgacagtcaaatctctaattaagaatagttcaccatttaatgtgttttgtactactgaagaaacgtcagtatcagcaaatgtctttggttccgaaagtcattgaatt

SEQ ID NO: 152006 - DNA, 286 bp, Homo sapiens
tctaatcagatgcccctcgagtgccccacatcacaggaggcaaccttcatcttgtaagctgaaaaatcacctttttacagttattttatgattattattactaattattttcactcgcacacaaatctgactgtgagaggaggcatgattaaggagaaaatgcttttcagccttcttgctaaaattagaaatctttgttgttgctcataaatgatgagtccagggatggtaaaatgtgctaaactgagagcccaggagtcagaayacacttcccataggacatgta

SEQ ID NO: 152007 - DNA, 377 bp, Homo sapiens
gaaatattttatgctcattaatgggaagaattaatattgttaaaatggccacactacccaaagcaatttacagattcaatgctattcttatcaaactatcaacatcatttttcacagaattagaaaatactattctaaagttcatatggaataaataacctgaattgccagaaaaaaaaatctactcaaaaagaatcaagccagaggtatcacactacctaacttcaaactatacwacaaggctatagtaaccaaaacagcatggtactggcacaaaaacagacacatagaccaatggaacggatagaggacccagaaataaagtcacacacttacaaccaccttatctttgacaaagttgacaataaaaaataatg

SEQ ID NO: 152008 - DNA, 591 bp, Homo sapiens
tcactcatgccccagcttactcatagggtacagmttccatgtcaggaacacaagaacacaagtgccaccacacccccagtacctgcttatagaacaggggtgccaatccagaaaaagtgggatattgtccctgcccctagctcttgtgcggtggcacagagattctgcccaggctgagaggcaggctgcaaagaaggccttaatgatgaagagctccacagctctgcctgagggaacagattttatctggagcaaatcctagagaattccatgtcaaaggtattactgaaaacaatggaggggcttatagctctataataaaggtagcaacaataaaaacatcagagcaatcaaaagttaactagcgactacctgaaaaagagacagccacaaagtggcctcctgggatcacagtaaaccctgggggtcaggaaggatgtgcacaaatactagaaacaattagagcatggtgtgcacccattaaggaacagtcagagaagggcaaggaaaggacttaaacacattctcaagatgcacattgaacaatcacaagcaggcagaaacctcactgccctaggtgattaagtgcgt

SEQ ID NO: 152009 - DNA, 591 bp, Homo sapiens
tcactcatgccccagcttactcatagggtacagcttccatgtcaggaacacaagaacacaagtgccaccacacccccagtacctgcttatagaacaggggtgccaatccagraaaagtgggatattgtccctgcccctagctcttgtgcggtggcacagagattctgcccaggctgagaggcaggctgcaaagaaggccttaatgatgaagagctccacagctctgcctgagggaacagattttatctggagcaaatcctagagaattccatgtcaaaggtattactgaaaacaatggaggggcttatagctctataataaaggtagcaacaataaaaacatcagagcaatcaaaagttaactagcgactacctgaaaaagagacagccacaaagtggcctcctgggatcacagtaaaccctgggggtcaggaaggatgtgcacaaatactagaaacaattagagcatggtgtgcacccattaaggaacagtcagagaagggcaaggaaaggacttaaacacattctcaagatgcacattgaacaatcacaagcaggcagaaacctcactgccctaggtgattaagtgcgt

SEQ ID NO: 152010 - DNA, 591 bp, Homo sapiens
tcactcatgccccagcttactcatagggtacagcttccatgtcaggaacacaagaacacaagtgccaccacacccccagtacctgcttatagaacaggggtgccaatccagaaaaagtgggatattgtccctgcycctagctcttgtgcggtggcacagagattctgcccaggctgagaggcaggctgcaaagaaggccttaatgatgaagagctccacagctctgcctgagggaacagattttatctggagcaaatcctagagaattccatgtcaaaggtattactgaaaacaatggaggggcttatagctctataataaaggtagcaacaataaaaacatcagagcaatcaaaagttaactagcgactacctgaaaaagagacagccacaaagtggcctcctgggatcacagtaaaccctgggggtcaggaaggatgtgcacaaatactagaaacaattagagcatggtgtgcacccattaaggaacagtcagagaagggcaaggaaaggacttaaacacattctcaagatgcacattgaacaatcacaagcaggcagaaacctcactgccctaggtgattaagtgcgt

SEQ ID NO: 152011 - DNA, 591 bp, Homo sapiens
tcactcatgccccagcttactcatagggtacagcttccatgtcaggaacacaagaacacaagtgccaccacacccccagtacctgcttatagaacaggggtgccaatccagaaaaagtgggatattgtccctgcccctagctcttgtgcggtggcacagagattctgcccaggctgagaggcaggctgcaaagaagsccttaatgatgaagagctccacagctctgcctgagggaacagattttatctggagcaaatcctagagaattccatgtcaaaggtattactgaaaacaatggaggggcttatagctctataataaaggtagcaacaataaaaacatcagagcaatcaaaagttaactagcgactacctgaaaaagagacagccacaaagtggcctcctgggatcacagtaaaccctgggggtcaggaaggatgtgcacaaatactagaaacaattagagcatggtgtgcacccattaaggaacagtcagagaagggcaaggaaaggacttaaacacattctcaagatgcacattgaacaatcacaagcaggcagaaacctcactgccctaggtgattaagtgcgt

SEQ ID NO: 152012 - DNA, 566 bp, Homo sapiens
gaatcagagctgagtagaggcaaactggtgcagaagcatttcctgtgtctctatttatgtgttcagggattccagtacgttcttaggatgaagcacttagaactggaagaaaagcaaagaaggtagcatttctgaggcatgataaacaaggctggtacctaaagtattatggttgtggctgagaactatcatgtagagtggtggggtgttgaaaagtaaactatttagatgtcacacttagtaatttatttaaatgttattgctgttctgcaactcccagtggagtttccctcttttcctctcacatttttaatatcaaataactttgaacagcccatatacaaattttataaaatgaaaattttgcaaagaaaccttaggatttttcatgtgctaactggtagcagtagctccagggtactgaaacattggtgagagcttctgtccttgcytagcatattggtcactagatgctggtggatggaaggagatcttgccccatgcctgagtgtaaggatattcaaggacttgtacttacctatattgggataaaggaggaaagacaa

SEQ ID NO: 152013 - DNA, 621 bp, Homo sapiens
ttttttacttatttaatacaatgttagctgtgggtttgtcacatatggtctttattattttgaggcatgttccttctatacccaatttgttaatggtttttattataaagggatattgagttttattgaatgttttttcagcatctattgaaaagatcatgtggtttttgttcttggttcagttaatgtgatttatcacatttattgatttgtgaatgttgaacgacccttacatccctgggataaattccacttgatcatggcgaatgatctttttaatgcattgttggattcagtttgctagtattttgttaaggatttttgcatctgtgtttattggcctgtagttttatttttgttgttgtgtccttgtttggttttgttatcaaggtaatgctgacctcatagatttattttgaaagtattatctcctctgcagtttttttgaagcgttttagtagagttggtattagttcttcttcaaatgtttggtagaattttgtagtgaagccatcaggtcctaggmttttctttgatgggagacttcttattaccgattagatctcactgctcattattggtctgttcagattttttatttgtttatggttcaattttgat

SEQ ID NO: 152014 - DNA, 505 bp, Homo sapiens
cagcatgcaacaagagagatgcaagtttaacataaatggaaataacatgaaaatacattggctgaaatgaactgtaccctgttaagtgaatgtcattgaaggtgaacttaccaatgcaattcctggatgcatgttcagactttttaaaaatgtgtgtcttttaggactcctaccaaatgtctttaaaaattataattttacatttcaagtttgtgaaatgtaattaaaggatatcgtttatattttttctgcatctgtcaaattgcaggctactttctggaggccatcattgatcagtggacacacttggtgacgcagtagtttacattaaatatctttaagcattattgtttgtcctggtgagttgtgtgtgcatatgtgtttatctatgtwtatctgtgtgcaagcatgtatgcatggtatatggtggtggtgggttggtgtgtgtatgagagagagagagagacctaacatatatctgttggatcataaaaagaataaaaag

SEQ ID NO: 152015 - DNA, 584 bp, Homo sapiens
tacatcaactggtaaatgaataaaaacatgtagtacatctatacaatggaatattattcagcaataataaggaatgaaacacagatacaagcttgcacttttataaacctcgaacattatgttgcatgaagaaagccagtcacaaaackccatatttcgttattttatttatatgaaaagttcagagtaggcaaatctataggaattgaaagtacattagtggttttctaaggaagaaatagagaggggtagaatggggagtaactgctattgcataggagtttatttttggggtgataaaaatattctaaacagattatggtgatggtttcacaactgtcttaatatgctaatattatttattattgcattgtatattttggatgaataaattttgtgcagtgtgaattatttctaaatggtgctttaaaaagaaaataggttgatgcatgtataagacaattttaaagaacgacaagctgttgatttggctggagcaaatgataagaaagagcatgtgtgggaggaggtgcaggggcctagtagtgaggaagtaaactggaaatacaggatgcagccagatg

SEQ ID NO: 152016 - DNA, 584 bp, Homo sapiens
ttaatattattttataagatgaaaaatgtcaaatatatatttcagatgaatagaaagtctaaaactaagtaatgaaatattttttaagaaagatcttgagaaatttaatctttatccatgagctaaattaatatgtaagcatccaaacttaaatatcaaattctattttgtatgccatctattttaaaaatggaaaagcaggttctttttaagtgcaatgaaatcatttcaaatgggtcagattttgtaatcggaagtaaagtgcagcagacgcttgggggaacagatccagctrtaggagctagaaggaagtcttgtcaaagacaatggcaataagtaacaggtggcactcctatggaattattggcatgagaaagattcagttggcttaacagggtgtatctatgggatccagttcgaagaaatgggggggacccaggggaagagagaatttgtgaagtcaaaccagtcatgtctatggcagttggcaggacattggatacttgactggagatccagcatataacaacaaatggtatcagagagagaaaaagtaaaaacaaggtaaagacctgaacttatct

SEQ ID NO: 152017 - DNA, 584 bp, Homo sapiens
ttaatattattttataagatgaaaaatgtcaaatatatatttcagatgaatagaaagtctaaaactaagtaatgaaatattttttaagaaagatcttgagaaatttaatctttatccatgagctaaattaatatgtaagcatccaaacttaaatatcaaattctattttgtatgccatctattttaaaaatggaaaagcaggttctttttaagtgcaatgaaatcatttcaaatgggtcagattttgtaatcggaagtaaagtgcagcagacgcttgggggaacagatccagctgtaggagctagaaggaagtcttgtcaaagacaatggcartaagtaacaggtggcactcctatggaattattggcatgagaaagattcagttggcttaacagggtgtatctatgggatccagttcgaagaaatgggggggacccaggggaagagagaatttgtgaagtcaaaccagtcatgtctatggcagttggcaggacattggatacttgactggagatccagcatataacaacaaatggtatcagagagagaaaaagtaaaaacaaggtaaagacctgaacttatct

SEQ ID NO: 152018 - DNA, 584 bp, Homo sapiens
ttaatattattttataagatgaaaaatgtcaaatatatatttcagatgaatagaaagtctaaaactaagtaatgaaatattttttaagaaagatcttgagaaatttaatctttatccatgagctaaattaatatgtaagcatccaaacttaaatatcaaattctattttgtatgccatctattttaaaaatggaaaagcaggttctttttaagtgcaatgaaatcatttcaaatgggtcagattttgtaatcggaagtaaagtgcagcagacgcttgggggaacagatccagctgtaggagctagaaggaagtcttgtcaaagacaatggcaataagtaacaggtggcactcctatggaattattggcatgagaaagattcagttggcttaacagggtgtayctatgggatccagttcgaagaaatgggggggacccaggggaagagagaatttgtgaagtcaaaccagtcatgtctatggcagttggcaggacattggatacttgactggagatccagcatataacaacaaatggtatcagagagagaaaaagtaaaaacaaggtaaagacctgaacttatct

SEQ ID NO: 152019 - DNA, 427 bp, Homo sapiens
gcatgtcattcattcaaagccttggggaaaataaccagtgtctccaattttgtcctgttacaaaagaaaacagcatgttaaagctatgtgtatcagtttatatgtttagttgtgagaaggccaatattcatatcacctagctttacaagaaatgcaggcctgaagatgaaaagcaacacaattgcttacagtttctcagatcacaragccttttaatcttacaaaatataaatcaatagatgagaaagaaaaaaacagattattgcacttattcaaataactatactgatgtaagttatgagcactcacaaataagttccaaatattggagaaatccaggagagataaatgtgctcctaattttgtttatagtacactttattcaattgttaaaagctgaaaagttttcttggcttggaaaaacaaa

SEQ ID NO: 152020 - DNA, 569 bp, Homo sapiens
tcaacttttctagaataatttctggaacaaagcctatgttcaccaatttcctaccatcctctgttgtctagggactaaaactttaatgtcatcagcacccccactgggcttccccacaggtcccaggaatcaagcctggatggctccctttttctgctgcccccttcattcycacaagacatgcaggtgactcaagctaataggacaaccgtcatgccattctccatgagcatatgcattttatcacaatgtttttccaaacatcctcccatcctcttgcattctctcctcatccttctcatctctccttctctcaaatgatcctccatgctcccatttctcaggcttacaaactcagagtcaactgtaaatctctcccatctcttcactcagtgctcaggccctgtcaccaatagcatcttcccttatgtcacccatttttctatttccagtgccaccataatcccaggaaaatccctggccaagggcccacttagggaaggctggtgaagccaagtgggggcactgggctcaagtctttccattcctgggggccccataggacaggt

SEQ ID NO: 152021 - DNA, 564 bp, Homo sapiens
tagggactaaaactttaatgtcatcagcacccccactgggcttccccacaggtcccaggaatcaagcctggatggctccctttttctgctgcccccttcattcccacaagacatgcaggtgactcaagctaataggacaaccrtcatgccattctccatgagcatatgcattttatcacaatgtttttccaaacatcctcccatcctcttgcattctctcctcatccttctcatctctccttctctcaaatgatcctccatgctcccatttctcaggcttacaaactcagagtcaactgtaaatctctcccatctcttcactcagtgctcaggccctgtcaccaatagcatcttcccttatgtcacccatttttctatttccagtgccaccataatcccaggaaaatccctggccaagggcccacttagggaaggctggtgaagccaagtgggggcactgggctcaagtctttccattcctgggggccccataggacaggtgccccacttgggggtgaaagtgtgtggaagggtgaggatttgtagaagagaagcaataaagga

SEQ ID NO: 152022 - DNA, 535 bp, Homo sapiens
cccataggacaggtgccccacttgggggtgaaagtgtgtggaagggtgaggatttgtagaagagaagcaataaaggaacctgaaaacaagcaaggaagggaagggagaaatgagataaacagaggaggccagaagacaaagagattgcaatgwaatcatttttgagccttcaaatgttcttcctaaaatctattccaaccctcaagcaaatagatgcatgagaatttaatgttgaaactcaagcaggagcatgtgctgaaaggcagaatgggtctaacttagtggaatcatcatttacatttttaggagtaatccaaactctacaatttaaaagacaaagaattaaaataaggtcaaaatttatcttttctaaattgtagattttgtatggtaaatacctaaattgtaccttgatgcttttgcttccacataaaaggtgaaaatcgtttccttcagatcatttttttcttaatagcagctttcacactgacagaaagaggacatttcttaccccattcagtaagaaaggaagagt

SEQ ID NO: 152023 - DNA, 535 bp, Homo sapiens
cccataggacaggtgccccacttgggggtgaaagtgtgtggaagggtgaggatttgtagaagagaagcaataaaggaacctgaaaacaagcaaggaagggaagggagaaatgagataaacagaggaggccagaagacaaagagattgcaatgaaatcatttttgagccttcaaatgttcttcctaaaatctattccaaccctcaagcaaatagatgcatgagaatttaatgttgaaactcaagcaggagcatgtgctgaaaggcagaatgggtctaacttagtggaatcatcatttacatttttaggagtaatccaaactctacaatttaaaagacaaagaattaaaataaggtcaaaatttatcttttctaaattgtagattttgtatggtaaatacctaaattgtaccttgatgcttttgcttccacataaaaggtgaaaatcrtttccttcagatcatttttttcttaatagcagctttcacactgacagaaagaggacatttcttaccccattcagtaagaaaggaagagt

SEQ ID NO: 152024 - DNA, 310 bp, Homo sapiens
gaggctgaggtgggaggatcacctgggcgcaggaggttaaggctgcagtgagctgtgattgtgccactgcactctagcctgggccacagagaccccgcctcaaagaaaaagaaaaagaaagaaaatgctctagctgtgcctctgatcctggcaaggggactgtggacacccaagtctcgggacctgatctcccaaggtgaggctctcgggctgcctcaagccctgtttcacsaccgactgttcttatccacattggttaggtttctgtccgtttctttttctgcaccagtagctagcacagagcccagca

SEQ ID NO: 152025 - DNA, 577 bp, Homo sapiens
tggcatgcacctgtagtctcagctactccagaggctgaggtgggaggatcacctgggcgcaggaggttaaggctgcagtgagctgtgattgtgccactgcactctagcctgggccacagagaccccgcctcaaagaaaaagaaaaagaaagaaaatgctctagctgtgcctctgatcctggcaaggggactgtggacacccaagtctcgggacctgatctcccaaggtgaggctctcgggctgcctcaagccctgtttcacgaccgactgttcttatccacattggttaggtttctgtccgtttctttttctgcaccagtagctagcacagagcccagcatagtaggattttgataaatatttgcttaaaaggttaaaaaaaagkaagacagatgtgtcatatatattaatgtttggctggatatttgataccaagggtaggtgaagaaataaagttatggccaaggctgggttgtttaagttgcagcccagaaatgtcaccttctgcccttctggacttcctgtttctccagctctgagcctgtccagatgcatttagaggggaagactgaaactc

SEQ ID NO: 152026 - DNA, 571 bp, Homo sapiens
aattaattcatcttaatttatataaaagataatagtttgtccaaagcatgagtaataatgatgtattgagtgattaagcacatggattaataaaatgaataagagcaatctctcaaggaataagaaattggaaatactctcttgtaaggcacctgcactacgtgaggaatagtataatgttattggaaggaggtggaagaaggataaatattagttaaaaattatattacaacctctagggcaaccacaaaaatttgtaaaaagacatataattgatatgctaagaaaggaagtaaaatggacttatatgaaatatttaattaaaaatcagaaggcagataaatgaggaaataaaacacaaaacaaaggcatcaaatataaagtttaaaaartggcacatattaatccaagtatgtcaataattaatttaacataaatagtttaaatataccaatcaacagattttcagccacttaaaaaacaaacagaacaaactaaatgttatctataagaaacccatttcaaatatggcaactcaggttaaaaacaaaagaatagaataatctttgcc

SEQ ID NO: 152027 - DNA, 619 bp, Homo sapiens
accctggcttcaattcaaggagcaaagaagttgtcacttctttttgtttcaatctcagtcccaagctttgttctccacactactttgccatcaaaacagctgttatcctatttccaatttgactccgttgtttgtatttatacttcagcagtcagagatctaaaggggagaagagaatgaggtaggtaaatggtaggatgtgggatccaaagatagcctatcttcaacatcctgcaatattaaaactggaagaagtgaagcctccttatgtgatgagaaaaatgcagatcagctgggcgcagcaaagcacrctcggtcacacagcatgccagggccagagacacaagtagacgtccgcacgacagcacaggtgaatgatcttttcccaaggccatcctactgtgactttgcaccatctgccattgctctgctcttttctctaggttaaaattttccagaatttctaagccctctttgtgttgttttcccatgtttagcatcgtggttactgtcctttgtttgtgctctcatttgctaacgctcattaattttgtgccctcacagagagggcattgccacagacacacttcagcctaatgagaggagtccaggatgatga

SEQ ID NO: 152028 - DNA, 619 bp, Homo sapiens
accctggcttcaattcaaggagcaaagaagttgtcacttctttttgtttcaatctcagtcccaagctttgttctccacactactttgccatcaaaacagctgttatcctatttccaatttgactccgttgtttgtatttatacttcagcagtcagagatctaaaggggagaagagaatgaggtaggtaaatggtaggatgtgggatccaaagatagcctatcttcaacatcctgcaatattaaaactggaagaagtgaagcctccttatgtgatgagaaaaatgcagatcagctgggcgcagcaaagcacgctcggtcacacagcatgccagggccagagacacaagtagacgtccgcacgacagcacaggtgaatgatcttttcccaaggccatcctactgtgactttgcaccatctgccattgctctgctcttttctctaggttaaaattttccagaatttctaagccctctttgtgttgttttcccatgtttagcatcgtggttactgtcctttgtttgtgctctcatttgctaacgctcattaattttgtgccctcamagagagggcattgccacagacacacttcagcctaatgagaggagtccaggatgatga

SEQ ID NO: 152029 - DNA, 600 bp, Homo sapiens
ggataaaatacatctttcagaattattatgtttctgggcatcactttttatatcaaaggggaaaaaagaactaacctagctgagatttgcaagggaaaacagcctagttctctttccataatgctttgaataattaagacacataagataaatacattaacatttcttcaagcctccaggcagcaatgagtatggagaaawgattactttttgagatcctcaaagaattttaaaatttgaaaatttttcctaagaagtaactttagaacagattcatagttaaacctggatttgttattgatcattgactaagatctgtctttccagatggagataccgtatctcatacagaatctgtgatcagggcataccatcaaggggcggtggtgctatgggaaggtaggggggacgtggactctggagtcagatctgcttgtgttctcatcaggcacaaccactcacatactctgtgacctcgagcaagttagaacctctttcagtttccccctctgtgaagtgggcataacagtatcactgacttcatagtgctaataattgctgtcatggtgcctggcacaaattttagtgctgcatgtctct

SEQ ID NO: 152030 - DNA, 442 bp, Homo sapiens
tggatacatacaggtccaggcatacagtgcaagctgttgggtctggaggacaatggtccttttcccacagctctactaggtactacccccagtggggactctgtgtgggagctccaaccccacatttcccttctgcactgccctagcagaggttctccatgagggccccacccctgcagcaaacttctgcctggacatccaggcacttcgatacattctctgaaaactaggcagaggttcccaaacttcaactattgacttctatgcacccgcaggctcaacagctgttggaagytgccaagacttgaggcttgtaccctctgaagccacagcctgagctgcaccttggcccctgttagccatggtgggagcagttgagacacagggcaccaagtctctaggttgcacacagcaggtgggccttgggcccagcccacaaaac

SEQ ID NO: 152031 - DNA, 635 bp, Homo sapiens
tcagtaatggctaagcagtttacaccaataattacatgaacatggtgatggcagcagccgtatgaatagcagctgccaatgatttattaactggcttaggtttatgcttaattctttctcatctcattctgttcaaaaaacaaacagccatttctacctcaactcaaagacttacaggaattcacataatttttcaggccaaatgattaaataagtaaaatgtatattktgagtacatttgcaatttatttagaaatggctataaatcaggagggcaacctagtgcatatttaaaatattaatgcatctcaggagaagatttagttgtcatctgaacatgagaccatatattaaaagcccactgtattaacaactaatttaaaaagagcaaaagattagcttggcataagcataccttgttacttgtttaatcatcaaatgttattgcactatttacacgaacatttaatgatttggtgccaacagactcagccaaagtcctcagcttaataaggggtgtttagtgtttaccagaaatagtggaagaacacgttttacacaaagctttattgttaacaactccatgaatgtaataactggttattgtgtagaagggcagagagcagttgaattaa

SEQ ID NO: 152032 - DNA, 453 bp, Homo sapiens
gaaaaacttcctaaagcctgccaagataattttctgtgtccctttggccagaattgtgtcgcatggtgaaccctaaaccagatattgataagtgaagtagaattgtcatgatagatttaggtgagttaagatttactaaccaaggctagaggatggccctgaaaaacacagtcagccaatacttgaacaaaattgggattctgttagagagaaaaaaaagaacagctattgggcaggtaattgccatttctactccacaaagcgatctttcctctgtaatattttatatcttggaatgacctaacattcacttcattcttcatttccaratttagatatagataatagataggtagatagacagacaaatagatagaaattttcttctttttcaaagattatgctactggtgctaattattatctctatgtgtgggtgtggtttaaaaataat

SEQ ID NO: 152033 - DNA, 437 bp, Homo sapiens
acctttttctcaacttgcctccagcccttgtggaagaggtgatgaagccattcccttgaatggttggagcacctgctatagacagttccaggtgctgtctctgtccaagctcctaacttttcatctcatagaacattggggcattttggatctagaaggaaactgtagattacaagctggttcagcctcttattaaacacctgaagaagtaattaggtgtccatgacttgcaaaatatcataytgtagcgagggttattaacccactaaaatgtggttttctagatgtggtctaagcacgtatttcactccaccatgtaaattcaactccatctctagtctttccttttgtttaaacgtttttagatttctttcacccatttggttcattttcagttcttttgaccctcagtacacctccacattgtctcttacaac

SEQ ID NO: 152034 - DNA, 328 bp, Homo sapiens
gtacctaattttatgtactgatttagcttcaggcttcacaaaatcttctctggctgctgtttgtacatggttcttaccaaatgtggggaagcagggagaccaggtagaaggtaatggctgtggtctgagtcacatggaacaggatagtggcgtggaaggtagagagaagtcgatttcagttttayttcagaatatatatgacaggacttgctgaaaaattgggtgcaaagagtgagcgaaagggaggaattaagaatgccttccaggattcagtttgagtagctgcaagactcggggggagacagggctgagtgaagaaaaaaagctt

SEQ ID NO: 152035 - DNA, 565 bp, Homo sapiens
ttacattttagcatatttttcttgagccacacatttgcttttttctaatttatttctttctatttctgtcagatccttttatcttttttgcatctgaattaagcctaattctcaattcaaagtcagactgttattgtctgaatatttgtgttcacaccgaaatgtacgttttgaaatcccaaccctcaaggtcggagttacagttggccctctgtgttcacaggttttcatccttggatgcaacctaacgtggataaaaacctgcmaatacaggagagctaactctactacaaccactttatataaaagatttgtgcatctgcagatttgttatgtatggtgggtggggaggggcctcaaaccaacgccacccaatgttgacacaaagaagtaactgtatattagacggtaagacgtttgggacatgattagatcatgagggtggagtcctcatatatgagattagtgcccttataaaagagacacagagacctagctagccccatgggaagaacagctagaaggcaccatctattatctagaaagcaggccctaaacagacaca

SEQ ID NO: 152036 - DNA, 556 bp, Homo sapiens
ggagtggttaagagagagattaagggagcatgaaactaacttttacagggtttacaatttatttaaggagattataagtatgatagctagatttattgagcacttattacattccrgtttctcttgataagtgtttgcatgcaataatttttaaaaatctcattattaattttcatattgattataagttgaaataggaatattttgcatatattgggttaaacaaagtatactatcaaaattagtttctctgctttaaaattttttaatgtggctactatatttttaaaattatggatatgacacacatttgtggctttcatttttttttcttttgaacagcactgatgtagaatgcatagttcagtcctattttttctttggttcattcccttaactacaagaaagctttttaatctttggaaaacaaaatataaaaatcttgtcctcttttcaaaagacgtttatgcagccaacagacacatgaaaaaatgctcatcatcactgctcatcagagaaatgcaaatcaaaaccacaatgagataccatctcatac

SEQ ID NO: 152037 - DNA, 556 bp, Homo sapiens
ggagtggttaagagagagattaagggagcatgaaactaacttttacagggtttacaatttatttaaggagattataagtatgatagctagatttattgagcacttattacattccggtttctcttgataagtgtttgcatgcaataatttttaaaaatctcattattaattttcatattgattataagttgaaataggaatattttgcatatattgggttaaacaaagtatactatcaaaattagtttctctgctttaaaattttttaatgtggctactatatttttaaaattatggatatgacacacatttgtggctttcatttttttttcttttgaacagcactgatgtagaatgcatagttcagtcctattttttctttggttcattcccttaactacaagaaagctttttaatctttggaaaacaaaatataaaaatcttgtcctcttttcaaaagacgtttatgcagccaacagacacatgaaaaaatgctcatcatcactgctcatcagagaaatgcaartcaaaaccacaatgagataccatctcatac

SEQ ID NO: 152038 - DNA, 544 bp, Homo sapiens
gggtcagtggccccctaagccagtatttgccaggataaaattgtgttatagactacaccaattagcagtgaaatcattagaatgaattcaattttgggggaaaaaagtggaaataagtgctctaaggcaaaggtgaaataatctgatagagaattgcagattgatatgctaaagataaagagatgtaaagaagtgaactgaaaggcctagtccacttcttctagaaagacatgcatatgtcaaaaacacctttttggaaataatcctgcccactactcttactatttattaccaaagtgacaataaattttgatctagtagggacaatagaaaaaaatgccttggatttctagttgatagaggtaaaaactttattatcatctcgtatattgtactttattaatagttgtctatttccttcaggtaatgtcaaaagttatgaaattccttttcatttaaaccaactttctcacactcaggctcccatgactaaggtcaaagkctctgataggtggagaatagcaaaggtctaggtcttctccag

SEQ ID NO: 152039 - DNA, 469 bp, Homo sapiens
ttagtcagaattactttcccttaggatcmccaattaattgtaggaaagggcagggtaaaattgtaattggtaaatggtcatggaaaaaaggtttctcatgagagaggtaagtaaaagatgtaaggaagacatgagaaagaagaagaatgcatgaattaatggagatatatatgctgcaagcaatggtagcacataaagtgtatattagtttcgtattgctgctgtaacaaattatagcaatttagtgcttaaaacaaaatagaatgtattatcttacagttttttagatcaaaagtctgaagttggtgttaccgagctaaaattagcaaggcaacatttttttccagaggctgttctttgccatttccagctttggaggctgtccacatttttggtacttggcccccttccatctgcaaaaccatcaatggcttagagtttgcaacagaagaaataaaagacaagtaat

SEQ ID NO: 152040 - DNA, 477 bp, Homo sapiens
cgcgcccggccccaatttttttttaaaggacgtaacacatttcattgtactgtgagttagcaggaatgttaggaaggactgtaactgaaagcctaggtacaaactgtccactgattattacttctttatgagatcatcaataaccttccttattcaccttatggtttcaaaccattgttaaagactacacttgcaatatttaagatctcttgctttgrctgtgtttcccccaccaacagcacttattgctttcaacctcctcttactttgtttttccctccaatgtggaaacaactgggacaagctagggtgcaagtactcatgaaaataaatacttcttgagcacttcacattggcacaatattaggaactaggagaaatacaggatatgcctattgtgagaagtttacaatcatattgataagaagagatatacatatagttaataagcaaatcagtacaacatatctcaaggcc

SEQ ID NO: 152041 - DNA, 559 bp, Homo sapiens
attcattcatggcaacctcatcccccaggcagctctacaaaaataaatctctagtcttggacttctctgatttttttattctgtatatccagtgtgttaggaagtcctacagattttaaccccaacattaaaaaaaaaaaatctgtcctcatttttcaactccatgctcttatctytaggctgaaatattttagtagcctttttaacgactctgtctgtagtcttttatttccagcctcttatgccctacagattaaattaggttcaggtttgggagagacatcctaaaggttgtctaaggatcatctgaaccaaggatggagaaaattattccccagaggaaagctgagcttgcacaacagagaaagtggatttgggccaccctggaggggcagggctggtagtgaatgaggatgggtgccccttatgtatatctttctagggcagaggcaactccaacctatgtatttccctggctcctgaaattgagtttatcctctgtactgagaggacacattacacttctgttacgaagcttgtattgctctgtcttgtgtgt

SEQ ID NO: 152042 - DNA, 559 bp, Homo sapiens
attcattcatggcaacctcatcccccaggcagctctacaaaaataaatctctagtcttggacttctctgatttttttattctgtatatccagtgtgttaggaagtcctacagattttaaccccaacattaaaaaaaaaaaatctgtcctcatttttcaactccatgctcttatctttaggctgaaatattttagtagcctttttaacgactctgtctgtagtcttttatttccagcctcttatgccctacagattaaatwaggttcaggtttgggagagacatcctaaaggttgtctaaggatcatctgaaccaaggatggagaaaattattccccagaggaaagctgagcttgcacaacagagaaagtggatttgggccaccctggaggggcagggctggtagtgaatgaggatgggtgccccttatgtatatctttctagggcagaggcaactccaacctatgtatttccctggctcctgaaattgagtttatcctctgtactgagaggacacattacacttctgttacgaagcttgtattgctctgtcttgtgtgt

SEQ ID NO: 152043 - DNA, 443 bp, Homo sapiens
taaacaagctataaatcagtatggaccaggttcttcttttgtaatgggactgttaaagaatgttgctgtgtccagtwggatggttcctactgactgggatgctcttactcgaacttgtctaactcctgctcagttcttacaatttaaaacttggcgtgcagatgaagcttccattcaggctgcttacaacacccaggcccaaactcaaattaatataactgcagaccaacttttgggggttggcagctgggccggtttagatgcacgactggtcatgcaggatgatgccatagaacagcttagaggagtgtgcattagagcttgggaaaaaatcacttcaggtggggaacaatacccttcctttagtgctatgaaacagggaccaagagaaccacatgttgattttatagctcttaaaaaggtgattgcaggagtctcttaaa

SEQ ID NO: 152044 - DNA, 568 bp, Homo sapiens
tagttgctaatgcaatatctaatgctagacactttcacagtttaacccatgttaatgcctctggtctcaaatgcagatacagcatcacctggagagaagctaaaaatattatccagtgatgcccaacttgccaaatggtacattcytcatcttttacaggaggagttaatcctcaaggattagaacctaactcttctttggcaaatggatgtcacacatgttccctcatttgggagactagcttatgtacatgtgtgtgtggacaccttttctcacgttctctaggctacatgccaaacaagagtcttctgcctgtgttaaacatcaccttttgcagtgttttgcggtgatgggcattccagcctctattaaaacagatagtgccccagtctatactagtcgagctccagctacatttttctccatgtggaatattaaacacattactgatatcccatacaattctcaaggacaagccatagtggaaagaatgaatctctccctaaaacagcagttgtaaaagcagaaagggggagacagagaatatggaaccccacagatgcaactg

SEQ ID NO: 152045 - DNA, 616 bp, Homo sapiens
tactaaaatttaatgaaagagaaaagatttccaggagaatcagacaaccaatcttgttaagtcaataacctgaattatatactctaaatgaattctgttaactctgcccagaaagtagttgccttgctgcttagaataaaataytatgctttatgacagttgtattcttttttcctcaattttatatcctctttcccatcattcaagttgtaacttccaaggcacaaatggtctgtattctgacatcacaatattcattacataagttgctctgtagaattgaatgggaagatggataaatcagtagctcactggagggtaaacaaaggaaggaagtgagggagggacaaagaaaaaaaagaaaggaaggaagaggagagaaagagaaagaaggatgagacaaatgacaaacttacagattcacaactgttgtgaaggattcattggaagtcaacactaaattatccaaatgtccttttaagaaccaaataataagccctgagatgcaaactgatatgcataatgacaatatctagagaatgaaaatgttcaaatatatcaattatttatttgttcatttgcttctaacattagaaagaaactctttagcaaagag

SEQ ID NO: 152046 - DNA, 314 bp, Homo sapiens
catgcctggcctatacaatgctaattctaatgagcttacactttatattctactttttcaattaggtttgttatataaagtttttcttagtctttaaactttcaaatgtattgttagataatatttcaataaattgatattccataggttactgaccattactctratcattttgtttgatcattctttctatctttaaagttttgtttccacagatatttctgaaacagcaatgaccttaaaattttactcacataagttcctaatagtgagattataagaatccaatattctacaagtttcactaatttcct

SEQ ID NO: 152047 - DNA, 495 bp, Homo sapiens
aagcattaatagaacaagaatttggtttcctgtatagctacttcaatgagaataacaataatatcaatttacaattgttagcatttgtcttaatatctggcactttcttttgatcataccacatgaacctaagtccaaaaagaccatcagaaactaataacaatggaggtgtccttttgtgatagcaatagattgtgttgtaagctgatttgtatgccccgaaaagatacactgaagtcctaaccmctgttatctatgaatgtgaccttatttggaaatggggtttttacagatataattaagatatatattaagattcggtcacgccgaagcagggtgggcccttaacccaatataactggttgccttataagaagagaagagatacagagacagacacacagaagagaacctgatgtgaagacaaacacacacacggagaaaggcacatgactacggaggcaaggactgaagttatgcagctgcaaacaaagg

SEQ ID NO: 152048 - DNA, 423 bp, Homo sapiens
aagtatactcaattgagcaggccatgtggcctctctgcctatagagtagccatttttttgtttctttacttctctaataaacttgatttcactttactctatggacttgatctgaattctttctttcacgaggtccaataaccctttcttggggtctggattgggatctctttttggtaacaggactagtttgactgtaccctttaagatggctacaacactttagccagggctactcktgggccaacactcacatcctcaaaattaagtgtctaattgttcccacagtggtctaacctgggctgcaattaactgcaggtgcaatctttgcacgtgtagctaatagaaggactaaaccaccccaaacaagctgcctcgggagagtctcaggctatatccttaaagttccacaattatttgaag

SEQ ID NO: 152049 - DNA, 205 bp, Homo sapiens
tgtcctccatgtccaacggactcactagtgagtgagatcatgacacaggtatcaaggaagcctgtgtaccccmaactcaacatgtccactatcaaagtatctgtttactcaatcctgctctatcttgataaagaaaataattttcactcacttctctgaattattagcttctatcaattctctttcccaggtatcccttgaattc

SEQ ID NO: 152050 - DNA, 528 bp, Homo sapiens
tgttgccttctgggtgaattatttattactttcttccaatttattaattcctttttgcctacgtctaatctagagtatatctcatctataaagtttttaatttcactgactatattatttatttctagaattttaaattattttttatatccacatctcttttgtttcactttgtgctgggttttgttcaattatttgctcattatggaggtttttccttcattcatctccctaaatatcctaaacatatttattttgaaatatgtatcaggttgttctattacataawttttttttcttatttataaattttttctgtttttagtggacacataataatgatacatatttatgaggtacatagtgatattttgatatatatgatatgtagtgatcatatcagggtgtataaaatcacattttatacataaattagcatatccatcatactacatgagtttttatgggccaaatttatatacaaagtttctgttttgtggactgctttctctatattagatttacttc

SEQ ID NO: 152051 - DNA, 546 bp, Homo sapiens
gtaaatgagatgtagaatctgcaccggaaatggctccacactcttgcagctgcaagagtcttgtccatagagaggttttttagagacacaagtcgtttggggtgaaaacaccaaatcattcatctaagacagaatgagagacagagagagaaaaagagagagagcttgctcaatgttagcagagaacagcaaataagcccgaatagatcctcaccaggaattataacaataaggtgtgtcatatggtaagcagaataaacttctctatattattccactaaggacataagaggattaggtctttactagttaacttgttatctcagttatggactctccaattgagggattttaatttttacaaataaaaggatggtttcacacaatggtccaccagagtgagaaaggrggccacacttttacacagcccagtttatcatgctaccatggaattctgcaaaagcctcattctcctgtgaaaggttagtccttattccaataagctctagactgtctgagcagtgaacattttaaatcagcataatt

SEQ ID NO: 152052 - DNA, 460 bp, Homo sapiens
ttcacacaatggtccaccagagtgagaaagggggccacacttttacacagcccagtttatcatgctaccatggaattctgcaaaagcctcattctcctgtgaaaggttagtccttattccaataagctctagactgtctgagcagtgaacattttaaatcagcataattatatttcacatggcaataaacactttcagtttaagtgcgcataatttgtctctttgtctgactgtctttgttgcattagtttttcaccatggtgagcataaaataacaggatttgtgatgattccccagagattactcttttttcctctgtctttyaaaaatgttcaagatgctttgtttatttttttaagagaaagaaaaagaaagttggatttcagagaaaaatctcatctcaggtttttggtttctaaaaaaaaacgtaggcaggttttgaatgttaaaagttgttct

SEQ ID NO: 152053 - DNA, 413 bp, Homo sapiens
ttattcataatgtattagggccacttaaaaagttttcacgcaggattcactgatgaatagacttaaattgtccataatcttcaatgtctcctgtggaarcaagagtagtaaagtaggtcactttcttaattaacacaactttcattgtctcttttattttacttgtattatttctttttaaaatatatacaatattgttcatcttacattggttattgttctttagcaatatccttattgaaagagtagactctattgcttggtagttatttcttccttacaggaaccgcaggttaaaggcgtaactctgagaaactcacatcacctgaatacaggctaaaataaatgcttgctaacctcttatatttttggcatctacatgtctaggatgacctggtgatttgtgcagtgtt

SEQ ID NO: 152054 - DNA, 582 bp, Homo sapiens
ctgactacattcttcaattcttaagactttaaagcatttatctagagtttactaattctcctatataaatgatggcctaccattccagttcatgcccattgaaagactgaagagaaaatgagaatgcagaaaagtccattttaccaaattatttgcattgacacctaaatagagcctaatacaaagagaagaaacatcctgatgcatgctccagagctttaagcaagtgacaactgtttttctctttcagttctaggagaataatgttttgcttagccattaataatggactaaagaccctacatttctctttcagttctaggagaataatgttttgcttagccattaataagggactaaagaccctacatttctctttcagttctaggagaataatgttttgcttagccattaatatgggactaaagacaatttcaaactacaaataacttaaatatttyttaaatttaaaaccactagtatcagttatcttttgcccttgtgttgaattcatggaattaaagactcagagagagaagaaagtaatgtaattagggcaaacagctcccaaatgtagtccct

SEQ ID NO: 152055 - DNA, 624 bp, Homo sapiens
agcttgcacagcactgtggacctgttgcagacccttcttctgctctggactccactcaaaactggcagcctttttgggtcactcaataaatgggctgcagtaacacacccaaatgaggaatgtgttgcctccaaaatccaaataggcccactaggcattgtgcctctttcttrgttgtaggaagggccaagtgcagcaacttaccctccatctcagaaggaatatctctacaggctccatgccactggaccactagaaattttactgaggtagaaggtccctgaagtttagttggcatgctaatgtctcaccagtaagtccagtgtgtttgctacttcttgctcactggatccaatcagcataaagtcataaatgtaatggaccagtgtaatatcttgtggaagtcaaaagcaatcaaggtctctctgaataagattatgacacaaagctgtagagttgataaacccttgaggtaggacagtaaaggtatattcctggccttgccagctgaaggcgaattgcttctggtgggcattatggacagaaatggagaaaaaggcatttgtcaaatccatggctacataccaggtaccaggagatttattaatttgctcaagcaatgaa

SEQ ID NO: 152056 - DNA, 624 bp, Homo sapiens
agcttgcacagcactgtggacctgttgcagacccttcttctgctctggactccactcaaaactggcagcctttttgggtcactcaataaatgggctgcagtaacacacccaaatgaggaatgtgttgcctccaaaatccaaataggcccactaggcattgtgcctctttcttggttgtaggaagggccaagtgcagcaacttaccctccatctcagaaggaatatctctacaggctccatgccactggaccactagaaattttactgaggtagaaggtccctgaagtttagttggcatgctaatgtctcaccagtaagtccagtgtgtttgctacttcttgctcactggatccaatcagcataaagtcataaatgtaatggaccagtgtaatatcttgtggaagtcaaaagcaatcaaggtctctctgaataagattatgacacaaagctgkagagttgataaacccttgaggtaggacagtaaaggtatattcctggccttgccagctgaaggcgaattgcttctggtgggcattatggacagaaatggagaaaaaggcatttgtcaaatccatggctacataccaggtaccaggagatttattaatttgctcaagcaatgaa

SEQ ID NO: 152057 - DNA, 525 bp, Homo sapiens
actaaatagtatcctttaatttcagcttgaagaactccctttactatttcttgtaaaacaggttctgtgatgtcaaactccttcaacttttgtttkcctgggaaggtcttttatctctccttcattgctgaaggacaactttgcggataaagtattcttgattgaaagtttcgtttgtttgcttgttgtttgtttgtttttttgctttcagatcttggaatatatcatctcactctctcctaggattcaaggtttctttggagaaatctactgataaatttacggatgtttccttgtatgtggcatgttgttttttatttgctgctttcaaaattctctgtctttgacttttgacaatttgattaagtgcctcattgaagttccctttggattaaatctgtttgagaacacttgagcttcatggatctgaatattcatgtcattaccaagatttaggaaatttttagcaattatttctttaaatacattttctgactctcactcttttctctttcttggttactt

SEQ ID NO: 152058 - DNA, 592 bp, Homo sapiens
aatttactagtatagatcttataaagtatctttccttctctttttttccttcttacaataaagaaaaaactgttagtgagatactatgataggtactaaaggaagtacactttccactgatttacctgcagccttgccaaagaactaccaccatgtcatggttcccaaggatgacatctgttagtttaacgtgggtgcataagatggactgagcacagcctcggacattggaaaccaggtaatacctacctcagctctttgagaacagctattaagaaagatcttttcttccccacaacctgtgattcaatttcatgaatcttttcttagcccccttcccccagagataagtgtgattcatacaaaggatctggatagagcaaggagagacatggtggggagactgggggckctgctgctcacttccaaagtggaggggaaaagcaagatcactcatttgtctttactcaggtgactcctcttattcaggaaacagaaagtccactgaggagcttcagttcacagtcagaagcttcattcaaataagtggagaattcacaccaaatgtagaacagttgaattaaatccaaat

SEQ ID NO: 152059 - DNA, 550 bp, Homo sapiens
ttctggcattttaatcctcacaacagtctacctgacccaaaacctttgcaggtaagaagccagcttgaaatatcagataacaaaaaattataaaacacaaaattaccgcactgttatttcatgacttacttcttaagtgagttacatagaaatcccctagcaaaagcaagatatctaggtcaaccttctyatccccatgatatttcattctgttaagtaatgacactgattctcctatatctgatcaaagcttttatttgtgttttctacgcttcttcaaataaagtagtgtataatttcaaactaatgttgataaatggggcttttatagtgtaatttggctaaacaatgaatataagaaaaaggtaaatgcagcagttctattgcatatgaattctgcaagcatatgaaatctgctgtgttattttataaactgtgttttggtttcagtgcagcacactagggctgctatgcagaagtcatttctttccacagtgcattttatactggagtaggccattaaaataacatgcttactttttagaggatg

SEQ ID NO: 152060 - DNA, 550 bp, Homo sapiens
ttctggcattttaatcctcacaacagtctacctgacccaaaacctttgcaggtaagaagccagcttgaaatatcagataacaaaaaattataaaacacaaaattaccgcactgttatttcatgacttacttcttaagtgagttacatagaaatcccctagcaaaagcaagatatctaggtcaaccttcttatccccatgatatttcattctgttaagtaatgacactgattctcctatatctgatcaaagcttttatttgtgttttctacgcttcttcaaataaagtagtgtataatttcaaactaatgttgataaatggggcttttatagtgtaatttggctaaacaatgaatataagaaaaaggtaaatgcagcagttctattgcatatgaattctgcaagcatatgaaatctgctgtgttattttataaactgtgttwtggtttcagtgcagcacactagggctgctatgcagaagtcatttctttccacagtgcattttatactggagtaggccattaaaataacatgcttactttttagaggatg

SEQ ID NO: 152061 - DNA, 382 bp, Homo sapiens
ctgcaagatattgaaatcatagtctgaacattttatctctgagttgtggcatggactctgaaattcttccctgtttataaaatcgcatacatgagataccccagcaaggtgagtttgtttgaagcagaaaaaaatgttaacatggaagaaattttccccttgctcattttagacccagtcatgtggtcagaggctggaatttataccagacattttcagaaaccttctggcagccatattattgctttttcaaaaragaatcacaattacctatgctctagctatttttgaaaaaccgtactgctcatgacccactatccccattttaaaaatgtactttactaaacaagttttatattataaaggagaaaaatatgattat

SEQ ID NO: 152062 - DNA, 599 bp, Homo sapiens
aaaggccaccctaggctattttacagtattcaaacttctgaaatagtaaggacacaggaatggtacacgcttccttagaaaatggatagaaatacagtaaaagttgagcagagtcaataaaaattttgctgcctcacaatgtccaagttatctgtctgcacatgtttaaaatccacaagatttttgtctgttaagtatcgttagatatgttttgtctgcttcatacatttaatatattagaatgaaaggctttcataaaattccaaactttaggatggaattattattgmcattatcattattttagagaaaagtagattgtgatgagaaaggaaaggttgagataacatataaaaaataaaatatagcaagaaagaaataattcttctaaattacataaactatgtgtaaatatactgggaataggctaactgcatttcaagggtcagcactgaacctgttttactacatgaagggctgtttatgacaatcaatattgccactcatttttaatgatcttttatgtcctctgtgcctcacattaaatgcatcaacatgtttgatttttaatttagccttgttaaagtaatttagttcaa

SEQ ID NO: 152063 - DNA, 519 bp, Homo sapiens
atgggggcaggagtttgttctagtgatggagttggaccacatcactaaatgcatccaactggtgctgtctaatctctgtgtagaactataacaatgtgacttttttttattgcagatgaatttactgtagtttctataagccagtggttataaaagaaaagcaaaagtagttggaaagataataaagcatttaattcagagatttaaaataacaataagaaaaygaaagaagagagaagagcaaagacagagtcttcattgagaaaggtaatacagtacttattagtatcatagttttctgatttccaaaagcaatcctatggtattcaggtcattataactaacacaagtagataaatgtcatataaagctacatatagcataggaaacctctaaaatagggagatcttaacatttgctgagttcaatctgtgtcctgggaactttacaaatattacattttgttttcacacacatgatttcaggcagtttcatcttcattccttggataaagaaact

SEQ ID NO: 152064 - DNA, 581 bp, Homo sapiens
agaaactgacttgagctgttcttctagcaggtcaaggcaagtagctaataagaagaatgrtagaagaagatgaagggtgaacaaatgcattttgtatgtaacagattttctacaatgagcacataaaacttgcatagtcagaacaacatataaagaaagggaaaatgaataataatcattgatttctactggaaaagttaggtttatgaaaaatcaaagaaataatattcagtctcattcattagactttcattattctttattctttgttttcctcacagatctctaaaaggaatattttgagaagaaaataaatctcttttagactaatatacttttaccttatacaactttatatgcagaatgatagccttgcctataacaggaagtaaaggcatagctgattatgatattttctttgcaagtgtgttccacacatatattttcacatggattctgaaaataaacaattccaaaaatgttttattttataatttacctatatttgtattttccccaaggaatttgtctcatttaaaaatgtttgattagcacttttttgacctctgaatttttctacc

SEQ ID NO: 152065 - DNA, 543 bp, Homo sapiens
cttattcactgtcacaagaacagtacaggaaagacctgcccccatgattcaatcatctcccactgggtccctcccrcaacacatgggaattcaagatgagatttgggtggggacacagccaaaccatatcacagacatttcatccaataaatcttttgtacatataatcctgtcttggcttctacttcttagaagacctgaacagacacagttggaaccaggagtgatcagagaaaacagctagtaagataaggtctgcaggcctggactgatggtggaggatggggtgtcacttaaccattagaagccagggagtcacgatgaccatagtgaccagcaagcttggaagagcagccaaagagtcttggcctacagaaagttgtgaagatggttaatagaacctaactcctttaggggaaaaatagacagtcaaccagcaaggggccttcttaatttctacaacaagaaaaaaggcaagaatggaggagcagaaaactaatggtgatcacccaataaaaagttttcataccttgctcagttctc

SEQ ID NO: 152066 - DNA, 472 bp, Homo sapiens
gaattcctgaggaatgtaagtgtttgacaacaaggcctgtaaatataatggtttaaccacaaagcttgaaaacgtttgttatgggaaattgattttcttcacttcagctgtaaattaactcatcagttttgtgataagtaacctaccactcaggatgtgaactttctggccttgtgataatgaatccaccacactgtgcctgttytcctattttttagagagctttttcttcccttaccagttctattcccaacagtatagaagtgatttaagctgcctctgacagatctgatccatatagagtacaaagcctctttcttccatgcactgtgagtgaaatactaacaacagccttgtactaaaagttataaatttaggaaaagctaggccttgaggggatgggagtgagttaagtaaaattaaaagtagtctaaatttatcttctttctggtgtatgaataaaagcaatagg

SEQ ID NO: 152067 - DNA, 387 bp, Homo sapiens
ggacatttatttaaaattggtgctcagtatgcaataattgatgcacacattccaacactggtcatttattgatgggctattaataaaggctgtaactaaaagggaccatcactgcatagcagctctgcccratagaactttctgtgatgatggaaatattctacatctgtgctgagcaatacggagcgcttggtatatgcctagtataattaatccaattttaatgttaattaaattaatttaaacttaatttaccaaatgtggctactggttatcctattggatagtgagaatcaattaaattagaaaaaatcccctatgcttaggaaatgaaagtattcaattgcattttttactattggcacttttatggcctgaaatagatta

SEQ ID NO: 152068 - DNA, 472 bp, Homo sapiens
aaaatgggaatgacatcattgtctcatcaggaatctagcttccgtgaagtgtctggggaaagatggatgttatatttaatgtcagaagtgccagttcatactgctctttattaaacggaggtgctttgccatccccgttgtctcagaggttgacaggtcatacctccaagtgcctaatattatacatacaattttactgcctttctactgaggaactagaatgaaaagtcaaacttgttacctgtgatgggatgctgtaatgtggctggtttgtttttgtgtcyggctgtattactctgttttcatgctgctgataaagacatacctgagactgggtcatttataaagaaaaggaggtttaatggactcacagttacacgtggctggggaggcctcacaatcatggcagaaggtgaaaggcatgtcttacgtggcggcaggccagacagcatgagaaccaagtgaaagaggt

SEQ ID NO: 152069 - DNA, 586 bp, Homo sapiens
tgtttgatgaaaaaactaatcaaggtattgtcttatgaaagagaaaaataagaatatcagatcctccatattacatttcaatttaatacagaacatctagtgttaacamactatgatattaataaaatatcaatgatatttttatatcatctagtgatattaataaatatggatgatatttatgtaatatcatctagtgttgacacagagttgacacactatgatattgatgaaataaatcaatgttatttctagatcatctagtgttagcacactattatattgacaaagtacatcgatgatagctgtataatttcatctagtgttaacacactattattcatatcttagggagatattattcctaatatcacatttggtgtacaccatgtgtgttacaccctgtaatattattcataatatcctagggaggatattactcctaatatcacagtgggtgtaaaccctgtgatattattcataacatcctagggagtgattactcctaatatcacagtgggtgtacaccctgtgatattatgtgcaatatcctagaaagccatttcttctaaatcacaataggtgt

SEQ ID NO: 152070 - DNA, 531 bp, Homo sapiens
actatggatcttcactcttaaagtaatgaaatactattccacaagcatcaattcaaacaaaccaagctgagaaggaaatgggccagaaatgtcaacctttttccccccgagcaggagggggaaaatgcaagagtattgactctagggagcatgtataagctcttttaatgtgctgaattttcataggataagcaaccttggcagcaaaacagttaagtcattgaaatgttaccattttgcaacattctctgctccctatcctctagccattgtcttggtgaagtccacaggtggtatatatagcaaagctctttcaaaatggccacagaaaagagsaagagagaatagaagaagacggagagggaatcttattcctttaaaaatgtcttaaagactttctaaggagactcttggtcaccctgaggatggttggcattacctctccttagagaggtgagtgtccctgatgttccgaggctaccagtccaactgaggacaggcttacaggacagcacaacaatccttaaaaag

SEQ ID NO: 152071 - DNA, 528 bp, Homo sapiens
acaagaacagaaagttacaattactcttctgattctggccaacccatgcagaagaaatgtctatgaaagcggtcaaagggaaaaaccttcctcagatgatgtaacattttaaattggaaaggaataaaataaagacttgaggacttttttttttttatcgtgagtactacttttctcttttttaaggaagtaccaaagatgaccaggaaaatccacttttgcaragctactcattttttgataattgggtgtgttaaattaagtttaacttaaagcttcctctttgcatattttaagttctgcttaaaggtttcttcttcgtgtatagtgaactgtaaactaactggatgtgtaaatagactgtaatctgctcttgtaccaaacaccaagttttggtcaagcaaagacagccaactgttcagattatgttcaaataacgcaaatggcaagctgtaaccaatccagctgtttgtgtacctcacttccattttctgtatctctctttcccttttctgcccataaatcctc

SEQ ID NO: 152072 - DNA, 527 bp, Homo sapiens
tttcaaagttgccctttgttcataaaggatggttcttttattatggtttttattccttcttttatgttaaaaaaaacttttaaacgtaattagcttatagatcctgtcagattattctcttactgtaagttcttagaggtgctaattcttctgctcattgtgtacgtggcttctccttctgactggcttcattctttgtgggtttattcagcaggaattgtttattctgagggagtcttgtaggtcctgagttatgaaaatatttctacagaacaatttgagtttgcttcttccctggttctgggaacatttttatagtgatctattagttcaagatacttacacagcctaaacaatgtaaatttgtgcaacacacttgtgcatgacataggcttggtgttctatttagtttttttaatcrgatgcattttttttcaccctgatactggagcacaattcagacttacttcccccttccctgagctacttggagcagtggtagttcttctagtcctgtttttatgtaa

SEQ ID NO: 152073 - DNA, 501 bp, Homo sapiens
catgcaaatgaaaaacaaaaaagagcaggagttgctacccttaaatcagattaaaacatactttaaaccaacaacaatcaggaaggacaaagaagggcattataaaatgataaaaggttcaattgaacaaaaagacttaactattctaaacatatatgcacccaacactggagcactcagattcataaaacaaattattggcctacaataaaacgtagatggcarcacaatattagtgggggctttatcactccactgatagcattagacagatcactgaggcagaaaactgacgaaggaattctggaattaaacttgacacttgaccagttggacctaatagacctctctaggatactcaagccaacaatgacagaacacacattcttctcatatgcacatggaacgtattctaagattgccccacatgctcagtcataaagcaagtctcaataaattaaaaaaaattaaaatcatacaaaggccactctcaaatcatag

SEQ ID NO: 152074 - DNA, 591 bp, Homo sapiens
atactgtcatagttaggaatgtttggcaagaaacagaaccaactcaagttagctgaaatacartaaggctttgactaattcaggaaatgtgaatggatcccaaaaggcatgaagcatagctaggcttcaaaaggaattggaaccagtttctagaagattatcaggattagttcttctcactgtctctctttttctcttgtcttcctctctctgtggccacttaggctcttgtctctgtttctctgtgtattggcagccaccttctccaccttctccttttcctcctcttcctccgtggctctgcagaccagctttctcaactgcactacacacggtccaagcaagattcaaccagacccagttttcatcacttctcacccaatgccacatcactaatgcccaaccaaggctgagtcctgattccaaattcccaggagagacattcttattagccagcttggtgtgatagccaccccttttccatcatctgtatctagaaggatgggggaagtgtccccatgcctacttaataggagttgttggggggtggggctctaaaagctagcacacgtgggataggatcaggccatt

SEQ ID NO: 152075 - DNA, 591 bp, Homo sapiens
atactgtcatagttaggaatgtttggcaagaaacagaaccaactcaagttagctgaaatacagtaaggctttgactaattcaggaaatgtgaatggatcccaaaaggcatgaagcatagctaggcttcaaaaggaattggaaccagtttctagaagattatcaggattagttcttctcactgtctctctttttctcttgtcttcctctctctgtggccacttaggctcttgtctctstttctctgtgtattggcagccaccttctccaccttctccttttcctcctcttcctccgtggctctgcagaccagctttctcaactgcactacacacggtccaagcaagattcaaccagacccagttttcatcacttctcacccaatgccacatcactaatgcccaaccaaggctgagtcctgattccaaattcccaggagagacattcttattagccagcttggtgtgatagccaccccttttccatcatctgtatctagaaggatgggggaagtgtccccatgcctacttaataggagttgttggggggtggggctctaaaagctagcacacgtgggataggatcaggccatt

SEQ ID NO: 152076 - DNA, 524 bp, Homo sapiens
ggctacaaatgacaaatgacgaatggaataaaagcagcagatgcccccatccccaccctattatggcctttgtttrtaatctctggcttccactgaatatcacatatcccatttcccttcccagctggtgctgagatgtaacaacttgtcacctgagatacagcccattaaaattacatagcacaggtaatggagaatccagtgcaggtccggacagcaggtaattagctgtaacttacagagcagtcttcaggccctctaagggcctcctgcctttactccccttcctttctgcttctttgcacactggaggccctaaacagaggtatctcttgggatttgttgagcaggggtggttatttaacactgttctcattaattcagccaccaagtcattgcagtattgggttcacaaggttgtggtggggaactgtgaccatcataatagaccatcaattctccagcagccagtggggtgcagggagtggattcagctgtctctgcatgttttccaagaatagaca

SEQ ID NO: 152077 - DNA, 520 bp, Homo sapiens
gggacaccgtaggttacgtctgtctgttttctatgtgcgatgacgttttctcacgaggctagcgaaatggggcggggcaacttgtcctgttcttttatcttaagacccgctctggaggagcgttggcgcaatagcgtgtgcgaaccttaataggggaggctgctggatcyggagaaagtgaagacgatttcgtggttttgaatggttttgtttgtgcttggtaggcagtgggcgctcaacacataattggtggatgaaattttgtttttaccgtaagacactgttaagtgcattcaaaactccactgcaaaccctggtaggggacagctccggcactgcgggcgggaatcccacggtcccctgcaaagtcatcgcaattttgcctttacatgtaagaattctctcaagcatgattttcacactggggaatgtcatttttgctagttgcaatatgtggatgagttgtttttttttaacttttgaaaaacgtaccattctgtttgatgtgtaaaaaacacaa

SEQ ID NO: 152078 - DNA, 520 bp, Homo sapiens
gggacaccgtaggttacgtctgtctgttttctatgtgcgatgacgttttctcacgaggctagcgaaatggggcggggcaacttgtcctgttcttttatcttaagacccgctctggaggagcgttggcgcaatagcgtgtgcgaaccttaataggggaggctgctggatctggagaaagtgaagacgatttcgtggttttgaatggttttgtttgtgcttggtaggcagtgggcgctcaacamataattggtggatgaaattttgtttttaccgtaagacactgttaagtgcattcaaaactccactgcaaaccctggtaggggacagctccggcactgcgggcgggaatcccacggtcccctgcaaagtcatcgcaattttgcctttacatgtaagaattctctcaagcatgattttcacactggggaatgtcatttttgctagttgcaatatgtggatgagttgtttttttttaacttttgaaaaacgtaccattctgtttgatgtgtaaaaaacacaa

SEQ ID NO: 152079 - DNA, 622 bp, Homo sapiens
ccgctacctcctgtactcttgcaactagttgaggacgtatgacccagagttctggtctctgtttcacccagatgaaaatcaggtctgcctaacattttgaatcaaaacctattgtcacaaagacacagggtgycttaacatttctgaattttgcctattttgtgaactgacaggtcaatctttctgcttaaatcagctagaattagtttctaatgcttgagactaagaatttgacaataggtcttctagggaggcattcctcaaactttatactgtggaataatcacctagacatcttactaaaatgcagattctggttaaaagcaggtctggatggggccttggttttgcatttctaataagctcccaggaaatggcagtggtactggtcagtggcccacacttctagtagaaaggatctaaataagggaaggcagagtttgtaggaaaataaaaagtctatttccaggttaaattagggcaggccaactacgtagctaataaacttcaaaatgtacaaaggctccgaacagcagaattacatttcttaataatgcacaatactgggtcagtaacagaacactaggcagttttccttcatgtatgcaagggcctaatttaa

SEQ ID NO: 152080 - DNA, 595 bp, Homo sapiens
ttagggtttggggttattgtggaggtgggagaaaacgaatataagtctcctggcctgtagcagacattcatttaatgataacygttattattatcttaagattttaaaacttttatttgttttattttttattttattttattttattttgccagcagctaccctatgaccaatatctagatgcaaattgaaaagttggttgagcattcagctctttataaatagctttatgcttggtaaaaaccagcattatgattaacttttttttataacttttatatcctgcttgtaatggtgtgaaaaaaatgtttaaagatgttgaaataatgcagtttttaaaaaaagaggtaagtattcaatatcagctctactaactagtagggattacattctcttctttcctttggttgttttttattttgttggtttgtttttatcattcagctgagtaggatatcagaaatagtaagcatctgctccattgagattcgtagcaacttgttaatttcaggtgggattgtgtttagatgtgacttttggcagttgagttccaagatgtttatcagtttgctcagactgttatcatcataattta

SEQ ID NO: 152081 - DNA, 595 bp, Homo sapiens
ttagggtttggggttattgtggaggtgggagaaaacgaatataagtctcctggcctgtagcagacattcatttaatgataactgttattattatcttaagattttaaaacttttatttgttttattttttattttattttattttattttgccagcagctaccctaygaccaatatctagatgcaaattgaaaagttggttgagcattcagctctttataaatagctttatgcttggtaaaaaccagcattatgattaacttttttttataacttttatatcctgcttgtaatggtgtgaaaaaaatgtttaaagatgttgaaataatgcagtttttaaaaaaagaggtaagtattcaatatcagctctactaactagtagggattacattctcttctttcctttggttgttttttattttgttggtttgtttttatcattcagctgagtaggatatcagaaatagtaagcatctgctccattgagattcgtagcaacttgttaatttcaggtgggattgtgtttagatgtgacttttggcagttgagttccaagatgtttatcagtttgctcagactgttatcatcataattta

SEQ ID NO: 152082 - DNA, 595 bp, Homo sapiens
ttagggtttggggttattgtggaggtgggagaaaacgaatataagtctcctggcctgtagcagacattcatttaatgataactgttattattatcttaagattttaaaacttttatttgttttattttttattttattttattttattttgccagcagctaccctatgaccaatatctagatgcaaattgaaaagttggttgagcattcagctctttataaatagctttatgcttggtaaaaaccagcattatgattaacttttttttataacttttatatcctgcttgtaatggtgtgaaaaaaatgtttaaagatkttgaaataatgcagtttttaaaaaaagaggtaagtattcaatatcagctctactaactagtagggattacattctcttctttcctttggttgttttttattttgttggtttgtttttatcattcagctgagtaggatatcagaaatagtaagcatctgctccattgagattcgtagcaacttgttaatttcaggtgggattgtgtttagatgtgacttttggcagttgagttccaagatgtttatcagtttgctcagactgttatcatcataattta

SEQ ID NO: 152083 - DNA, 604 bp, Homo sapiens
gggaattgaaggtgactgaggagcacaaggtattgagatgtttgttaggtgcgctgggtagggtagcttgaaagaatttgcaagaggtagatgcttcactaagagctgctgctctagtcagattggaaggaagcaacagaggaaagacaagctttagaagaaaggaaaaagtactactatcagaaatactaaaaggttatttcagattgtatattgcagcagatggcacaatgtaaaggacaaayggattaacttgctgagatttttggtgtccacttcatagccagccatgaaaggcacttaacaaagcagtgactttgttaaatgatagcttccagaacatgccatctgtggtccctgactgttctcattgcctgatgaagactggaattgttctgtctgaaaatgcagagtctttcatctggttgttttcatatccttgtgaattcttttctgagattgaatttctgtatatctgagaaggaccttggcttataaacatctttgctcccaatggcttcatgtttctccatagcatcacactgagagaatgctagcaaaaaggcagctttgttgatttgttgattcgtttgtgtattgggga

SEQ ID NO: 152084 - DNA, 516 bp, Homo sapiens
tctagaatttcatataaatagaatcatcatctgatggatgtgtacacacacacacacacaacatctatcttctttggttttgagattcattcattcactygagtgtacaagtagtttgctcctttttattgctgagtaatgccattgtattaatatgccacatactgatggacatttgcattgcttctaatttttggctattaccaccaaagctgctatgaacattcatgtgaatggaaaaaaagaaaacacaagtggtaagagtgggtatccttataccacatcttagtggaaaatctatcagcttttcctcattgattatgatgttagctgtgggcctttcatatattgtctatattgtgttaagttccttctatacttttttgttgagagtttttttttaatcatgaacgaatattacattttgtcaaatgcttcttctattaagtggatgtcagttttacaatgtagaggtagttcctccaaattgtcctatggaatatgccatccaaaagc

SEQ ID NO: 152085 - DNA, 572 bp, Homo sapiens
ctgttggttggtggctgaaagcatttcttcacccttcatatggttgtactgatgaactaaagaatataatccatggtaggaaacttcccgtgggcctttgctactaaaattacctaagttacccctgactcctctattggaaaatgtattgccaactcagtgaaaatcttatgtcataggcagttaagcagtttttttttyccctattttatcatgggcagagaccaatttggagatacatacatttgagtcacaaacagcactcccagcctgagttattcatgcccaaattcctcaatgtctaataacaaaaatgtctcttctcattaggaatgtcagaaacagagttttcccctgggagtctaaataaaatcacacatctggattggaaatttaaaaaaattgtccagatacttctacatagttggaagtttagcataatacaaacatttagagtgagcttttcccctccagtcacagagttattcctgttcctttgtagataaatgattaaatgctattacaaggtagaaactccaattgtgaagatgaactctgaactattaagcctt

SEQ ID NO: 152086 - DNA, 581 bp, Homo sapiens
ggaaatgaaaaaattcctccatcatcccagtcttgacgagattaactgatcaaaattgtgaacggcattttgtaaagcattagagatctaatgtgaatctctcatttaatcctgttttttccgctattccccgctcttactctcccccttccattccccaacctaccccctaaccccagctttttggttgttattgcaattcagtggcatttgttccgcaaccagcatttcttccccttcccttccctctcccaccctccygggaggccaagaaggaggcgcagaggaggagagaaaaagaagccccagtagtattcagccggcccggctccctacaggaagtgatctttctgcttttaggccagccacacgcctcccagccagccagcagcgctaactaattagcacacgtgatgggaattggaaacaaagtcgccaacaataggagcgtgggaacccgagctgcgctgcaattacagcgcccccctcaccccgcccggatcggcggcgggcgacgcgccacccgcccgcccagggagggcccgccaggtccgggcgcctggagctccgggccgcgtccg

SEQ ID NO: 152087 - DNA, 539 bp, Homo sapiens
agttatttactttagttatccttcacccattaaatcatgagaaaagataataaatgataaacgtgcttcattgttataaaataaattctcttcctagctagtttgttttatttgctcaattcaaaatttgaaccatataatcagtatatatttttggtatttatatgaaattagtacttcataaatatgaatcatgctattaactgtgtatattgtgatattctctaataactgtcatttgcatactacgcaactcttatcttcaatagtcaaaggactgaagaaaattttggagastgcactgcacatttctgtctacagactatacgatattacagcttgatctttaaacacttgtaagaaactgtctacagtaaaacatttccacctccatcaagctaacaaactccaggagaaactcattttaaaaaccccatggagtagaaagaagattatgaggttgttttacttcaaacagaataaagacatttttaagaagttttcaagtttggacatctttcccccatcagattacttct

SEQ ID NO: 152088 - DNA, 492 bp, Homo sapiens
actcatgctaggtgccacctgatccaactgagctctgaaacaggccagttttwtaaaaaaaaaagaaaaaagaaagaaaaagaaaggccaggagagtcatagcaaccaatctcaaggggcccagttcacttcagccggcaagctaaagaagtcccctgggtttaaactatacaaggaaaataactttgaaacaaccagtctgcttttcctttcactgtttctgctttcttctgcctttttctgtctgtaaagcccacctcctctactcagctcatgggaacactcattttatagaatgtggtgttgcccgattctagaattgcaaataaaagccaattaagatatttaaagcaaatttgttatacttttgtcttttagtatgctcatgatagattctcaacagggctcaatcaagcagacctttgcaaaactgggggtgcctctcaggctttggtgcgtatgcacatcacacggggattttgttaaaatgcc

SEQ ID NO: 152089 - DNA, 492 bp, Homo sapiens
actcatgctaggtgccacctgatccaactgagctctgaaacaggccagtttttwaaaaaaaaaagaaaaaagaaagaaaaagaaaggccaggagagtcatagcaaccaatctcaaggggcccagttcacttcagccggcaagctaaagaagtcccctgggtttaaactatacaaggaaaataactttgaaacaaccagtctgcttttcctttcactgtttctgctttcttctgcctttttctgtctgtaaagcccacctcctctactcagctcatgggaacactcattttatagaatgtggtgttgcccgattctagaattgcaaataaaagccaattaagatatttaaagcaaatttgttatacttttgtcttttagtatgctcatgatagattctcaacagggctcaatcaagcagacctttgcaaaactgggggtgcctctcaggctttggtgcgtatgcacatcacacggggattttgttaaaatgcc

SEQ ID NO: 152090 - DNA, 492 bp, Homo sapiens
actcatgctaggtgccacctgatccaactgagctctgaaacaggccagttttttaaaaaraaaagaaaaaagaaagaaaaagaaaggccaggagagtcatagcaaccaatctcaaggggcccagttcacttcagccggcaagctaaagaagtcccctgggtttaaactatacaaggaaaataactttgaaacaaccagtctgcttttcctttcactgtttctgctttcttctgcctttttctgtctgtaaagcccacctcctctactcagctcatgggaacactcattttatagaatgtggtgttgcccgattctagaattgcaaataaaagccaattaagatatttaaagcaaatttgttatacttttgtcttttagtatgctcatgatagattctcaacagggctcaatcaagcagacctttgcaaaactgggggtgcctctcaggctttggtgcgtatgcacatcacacggggattttgttaaaatgcc

SEQ ID NO: 152091 - DNA, 346 bp, Homo sapiens
aacagctacaccaacctacatctccaccaacagtgtactagggtttcccttctctccacatcctcatcaacacttgctatttcttgtgtttttgataaagccatccttacagatatgagatgatatctcactgcagttttgatttgtatttctctgataattagtgatgctgagcacctttccacataccttttggccatttytatgccttctttggagaaatacctattcaggtcctttgctcatgtttaaaaatagggttattcgggggtttttcttgctgttgagctgtgtaagtttcttacatattttggatattaacctcttacaagctatatgcttcaca

SEQ ID NO: 152092 - DNA, 518 bp, Homo sapiens
tcagtgacataaacccattggcctgaggccacacatcaaagagccctcctctactccctcaaaattagccaaacaaaaaatccagttgaatcctctgtcacaaactgtaaaacatgggatgattttatgtagtacaggacttttttattgcttatttataggtttactagaagaatagaacttataaaatatatacatagatttatatagagagtgcttcttagcatatagaaacrttaaaaatccatgacaggtggcaataattgcatggtttcccttttaaaaacaaaccaaccaactggtttagagtcctgtatatgtgcaggagtgtagaatgtgacactgtggttccattttatggtttcagtgctctaattgaaaagtgtcacatccatactttattattctccaaacatctaaaagagtagagattgcaaatttgaaagatgacatgcacaaactcatacacacacatacaaagcccattaaaattgtaattccacaatactgttgctgca

SEQ ID NO: 152093 - DNA, 518 bp, Homo sapiens
tcagtgacataaacccattggcctgaggccacacatcaaagagccctcctctactccctcaaaattagccaaacaaaaaatccagttgaatcctctgtcacaaactgtaaaacatgggatgattttatgtagtacaggacttttttattgcttatttataggtttactagaagaatagaacttataaaatatatacatagatttatatagagagtgcttcttagcatatagaaacattaaaaatccatgacaggtggcaataattkcatggtttcccttttaaaaacaaaccaaccaactggtttagagtcctgtatatgtgcaggagtgtagaatgtgacactgtggttccattttatggtttcagtgctctaattgaaaagtgtcacatccatactttattattctccaaacatctaaaagagtagagattgcaaatttgaaagatgacatgcacaaactcatacacacacatacaaagcccattaaaattgtaattccacaatactgttgctgca

SEQ ID NO: 152094 - DNA, 612 bp, Homo sapiens
catgcagcgtttgcactggaaggggacttgaggattgctcacatctgatcttgcattgtatagatgtgggaatgaaatgtgattaattgcacccagttgaatagcagagagggcaggaaagggactcaaatccaaagtgattactggtcaagtttatactctataatcccccactgcctctttctcacttagcaaataaaacacctacaattaagtcatcaattttagggattaaaaagtcctcagtgcaaatgggacctccaaccatggtgggctgagggagaaacagagctggttcaaccagtctctttccgtcccagttggggcacattattttacctcctggtgcctccactggaaagcaaatatgcccttcaaccatagaggaataacccgaggattaataagctaatgcagagggcgatgaacgctacttcatggtgtgtggctttgtaagtgagctaaatcaacatcagcaggcactgcaaccacagaacatgaaccctgatgagataatttccttcttcactgagaaggccctccaacctaatgaaaagctatagatccctcctggagacagcacagtcygcaaaaaaatgctatagcgcttat

SEQ ID NO: 152095 - DNA, 547 bp, Homo sapiens
gattctgtatttttaaaaattatggtgcatatacaaaatgaagaaatttatattttttcttaacaatctgacatgaaaactaagcacatgaaaatcttgaccttataaaagggtattctttttggaattgtggatgagggagggaaaaaaaggactgagacatggcaaagaaaaacaatccctccacacattctcatttttcaaagtgctgaaattcccaaacagcctgaggatttctctataagctgtctctgcaacaaaaatttctcttctagtttgaaatcaaacctgaggaattccaggcttaaaggaaaactctttctctctctctctctctctctctctctctstgtgtgtgtgtgcgtgtgcgcatgcttcagaggattcaacaactccaccatcaaaggcaggaattaaagtcactccttttaagactaagtgacattttggggagcaatcttgccattttcccccaagccccagtatgtggacttagcacctccccaagagggtgatgacacatctgcattgggcacagtccaagctt

SEQ ID NO: 152096 - DNA, 277 bp, Homo sapiens
aaggcataagaatgatacggcggactctrgggactccaggcaaagagttggaggagggtgagggataaaagactacaaactgagtatagggcatactgcttgggtgacgggtgcaccaaaatctcacaaatcaccagtaaagaacttactcatgtaaccaaacaccacctattcccccaaaacctatggaaataaaattaaaaaataagtaatttaaagaatgctttttaaatagagacttttgcccacaaaaaaagcattttgggaatgaaagctt

SEQ ID NO: 152097 - DNA, 600 bp, Homo sapiens
aacctgaaacattctgcccagccaaaataccgttccactaactttgccattttacgagggtatccattcttttacactccacaatcaaaacaccattttgtaaatcactgatttcttagtgctctaaatacaacaacttagtcactggaaagaaagaatgaccctaaaaccaaatcaatatcaggccaattatttattcttggtccttggacatgaatctattttgtggaggctagggagagtcaactgattgcattctgcttttcagtagactttttcttctgggtcaggagaggaaggaggcagatatgttctgggaagagggataaaatctaggagacaattagagacctcaaaagattctagtttttaatcttttatttaataaacaccatgtgtcagacgttgttctgaggrttttatgaatatttagtcacttaatcttgctactaatgtgtattagttcattctcacactgctataaagaactttctaagactaggtaatttataaaggaacaaggtttaattgactcacagttccaaatggctggggacacctcaggaaacttatgatcatggtggggaaggggaagccagg

SEQ ID NO: 152098 - DNA, 448 bp, Homo sapiens
accacaagatgtgccaacagtaattaagaacttctgaggaagagaggaaaacccgcaggctttgctggagaaagagggtgtacttagcttaaccctcctataactttgtaacagaaggcaaagaaaattgaggcaattctcctttaagtttactgatgctaaaacgcaagaatttgttttactgccatacactagggtaaagagccagtaattatgcctctatacaaaagcatgggagaaaatacggaccttctagtgtgcagcagacctgggttcaaatgacagcaacactttgaaggagtttcctcttccaaaaagtgaggataaagccattgcattctacaggagttataataactgcctgcacattgtctaagagygcctggcactgtgctcaacggaggtgctcaacggaggtgttactccactccacctctcagactatggg

SEQ ID NO: 152099 - DNA, 546 bp, Homo sapiens
ctttcttggaggaaatcaaatcatcttatgaccactagagggcagtagcaacttacggatgcaataggacaaacaatccccccttcgccccgcccccgcaaaggtaagttgcagatgatcggctaaaactggcactcatttaacagatgaggaaactgagtctcagggagggcaaattgttttttcaagatcacacaaaagatgagtggtaggtttgcatctggaagctgaytcaaagtttgaaacttaattacaaatgctaccgtaaaacagaaaatcaaatttaggcatcagaacttaaagaatttgtagtagatgaaaaatagtcatatcgctggcaaaaaaggaaaaaaaaaagaaacaaacaaaagagaaaaaagaaagtgaagactaaatattttgcttattctcatgcgtgcctagaaaggacatcctgggactccaccactggtgaagaaaatcttaacaatctaggggaagaggctgttaccagagcagcatctgaaagccaggacattgcaagcgaaaggtggcttctggagggga

SEQ ID NO: 152100 - DNA, 546 bp, Homo sapiens
ctttcttggaggaaatcaaatcatcttatgaccactagagggcagtagcaacttacggatgcaataggacaaacaatccccccttcgccccgcccccgcaaaggtaagttgcagatgatcggctaaaactggcactcatttaacagatgaggaaactgagtctcagggagggcaaattgttttttcaagatcacacaaaagatgagtggtaggtttgcatctggaagctgattcaaagtttgaaacttaattacaaatgctaccgtaaaacagaaaatcaaatttaggcatcagaacttaaagaatttgtastagatgaaaaatagtcatatcgctggcaaaaaaggaaaaaaaaaagaaacaaacaaaagagaaaaaagaaagtgaagactaaatattttgcttattctcatgcgtgcctagaaaggacatcctgggactccaccactggtgaagaaaatcttaacaatctaggggaagaggctgttaccagagcagcatctgaaagccaggacattgcaagcgaaaggtggcttctggagggga

SEQ ID NO: 152101 - DNA, 542 bp, Homo sapiens
ctagttatctactcctgtatatttatccaagagaaatgaaaacatgaagacctgtatacaaatatttgttgcagctttatttataatcagcaaaacctgaaagaaacccagatatccactggtataaacacactgcatagacagaactgcacaaacacacggggatgtgtccatacaaaccaatgttactagcaataaaaatgagtgaactgttgagagacgcaacacgaatgaattccaaaagcgttatgctaagtgaaagtagtcaaacaaagtcctatgttctgtgcaattctatttatataagattctagaaaaagcaaagctgtragggcagataccaggttagcggttactagggtctgaaggtaggagaagggacttacaaatgggcacacagaaactttttggggtaacagaaatattctatatctggattgtggtgatggatacatgattgcatatgtttgtcaaaacacatagaattatgcatcctttttaaaaaggtgagtttttaaatgtaaattatacctcaataaacc

SEQ ID NO: 152102 - DNA, 542 bp, Homo sapiens
ctagttatctactcctgtatatttatccaagagaaatgaaaacatgaagacctgtatacaaatatttgttgcagctttatttataatcagcaaaacctgaaagaaacccagatatccactggtataaacacactgcatagacagaactgcacaaacacacggggatgtgtccatacaaaccaatgttactagcaataaaaatgagtgaactgttgagagacgcaacacgaatgaattccaaaagcgttatgctaagtgaaagtagtcaaacaaagtcctatgttctgtgcaattctatttatataagattctagaaaaagcaaagctgtaagggcagataccaggttagcggttactagggtctgaaggtaggagaagggacttacaaatgggcacacagaaactttttggggtaacagaaatattctatatctggattgtggtgatggatacatgattgcatatgtttgtcaaaacacatagaattatgcatcctttttaaaaaggtgagttkttaaatgtaaattatacctcaataaacc

SEQ ID NO: 152103 - DNA, 390 bp, Homo sapiens
  misc_feature (1)...(390): n = A,T,C or G
gtagaaatatggtgtgtgtgtgtgtgtgtgtgtgtgtgtgtgtgtgtataatttatagcaatgagcctatgcagcatcaaaccttggtttctagataccattctccactaaaaggacttttcctcagaactttccttgatgaaatggatgattcaaggctggggcagggaaaacgcaaaacaaaaccggaacgcctggtgttagaaagttagaaactgctcagaattatggggatatgtcaaaaggacacagaagtcaacttgaataaggctctcactagccaaatctggggcaacttgagcatcaaaataatgacagtaatgaattayaacccattgaatgaaacagaaatctgtgggtccatattgacttaaataagtcaatnnnnnn

SEQ ID NO: 152104 - DNA, 261 bp, Homo sapiens
ctatccttgcagagaaccctagagaaagatgggcargctgatactacataggaggatgtggagataattgaagctaacaggcatacgataagatgctcaaagtcattagtaatttaaaaattgcaaattggagcaacaaatataacttctattgctgatctggcacaaattagaaaactaaatcatgacaggtgtttgcagaagtgtgggggtggtggcgccctcatgcacagttggtgtgacagtagacaggtgcagcca

SEQ ID NO: 152105 - DNA, 261 bp, Homo sapiens
ctatccttgcagagaaccctagagaaagatgggcaggctgatactacataggaggatgtggagataattgaagctaacaggcatacgataagatgctcaaagtcattagtaatttaaaarttgcaaattggagcaacaaatataacttctattgctgatctggcacaaattagaaaactaaatcatgacaggtgtttgcagaagtgtgggggtggtggcgccctcatgcacagttggtgtgacagtagacaggtgcagcca

SEQ ID NO: 152106 - DNA, 511 bp, Homo sapiens
catcatcatggtagccagcacaagaggtttgtagcacataaccaatgagttccattaggaacatatcagttaaggctgggtcattgggaccaatttattgcaaacaagtcccttttctatacaactatggtaggttgacattgttctgagggaatccaacccatgcctccagcactatttgactccagtctagggtatgattccactgcccccagaaraaggggacttaagtgtaccattgatgctgtcagccataaaaagccattctagatttgaagaaactcattcttagagtgagagtactggggctttatgtcttagattatcatttctttgtccagtagaagggtgagcaatgctattcccctttcctatattacatttccatgaaaaaggctttccatgtccagattcattgagagtcttattatgggccatgggttatgtcttttctggtaacacctgacatctgtgcccctaacctactccttaaggtcttctatgaaggctt

SEQ ID NO: 152107 - DNA, 511 bp, Homo sapiens
catcatcatggtagccagcacaagaggtttgtagcacataaccaatgagttccattaggaacatatcagttaaggctgggtcattgggaccaatttattgcaaacaagtcccttttctatacaactatggtaggttgacattgttctgagggaatccaacccatgcctccagcactatttgactccagtctagggtatgattccactgcccccagaaaaaggggacttaagtgtaccattgatgctgtcagccataaaaagccattctagatttgaagaaactcattcttagagtgagagtactggggctttatgtcttagattatcatttctttgtccagtrgaagggtgagcaatgctattcccctttcctatattacatttccatgaaaaaggctttccatgtccagattcattgagagtcttattatgggccatgggttatgtcttttctggtaacacctgacatctgtgcccctaacctactccttaaggtcttctatgaaggctt

SEQ ID NO: 152108 - DNA, 580 bp, Homo sapiens
tggctattgtcttctttaaggtgtggttcatcttctctgtttttcccatctattgtggtctccatgatgaatgcaatttccatttaatctataatgcttgacttatcttctgggtaacttctgaaataatggaagaacttgtagctctgtatagtgcatgggagtccaaatcgggattatttccttcaacaatgctttggctacatctgtagcccttgagattttgtggggtatgcctcgacacatccaaaaaaatgtgtctacaaataccaaaagaaatctgcaatttccactggccatgggcatttgaatgaagtctacctgccattcctcaaaagagcatatccatttgtattgtatcctctgttggggggacttcattcagtcttggaaatattctcagcacataaaacacatccttgtgttattttatgaatcrttttctggaagtgtgtgggcttcagagtagggccacactaggtaagcaagagcatctctcctataatatgtctcctcatgtagatgtcttaaaattaaataaaccatggccttagggagtagaattgttccataagcatca

SEQ ID NO: 152109 - DNA, 580 bp, Homo sapiens
tggctattgtcttctttaaggtgtggttcatcttctctgtttttcccatctattgtggtctccatgatgaatgcaatttccatttaatctataatgcttgacttatcttctgggtaacttctgaaataatggaagaacttgtagctctgtatagtgcatgggagtccaaatcgggattatttccttcaacaatgctttggctacatctgtagcccttgagattttgtggggtatgcctcgacacatccaaaaaaatgtgtctacaaataccaaaagaaatctgcaatttccactggccatgggcatttgaatgaagtctacctgccattcctcaaaagagcatatccatttgtattgtatcctctgttggggggacttcattcagtcttggaaatattctcagcacataaaacacatccttgtgttattttatgaatcattttctggaagtgtgtgggcttcagagtagggccacactaggtaagcaagagcatctctcctataatatgtctcctcatgtagatgtcttaaaattamataaaccatggccttagggagtagaattgttccataagcatca

SEQ ID NO: 152110 - DNA, 514 bp, Homo sapiens
tgggttaggcactgtcagatgaatatcttatactattttattaatggccctcaagttctggacaaactgataattcatcacagtgcagctttttcacaagcaggataggagggttatgtagggacctacaaaaatgaatcagtttctttttcaaacatttttgtagaagaagttgtattccttctaagtcttcttttttttttaatagatattgctttctccaggcaccctatccccctcttttatttctatgtgctttgggtgtgtgtttttggcttttccctgtatctcatytgcccaaatgcaattacgcactcttttatagttttctggaggaaaggcttcttcttcccctttctcagagtaagtgagcagcatttgtagtcacagcacctattccagcaggacccgtaagcacaattgctgcttctctaggggaagaataacttaagcatttaatttacatagcaggtcccatcccagcagggggattaggcagtctgacatatagaga

SEQ ID NO: 152111 - DNA, 441 bp, Homo sapiens
cttccttgtttcataaattccatgaaagcatttcaaaaatctctgtgatgttttatatgaaatttagcagcataaaatctggacttctaacattttacacacattaactaatttaatcctttcgtcgatactaagaagcaagtgttattattatccccattataaagattaggaaagagagagaggctaaggttaccatactagaaaacagtagagccaggatttgaacccaaatagcttgactgcagaatctaagctcttagccagtttttcaacaaggagagaaattagccatggcaattatatcatcattsacccagtgaccagtcatggctgagcaggatgagcacaggagcaggagataatgtcggcttcagaatggctatgtcattctcagcaagttactaaatcactctgagtttcagtttactcctctataaa

SEQ ID NO: 152112 - DNA, 408 bp, Homo sapiens
gctctgcaaaatatctcaagcactgatcttaggttttacaataatgatgttaccccgaggagcaatttggggaggttcagactcttggagccagaggctgcatgacccctaaactgtaatttctaatcgtgtagttaatttgttagtcctgcaaaggcagactggaccccaggcaagaagggggtctttttggaaaagggctgttaccaattttgtttcagtcaaaccatgaactgaattccttcccaaagttagttcggcctatgcccaggaatgaacaaggacagcttaagggttagaagcaagatagagttggttaggtcygatttctttcactgtcataatttccttggttataattttgcaaaggcagtttcagtttctttatctataaaatgggggtaatta

SEQ ID NO: 152113 - DNA, 408 bp, Homo sapiens
gctctgcaaaatatctcaagcactgatcttaggttttacaataatgatgttaccccgaggagcaatttggggaggttcagactcttggagccagaggctgcatgacccctaaactgtaatttctaatcgtgtagttaatttgttagtcctgcaaaggcagactggaccccaggcaagaagggggtctttttggaaaagggctgttaccaattttgtttcagtcaaaccatgaactgaattccttcccaaagttagttcggcctatgcccaggaatgaacaaggacagcttaagggttagaagcaagatagagttggttaggtctgatttctttcactgtcataatttccttggttataattttgcaaaggcrgtttcagtttctttatctataaaatgggggtaatta

SEQ ID NO: 152114 - DNA, 345 bp, Homo sapiens
caaaactggcctgtccacagggggaaattaattgcatctttttttttaatgtactttaagttttagggtacatgtgcacaatgtgcaggttagttacatatgtatacatgtgacatgctggtgcgctgcacccactaactcgtcatctaattaattgcatcttaatcagacagaattattttgtatgtctggacaataatcatttccatctctcagttttctacaatttagagggttataaagtagctcaaaaaacaaaaaaagggggtgcgasgcaaaactcttatagaatcagataacccagaagcagcatataatatttcgttgaaagtacacccacccagt

SEQ ID NO: 152115 - DNA, 470 bp, Homo sapiens
ctcccaacagatccctccctcgacacatggggattacaattcgagatgagatttgggtgggggcacagagccaaaccacatcagcgctaaattaatagtaaagaaaatcatagggtacaaagaaagtctacctagtaagcaagtcaaaaaaggcttcatagtggggtagctctagacctgggcctggagagataaaaatttgtcttcagaaaggaagagggaatgacaaaatataagtagcatttcaaggcataatgagagtcagatgaaaataasacaatggttggagtgctcaaagaggcttttttaacttacaaaagtagtatatcctcattgtaacaaatgaaacaatacaaagcatttaattaaacaatataaggcattcattacctccccccacccccttcctccatgcccacttccccaaggaacagctgaacagcctggttaaatgatgtaaaaaatatttt

SEQ ID NO: 152116 - DNA, 542 bp, Homo sapiens
ataccaacaagttttaagactttttaaaattattaaagtggatttaaaattattaaagtggatttctggattaaaactttatctagcatractaaaattttctaatgacaaagatggtttagtaaaagtcaaataaacttttttcccctaagcatttattcaagtatttattaagcacctactacatgtcaggtatgtgcaagactctgagaatacagaaataaacagaacgacatggtccctgcccttttatgtggcacttacagcctggtagagaaaccatctttaaaaaagtatcacacaaataaatctgttactacaaatcctacttagtcctgaaacaagaaagtatagacagtacaagagagaaaaataagtggactgttttagattgggggctcagacaaagtggcctttaatccaagaaggtagtgtggcacagtggggaagtcctgaattggggttcagaagctctccaatcacatcctggctctgcaacttgcaaactatgtgctcctggacaaatggcttaagttatttaa

SEQ ID NO: 152117 - DNA, 575 bp, Homo sapiens
gaattctaagaaacttggggtaggggtttgytaccccagaaaaggttcatgtttgggtctgctaggtgcctaggagtttacaaactcaatatgcctttaagttggtgtattggctggaggtttcttagacctccagctatatgaatttatacccaaacctactttgaggaccagcctctgatgaacagattcttaggagagatgttgtttccccttgacacaaagccagtgttcttgacctcttcctttacagggcagatttgttgttggttggttggttagttttggtctgtttactaaagatatgtctcttcatgggttctgggcttgttctctcagggtatactctccttcacctctaagttttatgaaaccaaaggattggctcctatctcttgtgtgatacctttacattccaagggtctgggttactgcacagatatttaatagattttgactaaccattagctttagtaactacttaatgttctggatttagtaaccactttagtggtctggattttaatattttatcctgtattttgaagtgtttttagtgagagtgtttcaaagat

SEQ ID NO: 152118 - DNA, 575 bp, Homo sapiens
gaattctaagaaacttggggtaggggtttgttaccccagaaaaggttcatgtttgggtctgctaggtgcctaggagtttacaaactcaatatgcctttaagttggtgtattggctggaggtttcttagacctccagctatatgaatttatacccaaacctactttgaggaccagcctctgatgaacagattcttaggagagatgttgtttccccttgacacaaagccagtgttcttgacctcttcctttacagggcagatttgttgttggttggttggttagttttggtctrtttactaaagatatgtctcttcatgggttctgggcttgttctctcagggtatactctccttcacctctaagttttatgaaaccaaaggattggctcctatctcttgtgtgatacctttacattccaagggtctgggttactgcacagatatttaatagattttgactaaccattagctttagtaactacttaatgttctggatttagtaaccactttagtggtctggattttaatattttatcctgtattttgaagtgtttttagtgagagtgtttcaaagat

SEQ ID NO: 152119 - DNA, 559 bp, Homo sapiens
atcatcatttccttatttttctttaaaattgtattacctagttatgcatcccccaaactatatacaaccatttagttctgctgtttaatttcatatacatgaaattacatagtgtgtataattttgagaatttcaacatctgctcaaagctatctttatgggacttatacatgttttagatatagctcattcatgttcctggctttattagttcattatgtgactgtagcattctactatttacttacactcgagttctttctggtgtttggctattataaacagttctgctttgaacattgttgtccacataccttgaagaggtacatgcccaagagtatctcaagagtacacttaggaatgaacttgctggatcataggacaggcccatcttcaactctactagataatgacaaaccttcctaaattgatgcatagtttacatttccactagcaatgagttttgctacaacctccccagtgactggtattgtcggattttrtaatttttaccaaccagatgagaatacattagcatttcattgcagaattatttctc

SEQ ID NO: 152120 - DNA, 584 bp, Homo sapiens
tatagacctattctcaagcagatgtttctaagaatccattacaaggtcaatataaaattaatggaaaaacaattccattaagcttacccatggcaaagccatcatcagtaaaggcagctccaattttattttttttatttaatttttccttgcaactaatggaatgctctacaaagttgagggtctaaaaagatgtaacaacatgttagaaaaacaattttgctamgaaaatcttcagaattcctataacagacattttaaaaattataaatagaatcactataaatagaatagaatagaatctagattcctgtccttttcatctgaaacatttgccttaggtaccctcttggtgaagatacaatctatacaagtgtatcttcatggatctcctttccaagtcctttaaatatgggcactccctcaatcactacttagcccaagaacagtgccttgtatatctcattataaaatattatgcacattttacagagaaggacaccgaggcttgggagatttattatctcacccaaagtcatatattaagtgaatgctggagttagcaaagtaggcctgctttattt

SEQ ID NO: 152121 - DNA, 528 bp, Homo sapiens
tggctgattcagtttcacatataacacagcaccttcaacatcaggctcttcattctatttctgtggccaaggtatgcagcttattatgtatttagcataagtatgttatcttttttgtttgttctttcattgttttatatgtgttttctggtttaacctgtttattccattccttcaaacataatatgctcggttatttatctccatagtattttacaatttttacttcaagttattggcattatctttactgtgaaattgcagcatgtaatacattaatacacttctaaaaagacattgcacttttgaaattgatgcatcatttaaaaaatgatttcttagtaaattaacatggaaattttaaagtatgcctaatacatttgctgtttctgacagtactaagggatcatattacagaagtaaagtataaatgtcagaagcttaaatggggaaagtatttgtgtrtgctctcttaaattgaatcatggaaaagataatcaagaagtttttcttctgagtcttttgtta

SEQ ID NO: 152122 - DNA, 463 bp, Homo sapiens
ttggtagaccagaaaagatgattaattttattacctttagcacaatgaattttgtgattttttttttaacagttattacaaggaagcttttttcttttctctcttgcmtgttctcatgccctttcctcctttgttgctggtttccataaattttatgctttaagttgcatattcatgttccttatgatggtaccatcaatcattagttttagattttcttttcaagagtattaaccttaaggtattggtgaaaataaagacttagaatttatgtaactgcttctgaccaaaaaactattggtttaaaatggagcatagacatgtagggaaacaatacaattgcaatatcattttgaaaaattaaagtatcaaatcttttgtgaatagcatttgctggacaaattatgcaaagaaatagagaaagatctgcgactttctgtgcatactcatttaaagctggatg

SEQ ID NO: 152123 - DNA, 588 bp, Homo sapiens
caagcatgttttagcttcctatgcaatgacagatgagcaacactaaaaagcactaaaattcctgctttgtttaatcaaggtttccctttatgcaagcaaatggaggcattacttgttattttttatttattaagttttagtgctgccaaactgaccttaggtagagtttatgccagttctatccttgttccttagcctcaggtgacaccaacacaggggatctcaaagcaagggaggaaaatcttcacccttttttttttttgagacggagtctcgctctgtcgcctgggctgaaatgcagtggcgcgatctcggctcactgcaacctccacctcccgggttcaagcgattctcctgcctcagcctcccgagtagctgggactacaggcatgcgccaccatgcccggctaattttttatagttttagtagagacgaggtttcgccgtgttagccaggatggtctcgatctcctgacctmgtgatccgcccgcctcagcctcccaaagtgctgggattacaggcgtgagccactgtgcccggccaatctttacctttaagacttgtctttagatttactgcaaccttct

SEQ ID NO: 152124 - DNA, 593 bp, Homo sapiens
aagcttacacttctttggcctctgctgccattaatggtggctagcgtgtcaggagagcaagcatagtggttaagagcgaacgcaggctttgcagtcaaagatctgggtttaaaattctgccaytcatcagctgtgtgaccttaggcaagctacttaacttctctgagtcttagcttcctcatctgtaagcacatactatacaaatacctcccctctgttgtgaaagctgagtggccagcctagtgcgtggcacttttatgtgcctaagaaaggccactattttcactcttaaaacatgcagctgtgaccctgatctgcctcctaggtgcttctccctcccccatgacaaactcacactcctggatgctcactactgtcatctggtttcccactcggtacattcacttgtttagcttgctatctatatcatcattctaaagaaaagtacttttttctttatataccaaattatgcatactttactcctattccctcccactgtctttaccccaatttgagaaaatactacttccacctccaattcgggcttctaggatcaggagttttaagatcaactttcaggatcagtagtt

SEQ ID NO: 152125 - DNA, 593 bp, Homo sapiens
aagcttacacttctttggcctctgctgccattaatggtggctagcgtgtcaggagagcaagcatagtggttaagagcgaacgcaggctttgcagtcaaagatctgggtttaaaattctgccactcatcagctgtgtgaccttaggcaagctacttaacytctctgagtcttagcttcctcatctgtaagcacatactatacaaatacctcccctctgttgtgaaagctgagtggccagcctagtgcgtggcacttttatgtgcctaagaaaggccactattttcactcttaaaacatgcagctgtgaccctgatctgcctcctaggtgcttctccctcccccatgacaaactcacactcctggatgctcactactgtcatctggtttcccactcggtacattcacttgtttagcttgctatctatatcatcattctaaagaaaagtacttttttctttatataccaaattatgcatactttactcctattccctcccactgtctttaccccaatttgagaaaatactacttccacctccaattcgggcttctaggatcaggagttttaagatcaactttcaggatcagtagtt

SEQ ID NO: 152126 - DNA, 593 bp, Homo sapiens
aagcttacacttctttggcctctgctgccattaatggtggctagcgtgtcaggagagcaagcatagtggttaagagcgaacgcaggctttgcagtcaaagatctgggtttaaaattctgccactcatcagctgtgtgaccttaggcaagctacttaacttctctgagtcttagcttcctcatctgtaagcacatactatacaaatacctcccctctgttgtgaaagctgagtggccagcctagtgcgtggcacttttatgtgcctaagaaaggccactattttcactcttaaaacatgcagctgtgaccctgatctgcctcctaggtgcttctccctcccccatgacaaactcacactcctggatgctcactactgtcatctggtttcccactcggtacattcacttgtttagcttgctatctatatcatcattctaaagaaaagtacttttttctttayataccaaattatgcatactttactcctattccctcccactgtctttaccccaatttgagaaaatactacttccacctccaattcgggcttctaggatcaggagttttaagatcaactttcaggatcagtagtt

SEQ ID NO: 152127 - DNA, 495 bp, Homo sapiens
tgctggatgtagtatgtgagagaaagtgggaaagccattgggcaaatggtcctgtgatttactgagacagaaaaccctggggagaagcaggttgttggtggtggcgcatcaatagtgctgttcaggctgttgtgattgagatgcccgttaggcaatcaagtggaggtttcatgtgggtacttgtatataccactcragtttaggaggagactggggctgaaggtataaatccatgagttcaccaacatggggacgttatttaaaccaaaagagtagatgagatttcttaggaatctaatacagaaaggaaagaggaaagcttggtggattgaggcccaagcaagatccagcagctaatggtgtaggaggaatatcaggagactaatagaccaccctagaagccctatgaatgggaaacttggaggcactactatactaaaagccaggggacaaaaggtttcaaaaatgaattgatccacaatgtcaaatgcagct

SEQ ID NO: 152128 - DNA, 617 bp, Homo sapiens
aagaacgctattgaagtacattctaaaatgatcccacctgcaatttggatttttggagaatcgggatcggtgtaaaattctacatgcatacacgtatttgcacaagaatatttatagcaacgtggtttttaataggaaactatctaaatgttcattacaagtgaattacataaagctcaatacatccatactacgaatcactgaagagctgctaaaatagatgaaatatatttataatggcatgaacaaccgacacaagacagttgcagagtaatgtgtatttgtgattacatttatgtttttaagttatacaaacgcgtatgtgcctaygtgtatgtaaattcataggaagacaaatcagaggacggtggttacctggggaaaagcatgtgttggtgagtaacaggattttcaagttttgatgtgtctacttatgtgttttgaatccttaacaatgagaatttattagggttttactcttgtaatcttaaaaagtaccgaaaagaactaatcaatgtaggcaaaaggtctattgaagagcattcttctgaggtcattggatctgccctgagttaaatgtttattgagtgcccactgggtaccaggcaccaggctag

SEQ ID NO: 152129 - DNA, 449 bp, Homo sapiens
tttaatgaatactactatatccaggcactgaacctgggtcagattgcacaaataagccacatgctctatgcccaatgaatttctgatctattggataatagtaacacacaagcatatactagagtgtgacatatgatagatgtgtgtgtagtgtactgttgtgggcatagaataaaaaaagaaattttttccaaggagggggctgatgaaaaagccttacagatgcagggttttatagatgatgcctctacacaaggttctgaagagtgattccgagtttgccatgyggacaagtacactacatgtggtgattccccatcagaagcatttgattaaccaatttcattaaccttccattccccaaccctgtcaattctttgttgtctggagctttacttctacaaagttaccattttcatatgaaacaaggaacttttcatgagtgagct

SEQ ID NO: 152130 - DNA, 610 bp, Homo sapiens
gaattcccagctctgctccttactagctaagtagtctcaggcaagtcacttttttctgagcctcagtttcctatctgtaaaacagggataatactacctattatttaataggtgtcaggatttaaaataatatggataagtagctagtacacagtaacacattcaataaagtatacaacttttattactgatccccaaatacctctttttattgkgtttttttcttctttttttagatagcttcccaaggacagcgaacagaatgtcctatggaaacatagttcccatggggctacaaatattgccaattttagtgagaaattacgttcctgagtcaaaatattttccctatgtatcactgttctttgaacaatctatttttttcttttaaaccacaatgacaaaagccttctaaaactctgtggtttccagtgagcacaaattaagggaacttagatgctaagatacattagaaatcgtcatcaaattcttatccttggctgtatgtacaagggaagtctcatctccttggcatacaaggcttcttgcagcacagtcccaccatgtcctccctggactgctcctgccacccaagcacagcatgtgtttt

SEQ ID NO: 152131 - DNA, 623 bp, Homo sapiens
tcttttgtaacaggacactattagagacactagttattttaccaaggctttgactggaatgacatgttttcagacttttcagactgctttgaggaattgaggttgagctacagagctgataaaaattccttggaaaaaytggccaccttgtttttacaaggttcccaacctgtggtaagtaaaaatgtccctttctgataggcctaggaatcccaagttattttggtacctctagaaatgaggaattcattcaattcatacaggtatctgcaggcacaaataaatctttggctgggctcaagatgcttttaaaaggtctaatctgagattccttattaaaaaaacatccagcaaagccaattttttaaaaaggcctatatagcaaataattattcatgttatgtttcatgcaaacaattaggcctagtataaataaaaccaaagcttattttgcaaataaattggtcctgctatgatttgtctttggtaaaaatgggggaaaactggagagggaaaaattatgtttcaaaaaaaacctatagcatgcctgttattagattctagccttggctgggcacagtggctcacacctgtaatcccaacattttgagaggccgaggcag

SEQ ID NO: 152132 - DNA, 632 bp, Homo sapiens
caagggtgtaaaataggctcactggacactccatcttccgagttcaattgattttcctgcctcagcctcctgagtagctgggattacaggggcctgccaccacgcccagctaatatttgtatttttagtagagacggggtttaaccgtgttggccaggttggtctcgaactcctgacctcaggcgatccccccaacttggccgtccaaagtgctgggattacaggcatgagccaccatgcccggcccatctttgtctttttttactgttgttgctttaaagtctgttttgcctgctacaagaatagctactgctgcttgcttttgctttccatttgagcggaatatctttttccatcccttttccttaggtttatgtgagtccttaagtgttagctgagtctcttaaagacagaagatacttggttgatggatttttatccattctgccrttctgcatcttttcaagcagagcatttatgccatttacattcaaagttagtattgagatatgaggtattgttctattcatcatgttagttgttgccttaatacttttctttttcattgtgttattgttttatacgctctgtgagatatatgctttaaggatattctattttggcatatttca

SEQ ID NO: 152133 - DNA, 370 bp, Homo sapiens
tctattttggcatatttcaaggttttgtgtctatatttggaactcctttcarcatttcttgtggtgttatagcagtaacatttgtttgtctgaaaaagactttatctttcttctgtttataaaagcttggtttcactgaatacaaaatccttggctgacaattttgtttcaggattctgaagatgagaccccaatcccttctggcttctaaggtttctgcgaaaagtctgctgttaatctgataggttttcctttataggttacctgatgctttgtctcacagctcctaagaccctttcctttgtctcaactttaaataacctgatgaatatgtgcctaggtgatgatctttttgcaatgaattttccag

SEQ ID NO: 152134 - DNA, 416 bp, Homo sapiens
agaccaggtcatacattcttcctaagtactttcatcaatttttgaaattaaacccatagtagttattaccacattgctgcaattgactattttttcttytacttcacttcccctttagcaatcaacgacaaaacttggactttattagcaacataaattctgttatattatctggaaataacaatttttttaaaggagctatatgtatatttctgaaacttcttagaagaaatgactagaaaatattttctattatggtatcccttcatggggattgacagtaagaatggctgccactttctggtatgataaataaatttatgtgtgtgtgtgtgtgtatgtatatatatatatatatatatatatatatatatatatatatatatatatatatattatctcttaaagaaagcaag

SEQ ID NO: 152135 - DNA, 422 bp, Homo sapiens
ttccctcaaaccaagaccaggtcatacattcttcctaagtactttcatcaatttttgaaattaaacccatagtagttattaccacattgctgcaattgactattttttcttctacttcacttcccctttagcaatcaacgacaaaacttggactttattagcaacataaattstgttatattatctggaaataacaatttttttaaaggagctatatgtatatttctgaaacttcttagaagaaatgactagaaaatattttctattatggtatcccttcatggggattgacagtaagaatggctgccactttctggtatgataaataaatttatgtgtgtgtgtgtgtgtatgtatatatatatatatatatatatatatatatatatatatatatatatatatatattatctcttaaaga

SEQ ID NO: 152136 - DNA, 416 bp, Homo sapiens
agaccaggtcatacattcttcctaagtactttcatcaatttttgaaattaaacccatagtagttattaccacattgctgcaattgactattttttcttctacttcacttcccctttagcaatcaacgacaaaacttggactttattagcaacataaattctgttatattatctggaaataacaatttttttaaaggagctatatgtatatttctgaaacttcttagaagaaatgactagaaaatattttctattatggtatcccttcatggggattgacagtaagaatggctgccactttctggtatgataaataaatttatgtgtgtgtgtgtgtgtatgtrtatatatatatatatatatatatatatatatatatatatatatatatatatattatctcttaaagaaagcaag

SEQ ID NO: 152137 - DNA, 559 bp, Homo sapiens
tatgtgaaggtagttacaggagcacatgagaatagataaatcgtatttaaaaaaagaaaaatgaatatgaaattatggacagtaaagaaactctgaaaacactgggaagagtaattatatttttgggacacaatgtggaaacattcccatcataatattatattaaatcaattgtctattaaacaattgtctcaccctctatgtattgataagggagtcaactgttgaaaagaaggcgtagtaagtttccactaattagatattttaaaaaacacagccttttttttaaattctctctacgtgagtgcccctataaagggtaaacccagagttaggagtacagagagmttttcttaggggtactatccatctcttcttgtttatttgtggtcactgcactccaaggtcctcaaactgccaggtattcctatcaatttcagttcctgaaacatgcatacattcacttccttaaacatgtgtaaattcacttcctttgtttttcttattcatgaagcttccttcattaaataaaatttctgccattttttacctaattcct

SEQ ID NO: 152138 - DNA, 586 bp, Homo sapiens
ttttttctttcatggattttatcatgtcttagcttcaaacatattgtctacaaagaaaacactcaggtgtgttgcttggctttcaagaacacacacacaaacacacacacacacacacacacccctcactctcaagcacacacactcacacacatatgcacaccatgacactttatcagacctacttcttatcttctcactctccatcttgaattaaccacacaagtcaaaatggtctcacaactagcctttgggtttatcattgtactaacagagactaactaacccaagccctagaacatactctggactcagtccaagtttattacacagagctccatgtgtttctcaaatgccatgcttagggaacctctatacattttcacccttagaatgcttagaatgaactcattttatatcctgcttgcctaaattckactcagattttaaagctcactaatctccaacttatcactaacacttttacatactgttatacatagctatcttttcttttttctacagtattttggcatttagaagatagtattatgacctttagttgtttctagaagtagattataac

SEQ ID NO: 152139 - DNA, 586 bp, Homo sapiens
ttttttctttcatggattttatcatgtcttagcttcaaacatattgtctacaaagaaaacactcaggtgtgttgcttggctttcaagaacacacacacaaacacacacacacacacacacacccctcactctcaagcacacacactcacacacatatgcacaccatgacactttatcagacctacttcttatcttctcactctccatcttgaattaaccacacaagtcaaaatggtctcacaactagcctttgggtttatcattgtactaacagagactaactaacccaagccctagaacatactctggactcagtccaagtttattacacagagctccatgtgtttctcaaatgccatgcttagggaacctctatacattttcacccttagaatgcttagaatgaactcattttatatcctgcttgcctaaattcgactcagattttaaagctcactaatctccaacttatcactaacacttttrcatactgttatacatagctatcttttcttttttctacagtattttggcatttagaagatagtattatgacctttagttgtttctagaagtagattataac

SEQ ID NO: 152140 - DNA, 475 bp, Homo sapiens
caccagagggtgctccatgcagaggcagtaaaccatggtaatagacttaaaagtagcctgtggagccctaagttcaactctttagttactcttttaatttagccaagttgcctgtcattttagaataggaacaatgggataatacctgctttgcctaattgttaagattaaatgagttcatgtaagtgagagcacctagctctagtcctggcatgctattggtactctgtgaattccctccttcttttacttcttcctattctcccatttcttctccctgttgtagagttkactcccttggcttgggtcacgagaggcttcctcagagcaggatcacgtcacttgacctgtctcagggtcccttaaatctctaggggttgtcactctaaatatagcttttggatgaacaaggaaatgcaaccagtcagcagctcctagtggcttcacaaaagcagttactggcagggagcccgca

SEQ ID NO: 152141 - DNA, 603 bp, Homo sapiens
aagcttgtgttttggctacataaattaagttacaaaaacagtgctatctgtttatcagtttgaatttactacaggacaagtctgaaaaataccttattgtttttcagttactatcttaaacttgttctgcagaattactccatttttgtcctctgttaacattttaagaagattccagttctttttggacctttttagttgtaatggagcccagcccatgtaagtctaaaattctaatctccttttgttttcctctccctctcagacctatcaaatatagccagtgacttgtagcaaagagyatggtcttctaatttactctatttcccccatctgtttttcacaggcctttgaggcagggagcagggaaatggtgaaagtcaagtgactcttagcttgtgctgttgtcatcctctctggactattgctacatttctaggtaactctgattagctactgatgctatctgtaaggctggcatctatccttgggctaaattttgggaaatgaatgagaaaaggaggcatagttaaggtttgggtgccagggaagatgatattgatgtacatggacatgctggaagaaagtgagctggttcagggt

SEQ ID NO: 152142 - DNA, 605 bp, Homo sapiens
tacaaaaacagtgctatctgtttatcagtttgaatttactacaggacaagtctgaaaaataccttattgtttttcagttactatcttaaacttgttctgcagaattactccatttttgtcctctgttaacattttaagaagattccagttctttttggacctttttagttgtaatggagcccagcccatgtaagtctaaaattctaatctccttttgttttcctctccctctcagacctatcaaatatagccagtgacttgtagcaaagagcatggtcttctaatttactctatttcccccatctgtttttcacaggcctttgaggcagggagcagggaaatggtgaaagtcaagtgactcttagcttgtgctgttgtcatcctctctggactattgctacatttctaggtaactctgattagctactgatgctatctgtaaggctggcatctatccttgggctaaattttgggaaatgaatgagaaaaggaggcatagttaaggtttgggtgccagggaakatgatattgatgtacatggacatgctggaagaaagtgagctggttcagggtaagcataatccaactgagcatcatagaagctt

SEQ ID NO: 152143 - DNA, 465 bp, Homo sapiens
aaagatctactgcatattcaagcaggtttttgtgcagctggaaagcctatgaagcagacaccacaggaggccttacagcagtccggagaactaagacctataagacactaagaaactcaattacccccaaccattgaggcaagagagtggtgatgrgcaagcaattaggtggcaatcattagaggtaaagtagggaaagttgatctaatcctttctcagtgctcctcacacttcagtgtgctacacatcacctgagaatctcatgaaaatacaaattctgattcagtaggtctggggcagagcctgagagtttgcatttctagtaagtagtatagaaataatatagtatctaataatcagacaatatgtacactaatgacccatgacctatatttcaaatgacaaagatctatttcagaccagcctcaaaggaaatctgtgtcagggctctaaggatgaaattgg

SEQ ID NO: 152144 - DNA, 465 bp, Homo sapiens
aaagatctactgcatattcaagcaggtttttgtgcagctggaaagcctatgaagcagacaccacaggaggccttacagcagtccggagaactaagacctataagacactaagaaactcaattacccccaaccattgaggcaagagagtggtgatgggcaagcaattaggtggcaatcattagaggtaaastagggaaagttgatctaatcctttctcagtgctcctcacacttcagtgtgctacacatcacctgagaatctcatgaaaatacaaattctgattcagtaggtctggggcagagcctgagagtttgcatttctagtaagtagtatagaaataatatagtatctaataatcagacaatatgtacactaatgacccatgacctatatttcaaatgacaaagatctatttcagaccagcctcaaaggaaatctgtgtcagggctctaaggatgaaattgg

SEQ ID NO: 152145 - DNA, 465 bp, Homo sapiens
aaagatctactgcatattcaagcaggtttttgtgcagctggaaagcctatgaagcagacaccacaggaggccttacagcagtccggagaactaagacctataagacactaagaaactcaattacccccaaccattgaggcaagagagtggtgatgggcaagcaattaggtggcaatcattagaggtaaagtagggaaagttgatctaatcctttctcagtgctcctcasacttcagtgtgctacacatcacctgagaatctcatgaaaatacaaattctgattcagtaggtctggggcagagcctgagagtttgcatttctagtaagtagtatagaaataatatagtatctaataatcagacaatatgtacactaatgacccatgacctatatttcaaatgacaaagatctatttcagaccagcctcaaaggaaatctgtgtcagggctctaaggatgaaattgg

SEQ ID NO: 152146 - DNA, 559 bp, Homo sapiens
ggctaagcatgtccccagacggcaagccacagggtccacaagtgctggctgtttggcagctcgtgcacagccaggtctgccctcctcactgctcgcccaccgcagcctctcagggtggtccagccaggaggggcaggagccctcttcttcctttgccactcagggtgcatggggcgggcaggaggatcaggttggggggctgcaccctgagtaagtgcttgttctccctacattttaaaagctcacaggaaaatggagagtttttcctgaaagaaaacaatttcaattatttggtttacttttgattacctggrcaattaatatccctttattttaaaatatgacatcataaaatcaaatggactaggaacatggtgataaaatagaaaaatatctcttaaacttcctcagtttaggaagacccataaaattcccttttacttgcctcataatttaacttgaggttgcagtttatgagtcctccctttcgtagaggctccagctggcaaagacgtgccgtggagagaaacgcaccacctgttccctcagggtcccttct

SEQ ID NO: 152147 - DNA, 389 bp, Homo sapiens
catgggcagacctgtaccatggcaaatgttcaacgaagtccttcaggcagaaggaaaatgatgccagacaaaatctgcgtgtacacaaggaatgaaastcaccagaaatggcaaagatgcccctctgcctggttccaccaatgatgtctgcagaccaacgtgattgggactggaatccaaatcccatttgcccttttcctcagtaccatccgtgatgacaggaacctcatcttcctctgtttcttcaaaatcgctctggaatatgcccacttcattgtgatccctggagtccccacagtcctaaagctgggaagctgggcaggtgggagtcagctacttctaaagacaagtgaataagccttctttaagttaacttaagctaccgtgca

SEQ ID NO: 152148 - DNA, 389 bp, Homo sapiens
catgggcagacctgtaccatggcaaatgttcaacgaagtccttcaggcagaaggaaaatgatgccagacaaaatctgcgtgtacacaaggaatgaaactcaccagaaatggcaaagatgcccctctgcctggttccaccaatgatgtctgcagaccaacgtgattgggactggaatccaaatcccatttgccmttttcctcagtaccatccgtgatgacaggaacctcatcttcctctgtttcttcaaaatcgctctggaatatgcccacttcattgtgatccctggagtccccacagtcctaaagctgggaagctgggcaggtgggagtcagctacttctaaagacaagtgaataagccttctttaagttaacttaagctaccgtgca

SEQ ID NO: 152149 - DNA, 558 bp, Homo sapiens
ttgcttctctgggttttgttttattttgctttgttttttttgatgaggggtctcactttgttgaccaggctggtctcaaacttctggcctcaagctatcttcccaccttggcctcccaaagtgctgggattacagatgtaagccaccacayccagctgcttttctagttcagtttttaaaattaaaagtggaaaaatatggaaaaccaaatgaaaaactttttcctttctgacggtccctaaataataaaattggttctacatatgatataaattcaagtttgtgttaagtgatgggtacagtaaaaatatgaaatacagaattctgtgcaatttttagagagctttttaaaaaatattttcacaagtactgccattcctttcatacctctttaaaaagtaacaatccaccatgcgaaagatttgtgtacttctttccctaaccttgcaatgtcggtgataatgctattcaattctgagacggtatgatattgtaaagaattaacaaataagaagaaaacataatttttttgtcttagtcacattattttttaaggta

SEQ ID NO: 152150 - DNA, 558 bp, Homo sapiens
ttgcttctctgggttttgttttattttgctttgttttttttgatgaggggtctcactttgttgaccaggctggtctcaaacttctggcctcaagctatcttcccaccttggcctcccaaagtgctgggattacagatgtaagccaccacatccagctgcttttctagttcagyttttaaaattaaaagtggaaaaatatggaaaaccaaatgaaaaactttttcctttctgacggtccctaaataataaaattggttctacatatgatataaattcaagtttgtgttaagtgatgggtacagtaaaaatatgaaatacagaattctgtgcaatttttagagagctttttaaaaaatattttcacaagtactgccattcctttcatacctctttaaaaagtaacaatccaccatgcgaaagatttgtgtacttctttccctaaccttgcaatgtcggtgataatgctattcaattctgagacggtatgatattgtaaagaattaacaaataagaagaaaacataatttttttgtcttagtcacattattttttaaggta

SEQ ID NO: 152151 - DNA, 528 bp, Homo sapiens
gtctcactttgttgaccaggctggtctcaaacttctggcctcaagctatcttcccaccttggcctcccaaagtgctgggattacagatgtaagccaccacatccagctgcttttctagttcagtttttaaaattaaaagtggaaaaatatggaaaaccaaatgaaaaactttttcctttctgacggtccctaaataataaaattggttctacatatgatataaattcaagtttgtgttaagtgatgggyacagtaaaaatatgaaatacagaattctgtgcaatttttagagagctttttaaaaaatattttcacaagtactgccattcctttcatacctctttaaaaagtaacaatccaccatgcgaaagatttgtgtacttctttccctaaccttgcaatgtcggtgataatgctattcaattctgagacggtatgatattgtaaagaattaacaaataagaagaaaacataatttttttgtcttagtcacattattttttaaggtatgacctatctgcaaagtga

SEQ ID NO: 152152 - DNA, 528 bp, Homo sapiens
gtctcactttgttgaccaggctggtctcaaacttctggcctcaagctatcttcccaccttggcctcccaaagtgctgggattacagatgtaagccaccacatccagctgcttttctagttcagtttttaaaattaaaagtggaaaaatatggaaaaccaaatgaaaaactttttcctttctgacggtccctaaataataaaattggttctacatatgatataaattcaagtttgtgttaagtgatgggtacagtaaaaatatgaaatacagaattctgtgcaatttttagagagctttttaaaaaatattttcacaagtactgccattccwttcatacctctttaaaaagtaacaatccaccatgcgaaagatttgtgtacttctttccctaaccttgcaatgtcggtgataatgctattcaattctgagacggtatgatattgtaaagaattaacaaataagaagaaaacataatttttttgtcttagtcacattattttttaaggtatgacctatctgcaaagtga

SEQ ID NO: 152153 - DNA, 528 bp, Homo sapiens
gtctcactttgttgaccaggctggtctcaaacttctggcctcaagctatcttcccaccttggcctcccaaagtgctgggattacagatgtaagccaccacatccagctgcttttctagttcagtttttaaaattaaaagtggaaaaatatggaaaaccaaatgaaaaactttttcctttctgacggtccctaaataataaaattggttctacatatgatataaattcaagtttgtgttaagtgatgggtacagtaaaaatatgaaatacagaattctgtgcaatttttagagagctttttaaaaaatattttcacaagtactgccattcctttcatacctcyttaaaaagtaacaatccaccatgcgaaagatttgtgtacttctttccctaaccttgcaatgtcggtgataatgctattcaattctgagacggtatgatattgtaaagaattaacaaataagaagaaaacataatttttttgtcttagtcacattattttttaaggtatgacctatctgcaaagtga

SEQ ID NO: 152154 - DNA, 638 bp, Homo sapiens
actgtgagagtgggttgggtaaaatggggtggatataccccatcagaagcatggattagatacataaaatagtaacgtgtatacctatgtaacaaacctacacgttctgcacatatatcccagaacttaaagtataataaaaaataataataaatcaagctcagtaaaatctcaagggaatttcaaagtttccttatgtatagcacattttgggaataaaaggggaaaatctattagatttttaaataaattcattaacaaaaaaatagtaacatggatggatcttaaaaacataatgctaatttaaaacatagcaaacaataagaaacataatatcacataaaaaaacacacaaaacaatgacaatatatgttttggaaaaacacattgaaataaaaatcyagacactacatcactgacacataagaagaaaaggaagcactgatgagagggaagacatttcatttaaaaagtgtgaatccaagaatggatgagataagagggaggctaaaagaaaaagagtggtcaagagaaaggggtgtatatgcacacacatgcttgtgtgtgtgtgtgtgtgtgttttaatagaaggaagagttgtaagtgtgcggatgcaatgaagactccaatgcacttct

SEQ ID NO: 152155 - DNA, 565 bp, Homo sapiens
ttttaaatagttctactatattctaatttttttaaagaaatcactcctgagcttttatattttaactcttattagtaatagaattacttagaatgccacttcaccagaattgagaatttcagttrcagggaagtagctgtcaggtctctaaaattaaaatataagtaaataaataaggggaggggacaacacaatgctccctgagtacattaaaagtggctatttttccacttaaagatatttttaaagtatcatcattgccttctaccattgccattatttcaaaaaaggacattttgacaagaaaaaaggaagaatataacctcagaatgaagtggtagttctttgtatctcaggaagaacaggtcagtctttaaaaactgagattctacctttacagggaaatgtgggaattgtttctacctccccatctcactgtcatcctctagaagccctgggaaagcaacattctgaggataggtcttggagagtccctttggttttctgttctcagcctgaggatgaactgggaacttttctttaaaaacttgacactcatcccata

SEQ ID NO: 152156 - DNA, 532 bp, Homo sapiens
gcaataaaatttcagttttaaatgaaaatttaagtcttaatgtgctaaatgtgtttcatgtatgcctttcattctcttcctgtaagctctaatctttccatgaggagctgattgattaggatcagtttaagaaggtgttctagtttttaaaatgcagtaaaaccacccacatttgctgcagctcctttgtcaacttggtgatgttatacaaaaagttcacattattgccacttttaaacaatataaaaatcttcctattcatacacacatattcatagcaacatatgtacaataaacaaaaagtgaaagcaacccaagtatccatcaataataaatggataaacaaaatatggcatacgtatataatggaatattattcagccttaaaaaggaaggaaattctgacatgtgctacracatggatgaactctgaagacattatgccaagtaaactaagccagtcataaaaggacaaacatcatgaatccactcatataagatatcaagaatagttaaattcatggagacagaa

SEQ ID NO: 152157 - DNA, 610 bp, Homo sapiens
ttactttaaattgcattttttaaattaattaatttattttttgtaggtaagaagaaatgtcagaagcagttgagggaccagaaactgggtcctttacagttgaggagacattctgctgcatagagttttaaatgtttcctccagttgtctgccttattatccaggatttttatctcaggagtctccctttgattttataaactgacacagtttcctgttttgttatgaatgcacactgctctagtccttcaataaacccatcgcacattttcaccatgttgtctataggcactctttctgcagtattaacaatgtcatcttcattgtcactagtgtcataatcaccttgattcaggaccatttcagctacctcaccagtcaatgaaggaacaacyggagctttattattgatgttaaaaactttgttatccgcttcttccagcttactaacactttgaaggtaagttttttgcatatgtaagtatgtctgacgtcatttttttctcactcgatatacggaatccttcaaattcactaccttgttcatcatgatcaatgaacatagttgtaggccaaagattgtgctggggatgcacaactgtatctttag

SEQ ID NO: 152158 - DNA, 610 bp, Homo sapiens
ttactttaaattgcattttttaaattaattaatttattttttgtaggtaagaagaaatgtcagaagcagttgagggaccagaaactgggtcctttacagttgaggagacattctgctgcatagagttttaaatgtttcctccagttgtctgccttattatccaggatttttatctcaggagtctccctttgattttataaactgacacagtttcctgttttgttatgaatgcacactgctctagtccttcaataaacccatcgcacattttcaccatgttgtctataggcactctttctgcagtattaacaatgtcatcttcattgtcactagtgtcataatcaccttgattcaggaccatttcagctacctcaccagtcaatgaaggaacaactggagctttattattgatgttaaaaactttgttatccscttcttccagcttactaacactttgaaggtaagttttttgcatatgtaagtatgtctgacgtcatttttttctcactcgatatacggaatccttcaaattcactaccttgttcatcatgatcaatgaacatagttgtaggccaaagattgtgctggggatgcacaactgtatctttag

SEQ ID NO: 152159 - DNA, 616 bp, Homo sapiens
tagaatgttcactggaagattaacagttgtcaagaaagaacaaaattttgcagtcaccatccaatctagcttccttgcagtatgtatgagccactggtaaaacatatttgagaaaccaatcagaaaagatatccctggagatccatgcctttttgttagcataataatggactcctggaaaactgagtacacaagcttttgtctatcatggcaagttacacttatgcaatgcctgctgcattggcatatcccaacacagttattctgttattggcatccttcattactgtaggttgtctcaycagctgtagtcagtgtcttcctggggcaataacaccaaaacagtgatatttcttcagcattatagacttgacatggagtcaaaatttcatcagcaatgaccctggcaaatttgtcaataaatttctcctctatttcaagatcagtagatgctttgttaccagatctttaaaaatttaatgctatgtcttttttaaaaacttctacagccagcctattgaacgttcatacttccctttatcagttcatcatgatagatctttgcttgtttcatgatcagcatatcattaagtgtcatgtgttcactgtgacgctg

SEQ ID NO: 152160 - DNA, 588 bp, Homo sapiens
tctggaggttcatggaaagagtgggctgctacatcatgtctatttaactcattccttccctaggagccactyggggccagaaactaatcctgtgtgctctgcaaacctgtgtacggttctcaccttcctcccccttcacccaaattctgcaacgtctctccaaccactctcaatacctttcttccaaagatctgcttggagagtgtcaattcttgatggtctagtcttagaggaagaagctcctcctgggtgctcctagtcagcccctcctggctgcttctagtcagccatttggatgttctctcttctattcttttcttacttgtatggtttctgaggggaagttagatataattcttatctttgtttctctacaggcgaagttttatttcctctggcttccttcagcattttttctttatctttgattttctgtattgtgaaaattatatgtgtaggtttgatttcttttgttttattttgcttttgtttttgtctttgctttggcatttatcctgtttctatttatcttttctccttctggtattgttattacacttatgctgcatcttttatcgttgacccaaa

SEQ ID NO: 152161 - DNA, 590 bp, Homo sapiens
catggcaggcccaacattaacaggaaaccccttagctaagactccccactgtggaggagacaagaatagaaagtcctctaaagctcttgccaccaagaaccctcataacttacgttgccaccgccattgacacagacttctgcagttgaccactgagatatctgcagtcaccgctgacattaatcacagctgaagaagttgcatggaaattataccactgctcccacccagagccagggccaccacaccctgctcaactactaccttaagacccatctgcagatgaaagccttttcctacaaaagccactctgtgatgtttgaaaaggtcactactccaccagatgcacagacatcaatgcagagaaatagaaacatgaaaaaaggcaaggaaacacgacaccaccaaaggaaaacaataattatctagtaactgacccaaaataaaaatgtacaaactgcctggaaagaaattcaaaataattatcttaagraactgaataaatcataagagaatacagatgaacaattcaatgggatgagaaaaacaattcatgatctgaccgagaaattaaacaaagagatagatat

SEQ ID NO: 152162 - DNA, 570 bp, Homo sapiens
atggaaaatcaatagtaacaaattcctacagtttaaaaaaatcctcaataaatagactaacattatacctcaaggaactaaggagaaagaaaggagaacaaactaaacccaaagttagcaagggaggaaataataaagatcagaacagaaataaagcaaatacataatagaaaaaccatagaaaaaattaaaaacctgagtcgactatttctgctttgacaccacctttattatttatatatctcttccaagaagtgtgtcaaccctccacctgcctagttctcatagcttgcatagctgccatgctaatgtgcttgcatctctttggaagggccatgwccttgcacacttccatggctgtgcaatgctttcttcctgtctaaaaatttatttcccgaatttattcatttgactaactgctacctattctgcaatccaatacaggattgattccatataaaaagctttcctggcccttcttcattcccaacttttctgggtagatatttatgtgttctaatagaattctaaacttttttctatcacagcatgtatcaacatttattatat

SEQ ID NO: 152163 - DNA, 570 bp, Homo sapiens
atggaaaatcaatagtaacaaattcctacagtttaaaaaaatcctcaataaatagactaacattatacctcaaggaactaaggagaaagaaaggagaacaaactaaacccaaagttagcaagggaggaaataataaagatcagaacagaaataaagcaaatacataatagaaaaaccatagaaaaaattaaaaacctgagtcgactatttctgctttgacaccacctttattatttatatatctcttccaagaagtgtgtcaaccctccacctgcctagttctcatagcttgcatagctgccatgctaatgtgcttgcatctctttggaagggccatgaccttgcacacttccatggctgtgcaatgctttcttcctgtctaaaaatttatttcccgaatttattcatttgactaactgctacctatyctgcaatccaatacaggattgattccatataaaaagctttcctggcccttcttcattcccaacttttctgggtagatatttatgtgttctaatagaattctaaacttttttctatcacagcatgtatcaacatttattatat

SEQ ID NO: 152164 - DNA, 492 bp, Homo sapiens
tgggtgacactgtttcttcactaaattgatacaaccaaagcaattttctgccaggggaaaatcacacatgcacacacacaaatcataaatgcacatacaggtacacacatgcacatgcacatacacacacttcagcaaacaatatgtgccccctgtaaccagtcatcttctcaggaggaaagaacatgagtgcccttaatgtaatrttattattatgttagcaggactggctatacttgaaagctttaataatcattcacagattcctaaataacaaatgacagctctaatcaaatcaaaaacacagacattgcttagtttgtgacttctctcaaatagctttccatcttcgaaatggtaatgttcttcatgacctcctctgatattataccctatttacttatattttaatgaaattctaaggaaacactgcaaaataacaggtgaaaaaaattaccagctgtttttgctaatgaagaaatgccttaacaa

SEQ ID NO: 152165 - DNA, 492 bp, Homo sapiens
tgggtgacactgtttcttcactaaattgatacaaccaaagcaattttctgccaggggaaaatcacacatgcacacacacaaatcataaatgcacatacaggtacacacatgcacatgcacatacacacacttcagcaaacaatatgtgccccctgtaaccagtcatcttctcaggaggaaagaacatgagtgcccttaatgtaatattattattatgttagcaggactggctatacttgaaagctttaataatcattcacagattcctaaataacaaatgacagctctaatcaaatcaaaaacacagacattgcttagtttgtgacttctctcaaatagctttccatcttcgaaatggtaatgttcttcatgacctcctctgatattwtaccctatttacttatattttaatgaaattctaaggaaacactgcaaaataacaggtgaaaaaaattaccagctgtttttgctaatgaagaaatgccttaacaa

SEQ ID NO: 152166 - DNA, 543 bp, Homo sapiens
tgttgaggaccttctgaaaacctatgacactaagactttttgctcctaagaatgaacaaatgaagttctgcatacaatttcagagaggagatgaatgagtcctggagccaggttaaaaacctgctccaagttattatatgcatttctccattatctaagatatttcactgtgacttccctttttcttatgttcacttctcattaatctcactaggctctaaactttgcagagacaaatgctgtgtcacatctatctgtatattatttttgatttttagcacaaggactaatgcacagataaaatgtgttgatttgagacctggtaggttgattgatcaaaggcctttatggataatgggtaacattagctatgggtagcatcttcttttaaaacagtggtatacattcacaatgaacaggtatggtcaactaatattttttacgattgtyatacaacacatcttcctctaaactacaactcaggcacatctgttagacttttttctcagtgatcaaatctgtatattttatatcaataacagc

SEQ ID NO: 152167 - DNA, 566 bp, Homo sapiens
cacaatagtcttggactcggcaccataagctgcttaggaggtgtgactagatcttctcctgaacactgtattgtcttgtgcctcatagtattccattaaattcattacataaatgtagaaaataattaaatcaatcatttgagaatytgggtaatgtcaatcaatctcccataggctaaatacatataagtagttgagaatggtgatagaatgtataaaactagacactggttcaaaaagactaacaggtgattgctgctttgtaaaatgctacctaaacacatcagctgatcagtgctgcataactacaagcaaagtttactttattcggtagtcttgacattaaaaaaaaaaatgtaggaggaattttggaaaaggcagtcaagggcatctaagtgaacaacacaaatgacacagagaccatgtgctaaagttaaggcacattaatcaaaatcataacatattagattcctaatgtctcagtgtccaacagtggaaggacctagtaaaagttaggaagtataattgtggcaagtttaacagtctaaaaatgaagtgagatatag

SEQ ID NO: 152168 - DNA, 475 bp, Homo sapiens
  misc_feature (1)...(475): n = A,T,C or G
ccaaggagaattcccacaagccagagatcctcagctacagtctaggagccaaccatgctaaaggtgactttcccactaaaaacaagaagcactgactagtaagtactggcactctgatcttccttacagttaaattcctgtgtccattaataacctgacattctgattgatgagatatagttgtattattagtgtgcctcctcagtggataacctctagttttatggaaaaattgcatctctgacctgcaaggctgagatctggattctacccaaatgctaacttcagtacttgattgccccctttcctcgtcncncncncagaaagagagagagagaaaggaaatggctaccagtctctgtcaccttaaccatcgcaagcataatcagctagtactattctgctaactctccttcgacagaaccgtaaaaactgggtggaatgattgmgtaaaagtgatttttctgtttacatt

SEQ ID NO: 152169 - DNA, 551 bp, Homo sapiens
gaactgaaaaatcagaagcttatagggttttattgcagtgataaatttagcttttcagtcatttttctttggtccacctactttttaatagaacttgacttgtgaaaatcaaaaaatttaagtcaaataagaatgttttgttgttgcagttttaatacttagagaagatacagtattgttatatcctctcactgaaatcagagacatatcttttgagtatgttaggcagatgatcatgacattagatgaactaggaatacaatatttaggaaaaaagtgatttcgaaccttayggtgtcaagtttctttttatctgtacatgtcaagtgttctcacaggcagactttttagagagattgctatcactgacaacttccagagtttgagagttttttgaatatactacttaaaaaaatctccatatggttttcatttgaaaaaacatattacaaactgagacattcactataaattaaattgaaataatcaaaatataattaagctatttgtgagtttacattttgcaaaacattttagaagcaaaatcattt

SEQ ID NO: 152170 - DNA, 551 bp, Homo sapiens
gaactgaaaaatcagaagcttatagggttttattgcagtgataaatttagcttttcagtcatttttctttggtccacctactttttaatagaacttgacttgtgaaaatcaaaaaatttaagtcaaataagaatgttttgttgttgcagttttaatacttagagaagatacagtattgttatatcctctcactgaaatcagagacatatcttttgagtatgttaggcagatgatcatgacattagatgaactaggaatacaatatttaggaaaaaagtgatttcgaaccttatggtgtcaagtttctttttatctgtacatgtcaagtgttctcacaggcagactttttagagagattgctatcactgacaacttccagagtttgagagttttttgaatatactacttaaaaaaatctccatatggttttcatttgaaaaaayatattacaaactgagacattcactataaattaaattgaaataatcaaaatataattaagctatttgtgagtttacattttgcaaaacattttagaagcaaaatcattt

SEQ ID NO: 152171 - DNA, 437 bp, Homo sapiens
tctgaggtagttattttggtttggccctaggagcagcaggagtcctgtggagtctcagtctactcctrttggtttcagtttataaattctgcctggagtggtcatctctttcctaacttggttacagacagtccatggatttccacttttgtgacagaagatggaaaaaggtgaggaggaggggacagcagatcacataggccatgaggggtcactgcaagactcgttctgaggcagatgggataccatcaaagggttttgagcaaagaaaggatgttaccagccttatgttgaatagggtgtctcatattctctgtgttgagtgagagtaggtgttacgatgtaagaaggaaaccaattaagattgttgcaataatccagagatggttgggagttggaccaaaatgataatgtcaggggcagattttaaatatata

SEQ ID NO: 152172 - DNA, 582 bp, Homo sapiens
atgcattccaaatctctctctgtttctctctctttcctacaatgataattttcactggtgctcaacttatctttctgccagccatcttgctgagaaaagagcccagcccctcagcacygcctgggcactgtagcttttgtttctagtggattgttttctctgatggcaacctcttgtcttgaactgacattctgccctgctcactgctcccagtgtcctctgttatatcaacatctgcagcagctgctgcttctttggctgaaaagtctcaatgtttgcctttaaaatgtcattccttcacctctctcagtactcagacttactcatcagtttgtttccagttgtcctcaaatgtgttcagaataaatgatgcacaaaggacagtttaaacatagcaaagcagctgtaggcaaggcatctccagctcaccgggctattctttcataataaaatgtgtcacattgtcattcgaatgtgtctctggcacagaagacactggctgtgtatcagctgtggcaataacaacatgtttagtggttgccaagccaagagggaaaaaagattaaatgaagaaggtgtaga

SEQ ID NO: 152173 - DNA, 233 bp, Homo sapiens
attgtataatgttcttctttgtcctttttcactgttattgcattaaagtccattttgtctcayataagaatagctactcctcctcacttttggtttccatttgcgtgaaatatctttctccatccctttaccttaagtctatgtgagtccttatgcgttaggtgagtcccttcaagatagcagatacttggttggtagaatttatccactctgccattctgtatcttttaagt

SEQ ID NO: 152174 - DNA, 573 bp, Homo sapiens
aagcaaactctactttgtaagcttatattatatcatgatggcaactgcaaattataaatcagacaggtttgtatttccataggcaaatggaaattttccttcatgaatttggacagtgtgaaccagagtcarttcaaccctgtctgtgaataagtagctcagtttattgaagcatgattctttagtttaagcatagagatggctactatctatgctgtgtgggtagctagctagctttggtgtttttcatggtaatgggacaccccattcatgaaaagccatcctaaaattgtccacagttgttctttgcaaggaaccaacaaagaggactgtggtctgattagcataacacatctaggcttctgtctcttgagaataaaagcatgtgccccttttagatggtgaatcagaggctttatctttgcatctaagggatggtaatagtgaatattattattatacatggaaatcattggattttgtctctcttgcttagatttttatttggataatatattgagggtaaagtaccctgaagcaaagaagaatgtctgttcctgctccccagccaaa

SEQ ID NO: 152175 - DNA, 572 bp, Homo sapiens
caaggtaaacaccagttcttggtgacttttttttaaataaagtttttttttgcctaaataagacataagcaacttgatccctcacacttaatacatccagtcctaacttgtattggaaagctagttccaaggctggtgttttgyatatatggtgagcctaataccacagatggcctctgtgtggatgcagggaccctacattgtagattattctgaaagttctactattaatagccagtgtaataattgaacactttcttgattagcttattttgtggagtggggggagtggaacagaggacaaaatgatttcttatgcttacccagagtatggaataactgcgaggcattgcttaaagctatttaattaaaatattaaaatgaccaaaaaacacaggaatcgccagcaatgttacgagtcagcagtggaaatgttccttgtcaatcatgggaagaatgctgagcttcaaccatctcaagcgcatataaccccattggtttttctttttggcagtcttggtccaaaaaaaaaaaaaaaaaaaccacaccaaaaaaacctcaaaacattgatc

SEQ ID NO: 152176 - DNA, 399 bp, Homo sapiens
tgaataccaatctgtgcatgcaatgggtaaagctccaaaaggctagtcaaagaacaattgtaagaatgctgttagccaaataattactagagctctcatggggccaggaattgttgtttaatcccatttagccttctaacaaatsttaaaaactgatctgtaagcaagtgaactgtcagaacaaaattcaaccttcttcaaaagactacaacaaaatccagcactcaatatgaaattactagacatgcaaagaaacaggaaagtgattcagtcagtagaaacagacacaagtgtgacaaagatgatggaattagcagattaagacataagacaatcgttatgaatgtgctcagggatttaaaggaaaacacaaacatgaggaaagaaatggaagatata

SEQ ID NO: 152177 - DNA, 478 bp, Homo sapiens
caccacatctggctaattttgtatttttagtagagatggggtttctccatgttggtcaggctggtctcgaactcagaacctcaggtgatctgcccaccttggcctcccaaagtgctgggattacaggcatgagccactgcacccggcccaccagggttgaatttttgataccagctgagcctgatccctggaatagctctggatatgtcatgcttttcttcctcccaggagcctgggtgccatttaacaattgcctcttcgctgattcaacaggaaggccatagtctcctaccsacacacaaaaaactgcagctgattccaggaatgtgaaggaggggcggtcatgcccagagtttctccaaaggaaaaaattcaaaatttaggaaaggattctgagtctttgtgggagaagagaataggaatggggaggggagacattttatatgtttttgtcctgctaacttttaaaggagggtct

SEQ ID NO: 152178 - DNA, 513 bp, Homo sapiens
atttcacatgcaccaaaactataattgtctcattgttccaccagcctcaccagctaccaccagtgctttgtggttttcagcatttcacaagctgaggatgcataaaaccacatctagctggagggccaagttgagaccttagttaccagctctgaatacttctcccaccactgccttttaccatgcagggtcacatacactgtctgtaaaatattaccaagagttatacggctcctggaaagcatcagaaaaagagaggtaaacctgatagcttacttgaccgtgtgttaaagtatggatgctgttctcaatccatttatattttcacagctagaagtacaaagtgaggattgccaaaataactctaacctttttaaatgtaattattaataataatttttaattgaaaaatctgagacaaaggctaacagaagtgatgcaaggcaaatagggataaactagtactgtccaggacaaacaaaacrtgtggtcatcccacatacagcattacca

SEQ ID NO: 152179 - DNA, 466 bp, Homo sapiens
tgtcagatatctctcagaggcctatctaagggtccccagtaaaaagggagccatcatctgaggctccatttrcatgatcatttggagtttgatggcctttagccaaaaagaaacaaattttacaaggaggttaagtatgcatgaaccatatatgagtattatacaaaaaggagctaaaagggaataatcttgtgccagagataacagaaataagaagtaaaatagactaatcattctgaaaacaatgttgtggccagagcagtttcacccttgtgaaagaaattaaatctaatttgggggagggcagttaaattttagaaaagagatttctgtttaggggagtagataatcccatgggcattcaggattaggggtccttggcaaagacacctaatggtgaggaacagaatgaaggtgagaacagcaatcataggcaggactataaaggatatccatgaaaggtgaa

SEQ ID NO: 152180 - DNA, 565 bp, Homo sapiens
agatgtgtagttttcattttaggatagggtaagaacccactccaggagaaacatcaatgtgaaccatcctaggaaaagtaaagaaattgaacaacaaaacctctgtaacaacagaatgtggtagataaccattaaatggaggtttttggaaagtctggtcttgttattcacataaattttctttctaagtagcaaattgggaccattatttccccatggtattttcatcacaatttacattcagtagagtctccttttgccatttgcaattccctgtctgcatttaatatttatgcaatattgaactaaataaaagcctgcagttctactcttgttcatttgttgtgtgtttgggggawgctgtgcagagttcaatggaatatgaaaatgcactgtattatgctcattatgagcatagctgctaactgatagactatcctggggaataaacttccttttcagacaaagtttctttgttttctttttgcctactcctagttgttttatttcctatcataaatgaaagttgttttgaaaaaaaatctataagcaaaattttctgtaa

SEQ ID NO: 152181 - DNA, 593 bp, Homo sapiens
taaatcctacataagaattcacaatgtatgttttacttactcagatgaacaagaaataaagagtgcattaaagtgaataaatatgtaatacctcgtagaagagttctctctcaaattcaagcttacctgagcatagccagaagcactaccattacactgtaaaacagattatagaatttaggagtgagaaggccagagagtctttattacagtggtttgctattgaaatgtgcaaacaatatgatatatgagtcagtactacagactggttaaacagggtacaacatctaaagccaagcatagtggtatgtacctttggtcccagctactctggagactgagttgggaggatctcttgagcccaggagttccagagcagcctgagcaatgtagcaagaacccatctcttaaaaaacaaataaaaacagtccatgaaacataaagtttgaaataaagattaaaagatatatgccaggaaaatgtaaccctttcccatcccacaaaaaaaaaagaataaataccagataacaaggaatttaagacaaaaaaawttggatataaaatggtcatgtattatgataaaagttctaatt

SEQ ID NO: 152182 - DNA, 538 bp, Homo sapiens
tgtgtacctaattacctaacttaacaacaacaaagtgtcaaatatatatgatttttatatccataggaaaaaatatccatttatgtgccacataatgatgtttctgtcaacaacagattgtgtatatgatcawgcccccagagaatcatgatatcatatttttcactgtatcttttctaagtttagatacgtacgtacttaccattgtgttgtaattgcttacaacatttagtatagtaacatgctgtacagatttttagcttaggagaaatatagtctttaccacatagcctaagtatatagtaggctataccacctgggcttgtgtaagtatactctataatgttcgtacaacaaggaaattgcctaaaaatgcatttctcagaatgcatcctttttattaagtgacacatgactgtatatctttctgtggatgattctagggcaattagctattttttaaatgacaagttagattcctgtatcgtgccataaaattaaattctataagtcaaaaatgtgttttaaaaaaagagcg

SEQ ID NO: 152183 - DNA, 532 bp, Homo sapiens
acaaggaaattgcctaaaaatgcatttctcagaatgcatcctttttattaagtgacacatgactgtatatctttctgtggatgattctagggcaattagctattttttaaatgacaagttagattcctgtatcgtgccataaaattaaattctataagtcaaaaatgtgttttaaaaaaagagcgagacttacactttgaaaataagaagaaaatatggaaacatcaggttatctcgtttggttcagatcagggagagtttgctggtacaactccttgatgtactacactgcaatgtttggtaccattatgataagtcaccaatagggtgatcaatatacttaggactgagaggatttataagacatagggccttaagtataaaaactaggaatgttgtagggtaattagccaasaaaatagagaaataaaataataactcgtggctttatttctgatatctcatgtgatacacgaggtatccatgtggtctaccatatcatgtggtcccttaaagatattggagagtttat

SEQ ID NO: 152184 - DNA, 532 bp, Homo sapiens
acaaggaaattgcctaaaaatgcatttctcagaatgcatcctttttattaagtgacacatgactgtatatctttctgtggatgattctagggcaattagctattttttaaatgacaagttagattcctgtatcgtgccataaaattaaattctataagtcaaaaatgtgttttaaaaaaagagcgagacttacactttgaaaataagaagaaaatatggaaacatcaggttatctcgtttggttcagatcagggagagtttgctggtacaactccttgatgtactacactgcaatgtttggtaccattatgataagtcaccaatagggtgatcaatatacttaggactgagaggatttataagacatagggccttaagtataaaaactaggaatgttgtagggtaattagccaacaaaatagagaaataaaataataactcgtggctttatttctgatatctcatgtgatacacgaggtatccatgtggtctaccatakcatgtggtcccttaaagatattggagagtttat

SEQ ID NO: 152185 - DNA, 510 bp, Homo sapiens
ttagtctttaaaaaaaactaaatgttatcttctcaaattattgctataaattttccttaaaacttttgtgacactgccatttactttatcatatttgaatattaaaaggcatttgattcaaaattaaatatataagaaaatttatattattatatatgtktctgatattctgaaacagtatattaattaaaagttttgccacaggaaaaaaaagtgagagtaccaatatacgatgtatgcaagaaaaaagcaataataaagtatcatgaactttaggtacatatatctgaccataaataaaaatatagccatccttaatgttgtaatgattcagtgctgcatcgggactgttagcaataatataagtatagaatttatcttgcaaccgggaaccattttgagatgaaagaaggcacaatcagtaattatactagaaaaataggcatacatagtgatcatgaccctaagcacaacaggatgtatagccacgttagaaatagagaagaccct

SEQ ID NO: 152186 - DNA, 624 bp, Homo sapiens
tatcatatgatagttgtatgtttaatttggcaacaaactgttcaaagtgttttccaagttggtaatgcaattttacattcccaccagcaatgtactgtgagtaaatttctctgaatccttcccagtgtttgctgttataattgttacttattgtatccattctgataggtgtgaagcgatgcctccttatggttttcacttgcatttccttaatggctaatgacatttaatgtattttcatgtgcttaattgcttatgacttctttggcaaattacctatttctgtatttttgccccattttctaattgktttttttttcttttttaaagttgcacattgaaaattatattctagatgttagccccttattgtatgtgtggtttgcaaatattttctcccagtcttcaaattctttcatccttttaacagtatcgtttgtacagcaaaacttttaatcttgatgaagcccaattatcaatttttccttttataaattatacttttgatatcaagtctaagaacactttgctttgctctattgcctaaaggatgttttctaagtttttattctaaaagttttataattttacattttagtccatgatccagtttgagttaatgtt

SEQ ID NO: 152187 - DNA, 402 bp, Homo sapiens
agtgattgtgctcctatcaactaattcactgatttctcatatccatattttgggaaaggcaagatgtttctcstggtacttcactttcttgtgctatctctctcccttccaattttcacatgtccataaaactcccatatttcaaggcctcttaactattattcaagtttatgtggtgcttctcttacagcaggtaccactttctgttttgtaatttattatttatgagcacatcaaatatacagtacctctactgaatgaatgaatggtatcaaatatttttattaagctttggggaaaaactggtgtttcactattgctttcaatttttaactattttttctaagacttgttaggttgaccccaaaactcactgctgagaaaaactgcaatctaaattaa

SEQ ID NO: 152188 - DNA, 402 bp, Homo sapiens
agtgattgtgctcctatcaactaattcactgatttctcatatccatattttgggaaaggcaagatgtttctcgtggtacttcactttcttgtgctatctctctcccttccaattttcacatgtccataaaactcccatatttcaaggcctcttaactmttattcaagtttatgtggtgcttctcttacagcaggtaccactttctgttttgtaatttattatttatgagcacatcaaatatacagtacctctactgaatgaatgaatggtatcaaatatttttattaagctttggggaaaaactggtgtttcactattgctttcaatttttaactattttttctaagacttgttaggttgaccccaaaactcactgctgagaaaaactgcaatctaaattaa

SEQ ID NO: 152189 - DNA, 488 bp, Homo sapiens
ttgatcctgggtgtatgtgtgtgtgtrttgccaaaagagactaacatttgagtcagtggactgagagacgcagacccaccctcaatctgagtgggcaccatctaatccgctgccagcatggttaggataaaagcaggcagaggaacgtggaaggactatactggctaagtcttctggccttcatctttcttccgtgatggatgctccctgccctcgaacattgaactccaagttcttcagcttttggacttttggacttacaccagtggtttgccaggggctgttgtaacttcaaccacagattgaaggctgcactgtcagctttccttttgaggttttgggactcggactggctttcttgctcctcagcttgcagatagcctattgtgggacttcatcttgtgattgtgtcagtcaatactccttaataaactcccctttatatatacatctatcctattagttctgtccctctagataactctgtg

SEQ ID NO: 152190 - DNA, 358 bp, Homo sapiens
caccaagtctatatttttttaacaacctgaatgaagtaaaatarcaagtcttatcaacaaagagaacaatagtttaattttacaatttaagtacaaggaaaagttatttttgccttgcattgttaaatttcacattttgagatttaagacttaaggagcattaaggacataaatcagcaaaactgtacctttgtgttactggcagaaaaggctatcaaagttttgctgaatcagattattacattttttgtatgtgaccaacctagatggtttccttcaacaaatgacagagtgatcattccaaactgatgtaatccatcaaaaacacttttctacattcagccaagcagcaactcaa

SEQ ID NO: 152191 - DNA, 368 bp, Homo sapiens
ttgaataatataataaattactgttgctattgcccaacaagtgaatatatacaagagatttatcactaaccataaggtacatttctccctaaaggtcaagatttttctggctatccaaaaacctatctaaagaaagggtaaactctgtaaayaaaatatgtttctctgattattggcaacatcattttccagctcagtaatcctggaagcttcagttatttttttagataaatgatggtacactggtaaactgcaatgactctggagcttgactaaatggccccaaatgtcaggcatggtatgttttacttttgtgacctgggacaatttgcttaaatgatgcctctctcagtttcctcttgcacaaa

SEQ ID NO: 152192 - DNA, 368 bp, Homo sapiens
ttgaataatataataaattactgttgctattgcccaacaagtgaatatatacaagagatttatcactaaccataaggtacatttctccctaaaggtcaagatttttctggctatccaaaaacctatctaaagaaagggtaaactctgtaaacaaaatatgtttctctgattattggcaacatcattttccagctcagtaatcctggaagcttcagttatttttttagataaatgatggtacactggtaaactgcaatgactctggagcttgactaaatggccccaaatgtcaggcatggtatgttttacttttgtgacctgggacaattkgcttaaatgatgcctctctcagtttcctcttgcacaaa

SEQ ID NO: 152193 - DNA, 618 bp, Homo sapiens
tttttgtcatgggtttaatgagtatttggctagcatacattagggttcacatgtcgaatcatatttaaaatgaagacagaggacagaaatggaaagaattaacagttggaaaattaggatacattaaaaatgacccaaataaagaaatttatatttcattraaaaatgtttagtagtttgtttttagtaatgtgaaaagttatttttaaaattataagtaaagaaatagctttaacagtaccaggagagcttatactacactgtaaaaataaatttctagaaattaaagattgcttagatattaattttgtctttttgttttttaagtgaagacattttagaacatctttaaacctaactttaaatctggggcctttcaaataacggtccaactagaagtgtgctataaacatgggatggaagaaatgggttttatttttagcataatcttggacccatgatttttataaacttgtagagattatcattgcaagagattatgttaatatttttatatcctcattatattccagaaaaagatacaaggcatgtcacaaagattcattcaatagagcatcattaaattcatagccctttatcctactgcatcaatattta

SEQ ID NO: 152194 - DNA, 618 bp, Homo sapiens
tttttgtcatgggtttaatgagtatttggctagcatacattagggttcacatgtcgaatcatatttaaaatgaagacagaggacagaaatggaaagaattaacagttggaaaattaggatacattaaaaatgacccaaataaagaaatttatatttcattgaaaaatgtttagtagtttgtttttagtaatgtgaaaagttatttttaaaattataagtaaagaaatagctttaacagtaccaggagagcttatactacactgtaaaaataaatttctagaaattaaagattgcttagatattaattttgtctttttgttttttaagtgaagacattttagaacatctttaaacctaactttaaatctggggcctttcaaataacggtccaactagaagtgtgytataaacatgggatggaagaaatgggttttatttttagcataatcttggacccatgatttttataaacttgtagagattatcattgcaagagattatgttaatatttttatatcctcattatattccagaaaaagatacaaggcatgtcacaaagattcattcaatagagcatcattaaattcatagccctttatcctactgcatcaatattta

SEQ ID NO: 152195 - DNA, 537 bp, Homo sapiens
gtcagtaaatggcagttaactaccaagaaggaacaagtcatccctaatcttccaatcatttcaacaaacattaacacagtaaactaaggctaaagcaagtgctagcatctttcctaggtccaaattttatttgaaactaggaagagaatggaataagctataagcattatgtcatcaagtcatgaatatgatgaccatgccggccagagctgtgtgggtgcatagagtaggcagcatatcacagtggttcagagtaagatgggcatccaagcacaatctacgggaaattttttgtgatgaaattttcatcagtcttgggtgaaattaggaaaatgagtacaatgtggaaaaatgtacagggagcttaatttattctctttaaataactattatttattttgagattcagttcttccatgttatttggtgttaaaatatccacttttataaaattgwgatgatagaagtagactttttcaatcattcttactatacaaaagaaaataatcacataaagtttaccacttgattttttta

SEQ ID NO: 152196 - DNA, 557 bp, Homo sapiens
agagcaaactgggaataatatctattaatataaagagcattactgagacaatctaattcaaaatattaataaaaactataatatctaaactgtatgacttttatttataatcaaattagttttatatcaatattaagtgtcctaatttaattgtattgtgatcatatataagaaagccctggatctttaaaaaatataataaaatattttgcagtaaaaagaacatagaggttgtaaggtccagaaatacctatagagagaatgatgatgcaaatgtggcaaccttttataacaccaytggtaaattttggtgaggggtatgtgttaattctttgtagtaattttgcaatatttcttgaagtttaaatacttttttaaaaatcaggtagttatcattatttacctcataagaataataaccacaataatttatctgaatgagtgttgaaagttattaaaaagtcatattttttcaaacagaaagtttggcatttatctttaatcaaagtggagctattgcaagtatttgcttagataaatggtaagaccaatactgt

SEQ ID NO: 152197 - DNA, 488 bp, Homo sapiens
ttaaaaagtcatattttttcaaacagaaagtttggcatttatctttaatcaaagtggagctattgcaagtatttgcttagataaatggtaagaccaatactgtacaattcttggctataaggccaatacaagggctaccaggccaasaatgtctattggccaatataaggccaaatgtatagggccttagctacagagtatacaaaagacagggatatgagtttagcagctacaattgtccattatgtgattaaccaaggcgctcattctaaagggaaataaagggtgagatagttatgtcttgctgaaattaaattaccaggttttggcaaattattaggaatgatggataaaggaaaatgtattatataactttaagagattaagattggatgagtaggatgatggagatgccattattaagggacactgaaagcaataactttattttctaaaatgaaatctaataatattttcttctaattata

SEQ ID NO: 152198 - DNA, 528 bp, Homo sapiens
aagctttatcattatgttgaatagatttgataaaatccatggatagccacaaaaaaatttgaatcaattaatgaaagaaaagtagagatgatatattttaaataagattttaactgatgtaaatatttggtcatagaagcaaatgtttacaatctttctcacctatacttgtgcagacaaattttstcatcatttatgatgataaacctattacacaatcatttaaaatgtcacaatcagtaaataatatagctacttcaagcataaaatcttttgttaaaatgttgactttatgaaagcaatatctcattaaaagttttaaagttttatttgttttatttggaagtcttatgattcaatatatcttattattataggttttgtaacaataatttcatgacatgaagaaagtataattagttttaaactaagctttatactaatacactcaaatttgctctagtttatcttattatccataaagccttatatcatctgtcatttgcaccaaacacagtggcaaattta

SEQ ID NO: 152199 - DNA, 555 bp, Homo sapiens
ttggttcttttggccaacaactctctattgaatcatttaatgatgagaagaaagcagccaaattaagaagaattgttattttttttcagtttcatccacggtagagtgaataggtgattaattaacaaatatgtgttgaagtgttaaatgaatgactctgtggaaaagcattttgagtagttaagagtagaaaatgcaaagggactgatatgaacataacttgcaatttgggcaaatgaaaagaaggcctgagtgcagagaaaggcaagtgataaagagaatgggaggtgataaggttagagagagaggcatgtgccagaccatgtaagtcagtagttctcaggtcaggatgcatattagaatcaactgagaaatttggtaaagcaccagtaaaaaaggagcaggggtgaatggtatctaagaaaaagcatgttttcaaatcctccaggtaaatgtgacatgtaaycattgttaggaatgaataatcacacatttgaaggcatgataagaaggccaagagatgccatcacagggttaataatgagggttaaaaaa

SEQ ID NO: 152200 - DNA, 588 bp, Homo sapiens
gtatgaatgcaataaattgcctacatccattcttcaacatagcaacaagattacgcactagaccctaaatgctgttccacttctctagtgatacagaatataccacagagatatagaatgtaacctatattctagatcacagctatgtaaactgctggtaattcccaaaatatgctatrctcaattacctttgggtctccatatattgtcttttgggtggacctcttagcccatctatcttggcctaacaccttctggccttttagatggcagtttacctgtcactttctccaggaaactttccctgatcgctcccctcccctactaaaacgggattgagtccttcacatactcccttaacattttagagcttattcttatcatgacactgaacacattaattgcaactgcctgcttacaagtctgtattcaccaactataaactcctaaagacattaaatttaaaagaaaaagcattcatcattgttttcactttactaagttttaatctctgcagcggttcaccaaaattttatgcactatggaaaaccaaagaaaggaaaagatttctgtactagatttttgaaa

SEQ ID NO: 152201 - DNA, 466 bp, Homo sapiens
gagcgcttctgcctctgcgccttgcggaccgatttccgggtgaagccgtccactttctccgaggccgagatggcggcgctggcagcccccgccggcggcgacgacgacgacatctccgcggccctgacgcttggcagctccggctgctgcttgcaaggcacgggcagcggcggagacggcaggaggaggcgggggagaggcgcggggtgctcgcgcccctgcgccccggccccacggccctccggccccgggacgccgccgagcttctcctcgccgcccgccaacgcctcacggccacatctcagcgcyggaggttcctggtccccggcgcgcggcgagctcccggggctgacggagggaagggcgggggcggaggggggtgaagaagttgttgactctgggcgcgcagagcgggtggaagagagcccgaagtttagacaactgaggcgggggcacgggggtgcgg

SEQ ID NO: 152202 - DNA, 606 bp, Homo sapiens
atagttgggagaaatatgtggataaaaatgaagtgataagacactgcaaaggcagtagggccaatggattggaggttctggtttggtaaagaattaaggaaataagacaatgtgaaagggaattatagtagataacagtcagagagtataataatttaaactgagcagctggaaatcctgcaattastggtgatgacttggatgagggtgagaccttgggagtgggtggctgaggttaatggagaacaagatcagtgaaggtgaggaagccaatagctgagagggtagaacttgtttaaaatggattgtccatggagatattgaaatcacaaagacaggagaataatgactgcaaaatggccagtggaaggaaagccagccactactagagaaaactaaaagggagcatttttgttagaaccagcagattgtgattagggcaagatagtaaagggattattcagagaagaggctgaaaatataagagatttttataaatatctatgtcagaacatatgtctataatagggaaatgtttgggatcttagggaaggtagaagatgtggtcagaatggcatatacagagctatttaaaaagtacagtgt

SEQ ID NO: 152203 - DNA, 606 bp, Homo sapiens
atagttgggagaaatatgtggataaaaatgaagtgataagacactgcaaaggcagtagggccaatggattggaggttctggtttggtaaagaattaaggaaataagacaatgtgaaagggaattatagtagataacagtcagagagtataataatttaaactgagcagctggaaatcctgcaattagtggtgatgacttggatgagggtgagaccttgggagtgggtggctgaggttaatggagaacaagatcagtgaaggtgaggaagccaatagctgagagggtagaacttgtttaaaatggattgtccatggagatattgaaatcacaaagacaggagaataatgaytgcaaaatggccagtggaaggaaagccagccactactagagaaaactaaaagggagcatttttgttagaaccagcagattgtgattagggcaagatagtaaagggattattcagagaagaggctgaaaatataagagatttttataaatatctatgtcagaacatatgtctataatagggaaatgtttgggatcttagggaaggtagaagatgtggtcagaatggcatatacagagctatttaaaaagtacagtgt

SEQ ID NO: 152204 - DNA, 606 bp, Homo sapiens
atagttgggagaaatatgtggataaaaatgaagtgataagacactgcaaaggcagtagggccaatggattggaggttctggtttggtaaagaattaaggaaataagacaatgtgaaagggaattatagtagataacagtcagagagtataataatttaaactgagcagctggaaatcctgcaattagtggtgatgacttggatgagggtgagaccttgggagtgggtggctgaggttaatggagaacaagatcagtgaaggtgaggaagccaatagctgagagggtagaacttgtttaaaatggattgtccatggagatattgaaatcacaaagacaggagaataatgactgcaaaatggccagtggaaggaaagccagccactactagagaaaactaaaagggagcatttttgttagaaccagcagattgtgattagggcaagayagtaaagggattattcagagaagaggctgaaaatataagagatttttataaatatctatgtcagaacatatgtctataatagggaaatgtttgggatcttagggaaggtagaagatgtggtcagaatggcatatacagagctatttaaaaagtacagtgt

SEQ ID NO: 152205 - DNA, 646 bp, Homo sapiens
aatgatattaattcttctgatccatgagtatagtatatctttctgtttatttgtgctatcttcaatttctttcattaacaatttatactttttagtgtacagattttttacctccttggttaaatttattcttgagtatgttttaatgctatccttaataggattgttttcttgatttatttttttttttggctaggtcattttttgtgtatagaaatgccataaatttttgtgttttgaattgatgtcttgcaactttactgaaycatttattaggtctaacaggtttttttttttggtgaaatctttcatggtttctacatataagattatgtcatctgcaaatagaaatattttccaatttggatatcttttatttctatgttgattgaagtgctgagagtgggcatccttgccctatactagatcttagaggaaaagctttgagtttcccctcattgcttataacgttagctgtgtatttttcataaatggactttattaggttgagaaactttctttctgtatctaaactattaagagttttcaggaagaacagatgaactttaaattttgtcaaatgcttttccgccttgatatgataatgtggtttttgtttttcagtctgttaatatgatgtatgaca

SEQ ID NO: 152206 - DNA, 617 bp, Homo sapiens
gggcatattttcatttctcccctctcttcttccctgttaatcttataaaattcacagggatgcgtttagcctctgccagtgacttttccccaaaagttgagtgcgacctgtcataattggaagatgtatatataaattcaactctaagacattttataaggatgcagttgataaagcatgagaagattgccttaactctccaaagtttatttttctaattataaaattggaattatataacgttgcatggcatttatgaggagtaaacaagtaaaaaaagtaaaatgtttagcttagaacctagaacacagccaattagaaaactgtactgtagtttcattccctgtttcttcaggmcacaaataacagccagttgattctcatttaaaacattatcttgttctaattgattaatatcaaacattgtgttctaaataagagagaatcatgcttcatatttctttgaatatctgactgatggaagtccaagcataaaggcatgggacaatgggttggtattaggacaaaatggcaatctaatgacagcttttgcatacttacaagtcataatatgttttgaatgaagaaatagtaacattataaaagatgtggttggg

SEQ ID NO: 152207 - DNA, 562 bp, Homo sapiens
tctttgtcttcgtcttcatatcaccatgttctctgttgtgagtctaatttctctttgcctctctcttataaaaacacttgtgatggcatttaaggcccactggtataatccagtataatccaaaatcaagatccttgagttaatcacactttcaaagaccctttttctaaataaggtgatattcayaggttccagggattaagatatggccatatcctggggggccattatcagccaaccacagtatgtatgttttatccaagcaatgagtattagcattactggtaaaggtggtgttttaccaaaaactagaataaagagaggaattgagccataaaaacggttttaggaagaggacacttggcagaaaaaaaaatagtcaatgcagaggctctgaggcgaggaactgtttgttggcttgagagaccacaaaaagcctagaaagactggagtagaattagagggaaggagagtattaggtgatgaataaaaataggtagcaggagagtctgcttgtgtatgttctccctggttgctgtatggatcttggctgttactccga

SEQ ID NO: 152208 - DNA, 501 bp, Homo sapiens
agcaaaataaagtatacacccatcaatgaaaaaccatgcaaccatgaaaaagaatgaagggactggccgtggtggctcatgcctgtaatctcagcattttgggaggctgcggtggggggatcacttgaggtcagcagtttgagaccagcctggccaatgtggtgaaaccccgtctctactaaaaataaaaaaaattagaaaggtgtggtggcgggcacctgtaatcccagctactcgggaatctgaggcagtagaatcacttgaacatgggatatggagatttcagtgagccaagatcgccccattgcactccagcctaggcaacaagagcaaaactctgtatcaaaagkaaataaataaatgaaggggtactacatgtacagacataaaacaatctccattgtattttattaagtgtgggacaaaagacaaaatggcacaaattctttttgttgttataaaaattaaaaatcttggattttataagcttgtacaggttct

SEQ ID NO: 152209 - DNA, 491 bp, Homo sapiens
cagacaattagcaaaataaagtatacacccatcaatgaaaaaccatgcaaccatgaaaaagaatgaagggactggccgtggtggctcatgcctgtaatctcagcattttgggaggctgcggtggggggatcacttgaggtcagcagtttgagaccagcctggccaatgtggtgaaaccccgtctctactaaaaataaaaaaaattagaaaggtgtggtggcgggcacctgtaatcccagctactcgggaatctgaggcagtagaatcacttgaacatgggatatggagatttcagtgagccaagatcgccccattgcactccagcctaggcaacaagagcaaaactctgtatcaaaagtraataaataaatgaaggggtactacatgtacagacataaaacaatctccattgtattttattaagtgtgggacaaaagacaaaatggcacaaattctttttgttgttataaaaattaaaaatcttggatttt

SEQ ID NO: 152210 - DNA, 632 bp, Homo sapiens
tactaattgcatgctcaaattagtaattttatacaatagcctcaaggaacagttattttgttgatttcaatgagttgttaaatttgtttttttgtttctttcaatttggtttaaacctgaacctcacagaagtgatttgaatttctctttttctacattgtttaaactttggctgaaaaagtttataattttgccagctgactataattacatagtccccatccatctccattattgcctttgtttagaaaatgaattctataccacttctactgtgccccaagccacagcttctttaaagtaatcagtacttgatatcactatgtagttcatcttctttttcacttgtttaatagctytattgagatatgattcacataccataaactacatcttttaaaaatgtacaattcagtgatctttagtaatatggtggtcactgagtatatgcaggggattggttccaggaccctcatgtataccaaaatctgtgcatacttaagtcccacagtcagccctgtggaacccacatatatgaaaaatccacattccatagatgtgggtttcacatcctgagaatactgtcgtttccatctgcgtttagttgaaaaatctccacatataagtggatc

SEQ ID NO: 152211 - DNA, 552 bp, Homo sapiens
taaatattaatgaggttgaacaggcaaattttttcaaatccttgccacctctaaaaaaggaattctcaaagaatattatgcaacagttaacacatttagagtatcctaattgtgtatgtgcttggtgtccacattgtctggaaaacacaagcataattactataacatcagttgcagatagattcttaacaagcaacagaaaaactaaaatgtgaattcaacgaataaaggaggaaagctcttaagaacataaggatttttattgtkttcccctctcaatatgggtactcaaccctggctgcaaattacactcacctgagggagcttttaaacatatcaaggcgtaaaatggggttcagtatgtatattgcaaatacattatgcttcaatatagcattaaatgaagaaaaatatccaaggcctgggtcccatctcaaatcaatggagaaatacacacattacatatttcaaatgtgtttccatcctaggacacagccttatgagcctatcaggtgataataactgtgtactgctgtgacctcagggttaccc

SEQ ID NO: 152212 - DNA, 552 bp, Homo sapiens
taaatattaatgaggttgaacaggcaaattttttcaaatccttgccacctctaaaaaaggaattctcaaagaatattatgcaacagttaacacatttagagtatcctaattgtgtatgtgcttggtgtccacattgtctggaaaacacaagcataattactataacatcagttgcagatagattcttaacaagcaacagaaaaactaaaatgtgaattcaacgaataaaggaggaaagctcttaagaacataaggatttttattgtgttcccctctcaatatgggtactyaaccctggctgcaaattacactcacctgagggagcttttaaacatatcaaggcgtaaaatggggttcagtatgtatattgcaaatacattatgcttcaatatagcattaaatgaagaaaaatatccaaggcctgggtcccatctcaaatcaatggagaaatacacacattacatatttcaaatgtgtttccatcctaggacacagccttatgagcctatcaggtgataataactgtgtactgctgtgacctcagggttaccc

SEQ ID NO: 152213 - DNA, 552 bp, Homo sapiens
taaatattaatgaggttgaacaggcaaattttttcaaatccttgccacctctaaaaaaggaattctcaaagaatattatgcaacagttaacacatttagagtatcctaattgtgtatgtgcttggtgtccacattgtctggaaaacacaagcataattactataacatcagttgcagatagattcttaacaagcaacagaaaaactaaaatgtgaattcaacgaataaaggaggaaagctcttaagaacataaggatttttattgtgttcccctctcaatatgggtactcaaccctggctgcaaattacactcacctgagggagcttttaaacatatcaaggcgtaaaatggggttcagtatgtatattgcaaatacattatgcttcaatatagcattaaatgaagaaaaatatccaaggcctgggtcccatctcaaatcaatggagaaatacacacattacatatttcaaatgtktttccatcctaggacacagccttatgagcctatcaggtgataataactgtgtactgctgtgacctcagggttaccc

SEQ ID NO: 152214 - DNA, 633 bp, Homo sapiens
tatcaggtgataataactgtgtactgctgtgacctcagggttaccctgaaagaggaggtttaccttcccaaaaggacatggggttgtgccttcatctggtgtgggacttcctcattctctcgcttaaacacatgggttttgagtcagccatttttrttacaatctgagctctacaactcattggccttatggccttgggagagacatttaatctctctgagcattattttcttcacctttccatgggaggtattttatgaccctctccatgtattgaagctgaaatgagatgctaagtataaaactttagtacaggtcctgacactcagtattgtaggttttcttattaatcattgaaatcaaatgttttagatttagtgaaaaatataggatttcaaagcaaggacagcaagctaaggctcatcaactaagagtcacaaatgattgtcttagacctgtgtgttagaccatttcaactttgaaaatagcctctagtcaagtatggatatgttttaattgtccaaaatgtgtacctgtagtcaaagttaggtaggagggaaggacatgtgaaaggaagatttcagaatgtttttcatttacattttggaggaagagaaagagtgcactcgttcc

SEQ ID NO: 152215 - DNA, 633 bp, Homo sapiens
tatcaggtgataataactgtgtactgctgtgacctcagggttaccctgaaagaggaggtttaccttcccaaaaggacatggggttgtgccttcatctggtgtgggacttcctcattctctcgcttaaacacatgggttttgagtcagccatttttattacaatctgagctctacaactcattggccttatggccttgggagagrcatttaatctctctgagcattattttcttcacctttccatgggaggtattttatgaccctctccatgtattgaagctgaaatgagatgctaagtataaaactttagtacaggtcctgacactcagtattgtaggttttcttattaatcattgaaatcaaatgttttagatttagtgaaaaatataggatttcaaagcaaggacagcaagctaaggctcatcaactaagagtcacaaatgattgtcttagacctgtgtgttagaccatttcaactttgaaaatagcctctagtcaagtatggatatgttttaattgtccaaaatgtgtacctgtagtcaaagttaggtaggagggaaggacatgtgaaaggaagatttcagaatgtttttcatttacattttggaggaagagaaagagtgcactcgttcc

SEQ ID NO: 152216 - DNA, 405 bp, Homo sapiens
gtgtagatttccttgtcagcacttgctgtgattggtaaacgctgagcaagatagttggcacasagaatttctgtggcaaaaattaaaataaagtcaccatatatcttgtggatttaaccctaacgttggctttgcttttcgacactgcaatcaaacataacctaatatttctatatggtatgtgtatgcatcgctcaccacaagatcagtgtgctgggtcttaaagggaaacaatttatgaacatacagcacacaagtaggacatatatgcacacagagtgttgaaaatttggtggtaagagttgtattagaccacacctaggatgataggtacagctccgtattccatggtttaccagaatgttgaactatagaaagtctaaaaaggaaggtgaccaaattgac

SEQ ID NO: 152217 - DNA, 405 bp, Homo sapiens
gtgtagatttccttgtcagcacttgctgtgattggtaaacgctgagcaagatagttggcacacagaatttctgtggcaaaaattaaaataaagtcaccatatatcttgtggattyaaccctaacgttggctttgcttttcgacactgcaatcaaacataacctaatatttctatatggtatgtgtatgcatcgctcaccacaagatcagtgtgctgggtcttaaagggaaacaatttatgaacatacagcacacaagtaggacatatatgcacacagagtgttgaaaatttggtggtaagagttgtattagaccacacctaggatgataggtacagctccgtattccatggtttaccagaatgttgaactatagaaagtctaaaaaggaaggtgaccaaattgac

SEQ ID NO: 152218 - DNA, 426 bp, Homo sapiens
tcatttgttatttgtctttcattctggttttgtatgtttttgttttttcaatacaggtcctcactcctgtcactgaggctggagtgcagtggcacaatcacggaatcacaggtcactgcagtctcaacttcctgggctcaagcaatcctcccacagcagcyctcctgagtagctgggaccacaagctcctgctaccacgcccagagtttgttgttgttgttgttgttgttgttttgttttgttttttagtaaagatggggttttgtcaagtcgcccaggctggtcaaattcctgggatcaagcgatccaccttcctcggccaaagtgctaggattacaggtgtgagctactgcacctggtctgtccttcattctgttgatatgatgtatccccatttattgatttgcgtacatcaaccatcctttt

SEQ ID NO: 152219 - DNA, 554 bp, Homo sapiens
tagggtaaaagtttgtgtgtgtgtgtatgtttttttttcccttcaacacatttaaatatgtcatgctgtgtccagaattggtgggttcttggtctcactgacttcaagaatgaagcctcggaccctcacagtgagtgttacagttcttaaagatggtgtgtccagagtttgttccttctgatattcagatatgtctggagtttcttccttctggtgggttcgtggtttcgctgacttcaggagtgaagctgcagttcttcgcggtgagtgttacagctcttaaaggcggcacttctggagttctttgttccttctggtaggtttgtggtctcgctggcctcaggagtgaagctgcagacctttgcggtgagtgtaacagttgataaaggtggcgagtctggagttgttcgttcctcccggtgggttcgtggtctcgctggcttcaggagtgaagctgcagaccttcccggtgagtgttatagctcataaaggtggcgctgacccaaagagtgagcagcagcaagatttttgcraagagcgaaagaacaaagctt

SEQ ID NO: 152220 - DNA, 641 bp, Homo sapiens
tggataagtatccacagaccagcattttaaaatagtggggagttacacatacattttgggaaaactgacatagtaaagacattygcattcaattatatttttgtgcctttttgtttgcttctgatacttgttaatcacaatttttatttttgtttctcctgaatccacctcctttatgcattgtttatgattatgaatatgcattcttgcaagcagggctttgttatttgaatagtttcatgcattcaatattaataaagagttggtgtttattaggtttctttccctttgcatcccagaaaatactactttttgtattgtatttgttaagaaactaaaggaaaaaaatgaccagcagttagacacttctctgtaattctttttgatcattttacatttatgccttatttttcaactctttatatgatctgaaataggatacagacttatttcactaactttgattgttgatggttttgggggaagggtgtcacagttaacaaatggcgtttctttcagtgcattttttgatttaggaaaggaagtaaatcttaccagaatcaacttagaaatttaagtaaaggcttcatgtaaacttgcaatgtttctgtaaagttctgccttccatttgaccagtaatt

SEQ ID NO: 152221 - DNA, 641 bp, Homo sapiens
tggataagtatccacagaccagcattttaaaatagtggggagttacacatacattttgggaaaactgacatagtaaagacatttgcattcaattatatttttgtgcctttttgtttgcttctgatacttgttaatcacaatttttatttttgtttctcctgaatccacctcctttatgcattgtttatgattatgaatatgcattcttgcaagcagggctttgttatttgaatagtttcatgcattcaatattaataaagagttggtgtttattaggtttctttccctttgcatcccagaaaatactactttttgtattgtatttgttaagaaactaaaggaaaaaaatgaccagcagttagacacttctctgtaattctttttgatcattttacatttatgccttatttttcaactctttatatgatctgaaataggatacagacttatttcactaactttgattgttgatggttttgggggaagggtgtcacagttaacaaatggcgtttctttcagtgcattttttgatttaggaaaggaagtaaatcttaccagaatcaacttagaaatwtaagtaaaggcttcatgtaaacttgcaatgtttctgtaaagttctgccttccatttgaccagtaatt

SEQ ID NO: 152222 - DNA, 521 bp, Homo sapiens
ccaaagtaatcattatagggtgtgcatttatttttgcgagcatcagtgtacttcaggttgtttttttagtatgcaaaacattatttgtggttgagtttacactgacatatttccaaccactgattctgatttagagtttttttcttgttctccatctctcctcacacctcccaagtggtaacattttgttcttaaatttatcaggcatttatgaaattgactattttctaaaaaaacagtaataccaaaagtatgtgtagaaggcagtactagtcagaatgcatagctcaacccagaactctacagctctaatagatttttgcctttattaagactgattaattgtcaatcgtaaaatttaaaaaaatgaattgttaatgaattaacaaggsacaaactatggtatgtcaacaaaaatatttttttcagtggattttgttagtagacagacacttcatgccagtagtttaggctgtaaggaaactctaagaactcattagacgtagaagacaacagataga

SEQ ID NO: 152223 - DNA, 460 bp, Homo sapiens
attgtgaataatgctgcagtgaacatagaagtgcasatatctttttgaagtggggatttaatttcctttgggtatatacccaaaagaggaattgctgggtcatatgatagttcttttttttttttttttttgaaaagcagtagtcaggtttaatagcagattaacacaaatgtatcagttttctatagttaccatagcacattaccaccagttttctggcttaaaatagttgttgtttttaatatcattaggaatctccatactgttttccataatggctgcaccagtctacatttccaccaacaatatacaagggtttcctttttgccacacccttgccaacatttgttgtcaatctttttgtttttttttataaaggcagatatacagagaaagagaataacacagtgggtaccaaaggtagaggcaggggggtatgtaggtcagagtatgcaaattg

SEQ ID NO: 152224 - DNA, 528 bp, Homo sapiens
cttagggggcacgaactgtggtttttttcttcctccccacccttctctgaatctttattatgtagcaaatattgtactctttaaagtatttgttgaatgacagaataaaaggatgctttatttatcagtatggctgaggtctgagctggatactytatatcttttcacttttcttctggctttttttctgtgttttttgctctttttcagcattggcatattatttgttagaaaatgttttccattctataaactttgtagcagatcaaataccagaagtgttagatccagcatttacaatctgtgtgtcctggggctactcacttagcgtcttcgagcctcagtttctgcattttcatgggttgttgggagtccctttagctctatagtgatcacctataaacctcctcaactacctgcccacagaaaataaattttcccatcaaaccatgttttgtgccaatgaaattgagttattctcttatttgttatttggtttaatatggagatgcataaaataacaaagag

SEQ ID NO: 152225 - DNA, 486 bp, Homo sapiens
tagttcttgctgcattttgggttaactttgttcttaggcttaaaatttgtgataggaataggatattktgtttcattttacttcatatgtgtttactttcaaatcagaactgttattttattttaaaatgtacttatgcacaccttatctgatatcagtgagaatagctactcagacagcttcttgtgcaatgtacaattataggatgttttctcatatatgctgtgatataaatgacatccccctggagttgcctacagactcaatattttatatttttaatgaatttgaccctttggctaaaataatgtatactttagtgtcatttatttttaatttcaaattagtgagtcataagaataatggccaaatgttctttataaatttaaatgttttgccttctctgttatctcaatagtgtactcagaactgcaagtggtagaaacattattgatgccagcaaatggtgacataaagaataaatgg

SEQ ID NO: 152226 - DNA, 486 bp, Homo sapiens
tagttcttgctgcattttgggttaactttgttcttaggcttaaaatttgtgataggaataggatattgtgtttcattttacttcatatgtgtttactttcaaatcagaactgttattttattttaaaatgtacttatgmacaccttatctgatatcagtgagaatagctactcagacagcttcttgtgcaatgtacaattataggatgttttctcatatatgctgtgatataaatgacatccccctggagttgcctacagactcaatattttatatttttaatgaatttgaccctttggctaaaataatgtatactttagtgtcatttatttttaatttcaaattagtgagtcataagaataatggccaaatgttctttataaatttaaatgttttgccttctctgttatctcaatagtgtactcagaactgcaagtggtagaaacattattgatgccagcaaatggtgacataaagaataaatgg

SEQ ID NO: 152227 - DNA, 486 bp, Homo sapiens
tagttcttgctgcattttgggttaactttgttcttaggcttaaaatttgtgataggaataggatattgtgtttcattttacttcatatgtgtttactttcaaatcagaactgttattttattttaaaatgtacttatgcacaccttatctgatatcagtgagaatagctactcagacagcttcttgtgcaatgtacaattmtaggatgttttctcatatatgctgtgatataaatgacatccccctggagttgcctacagactcaatattttatatttttaatgaatttgaccctttggctaaaataatgtatactttagtgtcatttatttttaatttcaaattagtgagtcataagaataatggccaaatgttctttataaatttaaatgttttgccttctctgttatctcaatagtgtactcagaactgcaagtggtagaaacattattgatgccagcaaatggtgacataaagaataaatgg

SEQ ID NO: 152228 - DNA, 578 bp, Homo sapiens
ttatttcctcacttcccctaccccaggctctataacccccattccactctctgtttctatgagtttaattgttttagattacagatataattgaaaacatgtatttgtctttctgtgcctggcttattttacttagcaaaatgttcgcaattccatccatgttgctgccaatgacagaatttccttattatataaggaggaagtggtattccattttgtatatataccacattttctttatccattaatctgtggatggtcacttaggctgattccataacttggctattgtgaatagcgctgcaataaacatgggagtggagacatctctgacattctgatttcaaatcttttgggtatatacccaggagtgggatttctggatcatatggtaattctatttttagtctttcaaagaacctccatacatatttccacaatggctgtcctaatttacattcctaccaacagtgcacaagggtttctttttccctatgttctcaccaaygtttattatctttcgtctttttttattatagccagtctgacaggtgtgagatgatatataattttgattt

SEQ ID NO: 152229 - DNA, 561 bp, Homo sapiens
ggtgacggagcaagactctgtctcaaaacaaacaaaccaacagaaaaacaaaaactaggaaactaggatcactaacattgttccagtagcttctgtttgaggaatttgtttttttttttttttaagcatttaggcaggtagaaatgcatatgcaagtttctagcagaaaggaggcccctgtttgccacacatacctcgaaaccttaatgagagtcacttctgagtaaccctgatgtagctatccacaggttgctgataattaggaaccagctggctgcatagtgagtgaggatgaggctctgattttttttttttttttggcagagttagttcyctgacacctgttgtgctttgtaagttccatttatactttttaatatatctgctccttcctcactggggctctgacaactgtaaaagaatgtttccaccacagcattaactttgcttcaaatttgaaactttcattttatgtgtatatgaaaacacataactcaacctgtgcaaaatacatattgagtgagttaatatgtgtcacagaattactgcttgtatatttgt

SEQ ID NO: 152230 - DNA, 561 bp, Homo sapiens
ggtgacggagcaagactctgtctcaaaacaaacaaaccaacagaaaaacaaaaactaggaaactaggatcactaacattgttccagtagcttctgtttgaggaatttgtttttttttttttttaagcatttaggcaggtagaaatgcatatgcaagtttctagcagaaaggaggcccctgtttgccacacatacctcgaaaccttaatgagagtcacttctgagtaaccctgatgtagctatccacaggttgctgataattaggaaccagctggctgcatagtgagtgaggatgaggctctgattttttttttttttttggcagagttagttccctgacacctgttgtgctttgtaagttccatttatactttttaatatatctgctccttcctcactggggctctgacaactgtaaaagaatgtttccaccacagcattaactttgcttcaaatttgaarctttcattttatgtgtatatgaaaacacataactcaacctgtgcaaaatacatattgagtgagttaatatgtgtcacagaattactgcttgtatatttgt

SEQ ID NO: 152231 - DNA, 561 bp, Homo sapiens
ggtgacggagcaagactctgtctcaaaacaaacaaaccaacagaaaaacaaaaactaggaaactaggatcactaacattgttccagtagcttctgtttgaggaatttgtttttttttttttttaagcatttaggcaggtagaaatgcatatgcaagtttctagcagaaaggaggcccctgtttgccacacatacctcgaaaccttaatgagagtcacttctgagtaaccctgatgtagctatccacaggttgctgataattaggaaccagctggctgcatagtgagtgaggatgaggctctgattttttttttttttttggcagagttagttccctgacacctgttgtgctttgtaagttccatttatactttttaatatatctgctccttcctcactggggctctgacaactgtaaaagaatgtttccaccacagcattaactttgcttcaaatttgaaactttcattttatgtgtatatgaaaacasataactcaacctgtgcaaaatacatattgagtgagttaatatgtgtcacagaattactgcttgtatatttgt

SEQ ID NO: 152232 - DNA, 605 bp, Homo sapiens
taggaatgcttgtgatttttgcacactgactttgtatccttagactgctgaagttgcttatcagcttaaggagtttttgaactgagatgatggggttttccaaatatacaattatatcatctgcacacagagacaatttgacttcctctcttcctatcatgtgattctatttgataacttttgattcatagaccttccttcaaatatgaagtctatcctctcaaaacttgatgctgtcttatcaactaagtttatacaatattttcaagtttttgtcaccatttcaataatgttcacagcatcttcagcaggagtagtttccatctcaaaaatcactctctttgcataatcataagaagcaacactttatccattcaagttttatcatgagactgtagcaattcaatcacctcttcaggctccatctctatttctacttatcttgctatttccaccacatatgcagttacttcttccactaaagtcttcatcttctcaaaattatccacgagggcaggaatcracttcttccaaactcatggtaatgctaatatcttccttctcctgtaaatctcaaatattcttagtgacatctagaataatga

SEQ ID NO: 152233 - DNA, 434 bp, Homo sapiens
tttagtaacctttaaatttattctagacataagtcaccaagtatayatcagtaattatttgatttgtagatgtttctgacaaagcagaataaagaaccatctttcaagatacatgataaatgaaacaacagacccaaagagtgactggaatattccttcttagcctaaagtaggaaaatttaaaagttattgattctcatggtcaagagattatcgccataatttccaaaaaactaagttcatggatcgtgatatcagtctcattttgatgcaaagaagtgagaaaatacataaagcaaacaaatgtgccagtgtcgcaaagtaaactaatgaacagagacatttaaacaacttcacaggttttcattatggaaaaccaaaataattagcagtttccactgaaaatgcctcctacttcttttacaaatcattaa

SEQ ID NO: 152234 - DNA, 475 bp, Homo sapiens
acctggcttggatcatgtgacgatccctgaaccaatcactgtcacctgatagagtaggctggccctgcctctgtcacacatcctccctggccatgctttgggaagaatgggggtcaaaatgaagctcatccaaccacagggacagagcataggtgggaggggtaatctcctataagaagggatactcggcagaaaaaaataaaaatagaaatattacatcaaaggctgcaacagggcttgctttgmaagtatggattaaaactcactgcagcctagagctagagatatacccgtgggtggcagggggtagaaagtcacacttcaagcatttaagcattattgaatatctactaccatatttcattggctctaagatgtacatttttcacattttaacaactgagatatcagaatgtttctcacaatgaatgacattctacaattgctgtcagccagggggcaactgtgatatagt

SEQ ID NO: 152235 - DNA, 471 bp, Homo sapiens
cacgttatttttatgatgagtttcaaagataagscctgtcctcagggaactctccatctgtttaggggaactgaggaagagtgatggcaagaggggacaacctgcatgagggttggggtgatttaggcttggttgtaacatcattagatttgtcatgtactttggctgcttttcaaagggccatatgaggagggcctaaaggtggaagaatattggaatagtccagttgagaagtgatttgtagagtcgggcatagtggcatacacctgtaatcctagctacctgggaggctgagctgggaggatcatgagcccagaggatggagaccagcctgggcaatatagccagaccacttctctaaagagagcgagaagcaatttgtgctgtcaaatagcaaacagtcaagatggggtagcagaaatggttgagttgcactagccgcaattttttttttttaagttgagagagaat

SEQ ID NO: 152236 - DNA, 354 bp, Homo sapiens
ttttcccatttttgctggagaatgtattttggactcttgactctgtttcactgactttttaagttatatgcacacctgtttgtttcactttttttcccttagataaaatgtgtcttggatgttttggtgttcctcttcccactaaatcccatttgagaccaaaggatttatttytctagttgctgtgagtccccttagaaattccctcagttgaataaacttgttgaacctttatttgggcaggaaacattcactgacatatatatatgaacgtacagccctctccgcaagctttgaaacacatttctaggatcatctcatcttcagagctccatggggttggctgaggcaact

SEQ ID NO: 152237 - DNA, 446 bp, Homo sapiens
tccattctcacactactataaagatactactgagaatgggcaatccatacagaaaggaggtttaattgactcacagttccacatggctggggaggcctgaggaaacttgcaatcatggcagaaggtgaagcaaggaacatcttacctrgtggcaggcaagagagtgcaagcaaagggcaagtgccacacgttaaaatcatcagttctcatgagaactctatatcatgagaacagcatgggagaaaccacttccataatccaatcacctcccaccaggtccctccagtgaaacgtgaggattacaattccagatgaaatttgggtggggatacagagccaaaccatatcccattcaatccagaaccatttgttgaagtctgcattttaataggagaaggcaataaacaagttaaaaagtacagttcagatgaaaagccattgaaagg

SEQ ID NO: 152238 - DNA, 575 bp, Homo sapiens
tgatgcactgtgaaagtgtaaattgtcaaaagcaaaattatctacccttggcattgtcattcatcacattgcctaagcagaattgcaatctcaaaggaagtgggaggggaggagaagtgagaagtgacataaaatgattagttctgctccacagacacaggatgctggcatgctgaggaccaagttaagcatcttagttgtgaatttgtttgtaaatgtgtctgtgatttgcaccatgaggaaaaatgaagggaacatgaaaccacattgtaggattgcacgtgatggtaaaaaaaaawaaataaacaggccatattttattgttgatattattttctaactttgttgagcttgcagaattttcccctttccctctcctccatccattcttccatatgtattcctgttaatgttaaccctcatactaaaaacaaagcaagcacatcttaattactatgagtcaaaaggttttaacattcactttcattgtgggcttcttaaatcagggcagtttagcactgtggttaaaagcaccaactctggaggcagtttggctgaatacgaacatcagctct

SEQ ID NO: 152239 - DNA, 548 bp, Homo sapiens
tgatgcatcactggttccaaaagccaatcacttaattctgagctcacattaaaagaaattacattttaaaaaataaacatcagtggaattggttgttggactttctttcctgcaaaagactttatcttacagagctatgactttgctctacaccaccacataccacacccttagtaggaacacttccactcacagcccttaatcatcttatttgaagctagaaccaaattaatcttctcaggaactaggaacaaaaaatgtcttcatgccgtttctattatgagataactatgctaaaacaaatgaaagaaaacaatggttattatcacctactcattaggtttccaattaaagaaaatcttcactctgacagactttgactagttcttctccattcttctgtttctgaaaagacgcttttcttaatcacaaaacctttgacaatttcagaatattgtgaaatgaagataacattagaatatamctcatagtgttttctgagaattaaaaaactgtagagaggttagaatataagtatcagggaaggt

SEQ ID NO: 152240 - DNA, 553 bp, Homo sapiens
aaacacttataaaacaatcagatctcctgagaactcatgcactaccacaagaacagcatgggtgaaactggccccacaattcaattacctctacctggtctctcccttgacacatggagattatggggattatgcaaattacaattcaagatgaaattttgggtgaagccacagccaaaccatatcaggcagccaaaaaggtttttgaggaatttattcattcaaatgtttatttattcaacaaatattaatcaagttttactatgtagaagtgaagttaatgcaattatttaatactaacattataattttttactagtagttctcagttactcaaataatgaatttttaggaccttctatccctagccattcttgcttataattttactaaatttttatatcaattcctgcatgtrtttacttatatgcatccagttataccatgactatcttcaaacaatttcgaggtgattgtttcacacatgactatgcaaatttctaaaatgtaagtagcagtcaaccataattgacataaatatgagatcccagat

SEQ ID NO: 152241 - DNA, 619 bp, Homo sapiens
gatattctttatttccttaaggttataaatgtgtgctctgagaaagataccattaagagaacggaaagacaagactcagactgggaaaaatatttgcaaaacatgyatttcatcaaagaattgcatccaaaatgtgcaaagtcctgtaaaactaacaacttaattaaaaaataaacaaaagatttgaatatcaaacaatatacgtgaatgctaaataagcatatgataaaaagtacagcataattcatcattagggaagtgcaaattaaaacaacagtgagaaattactacacacataatggaatgtctaaagtccaaaaaaaactgatattaattgctggcaaggatgtggagtaacaagaattctcattcactgctactaagaatgcaaagtggaggagaaactttagaagacagttggcagtttctcacacagcaaaacatacaacccaactgatctgaaaagttgtgtctatacaaaaatttgcatgtaagtgcttatggtagccaaaatgtttcataaataacaaaaaaagtgaacatactaataagctgtagtacatgcatataatagaacactattcaggaactaaagggaatcaagaccctgaaaatatta

SEQ ID NO: 152242 - DNA, 566 bp, Homo sapiens
ataattaattgagagaggggatacagggaggtacagttgggaggagaggaggtacttgataagaaattaagaggtcattgttgactatgttaagttgagatgcttattcttcagaaaaaataaaaagttccactgagttaaacactgaataaataagatatattcagaaataacttcagtaaagttgagggttactgttgactttgacaaaagcagtttctaagtagtggtggagacaaaaatctgattgattgagatagaagaataaaatgtgaagaagcagtaaaagcaaataaacagttgaaaagtttgcctcaaaatggtgcaatgatatgagaagagagctgaattgggaaatggatttactgtattaatccgttctcatgctgctatgaagaaatatctgagactgggtaatttataaagaaaagaggtttaattgactcagttctggacggctgggaggcctcaggaaacttaaaatcatggcaaakggcacctcttcacagggtggcaggagagagaatgagttccaagcaaagggggaagccccttataaaaccatc

SEQ ID NO: 152243 - DNA, 550 bp, Homo sapiens
aaaaactttgacaataaaattcagaattgaaaattggactttgcccaaataaaaaatgttctgctaatcaaaagacacttagaatatatataatatataatatatatatatatacacacacacacacaagacacaaggagataacatttttcatatatttatctgaaagaattcctatccataaaatatatagaacttctacagatccctaatgaaaagataagtagtagaaaaaatttgggtcaggcatggtgkctcatgcctgtaatatcccagcacattaggaggctgaggttgggggattgcttgagtccaggaggtggaggctgcagggagccatgatcaggccactgtgccactgcactccagccggggtgtcagtgagactctaactaaaaaaaaaaaaaaaaaaaaaaaggatggatagatgtactatatatatgcaaaattctttaagcaacaatttatataggaaggataaaaatggtcaatgatcatatgaaaaaattctcaccttccttacatatcatagaaaagcaaagtaaagcca

SEQ ID NO: 152244 - DNA, 550 bp, Homo sapiens
aaaaactttgacaataaaattcagaattgaaaattggactttgcccaaataaaaaatgttctgctaatcaaaagacacttagaatatatataatatataatatatatatatatacacacacacacacaagacacaaggagataacatttttcatatatttatctgaaagaattcctatccataaaatatatagaacttctacagatccctaatgaaaagataagtagtagaaaaaatttgggtcaggcatggtgtctcatgcctgtaatatcccagcacattaggaggctgaggttgggggattgcttgagtccaggaggtggaggctgcagggagccatgatcaggccactgtgccactgcactccagccggggtgtcagtgagactctaactaaaaaaaaaaaaaaaaaaaaaaaggatrgatagatgtactatatatatgcaaaattctttaagcaacaatttatataggaaggataaaaatggtcaatgatcatatgaaaaaattctcaccttccttacatatcatagaaaagcaaagtaaagcca

SEQ ID NO: 152245 - DNA, 456 bp, Homo sapiens
ttgtagtaacttgttacaatagtctcaggacactgatccagaaaccatgtcctgatttccctctggaccatctccccttccccaccctctgcccatgtgcttcgcattggaagtggctgctcccttttctctaggagtggtayatttgaccctgtcctaagccagttcaactttacatttctttggcctcaagattagctcaggaatgaacacataacccagacatccaatgaaagtgagtatatgacattcatagctactagaaatactttatctttcctgctggattggaaaacaaacaaacaaacaaacaaacaaaaggggctatagttggattacctgaatggtatcctgcaaccatgagggaagaggttgctgagtaatggaaacatcttgaagaaatcaatccagagactggtagatttgagttcgagtggtttctttcgggctcatgtc

SEQ ID NO: 152246 - DNA, 562 bp, Homo sapiens
ctcacatgatgtcaatcaaggctttggctggggttgtggtcttacttgaggcttgaatggataaggatttatttctaagctcacttaggttgttggcagaattcagtttcttgcaactaggatgagggcttctttctggctgtcatcagatcctacartctgcctcatagttctgtgctgtgtggggttccccagcatggtttcttgactcctcaaagttagcaaagatgggagagaggaagggggagggagagaaaaagagagaacacatgtgcaatacaggtgctgcaatctaatataacataatcacataatcatgtacacataatgacttacatcttgccatctttaccacattctataggttcgaagcaagtcatgaatccttccttcccacattcaaggataaggaatcatacggggcatggacaccaggaggcagagattgtggggctgctaccataagaatctatctgccacaaaaatgtacatgtgcctttttccttaatttctttctttttttgttttgttttgtttttggaacagagtcttggtctgttac

SEQ ID NO: 152247 - DNA, 368 bp, Homo sapiens
tcaaaatgttcatgtttatgcccaggttcaacatgtgaatccttccatcactttcctctttgaacactcawgagggaatagggtcttgtgctctctgaagattcctttagtctttggcctgcccccatgtcaggtggtaatcaccactttaaaacactgagattagtgcagtaaaaaagatttatgaatattaattctttttatagcaggtcataatgtgagctagagaacaaacagagtatagtttcattccaacgccttactgcaaagaagaatgggggttgcacattgtggaaaatattagttggagatgctagtttgaaaactaatttattgagaatggctttggccataactcgccagacacc

SEQ ID NO: 152248 - DNA, 368 bp, Homo sapiens
tcaaaatgttcatgtttatgcccaggttcaacatgtgaatccttccatcactttcctctttgaacactcaagagggaatagggtcttgtgctctctgaagattcctttagtctttggcctgcccccatgtcaggtggtaatcaccactttaaaacactgagattagtgcagtaaaaaagatttatgaatattaattctttttatagcaggtcataatgtgagctagagaacaaacagagtatrgtttcattccaacgccttactgcaaagaagaatgggggttgcacattgtggaaaatattagttggagatgctagtttgaaaactaatttattgagaatggctttggccataactcgccagacacc

SEQ ID NO: 152249 - DNA, 563 bp, Homo sapiens
caattcagtagcctctccttgctgtctttgcagtattctgacatcattgaccctttcttccctgacattctctcttcctttgacatcagcaagaaaaatcctagaaggctgtgtaactgtagttaagggcacagactggattcagccgggttatcggggttccaatctcagccctatacttaactagctgtgggactttggacaagttaattaacctcaytgtcctcatctgtaaagtgggagtaagggtagtactcacctcttggagtggctgtgtgtcccctgcctgttaacttggtcacctttgagaatcaatgtttaattttgatgcccgagctaagtcattggtttttctctttagagtttatgttttggagtcttgattaagaaatcctttcctattccaaagtcataaagatattatttacactttcttcattaattctatacttttaactttcacatttgattcttattgcatatagagtttattttttatttgaagggaagtagcaattaaattttaatttgccatagagtgaggttatttaccaaataatcag

SEQ ID NO: 152250 - DNA, 541 bp, Homo sapiens
aatcaacaaaactattttttattttgggtggaaaaaatgcattctatacatttccaaattgtgcgtattataaaccaggatgcttgcctccattctgcaaaccactatctcttcaaatgaggagaagatcagaaatgaagtgacttttccacagtctcatgtggagttagtgacagagctgggcctggaaccagtgtagtcttcatctcacttgactgtatgtatacatgcacacgcatgcattcatgtatgcacacattctgcctctgcagccagttccactgaatgtaacagagatgactatgamccttgcagacagccagccttgcaggggtgaggattatatgctagtaggcagcaagtttaggtctagagaagatttgtgattgtcccttaggaaaccttggttcctgacatcacatgagaccatctaatccccagagcaggtctttttctctctactgagatgtgtatcacctctttggagcgccacctccagtgaaagctaaacttttccagaatgtcccagaccccagtgaca

SEQ ID NO: 152251 - DNA, 541 bp, Homo sapiens
aatcaacaaaactattttttattttgggtggaaaaaatgcattctatacatttccaaattgtgcgtattataaaccaggatgcttgcctccattctgcaaaccactatctcttcaaatgaggagaagatcagaaatgaagtgacttttccacagtctcatgtggagttagtgacagagctgggcctggaaccagtgtagtcttcatctcacttgactgtatgtatacatgcacacgcatgcattcatgtatgcacacattctgcctctgcagccagttccactgaatgtaacagagatgactatgaaccttgcagacagccagccttgcaggggtgaggattatatgctagtaggcagcaagtttaggtcyagagaagatttgtgattgtcccttaggaaaccttggttcctgacatcacatgagaccatctaatccccagagcaggtctttttctctctactgagatgtgtatcacctctttggagcgccacctccagtgaaagctaaacttttccagaatgtcccagaccccagtgaca

SEQ ID NO: 152252 - DNA, 541 bp, Homo sapiens
aatcaacaaaactattttttattttgggtggaaaaaatgcattctatacatttccaaattgtgcgtattataaaccaggatgcttgcctccattctgcaaaccactatctcttcaaatgaggagaagatcagaaatgaagtgacttttccacagtctcatgtggagttagtgacagagctgggcctggaaccagtgtagtcttcatctcacttgactgtatgtatacatgcacacgcatgcattcatgtatgcacacattctgcctctgcagccagttccactgaatgtaacagagatgactatgaaccttgcagacagccagccttgcaggggtgaggattatatgctagtaggcagcaagtttaggtctagagaagayttgtgattgtcccttaggaaaccttggttcctgacatcacatgagaccatctaatccccagagcaggtctttttctctctactgagatgtgtatcacctctttggagcgccacctccagtgaaagctaaacttttccagaatgtcccagaccccagtgaca

SEQ ID NO: 152253 - DNA, 395 bp, Homo sapiens
tgacattctaaaaaatgctgcctgtttggagatggraagtgccacagaatcatggtttagggctgccaagaatcaaagatgacagagggcttggggcaaggtttctcagattagggttgggagattagagttgggagaccacctgcctgcctcagaatcttgatttttctcataccagatctgatttttccttggtgctgtcatttgtaaccttccctcaaaacaaagagagaacacactgtagttttttttctgcaactggtctgatttgcacaccatcaagtggcaatatgtgcctttggcgagcaaattagtgggattaaaacagctatcaagcatgctgcagcagaaaggattcctcccgcccagctgcacattgttatcactactgtgaa

SEQ ID NO: 152254 - DNA, 465 bp, Homo sapiens
gagacccttgcttgatgttcatggtttattttttcccatgtaaattcagtcagagccctgggcagagcctcagaaaaaaaccttctcaagtggtaggggcttgtcctaatggagctcatagaagcaacgtggccaggaaggcagtcaggaatgaggcaggtagaaaattccctgagtaggacgaagggggctgggagcatagctctcccccatttgccagcgtaagccgaacagcytggggtaagccttattcaactgcacctgcgcttgtggtgccagaaacttctgggcttagggaacattgcccttccgtgtctgggaaggacactgaataaactgggaagataatgactggctgcattaaaaaagcaaaaaacaaaaacaaaacaaaacaaaaaaacccccaaaaccaaaaaaaaaaaaaacaaaaaaaaaacaccaaaccaaccaactcttacatcctga

SEQ ID NO: 152255 - DNA, 517 bp, Homo sapiens
gagagtgacaagctagtttccttttatactctggagagggaaaaaagaaatgtaacaagaaggattgatgttttgcattcatttattcaaataatttttattaagaagttacatatgccaatcaccatgctaaatgctgagaaaataatactgaattagatgcaatccttttttcttaaagagtaaaggatcttgtgcagaagtcagaacagtggccgggcaattaccatgcagcgatctaagtgctccattggaggggtatgtggctagcctgagcaatatgagcctgtacagcaacacacatcagatgggtaattgtagaagctttagagaatgtcaagatctgtttcagctgtttgaggtgggtggagtgaggcaagatakacaagatggccactggaaggcatcatctattattggatttggttttttagtacctcttgtgggtgagttttgatagagcatcctaccaagatgcatgttcttttggcaagagtaagaggttcctgaaaaggtt

SEQ ID NO: 152256 - DNA, 592 bp, Homo sapiens
agtggctgcaaaactcaggtatgcagtgtgagaagatggtcagtggtgtaatgaaaaaagtactgggttgacagtagaaaactgggttcctaacctggtgctaccactagtaagccgtggaatatttggtaagtaacttctttctgagcctctccctcaacttataaatgtggaataaatcgtctctgctgtcttagttcatttgggctgttataacaaaataccataaactgggtggcttacaaacaacaaacctttatttctcatagttctgaaggctgggaaatccaggatcaaggtgcctgcagattcagtgtctggcgagggcatgttcctcatgaataatgccttctgtgtgtcatggcagcaggggcaaatgggctctctggggtcttttttaaagaacactagtcccattcatgagggctttgcccttaggacctaattatctcccaaaggcctatctttaaataccatcacgtcgyacttagaatttcaacatataaatttggggcagggggacagaaactttcattctgtagttcatgccttagagaattgtggtgaacaatgcatgagagaatgcatgcaa

SEQ ID NO: 152257 - DNA, 468 bp, Homo sapiens
aaaaccttgtgatggctcagacactagtgggaacctgggaattacaagggaggtcaaagagctggagtcggggagccctgtgggaggtgaaggcwtgcatgtttggatcttgaaatggaacagggaggaccaagggctccaggtctttgctccaaatcagaataaactaggctgcccccatgcataactagctcagaagctcaggaagctcacatatagggtggaagaatccctccacatatgacttcatagaggcccttatcctgtgcatgctgctctaggcaccctgctgtcccacaggcagggtctatgttagggggcagtgtatgtatgattgcagcaagctcaggactggtaccctagccagctggaggaccctgagcccatgactggacccctttagacagcattctactctttttaaaagaaagagttggcctggcagacctctacagcttcttcctgcct

SEQ ID NO: 152258 - DNA, 468 bp, Homo sapiens
aaaaccttgtgatggctcagacactagtgggaacctgggaattacaagggaggtcaaagagctggagtcggggagccctgtgggaggtgaaggcttgcatgtttggatcttgaaatggaacagggaggaccaagggctccaggtctttgctccaaatcagaataaactaggctgcccccatgcataactagctcagaagctcaggaagctcacatatagggtggaagaatccctccacatatgacttcatagaggcccttatcctgtgcatgctgctctaggcaccctgctgtcccacaggcagggtctatgttagggggcagtgtatgtrtgattgcagcaagctcaggactggtaccctagccagctggaggaccctgagcccatgactggacccctttagacagcattctactctttttaaaagaaagagttggcctggcagacctctacagcttcttcctgcct

SEQ ID NO: 152259 - DNA, 589 bp, Homo sapiens
cgatggaaacagataaaattccagctccggacagaacagtctgggagatgcaagggagaaaaatgtactgattttagagttttttagtagctctcaaaaccaagggtggtcctcacttgacctagaacaaatgggaaatgcagagaggaaggaggctctgagagaaaaggaaagaggggccagggccatcaggacacatgcttgaattacgtcagtaaattatccgaaaaacattcatccttgctgagtcaccatggctgacaaagtgctcccatctaagttccaggagaaatggggctggctgtcatacttgcttaatttagaaacaagaatatasctccttggtgagactgagtccactgctagttccctcgcaggtacatccatgctccgtcccctggcagaaggctctgccccactctgccacagtgccagtccacccacctctggcctgggtaaccccctgtggtcacagccccggacagaggaaagagaacctcctgaaggaaacctcagtctggcctcaggtacttcatgtctgaaatagagatcccggcattggccctaaggagtatggggggggtgaagc

SEQ ID NO: 152260 - DNA, 589 bp, Homo sapiens
cgatggaaacagataaaattccagctccggacagaacagtctgggagatgcaagggagaaaaatgtactgattttagagttttttagtagctctcaaaaccaagggtggtcctcacttgacctagaacaaatgggaaatgcagagaggaaggaggctctgagagaaaaggaaagaggggccagggccatcaggacacatgcttgaattacgtcagtaaattatccgaaaaacattcatccttgctgagtcaccatggctgacaaagtgctcccatctaagttccaggagaaatggggctggctgtcatacttgcttaatttagaaacaagaatatagctcyttggtgagactgagtccactgctagttccctcgcaggtacatccatgctccgtcccctggcagaaggctctgccccactctgccacagtgccagtccacccacctctggcctgggtaaccccctgtggtcacagccccggacagaggaaagagaacctcctgaaggaaacctcagtctggcctcaggtacttcatgtctgaaatagagatcccggcattggccctaaggagtatggggggggtgaagc

SEQ ID NO: 152261 - DNA, 562 bp, Homo sapiens
ggccaggatgtgggctgacttagtagttctactttccattttaaggacactgaactgggggggaaagcgtgtacccagtctcactgttaacaatgtctgtggaaagcccagctggtaaagccagcaggcagaccaagttacccctgccccactsgtgatcacttacctcacagaacacaatcaagcatcacatgagcccacttttcagctcctgccttcccaaggcctgcttactgttgttttgttcttgctgctttcgtgggactttgtggtagatgcttgctaccatttattaagggttacttcctaagtgcaggctcctaagtgctttgcatatctatattgcttaattctctcaattaccctaaggggtacatattgtttcccacattttatggatgaaaaactgaggatcagagaaagcaaataatgcacccaaggtcatagagctaggaaaggataaagtcaggatttgaatatgggtctatcctattccaaagcctgtgcatgaagcctcatacatatagatctgtctcatctagctcccaagtcaccctggata

SEQ ID NO: 152262 - DNA, 562 bp, Homo sapiens
ggccaggatgtgggctgacttagtagttctactttccattttaaggacactgaactgggggggaaagcgtgtacccagtctcactgttaacaatgtctgtggaaagcccagctggtaaagccagcaggcagaccaagttacccctgccccactggtgatcacttacctcacagaacacaatcaagcatcacatgagcccacttttcagctcctgccttcccaaggcctgcttactgttgttttgttcttgctgctttcgtgggactttgtggtagatgcttgctaccatttattaagggttacttcctaagtgcaggctcctaagtgctttgcatatctatattgcttaattctctcaattaccctaaggggtacatattgtttcccacattttatggatgaaaaactgaggatcagagaaagcaaatratgcacccaaggtcatagagctaggaaaggataaagtcaggatttgaatatgggtctatcctattccaaagcctgtgcatgaagcctcatacatatagatctgtctcatctagctcccaagtcaccctggata

SEQ ID NO: 152263 - DNA, 566 bp, Homo sapiens
aggtgggaaatcagtcttcttcatgtaggcaagtgacaaaaacaatccacagaagactgtctgaggcattttagacaataataagtgactaaatggaaatgaagagtcccatgaaattccccatcccattgactgttaatgatgtggtaattataaacacaccagccaatattattaccactgtcaagtgaatactaaaaccagctggtacactcagcaaagcactctagctcctggaaagtcctggaaactcatgtaatgctataagtctaacttagatgaaatcttagtctaactgtgggaatgaagctgtatttctcaacatgcaacactacccagaaaaccctatgcaataagcacaagaagtcgtctctggtgacctggactgacctatatccatagtggtgactatttccaccaatccatataaggttggtacagagattggccagatgcttaccaagctcattctctcttctgaagcacacgactgtyacatttcccaaccgcccttgcagttaggaacagttgtatgactgagctctggtcaatggaaggtgagcaga

SEQ ID NO: 152264 - DNA, 566 bp, Homo sapiens
aggtgggaaatcagtcttcttcatgtaggcaagtgacaaaaacaatccacagaagactgtctgaggcattttagacaataataagtgactaaatggaaatgaagagtcccatgaaattccccatcccattgactgttaatgatgtggtaattataaacacaccagccaatattattaccactgtcaagtgaatactaaaaccagctggtacactcagcaaagcactctagctcctggaaagtcctggaaactcatgtaatgctataagtctaacttagatgaaatcttagtctaactgtgggaatgaagctgtatttctcaacatgcaacactacccagaaaaccctatgcaataagcacaagaagtcgtctctggtgacctggactgacctatatccatagtggtgactatttccaccaatccatataaggttggtacagagattggccagatgcttaccaagctcattctctcttctgaagcacacgactgttacatttcccaaccgcccytgcagttaggaacagttgtatgactgagctctggtcaatggaaggtgagcaga

SEQ ID NO: 152265 - DNA, 544 bp, Homo sapiens
accttaaaatctttttaaaaatcggctgggcacattgactcatgcctgtaatcccagcactttgggagtccaagktgggtggatgacctgaggtcaggagttcgagaccagcctggccaacattgtgaaaccccttctctactaaaaatagaaaaaaattaactgggcacagctactcgggaggtgaagcaggagaattgcttgaacccgggaggcagaggttgcactgagccattgcactccagcctgggcaacagagcaagactccatctcaaaaaaaatttttttaagttagaatttgcaaatagatttatatcctgggaatatcaaataatcatggattatctatgagtagactcaatatgtatgggctcatcacacagaagtatttaagaaggttagggaaacattactaatatgagaaaaaactaatttggatgtagacaagcattgttcatttattcaacaaatatttattttgccactgctagatacatacccaaaagaaaggaaatcagtacatcaaagagatatctatactccc

SEQ ID NO: 152266 - DNA, 544 bp, Homo sapiens
accttaaaatctttttaaaaatcggctgggcacattgactcatgcctgtaatcccagcactttgggagtccaaggtgggtggatgacctgaggtcaggagttcgagaccagcctggccaacatkgtgaaaccccttctctactaaaaatagaaaaaaattaactgggcacagctactcgggaggtgaagcaggagaattgcttgaacccgggaggcagaggttgcactgagccattgcactccagcctgggcaacagagcaagactccatctcaaaaaaaatttttttaagttagaatttgcaaatagatttatatcctgggaatatcaaataatcatggattatctatgagtagactcaatatgtatgggctcatcacacagaagtatttaagaaggttagggaaacattactaatatgagaaaaaactaatttggatgtagacaagcattgttcatttattcaacaaatatttattttgccactgctagatacatacccaaaagaaaggaaatcagtacatcaaagagatatctatactccc

SEQ ID NO: 152267 - DNA, 526 bp, Homo sapiens
cagcgtgtattgttcccctctgtgtgtccatatgttctcacatttagctcccacttatacatgagaacatgtggtatttggtttgctgctcctgcattagtttgctaaggacaatggactccagctccattcatgtccttaaaaaggacataatcttgttcttaaaaagttaacttctaattctcagttacaaaatttgtaaaatgatgatgatggctagaatataaggtgtatttcagaatcaaatgccatagtggatgtaagaacacattgtaaacactctaaatataaaaatgcaatataaaatataaatayaaaacataaatataaaatgcaatataaaattgcaaggtattattgttattatctagggccagcttctcctcatagttaaatgaaggcactagtgtaaatcattacctggctgaggcttgcacatttaatattttgccaaaactatacttaggtaggtaaattacaatgcgcacataactttgataatgatctgagctttgtatagtagaca

SEQ ID NO: 152268 - DNA, 554 bp, Homo sapiens
tattggttcataagaagaggcacagaaaggcaagtccattacaagtaaagtttctctcctagtactctctagtattaattgacaaggaagatcttctatgctttatgtcaaaagtattctagttgaaatcaataaacaagctggaatattccagcagtgattggtctaaggaggacaaacatttactgatgaacaatcacaattccagcaatcaaaagaggctgtttagctcaaaagttagtactgtactgtgtctcattttccatctccaacaggttaaaaaaacatctcctaagaaacatgtttatttgrtggtacaaaatgcctctgagatactcccagttttcacaactgctatttaaatggttttgaaaacttcaggttgcattgctgttgcaaagtttgaagacaaaggtgaacattaacaaaatcagaatcacagagtgacctggaatcagaacagaaatgttcaattatttgtgttatagcgagcccttggtaatgtgttgtattgtgtgtgtttatggaatgaatgttaaggcgggtgttttgag

SEQ ID NO: 152269 - DNA, 554 bp, Homo sapiens
tattggttcataagaagaggcacagaaaggcaagtccattacaagtaaagtttctctcctagtactctctagtattaattgacaaggaagatcttctatgctttatgtcaaaagtattctagttgaaatcaataaacaagctggaatattccagcagtgattggtctaaggaggacaaacatttactgatgaacaatcacaattccagcaatcaaaagaggctgtttagctcaaaagttagtactgtactgtgtctcattttccatctccaacaggttaaaaaaacatctcctaagaaacatgtttatttgatggtacaaaatgcctctgagatactcccagttttcacaactgctrtttaaatggttttgaaaacttcaggttgcattgctgttgcaaagtttgaagacaaaggtgaacattaacaaaatcagaatcacagagtgacctggaatcagaacagaaatgttcaattatttgtgttatagcgagcccttggtaatgtgttgtattgtgtgtgtttatggaatgaatgttaaggcgggtgttttgag

SEQ ID NO: 152270 - DNA, 521 bp, Homo sapiens
cgctgaatggctttctcaaaagtgaaaaatgggcastattctgatagtccatctttccatcagttcagctaactttcactgtacaccttgcattcattggtcactgtgcaaaaaaccagggatgaaaaaattcaaagccagtaacatataaggcacaattcctctactccaggagttcacagactggtgaaggcagacacaggcaaaagagtagaatgcagtccaataactaaagaattgatccctgcttactagctgtgtgaccatagctaagtttcttatctctgtaccatgagtgtaatggaggcgatgtcagtccatatctatcttgtctgttggttgtgaaaattcaatgagtttatgcaattagcatgtaatcagctctcaaccatgatctgatgttatgatgtgatggacattcagatgggtgacgtgaaccctatgtagcacggataaagctgaaagggaacgagagggggtacctctggttgttgctcaggaagctttagagatatatggct

SEQ ID NO: 152271 - DNA, 521 bp, Homo sapiens
cgctgaatggctttctcaaaagtgaaaaatgggcagtattctgatagtccatctttccatcagttcagctaactttcactgtacaccttgcattcattggtcactgtgcaaaaaaccagggatgaaaaaattcaaagccagtaacatataaggcacaattcctctactccaggagttcacagactggtgaaggcagacacaggcaaaagagtagaaygcagtccaataactaaagaattgatccctgcttactagctgtgtgaccatagctaagtttcttatctctgtaccatgagtgtaatggaggcgatgtcagtccatatctatcttgtctgttggttgtgaaaattcaatgagtttatgcaattagcatgtaatcagctctcaaccatgatctgatgttatgatgtgatggacattcagatgggtgacgtgaaccctatgtagcacggataaagctgaaagggaacgagagggggtacctctggttgttgctcaggaagctttagagatatatggct

SEQ ID NO: 152272 - DNA, 532 bp, Homo sapiens
taaactttgataacaagtttagtagaccaggtcttcagttcaacattagggaaatgctccaatgagtgatgctttgcatcttatattgtcttgtaaagacaatcaatagagcattggcagaaggaaatttaccagtgaataaatgattactcctatttttaagtgccatcctttcagttctgtaaaaaatatgaaattattttatgaaattgtctgagatctgtccttctacgtctctctgtgtcacctccatacagtggcactcttggagaaaaaagatgatgttacaatgaaaagacttatctgtgaccccttccaccaaggtacccacaactttyttcaccattgcacatggtagggctcctgtgaaaatctttttaggtggtcatagtaaattatttgtaggtggtggttggtctgaaaactttttttttttttttttttttttttttttactgcaacaacctaacaggaaaactaatcagagatcatgaggagagtggtatatcagtcagggactaatcaggaacat

SEQ ID NO: 152273 - DNA, 550 bp, Homo sapiens
atacatgtaccgcttgattaaggaatatataccgtaaaatccacccactgtaactatatagagtaatgattgtttactaagtttatacagctgtttaagcatcagcacaatgcagtctgagagcacttctataaccttatcaagtttcacatgacactttgcagtcattttctgctcctacccatggccctggtgatatggtttggctgtgtccccacccaaatctcatctwgaattataactcccacaattcccatgtgtcataggaggagcctagtggtaggtgattgaattacgggggtgggtctttcctgctctgttctcgtgataatgaatgagtctcatgagatctgatggtttttaaaaaggaagtttccctacacaaatgctctctttgagtgctgacatccatataagatgtaacttgctcctacctgtcttccaccatgattataaggcttccccagccatgtggaactgtgagtccaataaacctctttctttagtaaattgcccagtctcaggtatgcctttatcagcagcatgaaaa

SEQ ID NO: 152274 - DNA, 420 bp, Homo sapiens
actctagcaaatgctttccccactggtattgaaactttcaaaattctcattttcaatctgctatcccctccaaaatagtatttttagattagatttccttttcttcttcttttgtggaattcttccaaaaaatgtgaactatgtacattaagggaaatcataaatcagcaaactacgcaacattaaaatgcacgcagttcactttgaggatttgcagttagtaagaaytagatacatatatttggtggtattgttgtggatgtggaaatgtcattcatataaggaaaatgagtttatggtctcaagaccataaatcagtgagttgtctgagaaaccaagggtaccagtgaggcatttcctgatttttactcataatatttacaaagattaaaagagataaaattccaaatgtgaaggctt

SEQ ID NO: 152275 - DNA, 522 bp, Homo sapiens
agcatgggaactaaaatgtcaatcagcaagaaattttaaaaacatttcaaaagacttgttcttttttttaaacttcatcatgatacaaaaggccataatcctctgagaatccatttttctgccacaataaaakaaacaacaatgatgataaacttattttttaacccaagttaaaactgactatagagaattgcaatatgaagacgataaatattcattacacaattgagtgaaaactagccataaattcactggcatcataaacttggacaaggtcaaagttatcattttgtagactggatagttttagcactgatgtgtcctgatgatagtttttattttttaaaaaatttttatgttacttattttttgaaactaattaactaatttcaatagtttttggggaacaggtggtttttggttacatggataggttctttaggggtaattactgaggttttggggcacccatcatctgagcagtgtacactgtacccatgtgtagtcttttactcctcaccc

SEQ ID NO: 152276 - DNA, 522 bp, Homo sapiens
agcatgggaactaaaatgtcaatcagcaagaaattttaaaaacatttcaaaagacttgttcttttttttaaacttcatcatgatacaaaaggccataatcctctgagaatccatttttctgccacaataaaagaaacaacaatgatgataaacttattttttaacccaagttaaaactgactatagagaattgcaatatgaagacgataaatattcattacasaattgagtgaaaactagccataaattcactggcatcataaacttggacaaggtcaaagttatcattttgtagactggatagttttagcactgatgtgtcctgatgatagtttttattttttaaaaaatttttatgttacttattttttgaaactaattaactaatttcaatagtttttggggaacaggtggtttttggttacatggataggttctttaggggtaattactgaggttttggggcacccatcatctgagcagtgtacactgtacccatgtgtagtcttttactcctcaccc

SEQ ID NO: 152277 - DNA, 522 bp, Homo sapiens
agcatgggaactaaaatgtcaatcagcaagaaattttaaaaacatttcaaaagacttgttcttttttttaaacttcatcatgatacaaaaggccataatcctctgagaatccatttttctgccacaataaaagaaacaacaatgatgataaacttattttttaacccaagttaaaactgactatagagaattgcaatatgaagacgataaatattcattacacaattgagtgaaaactagccataaattcactggcatcataaacttggacaaggtcaaagttatcattttgtagactggatagttttagcactgatgtgtcctgatgatagtttttattttttaaaaaawttttatgttacttattttttgaaactaattaactaatttcaatagtttttggggaacaggtggtttttggttacatggataggttctttaggggtaattactgaggttttggggcacccatcatctgagcagtgtacactgtacccatgtgtagtcttttactcctcaccc

SEQ ID NO: 152278 - DNA, 512 bp, Homo sapiens
atagtttgcatctcatgtgatcataacattaagcttgaaacttaacaattctacatcatttttygtacttaaaacaccttggaacagcattaactaattaatcaaattagataacaattctgttatgaactgaaaattatattgaatcatttgctgcagaatatcaagatggcatatgtatagatgtcatttttgaagtaatgattatagccatgtgcagtaaagtatttattaccttatctaattaatacacattttggcatgtcagggtttgtgggtaattatagttttctattgcggtaataatttgtatgatttatgaagcctatgaaacaacaatgtgagccaaaaagctgtctggaataattacagttaagcagcgtgatcaacaggtatgcccagccaagagaacacagccctggggataagatcctcaaacaaacagaagcgactggagctgttcagttctcagcctgctttttctcacctgaaaaaaaatggcccacccactg

SEQ ID NO: 152279 - DNA, 512 bp, Homo sapiens
atagtttgcatctcatgtgatcataacattaagcttgaaacttaacaattctacatcattttttrtacttaaaacaccttggaacagcattaactaattaatcaaattagataacaattctgttatgaactgaaaattatattgaatcatttgctgcagaatatcaagatggcatatgtatagatgtcatttttgaagtaatgattatagccatgtgcagtaaagtatttattaccttatctaattaatacacattttggcatgtcagggtttgtgggtaattatagttttctattgcggtaataatttgtatgatttatgaagcctatgaaacaacaatgtgagccaaaaagctgtctggaataattacagttaagcagcgtgatcaacaggtatgcccagccaagagaacacagccctggggataagatcctcaaacaaacagaagcgactggagctgttcagttctcagcctgctttttctcacctgaaaaaaaatggcccacccactg

SEQ ID NO: 152280 - DNA, 623 bp, Homo sapiens
cttttttggtaattggctaacttctatttctttaatatttgccacttaccaaaattgatgctgttattcaaagaatgcattttatgaagatttcaattaaggctatgtgtgtatagtagttcgctttttcaaattatgggtgtccttacaaaattgatttattaaccatacattttattttattttaaaatttaatcatacactttaaaataaaataaggtgtatggttaataaatacactttatttatttatttatttatttatttatttatttatttatttttgagaaagggtctcactctgttgcccaggctggagtgcagtggtgcaatcttggatcacagcaacctcggcctcctgagctcaagcgatcctcccacctcagcctcctgagtacctgagactacaggcacatcccaccaaaccccaataatttcttctgyattttttgtagagatggggtttccccaggttgtccaggctggtctcgaactcctggattcaagacatcagcccacctgagcctcccaaagtgctgggatttcaagtgtgatatttatcatagactctaaaaatattaaagtgactgctattaaaaatatgaagctattaatgttatttc

SEQ ID NO: 152281 - DNA, 623 bp, Homo sapiens
cttttttggtaattggctaacttctatttctttaatatttgccacttaccaaaattgatgctgttattcaaagaatgcattttatgaagatttcaattaaggctatgtgtgtatagtagttcgctttttcaaattatgggtgtccttacaaaattgatttattaaccatacattttattttattttaaaatttaatcatacactttaaaataaaataaggtgtatggttaataaatacactttatttatttatttatttatttatttatttatttatttatttttgagaaagggtctcactctgttgcccaggctggagtgcagtggtgcaatcttggatcacagcaacctcggcctcctgagctcaagcgatcctcccacctcagcctcctgagtacctgagactacaggcacatcccaccaaaccccaataatttcttctgcattttttgtagagatggggtttccccakgttgtccaggctggtctcgaactcctggattcaagacatcagcccacctgagcctcccaaagtgctgggatttcaagtgtgatatttatcatagactctaaaaatattaaagtgactgctattaaaaatatgaagctattaatgttatttc

SEQ ID NO: 152282 - DNA, 623 bp, Homo sapiens
cttttttggtaattggctaacttctatttctttaatatttgccacttaccaaaattgatgctgttattcaaagaatgcattttatgaagatttcaattaaggctatgtgtgtatagtagttcgctttttcaaattatgggtgtccttacaaaattgatttattaaccatacattttattttattttaaaatttaatcatacactttaaaataaaataaggtgtatggttaataaatacactttatttatttatttatttatttatttatttatttatttatttttgagaaagggtctcactctgttgcccaggctggagtgcagtggtgcaatcttggatcacagcaacctcggcctcctgagctcaagcgatcctcccacctcagcctcctgagtacctgagactacaggcacatcccaccaaaccccaataatttcttctgcattttttgtagagatggggtttccccaggttgyccaggctggtctcgaactcctggattcaagacatcagcccacctgagcctcccaaagtgctgggatttcaagtgtgatatttatcatagactctaaaaatattaaagtgactgctattaaaaatatgaagctattaatgttatttc

SEQ ID NO: 152283 - DNA, 623 bp, Homo sapiens
cttttttggtaattggctaacttctatttctttaatatttgccacttaccaaaattgatgctgttattcaaagaatgcattttatgaagatttcaattaaggctatgtgtgtatagtagttcgctttttcaaattatgggtgtccttacaaaattgatttattaaccatacattttattttattttaaaatttaatcatacactttaaaataaaataaggtgtatggttaataaatacactttatttatttatttatttatttatttatttatttatttatttttgagaaagggtctcactctgttgcccaggctggagtgcagtggtgcaatcttggatcacagcaacctcggcctcctgagctcaagcgatcctcccacctcagcctcctgagtacctgagactacaggcacatcccaccaaaccccaataatttcttctgcattttttgtagagatggggtttccccaggttgtccaggctggtctcgaactcctggattcaagacatcagcccacctgagcctcccaaagtgctgggatttcaagtgtgatatttatcatagactctaaaaatattaaartgactgctattaaaaatatgaagctattaatgttatttc

SEQ ID NO: 152284 - DNA, 593 bp, Homo sapiens
caacctaagtgtccattaacagatgattggataaagaaaatgtaaatawacaccatggaataattttagccatacaaagaatgaaatgatgtcttttgcagcaacatggatggaaccataggccattatcttaagtaaaataactcagaaacagaaagtcaaacactccatattctcacttatcagcgagagctaaataatgtgtacacatggacatagagagtggaataatagacatagaagactcagacgagtgggagagtaggagcgggatgagggatgagtaactgcaaaacaggtgttgtgtacattattcaagtgatggttccactagatgcttggacttcaccagcaatatatccatgtaacaaaactacacttacatccctaaacttatacaaatgttttaaggtaaacataaagaacactatataccacctatatccttgtatcaataagcaagtttgggggaaattgagatgagaagacccatcatgactgaaatgggagagctgatgccttctttaatgccaaaattgtcttaagatttctcattgcaacccttccttcatcacagcaaaggttcagggagg

SEQ ID NO: 152285 - DNA, 593 bp, Homo sapiens
caacctaagtgtccattaacagatgattggataaagaaaatgtaaatatacaccatggaataattttagccatacaaagaatgaaatgatgtcttttgcagcaacatggatggaacyataggccattatcttaagtaaaataactcagaaacagaaagtcaaacactccatattctcacttatcagcgagagctaaataatgtgtacacatggacatagagagtggaataatagacatagaagactcagacgagtgggagagtaggagcgggatgagggatgagtaactgcaaaacaggtgttgtgtacattattcaagtgatggttccactagatgcttggacttcaccagcaatatatccatgtaacaaaactacacttacatccctaaacttatacaaatgttttaaggtaaacataaagaacactatataccacctatatccttgtatcaataagcaagtttgggggaaattgagatgagaagacccatcatgactgaaatgggagagctgatgccttctttaatgccaaaattgtcttaagatttctcattgcaacccttccttcatcacagcaaaggttcagggagg

SEQ ID NO: 152286 - DNA, 593 bp, Homo sapiens
caacctaagtgtccattaacagatgattggataaagaaaatgtaaatatacaccatggaataattttagccatacaaagaatgaaatgatgtcttttgcagcaacatggatggaaccataggccattatcttaagtaaaataactcagaaacagaaagtcaaacactccatattctcacttatcagcgagagctaaataatgtgtacacatggacatagagagtggaataatagacatagaagactcagacgagtgggagagtaggagcgggatgagggatgagtaactgcaaaacaggtgttgtgtacattattcaagtgatggttccactagatgcttggacttcaccagcaatatatccatgtaacaaractacacttacatccctaaacttatacaaatgttttaaggtaaacataaagaacactatataccacctatatccttgtatcaataagcaagtttgggggaaattgagatgagaagacccatcatgactgaaatgggagagctgatgccttctttaatgccaaaattgtcttaagatttctcattgcaacccttccttcatcacagcaaaggttcagggagg

SEQ ID NO: 152287 - DNA, 595 bp, Homo sapiens
gctgatgccttctttaatgccaaaattgtcttaagatttctcattgcaacccttccttcatcacagcaaaggttcagggagggcaaaggcactcaaattctgagaaatactcttacaggggaaaatagggataagatctaaagttccacttsttttgatcttgtagattcaaccattcatttattcactcattcacgcaacaagtgtttgtcacgtgccaactgtgggccaaatattgtattctcattagggatagaaatgaaatgaaaacagatgccttcctcatggcatttatattatagataagggagaaagatattatcaagtactcaaataaattcacagtgataattataacaaaagttattcaggagagcttcagcttgatgtgaaaccctgtttagtgattttacctaattaggaagaactcagaaccagccaggatgggaaactcaggaagaatcagttatatatttatataaaatgcatatactgcatcttatacatgatatacaatataacataacatattattattacatagcatcattgtcttcttgaatacagaaaattaaatgcagagatagaggaagct

SEQ ID NO: 152288 - DNA, 517 bp, Homo sapiens
aataattagtttactttcatctctacaattgtaactataaatatcaaaattatatttttattattaacaaaattaagcacatcagttaatttgttgagcaatggcaattgatttatgttagatatttacaattcaattacattattattagcatttatttatttatttatttttagacagagtctcgctctgtcgcccaggctggagtgcagtggcgcgatctgggctcactgcaagctccgcyacctgggttcacgccattctcctgcctcagcctcccgagtagctggaccttttttcatacttgcattatacaatatttgaaatagacaaaagtattattaaaatgtttattaaatctgtgaatctaccatttagctttaaaattcttaactatcgtatttcattcaaaatacaaaagaattgaagatgatacagttgaaacccctgagtaacacccctgaagcctccctgaggttagttactgttgggtaacatgtataaatgttatcacatg

SEQ ID NO: 152289 - DNA, 345 bp, Homo sapiens
atgagatcttactaactaaatgttactatagagtaaatctgttgacctgaattaaatccatccaaaattgaatgacaacagaaaaatttcatctatataattgatcctgtatttaggagccatagaatgatatcttcgatgtactgaaaaataaatgtgtcaatccataatttatactctgtaaaaaatatcttccaaaaagaaagcagatatagaaaaaaaaactgaagtaattcatttctagtaaacagacactacaagaaactgtattaaggttcttaaaggagartaaatataatacaaacagaattttggacccactcaaagaaatgtagagggctggag

SEQ ID NO: 152290 - DNA, 583 bp, Homo sapiens
acaatgttagctgtgagtaagtcatatatggcctttgctatgttgaagtacattccttttttacctcatttttgagagtttttatcatgaagagatattgaattttattaagtatgaattctacatctgttgagatgatcatatgggttttgtccttcattctgttgatgtgctgcattgcatttatcagtttacttatgttgagtcattcttgcatccctgggataaattccacttgatcatagtgttcagtctttttggtgtgctgtttgattcggtctgctagcatttttttgagaatcgttgtatctatatttatcragggtattggtctgtggttttcttttttgttgttgttgtgtccttgtcttgttttgatatcagggtaatgttggcctgtaaaatgagattgaaagaattcctttacctttaaatttttgaaatattttgaaaataataggtggtagttattctttaaacatttggtagaaatcagcagtgaaaacttgactagtcttgggcttttctttgttgggagactttttattgctgtcagtttcattcctcattttctgtttgttca

SEQ ID NO: 152291 - DNA, 461 bp, Homo sapiens
tcagttctttatccacttcatgcagtgtattactttttgagatgtaacttaaaccaaacaattaatctcttatgacacagtgataytcttacacatatatacacatctcccttttgatctgaaggcccacacaatcttccatgccttatgggatcaacgctacctcttccttattaaccctttgcattatcatttatgtgacactcttgcagtttttagagctgccaagtagttttcaaaaaactctgaaaactatgccataaaatttcagaaattattttgttaccattaataacataaaactttgtaacattctatttatggagatagagaaacacagttatataaaaatctatttcatagttttacattgcattttttcaatttatgcatgatgacagtccaatcactagttagaagataatattttctttttgctcatttgcttattcagcaactaa

SEQ ID NO: 152292 - DNA, 437 bp, Homo sapiens
cctgcttccccttcacctttcaccatgattgtaagtttcccgaggcctccacagctatgctttttgtacaacctgcagaatcgggagccaattaagcctcttttctttataaattacccagtctcaggtatttctttatagcaatgtgagaacagactgatacacaatattactaccaagagtggggcattgctataaagataactgcaaatgtggaagcgcctttggaactgggtaatgggcagaggttggaagagtgtggagggctcagaggaagacagggagatgaggaaaagtttagaacwtcctagagacttgttgaatggttttgaccaaaatggacattgaactccaggctgataaggtctcagatggaatgaggaacttactggcaactgaagcaaaggtcatgcttttatgcattaataaagagcctg

SEQ ID NO: 152293 - DNA, 563 bp, Homo sapiens
attaaaacagagaccttatgactgacaaagcagactgtttgtagcaatatgataccaacatgacaaacagcaggccctgaaggaaagaaaagcattttaccccaaagtatatatattttttcaacatattttgaaaatggccctgcaaagctgtctcttacaggggaaaatctacaatctgtagagaattccttttcctttccaggtctttttcctgattcaggagagaattaactaagagtctggcacttgataagtctgataataaagttttacaatctattctctctgaagcctgctacttggaggcttcatctgcctaataagaaccttggtctctaccatcccttatcttaacccagacagtcccttctattgattctaagtctttaaataaactctttaaaccaattgcaaatgagaaaawctttgaatccacctatgacctggaactccgatcccctttgctttgagttgtcccacctttctggacaaaaccaatgtacatcttatatgcattgatgaatgtcttatgtctccctaaaacatataaaaccagcacc

SEQ ID NO: 152294 - DNA, 527 bp, Homo sapiens
tgattacaaattattcagtatccatttcactcctgtcagacatgcataaagctaagatactaacattaaccaaacttattgggctgtctgaagaataaattaattgaatatctctaaaacacttagcaatagaagcaaatcattctttgtatcctatatagttaaacttgatgtgcaaaatgaaaagtcatcactctcttcgacacttgttattctcatttatgctatacattacatttatagaggtaaaactatgtaaaatacatgtaaaattggggacargtcattgttattttgcataatttatttttggtgagcagagaacctttttggtcaatttatataaatactatagtgtttttgtcattataaccaggagaccaatttgttgaattggacagctggaagcaaggaagggaaaaagtatttcaccgaaaaggcagaagactggcatcaattgcaagctgtggaatcaagacaactttggctgagtcccattttatataggactaaaggagagtgcagtc

SEQ ID NO: 152295 - DNA, 557 bp, Homo sapiens
tggacttttagcctccagaactatgagaaataaatgtttcttgttgataagccacccagtctgtgatatttttgttatggcagcccagacagacttaaagaatatgcatattatgactattatgtgtgagatattcagcagctgagcgcattgggttgaattgtcagatatgaaagccattaatcccacatgacagttaagcacttgaaatatggtgactccaaattgagatgtgctgtaaacaattcatactagattttgaagacaagacctattatttttaaactaatgcaaaatatctcattaaggacttctagtatcctttccagaatgcaaagagcagggaagaatatcactcccacccttataacaaaaacgagttggaataacttcaaattcatgattcttttgtaatctttcagatarctgaggttgcagagcaaccaatgggccaaactctaacgaggggcaggcacctgcagggaaagaggatactgtgtgcttgcttcccagatgccactgggcaccaacaagtagaattcagatacaatagtcaa

SEQ ID NO: 152296 - DNA, 614 bp, Homo sapiens
gcagatttttcccccaagttatttttacatgaaggcatgcttgaaaaatttcagcccagatttaggtttaagttcccagacttagtaagtaattgctgcagtaatgagttctatgtcttaatttagtctgctccagatgttaacatctagattgtttgtttttcattctccacccctctgcatttccttatacaacagcacatttttctgaaattttaaatatgggagggtggtacaagagagcaggaagaaatagggtgagcaagaaatctagggtctcatctgctatgccaatcagaccaacttttttgctagagtaagctgagggaagaccagttttcaccttcatagaagccatattggccttcctgtatttgcaggagggtgtagtcctgaagaagaatatgcattcagggctgayagtgtgcttcctccaaggcaaggtactatgttggtggccctctttaagtgggaaataaaaactctgtggcagagttggctatgctgtactacgaatcaactaactcccttccccccaatatttattgaaacaagggaatgaaccccatcctataaactagcacaactgagtaacaggaaaaacttggcttata

SEQ ID NO: 152297 - DNA, 648 bp, Homo sapiens
gactagatccaacgatataaatttttcaagatttggatatacattgccaagttgcccttcaggtagatgctgggttacattcccaccagcagactaaaagctgattgttcattctcttcctcattaatattggatattaaattattctgccaatttggtggagaaaatgttttaatttatatttctttgattacaagtaaagttgaaatatgtatttttatatgtttcttgggatttttatattttttcttttataaattacttgcttacgtcttttgccaatttttctatttaggtgtacgtctttctggttagcacttcgtttatgttaacgatatgatatccattactcatataagttttaaacatttattttcagtttatttgttttgtaattttgccactgtttatttaatgtataaatttaaactgtcataaagtcaaatatttttcagtgttcagttctttttcatttgtgcttaggaaagcctatcttactccaataccaaatttaaaaataaaaaaaaaaaaaaaaaaagargtggatatatgggtgtttttctttcataggggcagaggcttgtggaaattttgggtatggtagccaagcaagatgtattaataaaaataagctatgctatgctgtag

SEQ ID NO: 152298 - DNA, 632 bp, Homo sapiens
gtgcttcacaaatgcatctactgcaaataactgagtgaatgaatgcaaaggcagttggctcctgatattaaacaaaacattctaatggagataattcctcaggtggtaaagatattaacatgtttgatagggagcttggttttatttgctattcaaagtgagtcataaccaagacattcttttcaaatctacataactacctgaagcaagccttaagtatagccaaacaggataattgaagaaattatcttgtttatacaagatcaagccagagaaacagaagcccccaacattcatctctctttggggttaaggcagtgatcttccagtctttcttatttgctgatattttatttaacaaaatcctatatggaagtccaaattataatataaaatcaatgaaatgaaatatcttgtaattgaagcagtagagggtagagaggcaaggaaagatgaagctctagaatccttccacctccaagggacccytagggcaccaccatagaacttctagaacacagcacaatttggcttgaaaactataccgaatgcatgttaattcagtaacacatttttgttcattattacttattattttctacatcatcaattatccctagaacaagaaaggg

SEQ ID NO: 152299 - DNA, 502 bp, Homo sapiens
ttggaatgcttgtaacacaaacggtaaatgcttgaggggatcgatacccaattttccaagatgtgattattacggattgcatgcctgtaccaaaatatctcatgtaccccataaatatgtacacctactatgtatctacaaaagttaaaaaattttaaaaaatttaatatgaatgctcagcacattaacttccagtcttcttgattttctaatatatacatttagcatgataawtctctctctaaagtactaccttagcagtatcatagaaattttgattgttgtatttttattacaaagttcaaaaatgtcctaattttcatgattaatacttctctctttgactaatgtttactagaggagtttttgaatttccaaatgtggatttttctagttaaaatcttttaaaattattttgtggtcagaaactacattctaaattatttcagtcctctagaatgtatttagacttgctttttgtggtgcccaattgcatgtgtgc

SEQ ID NO: 152300 - DNA, 570 bp, Homo sapiens
ccaacctaaaatattttttctaaacatttctcagtccaatccaatcctccatctttcactgctttcttcatacctttcactactttattattattatagtaaacttttctatatgtctagatctataatattttaaattacattttctttctttgcttttayggaaaacagctgtcaattgggcaatacttctcctataaccccatcagtctgaaactatttctgttgtttcatataccagtgtttgggcggtaaagtggtatactacagttcccacatatggatcattagtgtcctaaaagacacgaccacaatcaaccacagaaaccatcagatcaaaatttcttttttactgtgcattactcagggctaaactattctcatcccttcttaactgccttcacccatttacttctcaatcactcccctgacatccactgaggaattcaattacttgtgtatcatttttctcctctccatattttatcatttacagttacatcaaaatttaatggctaaaattttatcagttaaaactctcatttatactggccttcttttagtttcttg

SEQ ID NO: 152301 - DNA, 605 bp, Homo sapiens
catctggagtgtctgctgccatcaacccccacctctgaggtgttacatctaactgctgttaggatagggctgatgaccactctttactgcttcatgctgacagggggtattgtttggggataaatggcagttagatctttcttagaggcatatctaagggtcccaggtaaaaagggagccaatcattcaaggctccagttgcatgattgcttgaactttgatggtttctaggcaagaagaaacgaattttacaaggaggttaaagtttgaaatgggctacagctgtttcactctggtggaagaaatttaatcttggatgcaggcaattaaactttaagagagaaatagatgtttaggtgagtatttaataccttgggaaggggtccttgacaaagatgccttatgatgaggaacagaacaaaggtgagaatagtaagcataggatatctgtggagggttaattattastacttatcttttttaatttttactttggtgtccctgattttttcatgcctatacttcaggtgctctcatgggttaatggaataaattttgtcagttccccaggccttaactcaggtataatgaatccaacaatttat

SEQ ID NO: 152302 - DNA, 649 bp, Homo sapiens
tcccaataatccccacttccttgcattcatatgcatgtgtaataccctccaactgtgtattaaacagggctagtaatttctttcttgagaatggcttggagcaacattcttagaatgctgggatatcattaccagtattaggttgtacaaaactgtgatacagmtttggctggtatacacttcctttggattttcaagcttaccatttttttgataaagcaagttactatgttgtaacctgccctacagaatgaatgcttcatttagcaagaatctatgtccaacaaccctggagaaagtgaatccagccaccagccatgtgagagagcttggaaactgatagcttccaggtcaagtcttcatataaaactgcaaatatggctggtttcttgattgtatctcattaaatatccaaagtagagaacacacttaagccatcacctgatatgtggctcacagaaactgtgagatagcaaatggtactgttttaaaccacaaaagtttgagataatttttatgcagcaatagattacaaaaacagataaataatttggaattcattttaaatgtgtctttgaaaaatattcacaagatgttgacatcttctttggagaaagaaaatcatcttgcttcatcagtataagctgta

SEQ ID NO: 152303 - DNA, 515 bp, Homo sapiens
ggtttctgggtgcatagggtaaaggcatggggttgctggacatcaggtcttgaattaagagtggtattactgttcttcagggttgactttaagctactcctgagtaaaaactaactcttctacttcttataaatctttcctaatacacagcacagccctatgtgtgtagtggtgaatgcgcagaaaatgcctgtgattttctcatttgaacatctacttagtctttgcgaagaatccatagaaacaatctgtctacattacaacacataartgacatgtggtttccaagatcaggcctatcatttgaacataagtacccagaccatgtgctaggaaatgtgctccttgctacacacataccttctcttttaatcctcttaacaaccctggcaggtgaggttattctttacaaggtacaggtggggttattctgtataagttattcatacaagtttctgtatgaagaaacagagactgggggtagaggttgagtaaattgccaatggtcatcagag

SEQ ID NO: 152304 - DNA, 445 bp, Homo sapiens
tactcgttcttcacaattctgtagggtgcgtattactaaccccagtttacagctgaggaaactgaggcttggagaggttcgctcggtatcgtacagtttgcaaggttaaccctaatccggccagttctggctttccagcccagcccagcagcctagcctccctctctgccgctgcaggttataacggctctcccccgttttacacgaggtcccttccccttcaaatccacaggcaggaagatcgttccgaactgacggggctggggaatgtgggagtccggagtggggtttgggggagcttcctcargccctgagtgttggggtgggcaggccgcgccgatggccctcggggatgtcacattcgagatggggtgaccgagaacggcaaggcgggatgtggcaaacggcggcaagtgctcggagtcctaggtcttgccgccggaat

SEQ ID NO: 152305 - DNA, 410 bp, Homo sapiens
gcaaactctcattaattactgatgatgaccatgaggttttggagagggacaaaaccatctccaaatgtttttgagtgtctcctgtgtatcgtgtcctgtactagatgttttacacatcaactcatttaatccttatgagaacattgaaaacaaagttatccccattttacagatgagaaaattgagattgatagaggtaaggtmaccttacacagttattaactgtgagggtggattaaaatccagatttctctgtctctaaaacctcaggctttttctactgtgccatactacttctaatttgaactgtattttccagtgaaatgagattaatcttccctatagacatgccaggtacctgttatcactttattctggtatccgctccattttttggcatcctatgcttc

SEQ ID NO: 152306 - DNA, 393 bp, Homo sapiens
ttggagagggacaaaaccatctccaaatgtttttgagtgtctcctgtgtatcgtgtcctgtactagatgttttacacatcaactcatttaatccttatgagaacattgaaaacaaagttatccccattttacagatgagaaaattgagattgatagaggtaaggtcaccttacacagttattaactgtgagggtggattaaaatccagatttctctgtctctaaaacctcaggctttttctactgtgccatactacttctaatttgaactgtattttccagtgaaatgagattaatcttccctatakacatgccaggtacctgttatcactttattctggtatccgctccattttttggcatcctatgcttcttccatgcctgactttatctc

SEQ ID NO: 152307 - DNA, 591 bp, Homo sapiens
ttttaaagttctagttgaggaaaaggacatatccacagttttatagttcaccttacaaaatgactttcaatctcctttatttgccaccaatttatagtttttaatcatgctatgattactgaaacaaaaattcatattaaccctttaaaataacacttcctattgacagtttgttttttggacaattcaaacattttgcttagaataatcattwtggttcaagagaaccagggaagtacactcttctaagatacatctctgatagccattgggttgtttctattttcattatttggtgtttatcatataaaagcctatgatgctgtgtagccatggcataaaatatttcaggattttttttactctatctatatccacaatttttttttttaatttgccaattagaatgatatgtgggttagtttgtcttaggaggtaaagatgtgttttaattaaaatgatcacaattgtttccatgcaaacataggaataactttaaattacatagatagcagttttattgaaatattttcagaaactagcaaaaataaaataaaacagatggcaagaaattatcagtaataaagtcaa

SEQ ID NO: 152308 - DNA, 468 bp, Homo sapiens
ttgagcagttgccatgagggccatcagcagacgaagagagcagaggaattcctgtccaactcatctttttaaaaggatttttttgcggcataaatagagaggaaaagcaaattttggaacacaacctatatcatgcatacatcaattggagatgttttctcratgaaataccactgttggaaagcataagctttgctaaataggaactattactacataataatggaactaacaatcatagtaatacatgggacataaaatgtgttgcattttatttttgaaaggaataaagcataaagaaactttaaaagcagatataaataaaaaatactagagtcaaaatttaaaagcaagttttgtcttggtattcaaaagggagaaaggaaaagctggggaagaggaggaggaaaacttagacatgaagtagatggtgttattcttattctaaaagaaaccattttttgttaa

SEQ ID NO: 152309 - DNA, 331 bp, Homo sapiens
aggaaacagcagtcatgaacaacattatagatcaaacagacctagcagacatatacagaacattctacccaataacaacagaataaacattcttctcaaatgcatgaaacctaaaaatactactctaacattccctctgccctgtctgtgtaaaaactggtcatcaagaaatcatccgacctaccttgtttgagtgtagatcataagaccctcattccaaagagggtccctgccccatacccagaagaaagaaatgcatgcttaragaggccaagaagaatctaggcagacaggccttgttgtgtttccccactctatgtaaacattagat

SEQ ID NO: 152310 - DNA, 464 bp, Homo sapiens
tcctccgtagcatttttgcaatattcyaactcaagaagaagaatggttttcagggttcatggataagcaaacaaaatgaaacaaacaaaaaacactaaagaattgtgaaagaactgaaagaagaggattgttcctaaggcataaagaagcataaaaggctggctgaactctgtacacatctttacccttcctttgtagcactgcttttgttcacattagagatgctaattattgctcattagcatacattagcaaatgttaatgagtgtcttccaaagaacaaaaggcagtgggggcagggtagagtcagggtgaaggcttagcggtgagggaggggctacaacagaagagagacaaagagaaaaaggaaatgagagcaatatagaacttagattcatagtttcctaaaatttagaagatctatcttcctgacaaaatagtaatagcatcaagaaaagtgaaat

SEQ ID NO: 152311 - DNA, 562 bp, Homo sapiens
aatggaaaaggaaggttcatgggtagcaaattccagcctctacttacttagatgaggccggcctcacaggacagtaacacctctatttctggacctttgtctattctttttttgttttgttttgagatggagttttgcccttgtcacccaggttggagtgcagtggcgcaatcttggctcactgtaacctctgctttacagtttcaagcaattctcctgcctcagcctcctgagtagctgggattacaggcacccaccaccacacctggctaatttttgtaattttagtggaaacrgggtttcaccatgttggccaggctagtcttcaactcctgacctcgtgatccacccgcctcagcctcccaaagtgctgggattacaggagtgagccactgcacctggcccctttgtctattctttacctaccatctttcttattcctgtaaaacagtggcaggtttttttttagaaacttaagaagtcaatctttaaatggatattttggaaaaaatcaatgattttgaagtcaatatttttctttatgctcacaagagaatttgga

SEQ ID NO: 152312 - DNA, 576 bp, Homo sapiens
tggctccctggcttcagccccctttccaggggcgtgaatggttctgtctcactgacattccaggcaccactggggtatgaaaaaacaactcctgcggctagctctgtgtctgcccaaacggcagcccagttttgtgttggaaacccagcaccagggccctggtggcgtgggaactggagggaatctcctggtctgcaggttgygaagaccatgggaaaagtgcagtatctgggccggtgtatgtggtacagtccatagtggcttcccttggctaggagagggagttccctgatcccttgcacttcctgggtgaggcaacgccccaccctactttggcttgccctccttgggctgcatccactgtccaaccagtcccaatgaaatgaactgggtacctcagttggaaatgcagaaatcacccaccttctgcatcgatcttgctgagagctgcagactggagctgttcttgttttgccatcttgccagcaaatcggtgaattgttatgtattctgcaattctatatcttttaagtggagcatttaggccatctgcattcaatgttagtattgagatgt

SEQ ID NO: 152313 - DNA, 576 bp, Homo sapiens
tggctccctggcttcagccccctttccaggggcgtgaatggttctgtctcactgacattccaggcaccactggggtatgaaaaaacaactcctgcggctagctctgtgtctgcccaaacggcagcccagttttgtgttggaaacccagcaccagggccctggtggcgtgggaactggagggaatctcctggtctgcaggttgtgaagaccaygggaaaagtgcagtatctgggccggtgtatgtggtacagtccatagtggcttcccttggctaggagagggagttccctgatcccttgcacttcctgggtgaggcaacgccccaccctactttggcttgccctccttgggctgcatccactgtccaaccagtcccaatgaaatgaactgggtacctcagttggaaatgcagaaatcacccaccttctgcatcgatcttgctgagagctgcagactggagctgttcttgttttgccatcttgccagcaaatcggtgaattgttatgtattctgcaattctatatcttttaagtggagcatttaggccatctgcattcaatgttagtattgagatgt

SEQ ID NO: 152314 - DNA, 590 bp, Homo sapiens
tccctgtggtcttttcccagttcctctggcagccctcctcaaggactcctgtgagacaagtcagaaattgcttctctggggacccggagaacccacatggcttttcctgtggcttcttctacccttgtgtttcactcagctctctaaattgtctcagctccaggtaaggtcaaatctttctcttgtgatctggacctttaggttccccagtgagtgtgtrtattcggggcaggggatgatctccctttcccacttttgcagtttgggcactcacagtatttgggctgtctcccaagtcctgcaggagcaacctgtttccttcaaatggtctgtggattctcttgactttcccagtatatttctgcagcagttcttggaacaaaagttcacaatgcaagtctccacattctattctatccatccaagtgggggctgcaatttagtcctgactcctatctgccattttttcctagcagttcattctggattatttttaaccaataactcaaccaaagcacaggccttcagttcttgtactttacaggtatcttgagtatagcaatttttcatctgcagaatggagagtatat

SEQ ID NO: 152315 - DNA, 590 bp, Homo sapiens
tccctgtggtcttttcccagttcctctggcagccctcctcaaggactcctgtgagacaagtcagaaattgcttctctggggacccggagaacccacatggcttttcctgtggcttcttctacccttgtgtttcactcagctctctaaattgtctcagctccaggtaaggtcaaatctttctcttgtgatctggacctttaggttccccagtgagtgtgtatattcggggcaggggatgatctccctttcccacttttgcagtttgggcactcacagtatttgggctgtctcccaagtcctgcaggagcaacctgtttccttcaaatggtctgtggattctcttgactttcccagtatatttctgcagcagttcttggaacaaaagttcacaatgcaagtctccacattctattctatccatccaagtgggggctgcaatttagtcctgmctcctatctgccattttttcctagcagttcattctggattatttttaaccaataactcaaccaaagcacaggccttcagttcttgtactttacaggtatcttgagtatagcaatttttcatctgcagaatggagagtatat

SEQ ID NO: 152316 - DNA, 545 bp, Homo sapiens
attgacatttactcatgggagaggctgtgcacatggatctcaagtgtccctacacataacttctgagtgtgtcaaaccataaggcctaactgccctccctctgagtgatcctatagctagaaacataaccaattcagttgattaaggtctccacaacatgagtatcctgcaactgcttacttcttaagactgaggctattttggatcttttcatatagtctgccatttgaatatctctcaaataaattagaaagtaacagactcatctaatttaataaatgggaaaagacttgaacagtcacttcacaagtgagccatgatgccgtttatgcatcttaaactggggatatgctatggttaactaagaaaactaacttcacagcaacaaactccrctaatttgggactcatcaaaatgtagatcaggaatgctaacatgtgacagtgccaacacctgctgaggcttcagtcttctgaggagttggtgagttatctaatgtacaatgtagaagaacagacaggtactagttaacttgaagatgcatc

SEQ ID NO: 152317 - DNA, 626 bp, Homo sapiens
acaataaacatgttccaaattatgtataagaagatgtagcaaaggcagttttgagtgagactttggaatttttggacttctgatcctggcactcctgtctgggtttcgaaggtcagaggaaactagaggagaaaggaaagaaagagggaatggcatccttatctactatctttgcttcatcctgatggtccaaacagaacctttgagaastcagtggggatacaaacataaaaagaactaatgagaggccaggacaccaattaaccagttcactgatcagaaggctcagaaccttctagttgctactacttccattagaaaataattgtttgggggcaaaggaagcaaaaatcaacaggaaaacgaagcaaatacctcttacggaagagggaaatttatagagaacaaacatcattggccattgtgttttccttaacaccatgtgccagatacacaagaactgagttttctgaaacactgtgacagcaaagtttgctttgcctgtgacaagaatgaaagaaaatgaagaaagggaaagaggaaaggagggaaagagggagagagaggggaaaggaaggaagaacacaaggagagaggaagagagggagcaagagaaaaggagaaag

SEQ ID NO: 152318 - DNA, 592 bp, Homo sapiens
tttgttttattttggttttttttgctataatctcraaggtctttgaggttcctttcatctttttttcactctatcttctctctgttgtatagatggtcaatttatattgtttcctccagttcaccaatatttcctctgtctcctccattctgcccatgcattgagttttttatattggttattgtattcttcagttcaaaattttccatttgactcttttatcttctatttttggttatgacttcctatttctttgttgaagctttccaaataaattttcattagctacaagaatgttttaattgttcattggagtatttttatgatggctgctttacaagctttgccagataattctaacatttgtgtcatcttgatgttggcatatatttattatcttttctcacttagttttagttctttcttgtttttgtatgatgagtaattttccactgaaatatggacatttcaatatgatgagactctgaatcttatttaaaccttttgttttagctaccttcatctcacaccatcctcacagacgaaggtgggtgtcgcttcattactgccaggtagggtaaaagttcaggtt

SEQ ID NO: 152319 - DNA, 686 bp, Homo sapiens
taatctttttgtatattccattattatagggttgtaattatttacccatcctgttatttttaaacttttgggttgcttttagtttaagtttattaaaaatgatgcctctatgaacttycttgtatctgtatcctgttctcacactgctgctacccaagatactgcccaagactgggaatttataaacaaaggaggtttaattgactcccagttctacattgctggggaggcctcaggaaacttaacaatcatgatgggaggggaagcaggcatgtcttacatgtgtgagaaagagcagtaaaaactgccttatagaagcattagatgtcatgacaactcactcactatcacaagaacagcatgagaaaaactgcccccatgatccaatcacctctctcggtcccttcctcaacccatggggattatggggattataattcaagatgagatttgggtggggacacagctaaaccatatcactgtctcatggtggatatttgaacacatttttctgggtatatacctaggaatcaaattgagaaatcatacaagatgcgtatcctcaatgttagaaaaaactgttaaacagtttcccaaagtggatgtaaccaatttacatacctggatgtgtttgcattgcttcacacagccagtgtttctgttttttgtacttcttttaatttaga

SEQ ID NO: 152320 - DNA, 481 bp, Homo sapiens
tctctctctttgcctgttgacatccatgtaagacgtgacttgctcttccttgccttctgccatgattgtgaggtctctccagccatgtggaactgtaagtccattaaacttctgtcttttataaactgtccagtctcgtgtatgtctttatcagaagcacgaaaatggactagtacagctgccttaggaaaggaggactctgggtaggataaatwacttttgaagagtataattccttccattttagttggtatttttttctaccaggtttatattttatagctgtagtagtgtgtatatgtatgataattatgaaatttgtatccagataatgatcttttaagactttttttccaagaacaacaaatctacagatagggacaattctttgaaatctaaaaaatatctagattatcttgaagacaatcttcaggcaaaaaatctacactgtcatgcagctttctaaaacttatgcagttat

SEQ ID NO: 152321 - DNA, 527 bp, Homo sapiens
ttttctgtggtatctgcggtattttggacaattttttaaaatgcaggtgttgagaggttacatgtcatgaaattctcactttggaggactctcaaaagccaggtaccaaaaaattcaggaagtgactggaaggagttaygtcccctaaggctagccctggcttcagaattcttcctcccttgatcttcaaacacaagctccttctaattagcatgtttacaagacataaggaagaacagaactggttatcaagaattcaccttgatgtaggattatctaacccacaagggtggctggtgtttttttgttgttttgttttttgttttctatcttaaaaggcattggaagtaggaggtaagatgggggtggctaggacattttcaagtcctgaaagaagctgtgtggcaagtcaactggggcaatgcgagctattctggaatcaccaatcttcaactggacatcagaggatggctactgaatttgaatgatgactcaagtcttctgcagtccattagctataagaccct

SEQ ID NO: 152322 - DNA, 501 bp, Homo sapiens
gctgcatgtaccatatagagccatataaatgataggtgctaccattgtgttcaggaaaattgggaataatgcctttcttgattctcaatgcgggttttgtttatttttggtagacataatctatcaaacaaggtagcagtagacaaggatcggtgaaaaggggcatttggtggtgaaagtgaagtggccccttgaggaggttatccatgcagtgtcttccagcactaacactacctttgacttcatagcagtttcaggctgtgtagaaacccaattcaaactggcttaagcyaaaaaagaggatttactggctgtaactgaaaagcacaggagcttctagctttaggtcttcaggcatagctggatttgagatcccaaaagccgtccttagggctcagacgtccagctctgttgtgttccatgttaattccatcctcagttgcaatggctgccagcattgtcaagcccacagctccccttgcaattcctgtggaaacaatg

SEQ ID NO: 152323 - DNA, 635 bp, Homo sapiens
ttgacattaacattagaatgtcctgcctgctactgtcttctgaaagccatcagaacatttatggctttatgaagattctcttcagcactcatgtttctgcattacattggagaacctcttttcyatcatttgagagcaaagagctcatattcaacccatcttcccccattcaacattagaaacaaaaagggggtacatgtcataggtttcttaaagtaaaattagagaaaggcatgagaacgcaagcttcaaaaataatgaattgtgctctgctctaatagttaagcctgaggaacaaaacgaagcttaaacaagaaaaaaattttatttcaaaaagataagaaatgggaagtgagagtctagactgcttgacataatcatcacacactctgttcactagggtaggcacttgtcttcatggtagaagatggctgctggggttccagctatctcactggcattccagacagcagaatgaaggaatagaaggggatcttctctcccttttcaggcaacttcccataaatcccacacaattctgtctaaatctcaatttagtcacttggctgcatcaagttacaaggtaggttagcagaagcaattttattaaccaggtggtgatgtgccagataaaa

SEQ ID NO: 152324 - DNA, 427 bp, Homo sapiens
cacagggcagggtgtggggctatgcagagtgttcatgctctctcagggcacacctcctgccagacccccagtgtgagacagccaagtataaagggatcaccggaaaacctccaactggcctgcacactgggaggagtgtgcactggggtggagcctctggaagttcatgctgtttgcagggggaggagcctggcctcttttgttcctgggtgaacctggaatttaatctgtgaggcaggaaactggccagcaggactctctctgctgagagtttctgttcctccccacctttttttcccttttcgcccaatacgttccatttttctcacccttcaaagcatctgcgagcctaatctttcctggtsgtgtgacaaggaccctaaggagaaagtcctacaacagatgtgtgtgccaactcagaagcaat

SEQ ID NO: 152325 - DNA, 602 bp, Homo sapiens
tgaattcagctcagcctagggcagcaggaggagacggaaaagaggtgcctgcagagccagagaggagcctggaggatgctgaaggcagagaaacctccatggtgataacagcacaagaacaatcgagatgagagaggatcttgccattgacagtcatcatttgctcttttgctctgtttgtccatgtaggttcttgygtatttatgcctccttcctgcttcccttcctccttccctgttgtgctattgtgtctttcttcctgttggccacatctccttaccgtgatcagagctgtgtgccccatcagtgctcagctatgaaactgctgtgaccttaaaccctggggagccaaccttacaggcagtatctgtaaaacaacaacttcaatctagtgaaataatttattaactcagtgagacaactgttccattcgggaactttataatcaggtagaggagaaagacatgtacgttaatattgctgtaccactctttgaagctggcctgattatgtccatttaaaaaatgagttagctgagactaagagattaggggtaaaaaagaactaaatagatattggctctgaactatatggaatagaat

SEQ ID NO: 152326 - DNA, 602 bp, Homo sapiens
tgaattcagctcagcctagggcagcaggaggagacggaaaagaggtgcctgcagagccagagaggagcctggaggatgctgaaggcagagaaacctccatggtgataacagcacaagaacaatcgagatgagagaggatcttgccattgacagtcatcatttgctcttttgctctgtttgtccatgtaggttcttgcgtatttatgcctccttcctgcttcccttcctccttccctgttgtgctattgtgtctttcttcctgttggccacatctccttacygtgatcagagctgtgtgccccatcagtgctcagctatgaaactgctgtgaccttaaaccctggggagccaaccttacaggcagtatctgtaaaacaacaacttcaatctagtgaaataatttattaactcagtgagacaactgttccattcgggaactttataatcaggtagaggagaaagacatgtacgttaatattgctgtaccactctttgaagctggcctgattatgtccatttaaaaaatgagttagctgagactaagagattaggggtaaaaaagaactaaatagatattggctctgaactatatggaatagaat

SEQ ID NO: 152327 - DNA, 454 bp, Homo sapiens
caaacagttattttcaagtgtagtgtactgcttyatgagtcacactctcaacctcacctccaggggcccgctgggactttagtctagttataggtctagaagcaaacaggggtgttggaagcggctcctgaggagaatcaacattatcttgcctggcaagtgcctcaggggaggccatcactgttgcctcaggcagcacaggatttatctcctcagacaaaggtggaaaggctgatggcaccatgggtcagggaagggatgttgccgctactggggatggggaagctgttccttctggcaaaaaaggttcatcagagtttacaaactcagtgttcccagttccatcagggtcctcccacatgtccccagtccaagttgcagggtcccgttcttttccaatcaatgccctcactttaacagtagacacctggcaaggctgtgcatacatctttca

SEQ ID NO: 152328 - DNA, 472 bp, Homo sapiens
tggagtggaggagtacagttgttcattcagcaaatatttatcaactgctgtttatgtgccagacaacacaccatgtgccaagaacagaagaatcccacacagccactgcccaagtgaagctcacagtcaggagagcagacaggagaagtggcggttctctcagcaccctgattaaaccttcagagccatggtggataacatccagctgggtcctgacaggtgtcaggttgctgccagtcctttgtagaaaataaactcttcaaatttgtaatcatttagtctttatttttaattgacagtggcttgaagattgtgcctatggtgtcactttcactctgtgacatgtcccttaactgaaagaaaatgaggtacaagaacttacacaaaaacctggaaacacccatggggtggggatgcyatgcccgaggctgtcagggtgcagactgagaaaaagttgagagcttctgttaaa

SEQ ID NO: 152329 - DNA, 415 bp, Homo sapiens
ctgctccagctcccttctcacgctgctcagggccctggagctcacctgtaatgagagagagcaagccctgcgcctgtttcagctgctattctcaactggcccacggtgtagcccagtgaacacttgttggatatttttgggttcttgttcgcaggccctgttgctgccctctgctttctgttgcacagaaatgtaggtctgctgacccaggtagrtcttgtggctcttgatgatttatccttactgcttccacttgggagtttgtagaaatacctagatttgcagggagggagtttggatgtttgtctggtaaatgttgaccatttgtttctggcttgttttcttctttctatccagctgttctttttgtatgtgggaatttggagcaatttttaaaggatgcacccattgtcgt

SEQ ID NO: 152330 - DNA, 401 bp, Homo sapiens
cccttctcacgctgctcagggccctggagctcacctgtaatgagagagagcaagccctgcgcctgtttcagctgctattctcaactggcccacggtgtagcccagtgaacacttgttggatatttttgggttcttgttcgcaggccctgttgctgccctctgctttctgttgcacagaaatgtaggtctgctgacccaggtagatcttgtggctcttgatgatttatccttactgcttccacttgggagtttgtagaaayacctagatttgcagggagggagtttggatgtttgtctggtaaatgttgaccatttgtttctggcttgttttcttctttctatccagctgttctttttgtatgtgggaatttggagcaatttttaaaggatgcacccattgt

SEQ ID NO: 152331 - DNA, 415 bp, Homo sapiens
ctgctccagctcccttctcacgctgctcagggccctggagctcacctgtaatgagagagagcaagccctgcgcctgtttcagctgctattctcaactggcccacggtgtagcccagtgaacacttgttggatatttttgggttcttgttcgcaggccctgttgctgccctctgctttctgttgcacagaaatgtaggtctgctgacccaggtagatcttgtggctcttgatgatttatccttactgcttccacttgggagtttgtagaaatacctagatttgcagggagggagtttggatgtttgtctggtaaatgytgaccatttgtttctggcttgttttcttctttctatccagctgttctttttgtatgtgggaatttggagcaatttttaaaggatgcacccattgtcgt

SEQ ID NO: 152332 - DNA, 415 bp, Homo sapiens
ctgctccagctcccttctcacgctgctcagggccctggagctcacctgtaatgagagagagcaagccctgcgcctgtttcagctgctattctcaactggcccacggtgtagcccagtgaacacttgttggatatttttgggttcttgttcgcaggccctgttgctgccctctgctttctgttgcacagaaatgtaggtctgctgacccaggtagatcttgtggctcttgatgatttatccttactgcttccacttgggagtttgtagaaatacctagatttgcagggagggagtttggatgtttgtctggtaaatgttgaccatttgtttctggcttgttttcttctttctatccagctgttmtttttgtatgtgggaatttggagcaatttttaaaggatgcacccattgtcgt

SEQ ID NO: 152333 - DNA, 641 bp, Homo sapiens
aatgctacaaatcaaggattttcttctttttttttagaattggtttttaacacttaccaatgaatcacttgtcatatgaacatttctaaagccaggaatgggggacagattcaccagaactcagggactaagaatgaggaataggttccctaaaggacaatcaagatattgttaccaggaaaagggatgactgttgggaagcgtcctcccatatattatattattacattacattatgttataattgaggatccacaatgaactaagggttctaaaaaggcctgtgacttataaagctgtttaactcagtgttatccaaccttctgtgattagaaagtctcctttttcataaacttctgattaacttctcaatgcctttggaaaatagtgaacaagagtatagagatattaatacaaaagaagggaactaacaatttatatgtagatctattgctgtgttagtggctgggggaaaaaagattcttaatgttttcctctcccttgaatggcaaatagaaaatgcctaaaatgaagaaaatattgattttaaaccaactgatacgtctgcaaactttattttaactttgagccactraaagggatttaaaatcaaaggaacaatatatttcctatatctttta

SEQ ID NO: 152334 - DNA, 559 bp, Homo sapiens
aaaataatacactaaattaaatgtgcactttcatttacataaaaacatgcatataaacaagtccagacaggaatacacaaaaacagtacttactattttcaagtggtagaatcacggcttatttcycccctaatttcctatgctatctgtaatggttacacatcatttaataattaacaagtgatttttaaatcatgcatgatgtttttaatgaaccctgaaaggtatctgatttacttcctaaataatccaaaagttcactgataccaccttaaggcttcttaaaaaaaattattcagtttctttaatgtcataggaagaaaatctatgttcaaacttactaattttacgagctccatactctctttacgtagaactttaatttcccagataacatttgagcggtgtggaaaaactgaacccctgtcgttccactttaggtataatgtagaggttgagaaatcagcagacaaattcaagatctctggagtatctggaattaaggctttaaaaagaggaaacaaaagagaaaacttagtaaaataagtaatgatttttc

SEQ ID NO: 152335 - DNA, 386 bp, Homo sapiens
ggggggtataagagagagggaaagagggaagaaaggagggaaacaaggggaaaaggcaactatagaataaaaaaggtagtccatctcagattctataaatgtttatgaaaaatgtttttgtttttgtacatggttggtacgatattcactgtagcaataaattatacrgctatttatatgacagaaaaacaaatattacattaaaagtactcacattataaagcagcactaatcataataataaagtaatttaatgaatgaccttggagaaaagagatctatttaaatatggaaataatataaaaactaaaccaacgggcaggaggatgataatttctttatataaataagctataaaatatctacataaacattcttaatatatt

SEQ ID NO: 152336 - DNA, 631 bp, Homo sapiens
tgtctaaaaacaacaaaaaataaataaataaaataacaaaaatcccaagtctgaaatgctccagtgagcatttcctttgagcatcatggtggtgctcaaaaagttttgaattttaaaacattttgagttttggattttcagattagggatgctcaacctgtataccactgcctaatgatctaaatttttcatagagtagaagtaattaatggggttgcactttcaaaagcttaagtcaaggagaggggcagcatttcaataaaatagttttagactagatttgttttttatataagtattctatatagttgcttttatttttaaatagaagattaaatatgtaagttatactaatacaaattattattaattgtgagaaatgagcaagatttcaataaaatattgaggtgctataaaagataacttgggacttctaggcaaacacaatagattaaacaactatttycttctcccttacctcctgaaatcactccaaagagtaaacagattttttttaaaggtgtgaatggacaaagacaaaatatagaaataaagcaacatcactaaaatctggaagctggaaagcagatggataatggtaactgatgtagaagacctgagaaaacaaaat

SEQ ID NO: 152337 - DNA, 533 bp, Homo sapiens
gtgctggtgggaccttagggtccgcatcaccaagtcgagtaaggaatccgtccatgttagttaggttttttctttccattggttcttttcacagtagaaccaaagtagaacatgcttctgccactagtacacatgtctggcttctagataaggaaactaactttttctgtcctaactcacagctgtatttaggctctaaggatctgggaaacagagatgtgacaggtcccctttttctgcttcatcttctctttaaaacaaataggactggacgtgggcaaacatatctgtagcaaaagattgaacactgaatcagggtcatgtgctccatgctccttagttatttttattcatttaagggaatgagaaaaagcaaaggaggccctcaggacatgaaaattaaatgtggcagctgaaattggcatctgcaggcgcagctcaagcaggctggcrtccgctaagcaaggcgtttaaaaggagttgaggctgctctaaccaaactgaagaaaacctgggcaggggctgtttaaagg

SEQ ID NO: 152338 - DNA, 403 bp, Homo sapiens
tcattctatcagggcagagtgtagggaaaccctaaggcatagtgcagtaacctggagcaagtggtcgctgaagatagttagcacccctaagccaasaggggccggggagggactgcctggcagggggtgtggtctgccatggagggaggctgacagcctgggtccaccttactagagaggaaagaggggaaaaaataccctagcctcactctccccactcctcagatctgcctgtgttccctatgggctgaatcccacaggagttagagggaatggacccctgtggcaatccctatgatcagccttcctctcaggttggagaagaatgaagtgcacatcaaccaaacagaagagaagcaatttggaggaggaaaaaatcagttcttcatgaaaggatcacatt

SEQ ID NO: 152339 - DNA, 414 bp, Homo sapiens
gcaagaagaatcattctatcagggcagagtgtagggaaaccctaaggcatagtgcagtaacctggagcaagtggtcgctgaagatagttagcacccctaagccaacaggggccggggagggactgcctggcagggggtgtggtctgccatggagggaggctgacagcctgggtccaccttactagagaggaaagaggggaaaaaataccctagcctcactctccccactcctcagatctkcctgtgttccctatgggctgaatcccacaggagttagagggaatggacccctgtggcaatccctatgatcagccttcctctcaggttggagaagaatgaagtgcacatcaaccaaacagaagagaagcaatttggaggaggaaaaaatcagttcttcatgaaaggatcacattg

SEQ ID NO: 152340 - DNA, 639 bp, Homo sapiens
ctaacaaatagagaagaaaaggaaaagaaggctgtgtatgctttttacaccttgactatgcaagagttaaccatttctwgatatgttgtcattctcctcataagcaaatatctcttcgtttgggtttttgtaatatactctaataaacaaaattgcctctataaaaaaactatgggtcttatacttgtaggtaaatgccacttaattttcagataattaatctcagcaaatgatattgtggtatttttttaaaagccaatggagccataaacataggcctttctacatctgtaggtttactggggatatcctcctttggagatttaacctaaggaccatgttagcattgaatcagcctgtgtgcctttctctgatacaggcatcataatttacctagaagaatattattttggaaatttttggctagaaaaggaagactgaatggactctgcaacttatatcatagctgtgccctgggattgatggattatgaagtcatttcttgatttaacaaatgttttaaaagtcaggaggttgacagttatctaaactacatgcagtgcttttttaaactagtttctcttaagcatgaggctgtagcataatgaagtagcaaacaaagtggcacctgggagtagt

SEQ ID NO: 152341 - DNA, 639 bp, Homo sapiens
ctaacaaatagagaagaaaaggaaaagaaggctgtgtatgctttttacaccttgactatgcaagagttaaccatttctagatatgttgtcattctcctcataagcaaatatctcttcgtttgggtttttgtaatatactctaataaacaaaattgcctctataaaaaaactatgggtcttatacttgtaggtaaatgccacttaattttcagataattaatctcagcaaatgatattgtggtatttttttaaaagccaatggagccataaacataggcctttctacatctgtaggtttactggggatatcctcctttggagatttaacctaaggaccatgttagcattgaatcagcctgtgtgcctttctctgatacaggcatcataatttacctagaagaatattattttggaaatttttggctagaaaaggaagactgaatggactctgcaacttatatcatagctgtgccctgggattgatggattatgaagtcatttcttgatttaacaaatgttytaaaagtcaggaggttgacagttatctaaactacatgcagtgcttttttaaactagtttctcttaagcatgaggctgtagcataatgaagtagcaaacaaagtggcacctgggagtagt

SEQ ID NO: 152342 - DNA, 587 bp, Homo sapiens
ctctacaggcatccatagagacagctcccaagcatcagcgaattgaagaatttgggaatatgctttactgattgttccatatttctttattttttacactgcttttctttatccaatcttacttttcattgcagttgcttttttttttggcyttgtctgctcatgccttgggctcttcagtggtacactggaatattgctcaactctgtggtggacatcagtttcagtaggtgattctgtgtgtccctcttgggaaatctgctatagacctctccttacagacaatattcaagtacagaacagacacacttagtataaagtagaaattgatataaacaaaaaagtcagtgaatctagtgtttatgagaattcctgtttcatataattggtgatcatgtatggtgaaacatctgctgtttctcctgctagtagcactctgatttttccttgtagatgtatcaatccttaactcagtccatataaccagacagccaatgacaatggtgtatcacaggaaccacagtgtctgtatcagaagtggtcacatgagtcaagaagggctaattagagccagcccggagacttct

SEQ ID NO: 152343 - DNA, 475 bp, Homo sapiens
acaggtcaaaagtgcggagcatcacaagagaagtgtgggtgacaaatcaggggcaagcagacgyggtaaactttagagaggaaagaaatggactggctatgaactagacatacaggatggacaggaaatgcaaaccagacagaggaaacagtataatcaaaggcatagtttaggcaatttcaagcagctcagattcgttggcacaaaagggaatgccaggatatatgataggaaaggactgaatgaatccttcatggaaagaaggattaagaacatcaggttgaggagatacgttgaacagcttagatctcagctgacaggtggcacacttctcttccctacacttgcatcatcctggccattgtttaacatccacccttgaaataactattctttacacattgagactgtagtgcataaggaagtgtattaggacactaacctgtgagtttaaggtaggttgtagagtaaaaca

SEQ ID NO: 152344 - DNA, 587 bp, Homo sapiens
acaaaatttacaaggaggttaaacaagtaaggacaaagattcatagtaataagagagctattaaaggtcgaaggaaggaggaaccatgtcacagttggtaggtatcctttgatggagtcccagatggtttgagcagtgggattatattgaaattatgtagccaggtagcctgttagtaaatcttttgaactttcagttcaactaatcctgaattgttaatataagaacaacaggtgtggtttattactgtgcaaacccctctttgttcagccagaacataaagcctcttgttgtttccttgaccattcaagtagttcatgctttggcacggttagagcttcatacagtagyttagcaatgagcctaaatcatgggatcaaaatcttgcaaattcctgtcatacccaggaaagttttgagttgcttcttcggttgtagaggcctgacctttaagatagcttccttttgttcgatggacatggtgtagtttcttgggcttaggatgtaccccagatattttacttccagtttagaagtctgggccctgggtggagagactggataccctttctcccaggaagtttagaa

SEQ ID NO: 152345 - DNA, 550 bp, Homo sapiens
aatgggagaaaatatttgcaaactacccatctgacaacggattaataaccagaatacatatggagctcaagcaactctataggaaaatatctaataatccaaaccaagatgagcaaaagatttaaatagcaatttctcaaaagaagatatacaaatggcaaatgggcatatgaaagatactcaacatcactgatcatcagggaaattcaaatcaaaactacaatgagatatcatctcaccccagttaaaaatgtcttatattcaaaagacaagcataataaacactggcaaaaatgtgaagaaaagggaacacttgtacactatgagtacactatcaatggagtaaagagacaacctacagaatataagaaaatattttcaaactatgcatctgacaaaggtctaacatccataatctataaggaacttaaatttacaagagaaaaaaaacyccactaaaaaatgggcaaaggacatgaacagacacttttcaaaagaagacataagtgtggccaacaagcttatgaataaaaagctcaataaaactgat

SEQ ID NO: 152346 - DNA, 465 bp, Homo sapiens
gaattcaaaccctgctagttgaaccctagaatcctgacacgggcagccagagttccgtgtggggaccattctaggtatattaagcagacaggaacttaatacaagaatcgatggtgcttgcaaaatcactggaagacgctgagagagtgggctgtgtaggcttctcaaattttaccgtgcaaaagaatcagcagaacaacttgctaacgcacagtttcttcagtctcaccccctcacagttgcagattcagtaagtaggtccggggtggggctcaagactctgcatttttaacaagttctcaggagatgctaaagatgtgtgaataagaccacagattgagcagccccggaataggtaggaccctcgtgacaccacagagctgggtcaccaaggagcagctccttygtatagggagaaaggtggagaacaaagaggcagttaccagaactatgacctggaaatgg

SEQ ID NO: 152347 - DNA, 521 bp, Homo sapiens
ttttgtctcctctgtatattttcaaatatcctgtcttcaaggtcactgtttcttctgcttgatccattctgccattaaatgactctgatgcattctttagtataccaattrcatttttcagctccagaaaatttctgcttgactctttttaattattttaatatcttcattgaatttatctgatagaattctgaattccttctctgtgttgtcttgaacctatttgagtttccttaacacagctactttgagttctttgtctgaaaggtcacatatctctgtttctccaggattggtccctggtgccttatttagttcatatggtgaggtcacctttccccagatggtgttgatgctagttagatattcttcaatgtctggacattgaagagttaggcatttattctagtctttgctgtctgagcttatttgtagccatccttctcagggaggccttctggaaatttgaaaagactaaggtattgtgatctaaactgtatctgctttagggggcaccccaa

SEQ ID NO: 152348 - DNA, 435 bp, Homo sapiens
gtttgcttagaattaactttgtcctatttgtcaactgggttctggaaaaaaacaaacatgatgaagcttttgaataattgtgcagttttttaactagggaaagctttgtactgctgctaatgatatgcacccagaaaccttgttagacaaaaggcastttcaagccaatgctatggtttccatgtggacatacagtgcctatgtagcaggcacttagagtaaatggacttgccttaatttataaaggagggaagaggtagaagggaaccatgggtcctccagctagagggggagtttactaaaagggagtccttggaaaggggaatggagagaaggtgcctttgactgtcttctatccattagttctgccctggagcacactggggaagcaggctgcgggccttccaaaagtaaaaaatggtgatatgcaatcga

SEQ ID NO: 152349 - DNA, 595 bp, Homo sapiens
aagagaataataaaagtgaatagtaaattaaatgaaataaagcatataaaatttcgtaaaatacccaagagataagaactcaatgcaggttaattgttactccattattagtgttaatgcttcaagtgcttagaacatagacagtaaatacatgtagttactttcattttttctagttctgagtgacttcaaggcaggtgactgaactctattcattcaggtatgtagtgaatgcttgtgatgagcctcccagagcttcccttccagatggagagtgctcattcttctagcttctgaaagtgttgttggctgtcaattcccaactaagtttctgtctgagaattgccctcggcaaaagaaagccacctcrctcaatgccacacatgctctttggaataacttgcatgcaatgattgatgtctggggaggggtgggaggagaaatctgaagatcccccacagctcctgcagtcttggctgaggcctttgttctgactgcatcacagtccaatttcttcctctacatagttctgtttcctgtactctcccataggtgttgatcccaagagaattcgagagtaaaccttctgcacaca

SEQ ID NO: 152350 - DNA, 584 bp, Homo sapiens
gaagatccatgagttatttgcaaaaccatacccaccccgttattgccagtttaatcgttatatccctaatgaaacatgcaacattattaatatatgcatacatatcaataattctgctgtaattaatatagtagtaacttttactttaaaaagttaaatgccattcgcctaatttttctgtctcagtttcactatctataaaataagagtaatacctacctcataaagcttttgttaggattcagtaagaaggttcatgtaaactgcttagaacaattattggcatagaatcatcacttaataaatactagcttttcaaattagtaataacttttaagaatgttacaaatttaatagtagctgttggtcacacatttttaatagatatttccaaattgccctgctaaaatatggctctctcatgtcccagaggatgagtttctgattatatttctacgtgattagtttacgtttcttagttttcatgaaaggatacctcagtaaaaataaatggggttcatcatttsataaatcttggtttaagtcaagagcttgagatcagatataaaaattgttttttcagt

SEQ ID NO: 152351 - DNA, 590 bp, Homo sapiens
agagcttgagatcagatataaaaattgttttttcagtatgttcagaaactagggtatttcttgttaataaatcagtaagctttttttttttctttttttttttttttttgagatggagtctcactctgtcacccaggctagagtgcagtggtgtgatctcrgctcactgcaagctctgcctcccgggttcatgccattctcctgcctcagcctcctgaggaggtgggactacaggtgctcaccaccacatccagctaattttttgaatttttagtagagacggggtttcactgcgttagccagggtggtctcgatctcctgacctcgtgatcagcccacctcggcctcccaaagtgctgggattatcagtaagctttttaaactcttctacaagctcaaagaaaaatgccagaataaaagtaaccaaatccattgacgtatggctgaatatgtctttcaatttaaaatggaatgaacacacatttgggtattcattgtatgctgctaggcattgaatgagacacaaagaaatagaagcctttatcactgtctgggagggtagaaagaaattgaaaatactacctatgctt

SEQ ID NO: 152352 - DNA, 338 bp, Homo sapiens
cacccataagtagcatgaaatacctgctttttctgatgtatgattgttaagttatgggatagggttcagcaaaagcattaatagcaacagaaagcaaactatttattcctctttcataacatgaaccagaatcaaatagttggaagccaatttttgaatctgaagcagataatgtttcctgtatcctgctattatttttctccccagcatgtgttcaatgaagataagtcccgtgaatarttatctgactccataaaaaccattaggccagagtccaatgagatatcacagctgtgctacggatgagataatagaaaaagaacaacattcaaagcttt

SEQ ID NO: 152353 - DNA, 595 bp, Homo sapiens
ttttccaggagttgtatgcaacacttatgcttctattttattagttagaatttagtcatgtggccacatcatgtaagggtataggcttggctgggaaaagtagtctttttctggatagtaatgtgtaacagtaaaaatacttcataagcaactgatagtcactgtcacagacagggaataacaaaatggatgatgtctttaatgatagttttacagaaaattcaaatatggtatttatagaaatgcgttaccagwggcaagagaacagagtcctgaggccacaaaatattggtgcatctgtactattttacttagctcaggtcttgggcatttcttcaggagaagtaaatgctgaagctccagagaaataattacatatttaacatgttggctctagttcacttccctagggaccaaccagcttttaaaacatgaagttctaataaggaaaacataaatccagttcttacccatgagatgtaattgatgcatagtcttatattcttttggccttctaacaggcaatagctacacaaaacttttacccgtggtttctgtaataatttaattgtggagaaagtgctttgtccaaagc

SEQ ID NO: 152354 - DNA, 595 bp, Homo sapiens
ttttccaggagttgtatgcaacacttatgcttctattttattagttagaatttagtcatgtggccacatcatgtaagggtataggcttggctgggaaaagtagtctttttctggatagtaatgtgtaacagtaaaaatacttcataagcaactgatagtcactgtcacagacagggaataacaaaatggatgatgtctttaatgatagttttacagaaaattcaaatatggtatttatagaaatgcgttaccagtggcaagagaacagagtcctgaggccacaaaatattggtgcatctgtactattttacttagctcaggtcttgggcatttcttcaggagaagtaaatgctgaagctccagagaaataattacatatttaacatgttggctctagttcacttccctagggaccaaccagcttttaaaacatgaagttctaataaggaaaacataaatccagttcttacccatgagatgtaattgatgcatagtcttayattcttttggccttctaacaggcaatagctacacaaaacttttacccgtggtttctgtaataatttaattgtggagaaagtgctttgtccaaagc

SEQ ID NO: 152355 - DNA, 380 bp, Homo sapiens
tgggcataagttacatgcaaatactacattttatttaagggacttgagctgcggattttggtaggkggtgagtcctggaaccagtccttctgtggataccaagggatgactatagtacccacatgtgcagcacatgcagtgagtgcctctggcatctggtacctacctatgacagtttcctcttcttattttactcacatcccacctcttacagcatgctgttctgccgcgacactaaagaaccttcttgaatatccattgcagatatggggaatggtaaatgcagtcttttctcctctgctttgcctttcgagttcagcacaggaggactcttccatgaaactagagatcatctgatttgtcctcttgaatttttcccc

SEQ ID NO: 152356 - DNA, 405 bp, Homo sapiens
aagtttcccatctcattccaggacagctgctcctcgagtggaatgtcttgcaccatttacattgttttcccatgtatatggttacgttttcctaggttaagtgcatctactgtatctctgtgtctgcatcacacaatatgttcacatttacttccctcctttagacattagtggataacagccagttccgttagctccaacctgctttctgtgcttccagctatgttatatacttgttttgtctccttggatccaatgtatggccccagagggacacgtactgkctttggctttctgttctccctcatggtgctgggtgcacagtgggtaattccgttactgctcaataacccttcaccgtctgattttgagaaagagtcatcagacaaaagtagatagaccctg

SEQ ID NO: 152357 - DNA, 480 bp, Homo sapiens
tttattagacacaggaaaacatcgtttacagacttcttcattgtgtagggattctgccttcaggcctgttcaccagccaggagaattgtgctttttgatccagggctcttggccagaacagccttctcgctcattaactcagtcaaccaaatgcttcctgtgtttccactggtggttcagaacgtagtctctgccctctratacctcacggtctaacgggggagaaacaagaaagtcagaacttacaatacaagataataaggaataagagcagagcctttggaaccagacagacttagatccaaatgtcagctctgcatttactagcaagtggtctatcttggtaagatgcaactcttttctctaagtcttaatttctccctctgtaaagtatgacctcatggggttattgtgaagattaaatggcatatcgtatataaggcccttggcacgatctttggaaaataataaccattcagt

SEQ ID NO: 152358 - DNA, 480 bp, Homo sapiens
tttattagacacaggaaaacatcgtttacagacttcttcattgtgtagggattctgccttcaggcctgttcaccagccaggagaattgtgctttttgatccagggctcttggccagaacagccttctcgctcattaactcagtcaaccaaatgcttcctgtgtttccactggtggttcagaacgtagtctctgccctctgatacctcayggtctaacgggggagaaacaagaaagtcagaacttacaatacaagataataaggaataagagcagagcctttggaaccagacagacttagatccaaatgtcagctctgcatttactagcaagtggtctatcttggtaagatgcaactcttttctctaagtcttaatttctccctctgtaaagtatgacctcatggggttattgtgaagattaaatggcatatcgtatataaggcccttggcacgatctttggaaaataataaccattcagt

SEQ ID NO: 152359 - DNA, 565 bp, Homo sapiens
tttgctgtgattattcctgtcctcctccttgggaccactctgtccagagatctcttttctgaactsagaggctaactatccgcatcattaatggaatgcttgcctcccaagcagatagattctaagttccctgaaggcgtgacaatctattcattcttggcacagtgaatagattcgttgattcaatccaccaaattcacttgcattggctactcatgaactcatcatactatgtctttgaagaatgccttacggggtgtctaagggagagaatagagtcatgggttctccatttctgtttctgactgggccaataaagccccttcctcatccctcttttccacttaccactagggacagaaattaaaaaccatggcttcaggctactaaaagcctaaaccaaaccaaatcaaaccaaacaacaacaacaaaataaggcaggttggacaagcttacgagtgtaaccaaactatctggaggtgtctgttgtgcgggacgcttatttccactgacctaaatttccctgccacttctcccttaatttatcttgccttaggatatttac

SEQ ID NO: 152360 - DNA, 598 bp, Homo sapiens
ttattaagtaaacgaaaaagcacacagagtaagaggagatatttacaatacatgtatctgacaaggtatgctttagaacgtttacctaaagtactcaatataaaaatgggtgaaagacttgaacaggtactttacaagaaaggatagccaaatggacaacaaacgctttttaaagtgtttaactttttagacatcagaaaaggggagattaaaattagaatatgataccaacacacccaycagaatggctaacgtgaaaaagacagagaatgccaagtaccagtgatggtgtagaagagctagaacactcatgcacttctagtagaagtatagatttctagagtcctgttcagaactgttggcaacatctcctgaagctcaacatactctattattggctgaagcatatagctaccagaaatgcatacgctccttcactaagagacctacaggacaatgttcatagcagtactatttgcaatactgaaaaccatctgaatgcccatcaacagtaggataaatatgttgtgatatatttatacaatgaaacactatacagtaatgagaatgaagtacaattacattcaatagtgtgatt

SEQ ID NO: 152361 - DNA, 598 bp, Homo sapiens
ttattaagtaaacgaaaaagcacacagagtaagaggagatatttacaatacatgtatctgacaaggtatgctttagaacgtttacctaaagtactcaatataaaaatgggtgaaagacttgaacaggtactttacaagaaaggatagccaaatggacaacaaacgctttttaaagtgtttaactttttagacatcagaaaaggggagattaaaattagaatatgataccaacacacccaccagaatggctaacgtgaaaaagacagagaatgccaagtaccagtgatggtgtagaagagctagaacactcatgcacttctagtagaagtatagatttctagagtcctgttcagaactgttggcaacrtctcctgaagctcaacatactctattattggctgaagcatatagctaccagaaatgcatacgctccttcactaagagacctacaggacaatgttcatagcagtactatttgcaatactgaaaaccatctgaatgcccatcaacagtaggataaatatgttgtgatatatttatacaatgaaacactatacagtaatgagaatgaagtacaattacattcaatagtgtgatt

SEQ ID NO: 152362 - DNA, 483 bp, Homo sapiens
aaaactgtagatagtttgctttagggctctttccttttcagcaatccttttaattttttcttcctggatatgaatggyttattttctgtagtccaatcagctacgcagaggtcttcatttatttttgatttgctatggccaattttatcattgaacgaatgagctttataaacaccagtgttgtgcagctcctgtgcatgtaaaagccagcagtcctagtcaaggacttttgtaatttgaaaagaacagaacagcacaaaaattttccaattgtgaatatgttgggatagcagatgaggtgaagaattcctactgttctaaaaattgagaaaaaacaatcatggaaagttttctcagaccgaagctttcttagtgtattatgtctccctggcttactaccagcaagtgggaaagactagcttcctaaagtactatgctactgaggggctagcatgctacgaatgctctgaactagaggccaga

SEQ ID NO: 152363 - DNA, 483 bp, Homo sapiens
aaaactgtagatagtttgctttagggctctttccttttcagcaatccttttaattttttcttcctggatatgaatggcttattttctgtagtccaatcagctacgcagaggtcttcatttatttttgatttgctatggccaattttatcattgaacgaatgagctttataaacaccagtgttgtgcagctcctgtgcatgtaaaagccagcagtcctagtcaaggacttttgtaatttgaaaagaacagaacagcacaaaaattttccaattgtgaatatgttgggatagcagatgaggtgaagaattcctactgttctaaaaattgagaaaaaacaatcatggaaagttttctcagaccgaagctttcttagtgtattatgtctccctgkcttactaccagcaagtgggaaagactagcttcctaaagtactatgctactgaggggctagcatgctacgaatgctctgaactagaggccaga

SEQ ID NO: 152364 - DNA, 431 bp, Homo sapiens
aatcaagtctcacctttcatcttaagaaactagaagatgaccatagtaaatcaaagtaagcagaaggaaggaaataatagattagaaaggaaagaaaaaacataaagacttgaaaaacagtagagaaaacaacaaaactagaagttggttctttgaaaggattagcaaaattgacaaacctggaatcagattgaaagaaaagataccactamtgtttactgaaaaagcaatccttactgaatgcttttgtaaagcgattggttatcccaatagaatatacatcactttacacctattttttgtgtgaacattctgttatgtaagcattcgaacattgtttttctccaaaaagtgctttccacgaattgtttcatcctcgtgacattcttagaatgcagaagctgttgtatttagtaaactgtaatcattaa

SEQ ID NO: 152365 - DNA, 532 bp, Homo sapiens
aaaaaagtcgattcattgcctatcaccagtcttactgcagcttctccttttacttattggttggctacattttcttttgactcatgtttaaacatatgagcctattgactattcttaaatgatgacctggctggattaatattcttgggtcacagtttgtttctttttggaagatgctattccatcattttctttcactgaatatcttggagaagtctgaggccaggcttacttaacctttgtaatctctcctcataaggtgtttttttttttagttcatgtaacccagatgtatctgtatttatctttccatatcaagttttctggagtctgtgcctttctgacaggcagacyaaagttttgcttggaatcaggaaaattttttctgttaaatctttgcatttatttatgttctatggtttgacctttcattttgaagtaccagttacgtttatgttggatcatttttatttgttctcatctactattttcttgttgctttaattattcatcttttccttatttattcagc

SEQ ID NO: 152366 - DNA, 437 bp, Homo sapiens
agatctattaaacaaaaagtttgtcaacctttaaatatgctttaaaaactaaagtaaaccatggacaaagaacacgagaaaggaaaataatgtataaacaaagtgaaagtatcagtaaatagaaaacatgaaaaattctggagctgaaaaatttcttagagggctttacagattttaaacaggcagaagaatcagcaaatttgaaaataggacaaatgtaattatccagtccgaggaacagaaagaaaaaagaatgaagagtgaacagagcttgagggatctgtggcatgctatcaagttaccaacatatgcattaaaggagttccagaaaacgaaaagaaaaaggcagaaataatatttgaggaaataatggctgagacttcccaaattcaaygaaatacatgagctacacattcaagaagatcaacaaattataa

SEQ ID NO: 152367 - DNA, 500 bp, Homo sapiens
agagagcagatggtggtggcttggaaatggaagatatgactggcttctggatatattcttcaggtactcctgacaagatctgctgacagattagatgtgaggtgtcagagagagaggggagtcaatgaygacaccttagtttctagcagagcaactgcaagagttgccattaatgcaagtaggaaagaccatgtgaggggtaggtatgagaaagaatatcggtaccccaatcttggacctggtaagtttgtgatacccaacagtttgtgaccaatcaaacagagatgtcaagtaggcaggttggtatggaagtctggaattaaggagagagatctaggctggagacacgcatttggaaatcattagcacacacaaggtagtaaaagtcatgagaaagaagattgaggactgagtcctgggacatatcagtcctgggacatatcaatgtgtaaaaggtgggatatgagaagaaagcaaaacagactatgacagatggactg

SEQ ID NO: 152368 - DNA, 573 bp, Homo sapiens
gcagatggtggtggcttggaaatggaagatatgactggcttctggatatattcttcaggtactcctgacaagatctgctgacagattagatgtgaggtgtcagagagagaggggagtcaatgacgacaccttagtttctagcagagcaactgcaagagttgccattaatgcaagtaggaaagaccatgtgaggggtaggtatgagaaagaatatcggtaccccaatcttggacctggtaagtttgtgatacccaacagttygtgaccaatcaaacagagatgtcaagtaggcaggttggtatggaagtctggaattaaggagagagatctaggctggagacacgcatttggaaatcattagcacacacaaggtagtaaaagtcatgagaaagaagattgaggactgagtcctgggacatatcagtcctgggacatatcaatgtgtaaaaggtgggatatgagaagaaagcaaaacagactatgacagatggactggaaaggcaggaagaaaagccaggtgagtgagtgagatcctgaaagccaagtgaagacactgttatggaggagagagtt

SEQ ID NO: 152369 - DNA, 550 bp, Homo sapiens
tggaaatggaagatatgactggcttctggatatattcttcaggtactcctgacaagatctgctgacagattagatgtgaggtgtcagagagagaggggagtcaatgacgacaccttagtttctagcagagcaactgcaagagttgccattaatgcaagtaggaaagaccatgtgaggggtaggtatgagaaagaatatcggtaccccaatcttggacctggtaagtttgtgatacccaacagtttgtgaccaatcaaacagagatgtcaagtaggcaggttggtrtggaagtctggaattaaggagagagatctaggctggagacacgcatttggaaatcattagcacacacaaggtagtaaaagtcatgagaaagaagattgaggactgagtcctgggacatatcagtcctgggacatatcaatgtgtaaaaggtgggatatgagaagaaagcaaaacagactatgacagatggactggaaaggcaggaagaaaagccaggtgagtgagtgagatcctgaaagccaagtgaagacactgttatggagga

SEQ ID NO: 152370 - DNA, 573 bp, Homo sapiens
gatatgactggcttctggatatattcttcaggtactcctgacaagatctgctgacagattagatgtgaggtgtcagagagagaggggagtcaatgacgacaccttagtttctagcagagcaactgcaagagttgccattaatgcaagtaggaaagaccatgtgaggggtaggtatgagaaagaatatcggtaccccaatcttggacctggtaagtttgtgatacccaacagtttgtgaccaatcaaacagagatgtcaagtaggcaggttggtatrgaagtctggaattaaggagagagatctaggctggagacacgcatttggaaatcattagcacacacaaggtagtaaaagtcatgagaaagaagattgaggactgagtcctgggacatatcagtcctgggacatatcaatgtgtaaaaggtgggatatgagaagaaagcaaaacagactatgacagatggactggaaaggcaggaagaaaagccaggtgagtgagtgagatcctgaaagccaagtgaagacactgttatggaggagagagttttccattgggtccaatattgctgacag

SEQ ID NO: 152371 - DNA, 541 bp, Homo sapiens
ctactacatgtaagtactatatattactacatgtaagttctacagattactaactggagggtaggcaatcttcaaattattaggagcccgaatcaacaccaatcagaaasaaaagcaaattcttaagttttaattcaaattatatactgtaacatcatagggttatatatctagactatcttcttcagttcagttctaatatatactacggtcccctaataacactaactaaaactttaaagataattcttactaagtttctgcatctaaaaagttagaaatttattgtttgtaccctaacaccaaagatcccattctgcaaggtatgattcccttaataggcagttgggttgatttcataaccccattctcactgaatgtagaccatgaagtcaatgaaaggccacatctttaacctaggcattagtaactggcaatataaaactgaaaaatttgagccactggccatgattactcctataccatgaatccaactcagtggccatcactgttaaattgttcataatttctgttgcttaat

SEQ ID NO: 152372 - DNA, 541 bp, Homo sapiens
ctactacatgtaagtactatatattactacatgtaagttctacagattactaactggagggtaggcaatcttcaaattattaggagcccgaatcaacaccaatcagaaagaaaagcaaattcttaagttttaattcaaattatatactgtaacatcatagggttatatatctagactatcttcttcagttcagttctaatatatactacggtcccctaataacactaactaaaactttaaagataattcttactaagtttctgcatctaaaaagttagaaakttattgtttgtaccctaacaccaaagatcccattctgcaaggtatgattcccttaataggcagttgggttgatttcataaccccattctcactgaatgtagaccatgaagtcaatgaaaggccacatctttaacctaggcattagtaactggcaatataaaactgaaaaatttgagccactggccatgattactcctataccatgaatccaactcagtggccatcactgttaaattgttcataatttctgttgcttaat

SEQ ID NO: 152373 - DNA, 541 bp, Homo sapiens
ctactacatgtaagtactatatattactacatgtaagttctacagattactaactggagggtaggcaatcttcaaattattaggagcccgaatcaacaccaatcagaaagaaaagcaaattcttaagttttaattcaaattatatactgtaacatcatagggttatatatctagactatcttcttcagttcagttctaatatatactacggtcccctaataacactaactaaaactttaaagataattcttactaagtttctgcatctaaaaagttagaaatttattgtttgtaccctaacaccaaagatcccattctgcaaggtatgattcccttaataggcagttgggttgatttcataaccccaytctcactgaatgtagaccatgaagtcaatgaaaggccacatctttaacctaggcattagtaactggcaatataaaactgaaaaatttgagccactggccatgattactcctataccatgaatccaactcagtggccatcactgttaaattgttcataatttctgttgcttaat

SEQ ID NO: 152374 - DNA, 541 bp, Homo sapiens
ctactacatgtaagtactatatattactacatgtaagttctacagattactaactggagggtaggcaatcttcaaattattaggagcccgaatcaacaccaatcagaaagaaaagcaaattcttaagttttaattcaaattatatactgtaacatcatagggttatatatctagactatcttcttcagttcagttctaatatatactacggtcccctaataacactaactaaaactttaaagataattcttactaagtttctgcatctaaaaagttagaaatttattgtttgtaccctaacaccaaagatcccattctgcaaggtatgattcccttaataggcagttgggttgatttcataaccccattctcactgaatgtagaccatgaagtcaatgaaaggccacatctttaacctaggcattagtaactggcaatataaaactgmaaaatttgagccactggccatgattactcctataccatgaatccaactcagtggccatcactgttaaattgttcataatttctgttgcttaat

SEQ ID NO: 152375 - DNA, 566 bp, Homo sapiens
ggtccttttattcaaaactcattccacaaataaccaagtattgattctgggcaggcactcttcttggtactgcagacccagaagctggaatccagactatacacaagtaaacaaacagccctaacccaaagtaacgatggagaggtgaggcctggaggtatttgttcatctgctcctgatgacctgttgaaacacattcctttccatttccctccactacactgagcagacactgagctacttgtaagtctcygaccatgccatgctgtttctcacctttgcctttgctcatgctatttttttccatgcttcttcaccttgaaagtctctatgtagttttgctacgcttatcagcaaacttaccaaattgccctgtgattgtctgctactttgtgtatctcgcctcttagactgagttccttcaaagcaaggattatcttttttcattttattttccctgctacttatttttaaaacaatagatcaaatttatagcacgtaatgaccatgaataaaaacaataaagctagattaaagaatacaagacctttagatcaggtgtcacc

SEQ ID NO: 152376 - DNA, 592 bp, Homo sapiens
catcaaatctgggagctctctgcctccccactcctaaattcaatacttaaattctctgtttcttaagattttattagttgacattctgttatctgtagccaaaaccacttctaatatgctgtacttctctggagtgagagtgcagtaaagactgtggcatttattgtccattttctaatgaacaggtgctatggtctgaatgtttgtgtccccccaaaatccatatgttaaaacctaacccctatggtgatggcagtaagaggtagggcctcttaattaggtcatgagggctctgccctcatgaaagggattagtgctcttataaaagaggcctgaagtggcttcctcaccccttccgccatgtcacaacacatagaaggtgccatctatgaaccaggaaatgggatcccaccagacaccaaactgacgggtaccttgatcttggagttcccgtcctctagaactctgagcaatmaatttctgttgtttataaattgcccagtctaaactattttgttccagtggcagtcaagctaagactatcttagtcttagcctaagacaacaggcagatcttattacttccagaattc

SEQ ID NO: 152377 - DNA, 393 bp, Homo sapiens
gagcaatggactaagctgggagtcactgmcctcagaggtcttatgctttcccccttcaggtatatatggtctcctatatccttctaataagtcatccctttacctaagcttatttcagatgggtgtttgtcacttcccatcaaaggagttttgactagtagagaaatgggtgctggaagtggaacgttcccactgacagccccccatagggagttgttaggatgctgccatatggaattgggatatttgccatctttgttaggtggtatgaaaatcagttggttaaagaattgtcagttgtctgctaaactcagcattttgtgaactcagagcattattcataaaataggaacattaggtgacctgatagaaaatgtcaaaatatttcctact

SEQ ID NO: 152378 - DNA, 393 bp, Homo sapiens
gagcaatggactaagctgggagtcactgccctcagaggtcttatgctttcccccttcaggtatatatggtctcctatatccttctaataagtcatccctttacctaagcttatttcagatgggtgtttgtcacttcccatcaaaggagttttgactagtagagaaatgggtgctggaagtggaacgttcccactgacagccccccatagggagttgttaggatgctgccatatggaattgggatatttgccatctttgttaggtggtatgaaaatcagttggttaaagaattgtcagttgtctgctaaactcwgcattttgtgaactcagagcattattcataaaataggaacattaggtgacctgatagaaaatgtcaaaatatttcctact

SEQ ID NO: 152379 - DNA, 576 bp, Homo sapiens
ccaatagagttgcttaaattcactgggataggtcaaaaaggctttattttcctgatctgccatagcttccacacaattttcagaaggaaaaacaagcaaataatgtaagaacatttcaaaaggattcagtgaccagcttgaaaggattttcagtggccatgtctagcgtaagttagctacaaaatcgtgaatataaaaattataatcagacactaaagttaagtatctatgagttcatactgatataaaggaatacacatatgaatgaatgaaaaatgagaaggaaaatctctttgytatagtagaattctaactaagaaatgtttaagaaagaaatgaggaaaatagaaatcactatttggcaaccagaaagtaattattgtttcaggcaagcatcttcaatagatactaaaattagtgaacaacaaaaaaatgatgagaaacagaatcttcacagaggcccacaatatctccactttgacagcaccttaatgaagggatcatagttaacatcaccagtaatgggacaaatggacaccatgtgccttctgatataatgaatttagaaggacacaa

SEQ ID NO: 152380 - DNA, 511 bp, Homo sapiens
ttaacttgcctaaagtctctttgcaggatttggcacttttctttccatcctggctccagagggacagagaacaactggtcatagacatagaaatagttcakaaacctgactcagccccttctttatctctctgtggccagtcagccacccactcttgccaattttccttccaaaagaccgttatgtttacccatccttcatacccactgccacttctaaaccaagccctttgcaaattccaccaaggtcacagcaacagctggtcttctccacagcctcacatagactcccagtcccacatccagtgcccacctctcctgcataccaccagcagactctttgcatgtgtgcctgtatgtgttcctctcccctactcaaacatttacaggctctgtatttcttatgggtttccatcatctgatctcatcctatgaatccaaacatttttcaccatttcataatttgtacccattgctctgactagcagttccaccctctgtgttaattcaag

SEQ ID NO: 152381 - DNA, 568 bp, Homo sapiens
tcattgagattttgatataaattgcatttaatccatagattgctttgggtagtgtcaacgtcttaataatagtaagtcttccaatccataaacacaggctatctctccatttatttgtgtcctcttcaatttctttcagcaatgttttatagttttcagtgtgtaagttgtttgtttccttggtcaagttcatttctattttattatttttgtgatgttactacaaatagaattgtttcttaatttctttttcagattacttatgttgagtttatagaaatgcaattgatttttgtgcatcagttttgtatctggcaacttttctgatttattagttctagcagtgtcctgtggaattcagagttttccctaaatcagttcatatctcatccactaacagatacaattttacttcatcctttccaatttggataccttttatttgtttttyttgcctaattgctctagccaggaattccactactatgttaaacagaagtagcaaaagcaggcatctttcttattcctgatctcagaggaaaagctttcagtttgtcaccactgagta

SEQ ID NO: 152382 - DNA, 573 bp, Homo sapiens
ctcaggaactctcttaaaaatgatttcttccttattttggataggcacctatttgtttctatgagagcgagaattactaacccaaactgtgttaattatgaagaaattcttctccaaaattttgtttcttcttctcagtactattgtattttatcatctttgtgtaaatacttgtaattctgcttgtgttataaaagcctatttaagatatagtaaatgaaggacagatgtttaaaacatgggtccacaatgaagttgtaaatgctgctagcacagtaaattctgtgattaattttagtttgtttatgcaatacgtatatttacacagctggaaaagcatcaaaaataactgtctctatgccaatattaattcaaaatcagtattaataagaagcagcataggtacatttayatcaaagtacacaaaggttaagtacaaatgcttaagattagaaatgaatcattcaaatatatcaagaatcaatttctctttaattaattaattacaacatattgaaataataattcacaaactgtatgctgcctcactttctggttctgactaaaaaacac

SEQ ID NO: 152383 - DNA, 618 bp, Homo sapiens
gccactgcacccggccaccctgtcatactgcaatacaaatttaatgcattagttgaatttttaatgttaaattttctatgactccaggataatgcaccataataacatttgggatggataagggtgtgcttttctcttgtaaggtaagagaaagagtgttatgaataaaggactattcttagccagatcaatattaataaagagtttatgtagaagtggakaatctagacactgattccattaaaactacccattcaactgccaagggaaagaaaccagtctgaaaaggctatatactgggctgggcacaagtggctcacatcatctgtaaacccagcactttgggaagccaaggcagaaggatttcttgaggccagaagttcgagaccagcctgggaaacatagcaagaccttgtctctacaaaaaatttaaaaaattaaataaaaaacttaaattaggcaggtgtggtggcacacaccagtagtcccagctgatgtgagaggatcccttgagctcagggattcgaggctacagtgagctattgactgtgcccctggactccagcctggatggcagaacaagaccccatctctttagggggaaaaaaaaagattaca

SEQ ID NO: 152384 - DNA, 618 bp, Homo sapiens
gccactgcacccggccaccctgtcatactgcaatacaaatttaatgcattagttgaatttttaatgttaaattttctatgactccaggataatgcaccataataacatttgggatggataagggtgtgcttttctcttgtaaggtaagagaaagagtgttatgaataaaggactattcttagccagatcaatattaataaagagtttatgtagaagtggataatctagacactgattccattaaaaytacccattcaactgccaagggaaagaaaccagtctgaaaaggctatatactgggctgggcacaagtggctcacatcatctgtaaacccagcactttgggaagccaaggcagaaggatttcttgaggccagaagttcgagaccagcctgggaaacatagcaagaccttgtctctacaaaaaatttaaaaaattaaataaaaaacttaaattaggcaggtgtggtggcacacaccagtagtcccagctgatgtgagaggatcccttgagctcagggattcgaggctacagtgagctattgactgtgcccctggactccagcctggatggcagaacaagaccccatctctttagggggaaaaaaaaagattaca

SEQ ID NO: 152385 - DNA, 618 bp, Homo sapiens
gccactgcacccggccaccctgtcatactgcaatacaaatttaatgcattagttgaatttttaatgttaaattttctatgactccaggataatgcaccataataacatttgggatggataagggtgtgcttttctcttgtaaggtaagagaaagagtgttatgaataaaggactattcttagccagatcaatattaataaagagtttatgtagaagtggataatctagacactgattccattaaaactacccattcaactgccaagggaaagaaaccagtctgaaaaggctatatactgggctgggcacaagtggctcacatcatctgtaaacccagcactttgggaagccaaggcagaaggatttcttgaggccagaagttcgagaccagcctgggaaacatagcaagacyttgtctctacaaaaaatttaaaaaattaaataaaaaacttaaattaggcaggtgtggtggcacacaccagtagtcccagctgatgtgagaggatcccttgagctcagggattcgaggctacagtgagctattgactgtgcccctggactccagcctggatggcagaacaagaccccatctctttagggggaaaaaaaaagattaca

SEQ ID NO: 152386 - DNA, 513 bp, Homo sapiens
gattcaagtgagtctcttgcctcagcctcccaaggagctgggactataggcacgcaccaccatgcccagctaatttttgtatttttagtagagacggggtttcacaatgttggccaggatggtctcgatctcttcacctcgtgatccaccagcctcagcctcccaaagtgctgggattataggygtgagccatcgcacccggccgtgaatgatttcaaaatatgttgttgacaaaaacttagttgtgaatactacaaatttatgtaatgagacattcttcaggggaaaatgggtacaagcaaaatattaataatccaagctagtcctcatttttcacctgagggaacaggtgacgctcagtgtaaatgaatgaggagaaagaaaattgactctaggatgtgcctcgttagaagtaaactacaaactgtttttatccttttcttttcccaaaaaaaaggggcttttttcatactttagggacctaccattaggcatatcacatacagactcact

SEQ ID NO: 152387 - DNA, 635 bp, Homo sapiens
ggtcataaacgtatttaatgagatattttactgctaatamaatttagattaatcttgaaatttatagatgaagatactagatgcttaaaaagctcatattttattttaaaaatcttaaatattctagtaatattaaatatttaaaggagtaagtctatcaataaataagcagtaagaggaaaaagagttattagatttgatctttatgatgacaagctaagatcaggaagagaagtagagagtgagcactgcctgcaattgaggcacctctgaattaaattaaaatattgtatgtttaaccatcacacttttattgtaatatgaaacttagcactacaattaactgacatgggtgacagatgatgagaccgaactatttttccttaaagtgacaagtaaaataataacatacccttagtaggttttatttttagcagtgattaattcaattaatacatatgttgtcaaatgccaatgggatacactcttttccaagcaatagacctactcatatttttttccactcaagtgaaacttaactcatctaaaacacatccattactagagggaaaaaagttgtttttatttatcgtatttcatggtccagttctcttatttcacaagtactgaaactg

SEQ ID NO: 152388 - DNA, 635 bp, Homo sapiens
ggtcataaacgtatttaatgagatattttactgctaataaaatttagattaatcttgaaatttatagatgaagatactagatgcttaaaaagctcatattttattttaaaaatcttaaatattctagtaatattaaatatttaaaggagtaagtctatcaataaataagcagtaagaggaaaaagagttattagatttgatctttatgatgayaagctaagatcaggaagagaagtagagagtgagcactgcctgcaattgaggcacctctgaattaaattaaaatattgtatgtttaaccatcacacttttattgtaatatgaaacttagcactacaattaactgacatgggtgacagatgatgagaccgaactatttttccttaaagtgacaagtaaaataataacatacccttagtaggttttatttttagcagtgattaattcaattaatacatatgttgtcaaatgccaatgggatacactcttttccaagcaatagacctactcatatttttttccactcaagtgaaacttaactcatctaaaacacatccattactagagggaaaaaagttgtttttatttatcgtatttcatggtccagttctcttatttcacaagtactgaaactg

SEQ ID NO: 152389 - DNA, 348 bp, Homo sapiens
aatatttatattatttgatacgccactgagatctataaaatccatacctaaaactctttgctaaggcactttctccacttctttctttctctctttctctctctctctttctttctttctttcgatatggagtcttgctctgtcgccaggctggagtgcagtggggtgatsttggctcactgcaaactccgcctcctggattcaagcaattctcctgctcagcctccccactccacatattttttaacacaggatagttatatgggcaaactatatctgaaaaaaagttccaaattgaattacagtccattccaagcaattaagattaccaaattttcctatgaaaat

SEQ ID NO: 152390 - DNA, 348 bp, Homo sapiens
aatatttatattatttgatacgccactgagatctataaaatccatacctaaaactctttgctaaggcactttctccacttctttctttctctctttctctctctctctttctttctttctttcgatatggagtcttgctctgtcgccaggctggagtgcagtggggtgatcttggctcactgcaaactccgcctcctggattcaagcaattctcctgctcagcctccccamtccacatattttttaacacaggatagttatatgggcaaactatatctgaaaaaaagttccaaattgaattacagtccattccaagcaattaagattaccaaattttcctatgaaaat

SEQ ID NO: 152391 - DNA, 525 bp, Homo sapiens
tgatgaaatactttaattcattaactgaagttatatgttgtctctgagacttacataaaaatgaatgatcacaagaccatctgatgcattcctgtgaggagctaaaggaacagtagaaaggtgggccagtcgaagaaaaatatttcttacctaaagttgcagtgcaaacaatgaggaaagaagagggaaacaaagaaagaaaagaaaaagaaaaaagggcacatgaaattgcaaacagcactacaagtaatagagctcattttaaacatcctaaagtcttataagaaaatgaaaagacaaaaagaaaaagccmccaaaaatttttatatacattctcccacacacatgttgcaaaagggaaaaaaaaaaaaaaaaaaaaaaaaaacacgaaacaggaggtggactctctgtacacagtgtgtccataaagtggaaaccagtctcacactttatagtcacacctcatataccgccatggaaggcaggcctcctaggtgaggcatcgagtttcacaggcatgctcaa

SEQ ID NO: 152392 - DNA, 496 bp, Homo sapiens
attagctcaaaggcgtgggcatctggaaagaattctgactatttttttaagatgggctattccttgccaatattcccaaacaaactcacactatccagtctttcgctttayccagtttcttaaaatcaccttctccacaagataagcacatgtaaagggtgttaagccaatctaatagttacacctaaaattttcttgactaaaaatttcacttgttaaaagagttcacggatggttgtccttggaatttccttctggagttagtattcatacatcaattctctcatttttgagtggcaataatctaaagtgaatcacaaaaacacacaaatcacgacctcacatccgttttactaaaattaggtcattcccctttatttacccttttggttttcttgtttgtttgtttttggggggtttgtttgtatgttttgagacggggtctcactctgtcacccaggttggagtgcagcagagtgatctcggctcgctgcaa

SEQ ID NO: 152393 - DNA, 514 bp, Homo sapiens
aaagtttctagaagtcacactgatgaagaaattaccatcaaagggttcccgcatgctttagattttgcaatcttataaccaacttagaaagaacaaaaataatagtgctaaaacattatcaacagactattgaaattaatttctgtagtctgcaaaacgaaactaattttgcactttatatacataatgttttatttgtggtttgctttatccattaaacattgctattgtgttgacagcacaatagaatgagaatgacatataggcatctctcagtctctctctcwtacacacacgcacacgtcccacaagaggtatccacatgttacacacacatataagaaaagtgctaggccaggcacaatgactcatgcctgtaatcccagcattttgggaggccaaggtaggaggactgcttgagcccaggagttcaataccagatggggcaacactggaagactcccttctctacataagaaaaaagaaattaagagggtatggggctgcatgcctg

SEQ ID NO: 152394 - DNA, 514 bp, Homo sapiens
aaagtttctagaagtcacactgatgaagaaattaccatcaaagggttcccgcatgctttagattttgcaatcttataaccaacttagaaagaacaaaaataatagtgctaaaacattatcaacagactattgaaattaatttctgtagtctgcaaaacgaaactaattttgcactttatatacataatgttttatttgtggtttgctttatccattaaacattgctattgtgttgacagcacaatagaatgagaatgacatataggcatctctcagtctctctctcayacacacacgcacacgtcccacaagaggtatccacatgttacacacacatataagaaaagtgctaggccaggcacaatgactcatgcctgtaatcccagcattttgggaggccaaggtaggaggactgcttgagcccaggagttcaataccagatggggcaacactggaagactcccttctctacataagaaaaaagaaattaagagggtatggggctgcatgcctg

SEQ ID NO: 152395 - DNA, 514 bp, Homo sapiens
aaagtttctagaagtcacactgatgaagaaattaccatcaaagggttcccgcatgctttagattttgcaatcttataaccaacttagaaagaacaaaaataatagtgctaaaacattatcaacagactattgaaattaatttctgtagtctgcaaaacgaaactaattttgcactttatatacataatgttttatttgtggtttgctttatccattaaacattgctattgtgttgacagcacaatagaatgagaatgacatataggcatctctcagtctctctctcatacacacacrcacacgtcccacaagaggtatccacatgttacacacacatataagaaaagtgctaggccaggcacaatgactcatgcctgtaatcccagcattttgggaggccaaggtaggaggactgcttgagcccaggagttcaataccagatggggcaacactggaagactcccttctctacataagaaaaaagaaattaagagggtatggggctgcatgcctg

SEQ ID NO: 152396 - DNA, 494 bp, Homo sapiens
tttttagtttattaatcttctcatgaaaaagccacagtggccactgataacatccttgcagcacctttgctcctttggctttttgccagcactaacactggcctttgctgtctgcctaccttcttcatgccgttcttacattcctttcattgctttctcaaggtctttttcttctcacacaggccatgtcttgtaagtctatgtttgtgttcatttttgtttgcataatccaaggaatcgtaaattatgccaaagccagtagtcttgccaccaccaaaatgagttctgaactcaragatgacatctggtgtggtcttgtacattttggctactttttcccgaatttctctcttaggtagtgttgccttcccggggtgaaggacatcaatgaccatttgttttcactgaagtagttggttggtcatgaactttccagtttggatagttaccatgtcattcatgatggtggtcaatcctcagacagccgaggaaga

SEQ ID NO: 152397 - DNA, 328 bp, Homo sapiens
caattgcctcactttctattactttatcatttcagaaatgaatatgctttcagtgagagagagattactatgtacaccccaagtgaaacrgtaaagaatgaaactatgatttgtgaagtgtggttgctacccaactaagttagtggaaaacactgcataacatatgactcataaaatctagaaatcataatagtattaaattcaacctcatgaataaataaaagattctaagtttacattgcattatatatatatttatttggaaagtagaaccaaagaactggtataattctacagcaactcacatcttgccaaaaagaaaaatgtt

SEQ ID NO: 152398 - DNA, 432 bp, Homo sapiens
cctaatattgttaagatgtcaattctcctcgaaatgatatagattcaaagcaatcccagttaaaatcccacatggctttttttaaaaaattacaagttgattctaaagaatctagaataaaacaaatctgaaaaagaacatagttaaaggaactgcctgacttcaaaggtaatttagggagtgatggatatgttcattattttcatggtttcaggggcatgtacatatatcaaaacttacccaggtgtacactttaaatatgtgcagtttattccatgacaattacatctccatcaagctgtgttttaaaaatgttaacagagtgaaagaaaaaaaaaagagggagaaaacattgccttggtatcagaccttcccagagtktgtaggctcagtttttaaacaaccatagacaataaagctgaattcatgtgt

SEQ ID NO: 152399 - DNA, 481 bp, Homo sapiens
gctccatctcaaagaaaataataattaaaaaataaaaataaaacatacatacacaagggcagaaatcattgcttctttggaatagtcctaccacacagtaggtgctccataaaaattcagtgaattaataacttaacttgaatatagtattaagactaatcctttatccacataacagmttccctccaccaaaaaaattagcaattttgtggttatctctttatattttcctcatataattttagaatcaaacagagcctgctccacccataatgaaagtcaaggaggaaagtacattggaaatgaggaataattaaaacaactgtattaggcagggctctccagtgaaatagaaccaataggagattagatagatagatagatgataggtagatagatagatagatagacagatagatagatagatagatagacagacagatagatagacagatagagtcatgcatcgcttaactacagc

SEQ ID NO: 152400 - DNA, 566 bp, Homo sapiens
ttggccacgtggggctttgagatggctcttagacatccaagtggaaacgttaagcgggcaaaattagataacatggtaattattgcctggacgagcctcattcaaagggccttctgaagccaccaccagacttggacgatcttgacccagtctaaagctgtgttctgtcctatgactgtaccttcctcccaagccccgaagcttgcggaccatcccgtcagatatacaatttctttttctttttcttttttttttttgagatggaatcttgctctgtcgcccargctggagtgcagtggcgcgatctcggttcactgcaacttccacctcccaggttcaagcgattctagtgcttcagccttcagagtaggtgggactacaggtgcccaccaccatgcctggctaatttttgtatttttagtagagacggggttttaccatgttggtcaggctggtctctaactcctgaccttgtgatccacccacctcggcctcccaaagtgctgggattacaggcgtgagtcaccgtgcccatcagatatacaatttctgagcaaggacttctg

SEQ ID NO: 152401 - DNA, 587 bp, Homo sapiens
tgctctgtcttaatttacagagcttcttgaataaataaagatttcaagagagtggcatttgatgacctgagaatgacctttttctttagtgtcatggtgataagaaagttaattaggagagaagaaacagatattttacaaggataaagcaagcaaatcccaagaggaagaggccaggggaccaagttgaagttcactgatgacagaaacagaattttatacccagaatcaggttttcttcttttcatcttcaggaactgggatatcttacytgagaaaggcaagcttttgttggtgttataataaaataatactttaaacaataaaatttgacactgttatttcctaattttgcagttgagatttaagaggttgggaactggtaccaaactgtatctcaccagtaaaagacagagagaggagaagtcaggggatctgaggccaagttctgttctcttaacaaccacaaatccttaatccctatgtatctggctttccctgggactgaatcaggtttctctgcacatcagcctagtccacttccaagatgaaatgaatttccttggatcatgttataggaaaatgac

SEQ ID NO: 152402 - DNA, 587 bp, Homo sapiens
tgctctgtcttaatttacagagcttcttgaataaataaagatttcaagagagtggcatttgatgacctgagaatgacctttttctttagtgtcatggtgataagaaagttaattaggagagaagaaacagatattttacaaggataaagcaagcaaatcccaagaggaagaggccaggggaccaagttgaagttcactgatgacagaaacagaattttatacccagaatcaggttttcttcttttcatcttcaggaactgggatatcttacctgagaaaggcaagcttttgttggtgttataataaaataatactttaaacaataaaatttgacactgttatttcctaattttgcagttgagatttaagaggttgggaactggtaccaaactgtatctcaccagtaaaagacagagagaggagaagtcaggggatctgaggccaagttctgttctcttaacaaccacaaatccttaatccctatgtatctggctttccctgggactgaatcaggtttctmtgcacatcagcctagtccacttccaagatgaaatgaatttccttggatcatgttataggaaaatgac

SEQ ID NO: 152403 - DNA, 587 bp, Homo sapiens
tgctctgtcttaatttacagagcttcttgaataaataaagatttcaagagagtggcatttgatgacctgagaatgacctttttctttagtgtcatggtgataagaaagttaattaggagagaagaaacagatattttacaaggataaagcaagcaaatcccaagaggaagaggccaggggaccaagttgaagttcactgatgacagaaacagaattttatacccagaatcaggttttcttcttttcatcttcaggaactgggatatcttacctgagaaaggcaagcttttgttggtgttataataaaataatactttaaacaataaaatttgacactgttatttcctaattttgcagttgagatttaagaggttgggaactggtaccaaactgtatctcaccagtaaaagacagagagaggagaagtcaggggatctgaggccaagttctgttctcttaacaaccacaaatccttaatccctatgtatctggctttccctgggactgaatcaggtttctctgcacatcagcytagtccacttccaagatgaaatgaatttccttggatcatgttataggaaaatgac

SEQ ID NO: 152404 - DNA, 610 bp, Homo sapiens
aatctctctgaacctcagtttccgcatcgttaaaatgtgggtatcacaggttgggtcgtctaggaagcagacactgggatggagattagcatgtgggaagtttattasggcatgctctgcagatccacactgcgggggcaagacaaggaagcagggctgggcagagggagaagctgggctaccagacaggcaacaaggactcagctgaccccacggggagctctggggctaggatggcccttcacagtggcccagactggggtgagaaggccaggccttatggacccacatcaaccagtcattccctggatgttgcttccctgggggagggacatgacctggaatgagatgtcttacttcagccaagaaaggaaaatgcactgagagctgtcagggaacaaccttcccagcagctggggagaaaatcaagcaatcttgaaggaggatttaggcagcagggcacagcgtccatgacaatggctaacaataataaataactgcattacagggctatataaggatcaaatgaggatatatattaaggaaatatataatgcagaatatatatcatatatagtacatccttttatatatatgaggctctctatat

SEQ ID NO: 152405 - DNA, 524 bp, Homo sapiens
ggacatagaaaaatggaaagatgtccaatatttataattggaagaatattgtgaaaatgaccacacttcccaaatccgatctacagatttaatgtggtcattatcaaaataccagtggcattcttcaaataatagaaaaagtaatcataaaatttgaatgaaaccacaaaagaccctaaatatctaaagcaatcttgagcaaaaagaacaaaattggagacatcacattacttgacctcaaactatactacaaagctataataaccaaaacagaatggtactggtatgaaagcagactatagaccaatggaacagaatagataattcagaaataaatccacatatttacagtcaaccaatttttgaaaaaggtgycaagaacatatattgaggaaagcatagcctcttcaataagtggtgctgggaaaactacttatacatatgcagatgaatcaaactagacccttatttctcatcgtatacaataatcaaataaaaaatgaattgaagacttaaatgtaaga

SEQ ID NO: 152406 - DNA, 567 bp, Homo sapiens
tgttcacagaactggaaaaaactattctaaaattcacagggaaccaaaaaagagcctgaatagctaaagcaatcctaagcaaaaagaataaagccagaggttcaaactatagtctaaggctacagtaaccaaaacagcatgataccagtacaaaaaaagacacagactaatggaacagaatagagaacccagaaataaagccatacacctrtagccgtctaaacttcaacaaagttgacaaaaaaataagcaatagggatgactccctgttcaacaaatggtgtgggatagctggctagccatatacagagaatgaaactggatccctacttttcacaatatataaaatttaattcaagatggattaaagatttaagtgtaagatcttaagctgtgagaatcctagaagaaaacctaagaaacattttagacatgggtcttgggaaaggatatatgactatgtcctcaaaagcaattgcaacaaaaccaaaaattgacaaatggaacgtaattaaactgaagagcttctgcacagcaaaagaaactatcaacagagtaaacagacaa

SEQ ID NO: 152407 - DNA, 567 bp, Homo sapiens
tgttcacagaactggaaaaaactattctaaaattcacagggaaccaaaaaagagcctgaatagctaaagcaatcctaagcaaaaagaataaagccagaggttcaaactatagtctaaggctacagtaaccaaaacagcatgataccagtacaaaaaaagacacagactaatggaacagaatagagaacccagaaataaagccatacacctatagccgtctaaacttcaacaaagttgacaaaaaamtaagcaatagggatgactccctgttcaacaaatggtgtgggatagctggctagccatatacagagaatgaaactggatccctacttttcacaatatataaaatttaattcaagatggattaaagatttaagtgtaagatcttaagctgtgagaatcctagaagaaaacctaagaaacattttagacatgggtcttgggaaaggatatatgactatgtcctcaaaagcaattgcaacaaaaccaaaaattgacaaatggaacgtaattaaactgaagagcttctgcacagcaaaagaaactatcaacagagtaaacagacaa

SEQ ID NO: 152408 - DNA, 567 bp, Homo sapiens
tgttcacagaactggaaaaaactattctaaaattcacagggaaccaaaaaagagcctgaatagctaaagcaatcctaagcaaaaagaataaagccagaggttcaaactatagtctaaggctacagtaaccaaaacagcatgataccagtacaaaaaaagacacagactaatggaacagaatagagaacccagaaataaagccatacacctatagccgtctaaacttcaacaaagttgacaaaaaaataagcaatagggatgactccctgttcaacaaatggtgtgggatagctggctagccayatacagagaatgaaactggatccctacttttcacaatatataaaatttaattcaagatggattaaagatttaagtgtaagatcttaagctgtgagaatcctagaagaaaacctaagaaacattttagacatgggtcttgggaaaggatatatgactatgtcctcaaaagcaattgcaacaaaaccaaaaattgacaaatggaacgtaattaaactgaagagcttctgcacagcaaaagaaactatcaacagagtaaacagacaa

SEQ ID NO: 152409 - DNA, 539 bp, Homo sapiens
ccttcttgaaagcagaaggaaagaaggaagacgattaggtgggcgagmgcattgggggtgtggtaggaaagaaaaagagggagaaatccacctgaaggatagcaataactaacactatcgaatgtttctcacatagcaggcactttgcatcctcataactccaagtgtggcctggagaccagcaggcatcacccagagcttgttagaaatacagaatgtcagcttactccctagacctactgactaagaacctgcgttttaatgtgatcccaggtgacttgtgtgcttgttagagtttgagaggtgctacattacatgatttaatgtcattagtttaattcaacaattctatccattcaaaatgattttctcattttgcagatgaggaagctgagatccagccaagttcacatatctagtaagtgacagaacctagataccaacccaagcatcctgactccagagccttcttcgctgtaccaaaggcttaggtcactccacttgtttgtttctggtcaaacatgtgttgacaattgtgt

SEQ ID NO: 152410 - DNA, 554 bp, Homo sapiens
gtgtaatgtgtccaggtctctgaaagcrtgtagcttgcccagtttgaggaatccaatgtcggttgtgatatggggtaggtggaagggaagattagggaggattctctttcatgtacacacctattctgaaccatctcctggggaagattcttcaaagaaagaaattggaggtccctggctcctctctccaaatttcctgagaaaattgcaaagtagattgtctctggaaaagaagggaagaacatgagaaagaaggcttgttgctgagaacaaaaaaactgaacaggagaatggggttaggctggaatgttttaattctatttgctggaagcatgaaggcttcctggagctagaactgaaaataagcaccaggtaatctggaatggccacggtcaaagagcttggcttaccaaaagtctcgaagctcccacaaggatgaagtaggggacatgctagccctgaagttaggaagatatcctaatcactctttttttattgtttcctactaggctgtaagcaattcaagggcagggatacatgtctttgtcatttgt

SEQ ID NO: 152411 - DNA, 554 bp, Homo sapiens
gtgtaatgtgtccaggtctctgaaagcatgtagcttgcccagtttgaggaatccaatgtcggttgtgatatggggtasgtggaagggaagattagggaggattctctttcatgtacacacctattctgaaccatctcctggggaagattcttcaaagaaagaaattggaggtccctggctcctctctccaaatttcctgagaaaattgcaaagtagattgtctctggaaaagaagggaagaacatgagaaagaaggcttgttgctgagaacaaaaaaactgaacaggagaatggggttaggctggaatgttttaattctatttgctggaagcatgaaggcttcctggagctagaactgaaaataagcaccaggtaatctggaatggccacggtcaaagagcttggcttaccaaaagtctcgaagctcccacaaggatgaagtaggggacatgctagccctgaagttaggaagatatcctaatcactctttttttattgtttcctactaggctgtaagcaattcaagggcagggatacatgtctttgtcatttgt

SEQ ID NO: 152412 - DNA, 554 bp, Homo sapiens
gtgtaatgtgtccaggtctctgaaagcatgtagcttgcccagtttgaggaatccaatgtcggttgtgatatggggtaggtggaagggaagattagggaggattctctttcatgtacacacctattctgaaccatctcctggggaagattcttcaaagaaagaaattggaggtccctggctcctctctccaaatttcctgagaaaattgcaaagtagattgtctctggaaaagaagggaagaacatgagaaagaaggcttgttgctgagaacaaaaaaactgaacaggagaatggggttaggctggaatgttttaattctatttgctggaagcatgaaggcttcctggagctagaactgaaaataagcaccaggtaatctggaatggccacggtcaaagagcttggcttaccaaaagtctcgaagctcccacaaggatgaagtaggggacatgctagccctgaagttaggaagatatcctaatcactctttttttattgtttcctactaggctgtaagcaattcaagggcagggatrcatgtctttgtcatttgt

SEQ ID NO: 152413 - DNA, 531 bp, Homo sapiens
agaaagaagagacaaaaggaaaatgagatggaaacataaacagagccaggaatgaggcctatacaaaaacgcatgtcaagaaattccgtgcccttgctaagggttgactctaaacctttcggtgcctgaaaacgaaaagatgtttaaaaaaagtgttaagtcagagaaaggccatgggaaggagttgggatgagtgtggaaggagccagagaatacagagaaaagaggtatagattcatgataggcttttactaatgccgaatcaccttcagatgagggtgctatgatattgtgatctcagtatatgggaaacgtaaactttaccacgtttagagagtgatgtattaagttggctaaaagtactaagattaataatatctgacayttatacagagtctggaggacacattgcacagtgaaatgcactactacaaatagcacgaagctctctgggcaccaaggtgccaagactgccagggtgggaagccagaatatcactgtggcctacacatatgggctcaagacggactg

SEQ ID NO: 152414 - DNA, 590 bp, Homo sapiens
tacttttatgataagcatttcaaatatttccctccaaggtcaataggtttattttgtcattgatctttcttgtcctgccttaggtattttcctcattttcatttcttttttaatgtaattgaatttatcagtstgtcttttaacagctctcagatttggaatattgcctgcaaaaacctccctgccccacatttacaaaggaatcttggtgctttaattgagtagtttcacgtttttacatttaagtatttgatacatttggacctattctgatgcacaatcaggtatggatttaccattaacttttataaatcactgcctagttgcccttcactgtttatgaaaacatacgtctctacacccactgtattgaggtcctatatttatcatatactaagtttcactaggtatttgtttctgcttctggactttgtattcaattctatttcatttagctgcctattcgtaaatcactaccattttgatttgattactgaggctttataatatgttttaaatctggtgtgtttagtctccctttattatagttcatttgaataattttctcccagatttttttcacctctctt

SEQ ID NO: 152415 - DNA, 595 bp, Homo sapiens
ccacatgaatataaaccaagaagctgagagtcaatttaactgcaggggtctgcattggcaaagaaaactcaggtctagctagtcatattcccaattcctctagtttatactcataggcagtgaactatggaagttcttgtacacccagaaaatgcatgtttccagattcccatctgagttagtgccatgaaatataaagactaatatctacttagcaatcagtactgggatgtgagaccaatggacaaggggaattattccagggarcagaaccgaggactgttgaattacataatccaggaattgatgccactatatggcagcaagccttcactatttctgccttgcagtatttgctgtttgcattttttacaattattgtatgtttctcattatgtgtttacttttttgaaaaattttgttttatatcgtgggtgctgttttccagtagtgtacattagctatgatatcagcagataatttttagtttatagatctttgtatcatgatgaactacaactaatggcttcagatggagaggatttgtcataaccttaaaatcctgtgctttaaggtagacactgaagcagaacga

SEQ ID NO: 152416 - DNA, 534 bp, Homo sapiens
atcttttggtattagggtggcagcgctatgggtgacgagaagatattactctttcacccctacattatctaagtcaaaatcccctccatgctcctacaccaagcttgaatagccaataaaatataaggtggaactttcttggttggatttctggaattacattttaaaaaatttattataaaaattttgaaatccacagaaatcttgaaataatatcctaactgaaacactaagawtaccttcaaatctcagtggcttaaaacaacacatctacatatccattgtggtatgactgaagcttttgctctaaggtcctcacttggtggcagctgaacatgcaaacactatttgcaatgttgctagtcccatgaaattagcacacaaaggaagcaagccctgtactgactatgtaaatttctgcctagaaagatagacaacatttttacttgtgtttctttgttaaaagcaaggtctatggccacacccaactaaactggttgtaaagaatgaatccggctcatttaatttaattag

SEQ ID NO: 152417 - DNA, 633 bp, Homo sapiens
cagcgctggtaagcttctcagctgatgcctgtctttgctgatgcttctgggcaaaagtggtcccccaaagccaactgtcttcactgagtttcttaattctcttatatcttgtccttataattcttttctgtcttttcagttctcaatttttcaagcaaaagtcttttttaattattttttttaatactactgtcatttcttgtccgcaggtataagcatgctctgaattgcttaatccaccaactctggaattggacatcagattttttttaaaaagaaacactcaacagacatcagacatccaccatttgcttcttgttcttccctttacccacttcttcaaacttttcatacagatawagctgcaaaattggagtagtcttcctgtgagtttaaaggcgaaagcaacatatgcatagcagatgtgtctgatctgcatcatggctctccttacctaccttgaactacatacttctcaacttatttaaaaagcaaaaacaaaaactaccttaaactaatttaatatgaatgcattctcaagaatatgaatatattctccactaacaaagagaggaactatgcctcagtggtgacactaatggttataaacagatctcatacacacacacacac

SEQ ID NO: 152418 - DNA, 600 bp, Homo sapiens
atggtagtgagttttaagtggcayattgaaggggattttagaatcttttcttttcttgctaactttaaaatgatagcagttgaaaaaatgttatataactaactaggctcctttctgcctcagaaacaagttttattgagatgtctgacataacaggctgatcatttgcctatggttcctagagttatagaggcagaagaagcccacagtgctctctccacaatcacccactgacccatgtgtcttgcaccaaatttcaactgataatttctttttctgtcatgtgtctgtattatgaaaatgtttgtccttcttcatttagattataagcagaaatcagggcagattgcattgatgattctaattctctactgcaatttgagtccttttactgctcactcttaccctttccccacacttgtccaagggcaggagaagatgggtgtttcagctcaaggagggtagtaatttgctttccctttatgtttttgttctatttggccctcagtgggttggatgatgcccacccacattggtccatttttgcactgctgtaaagaaatacctgtaagtggttaatttatgaagaagagagaatta

SEQ ID NO: 152419 - DNA, 507 bp, Homo sapiens
atgggaattctgccctatttttgcaatttttctgtaagtctaaaacagtttcaaaatagggaactcatttaaaaaagagacaaacatgatgtgcagaagacaaaatcaataaataactctggtaacttgtaaatggaacagatgattaaaaaatgaaagagataatattgatgaagtacttataatcaaataagtgtttatgaagttgttgtaggtgaattacttataattactgccttcaaatattttagatgttktatgtaaagggatcatgctcactttagtttccagtggcagaaaaagaacaaattgatcaaagttccatgggagcagatttcaacttagattgaaagaataattttatgattattaagctgtccaaatataactcacctgcctttggagaggattgcagcactaccttttaatgatcttcagacatatgctaaagaaatgtcatagtgaagaacagttgtacaagaataagcccgaaggtgtcttcatctc

SEQ ID NO: 152420 - DNA, 356 bp, Homo sapiens
agaattcagaatatgaataggaattaagatcatcaacatacaggagaaagtcatccattcccatgaagttaaggattacaataaaatgataaaggagctaatagataaaatggacattataagaaagaagaaataatctgatctgatagctgaaaaatactccactagaattgcataatacaatcataagtatttacagtagaattgaccaagctgaggaaagaatctcagagctcgaakacaggctctctgaaataactctgtcagagagaaatagagaaaaaacaataaagaagaatgaacaaaatctctgagaaatgtgggattatgtaaagataaaaaatctacaactcatt

SEQ ID NO: 152421 - DNA, 594 bp, Homo sapiens
ttgtctgatgtttccttactatcaggttaagactatgcatttttggcagtattgacacagatgtggcgctttatccacctcagtgcatcgtattaagaaatatgtgatgttggtctgcactcattactatgacattaactttaatcacttggtttctccaatgtcaaattcctatttctcatttatttaatatgtgttttctagaaagatgctttggaactatgtaaatgtactgttcttgataaacttttacccattagtgttaacatttattgatgatcttttcataaatccatactaccaagatgtttgctaaaaggtgattttctaactccattatttctctkctgtgtattagctggcattctactgtaattaagggtttttccttttttcccatttatttatatcagtgtagtattataaattcttgttttattcaatggtttgaaagccattgctatcattctgatgctcacattgtcccagtagaagccatattgtacttttatacaataaaataccccaaaaaatggtacaatgagtgagccctctttaaatgtcctatccagtcctgactttgaaagaacttac

SEQ ID NO: 152422 - DNA, 566 bp, Homo sapiens
atgtgtgggggattggtaatttcaatacaatattatgtaagctgagatttaatttaatgaaatgtacctgctgttgtatccagaacagtactatatatgagagaagtgtttaaaatatggaccttctcttcaagatatataatctctctaagagaagtgtgcattcatggacaaccattcaaagtaagctgctaagacaacagagagttgcactggaggcgtacataattctaccctttgaaactttcttggtggcattgttaaagatgaaagtctaatgagtagactatgtttggccctatgattgtgttcctcatgttaccatattctcagtgaaractataaagaatgtaaactctaattttctgtttccctatgactccacatttcattagtggaaaaaatagcctatataggaaaacaggaaacattagcaaaaatgcaacttaatattttaaggacatacatagccctaaagggacatgcagcagagcacaaagttgtatgtactggaaagccagcacagtagcattggtttgagaaggcagttagcttaatgatgaaga

SEQ ID NO: 152423 - DNA, 436 bp, Homo sapiens
aaaacagcaccaaaaaggatcttttatagagatttatttttctttgttccttttttgtctctcttcagaccccctttatttgaccaagaccrtcagtggcttggtatcaaaaatgacttcaagaaataaagactgaaaattaaaactccaaaaactgctgaaggtaaaatactagtgtgggaaggaaaagcaatgcagaattctcaggtacataaaagagaagaatttcttttaatttgtgtatctattaaaaagttaagaacttttagttctagctggatcataaaataagtgacatatttttactctggcaaagtaatattttctgaaaagcagaaagtgtaaatgctatttcatgtaatatgaccatttaggctattctgttctatattctggttcttagactcttctgttagtaaacctctttgagaaccca

SEQ ID NO: 152424 - DNA, 597 bp, Homo sapiens
atggttctgctcccaaaaaggttatagtctggcaagggagacaaatatgtaagcaaataagttcaatgttgaagaaacaggacattctggatctagaacaacacaaacaaaagtgcaaagaaggggctgagtatagtgtgtgtgtgtgcacgtgtgtgtgtgcgtgtaaaattgatagcagcttagaggaaggaaagaatgggccatatgaaggcaattgaaagtttaacaaaaaattgaaatagactgtcastgctgtctaatagaattttcagcaataacaggaatgttctatatctgtgctgtccaatgtggtagccactagtgacatgtaactatggagcatttgaaatgcatctagtgtgactgagaaactgtattttcattgtcattttttaaaattaatttaaatttatatagtcacatgtgactaatggcaattataatgcacagtcctagactagatagccaaactagatgtaatggagttttctgggtcatgtgctgaatgacatcattcattctacctgggctacctatgctccagactgatgggtctgggagaaaaggatatgctacggtgaatgactgagtttt

SEQ ID NO: 152425 - DNA, 522 bp, Homo sapiens
ttctataacctatgaatatcgtttcagggtagtaaaggggccattgctaaatattgttttgaaaaggtagcactaattctgagagggttagaaccactattctaaaaacaatgtagtccttgttatcactatattataacctcttaactttatcagatgaatgtccatttctgtgaaaaatacaaattgccacttatcgtagttcactagtgcaatcyttcctgaggtgggacaacatttctgtcttggagagcagaagtaactggccctcatagccacctagacagtctagaaggggcacaaatctccctttactattctggtacaaatgtgggcagattttcttcttactttccaggaacaatttctagatcccactagaacatttaaacgaagtcttactaatagcacagggaaaatcaaagtgagaaaatgaatgtcatgaaactagataaactaacgtatgcaatgttctcatcctcaactaggggttctttgcaggaattccttcctcctacaaca

SEQ ID NO: 152426 - DNA, 522 bp, Homo sapiens
ttctataacctatgaatatcgtttcagggtagtaaaggggccattgctaaatattgttttgaaaaggtagcactaattctgagagggttagaaccactattctaaaaacaatgtagtccttgttatcactatattataacctcttaactttatcagatgaatgtccatttctgtgaaaaatacaaattgccacttatcgtagttcactagtgcaatccttcctgaggtgggacaacatttctgtcktggagagcagaagtaactggccctcatagccacctagacagtctagaaggggcacaaatctccctttactattctggtacaaatgtgggcagattttcttcttactttccaggaacaatttctagatcccactagaacatttaaacgaagtcttactaatagcacagggaaaatcaaagtgagaaaatgaatgtcatgaaactagataaactaacgtatgcaatgttctcatcctcaactaggggttctttgcaggaattccttcctcctacaaca

SEQ ID NO: 152427 - DNA, 533 bp, Homo sapiens
ctaaacatataaagagaatatgcaaattaagggcatgcaaattaaaattatactaacatacaatatttcaccctgataggcagaaagccaaaggtgcaatagttcattctgtgggggagactttggagaaacagtcactattgcttgttgctgttaggattgcaaaatggtataacatgtgtggcagggacactgacaatatctagaaaacagtgaaatgcatttatctttggtgcaarttattttattgtctcttctcatacctcttatccatttttttgcccttccccacactgctctggaccatgagatactactaacccttttggaaggcctcactcatgtttccttgcaactgccttaaaccactacaataaatgagtagtttaacagactgttcaattggtggtgccatggattaagtccactagccattgtgggattctagcctcttgtctttcattaaacctctaaagttctcacatgctgaggcgaaaaagtttcctagagttctgaaatacaggtcttaaatt

SEQ ID NO: 152428 - DNA, 533 bp, Homo sapiens
ctaaacatataaagagaatatgcaaattaagggcatgcaaattaaaattatactaacatacaatatttcaccctgataggcagaaagccaaaggtgcaatagttcattctgtgggggagactttggagaaacagtcactattgcttgttgctgttaggattgcaaaatggtataacatgtgtggcagggacactgacaatatctagaaaacagtgaaatgcatttatctttggtgcaagttattttattgtctcttcycatacctcttatccatttttttgcccttccccacactgctctggaccatgagatactactaacccttttggaaggcctcactcatgtttccttgcaactgccttaaaccactacaataaatgagtagtttaacagactgttcaattggtggtgccatggattaagtccactagccattgtgggattctagcctcttgtctttcattaaacctctaaagttctcacatgctgaggcgaaaaagtttcctagagttctgaaatacaggtcttaaatt

SEQ ID NO: 152429 - DNA, 372 bp, Homo sapiens
tgcccttccccacactgctctggaccatgagatactactaacccttttggaaggcctcactcatgtttccttgcaactgccttaaaccactacaataaatgagtagtttaacagactgttcaattggtggtgccatggattaagtccactagccattgtgggattctagcctctygtctttcattaaacctctaaagttctcacatgctgaggcgaaaaagtttcctagagttctgaaatacaggtcttaaattcctggtctctgtcacagaccaattgcatcagaatctcacgtgggagggatagcaatctgttgttttcagactcactgggttgggtaactactgatcaagatacagcacagtttctcac

SEQ ID NO: 152430 - DNA, 420 bp, Homo sapiens
gcaagttattttattgtctcttctcatacctcttatccatttttttgcccttccccacactgctctggaccatgagatactactaacccttttggaaggcctcactcatgtttccttgcaactgccttaaaccactacaataaatgagtagtttaacagactgttcaattggtggtgccatggattaagtccactagccattgtgggattctagcctcttgtctttcattaaacctctaaagttctcacatgctgaggcgaaaaagtttcctagagttytgaaatacaggtcttaaattcctggtctctgtcacagaccaattgcatcagaatctcacgtgggagggatagcaatctgttgttttcagactcactgggttgggtaactactgatcaagatacagcacagtttctcacatt

SEQ ID NO: 152431 - DNA, 420 bp, Homo sapiens
tgcatttatctttggtgcaagttattttattgtctcttctcatacctcttatccatttttttgcccttccccacactgctctggaccatgagatactactaacccttttggaaggcctcactcatgtttccttgcaactgccttaaaccactacaataaatgagtagtttaacagactgttcaattggtggtgccatggattaagtccactagccattgtgggattctagcctcttgtctttcattaaacctctaaagttctcacatgctgaggcgaaaaagtttcctagagttctgaaatacaggtcttraattcctggtctctgtcacagaccaattgcatcagaatctcacgtgggagggatagcaatctgttgttttcagactcactgggttgggtaactactgatcaagatacag

SEQ ID NO: 152432 - DNA, 420 bp, Homo sapiens
gcaagttattttattgtctcttctcatacctcttatccatttttttgcccttccccacactgctctggaccatgagatactactaacccttttggaaggcctcactcatgtttccttgcaactgccttaaaccactacaataaatgagtagtttaacagactgttcaattggtggtgccatggattaagtccactagccattgtgggattctagcctcttgtctttcattaaacctctaaagttctcacatgctgaggcgaaaaagtttcctagagttctgaaatacaggtcttaaattcctggtctctgtcacagaccaattgcatcagaatctcasgtgggagggatagcaatctgttgttttcagactcactgggttgggtaactactgatcaagatacagcacagtttctcacatt

SEQ ID NO: 152433 - DNA, 571 bp, Homo sapiens
gtatcacatcaaggcccactctcagccactgctcagctgctgcttctaggcaattttctggcagctcagatgcgtccaatttcaaaatctcccccccagtttctctattggctgtacatgcctgagaactggactgtcctttgagtacgctcagactttcctgagtattctgatgacaaaatgggtagagatgtaacaaagtagcagcaattcattttgctagaggctcagggtgctgtctaggttttgtgtgtgtgtgtgtgtgtgtgtgtgtgtgtgtgtgtgtgtgwgagagagagagagagagagagagggagatcttggaatgcctattctatatagttactctgagaactctgaattgggactgacagatgctaatctcagcctgggtcagttgcacgaatgttctgagtaaggagctgtggatgatgatataaggagcatagagacgcagagaaagttgatcagtaaagaggggtgatggagactgtaacgccctataggagagagagcccgagagtggtagctgccttcttgccagcattccaggctccgcgtctagtccttt

SEQ ID NO: 152434 - DNA, 571 bp, Homo sapiens
gtatcacatcaaggcccactctcagccactgctcagctgctgcttctaggcaattttctggcagctcagatgcgtccaatttcaaaatctcccccccagtttctctattggctgtacatgcctgagaactggactgtcctttgagtacgctcagactttcctgagtattctgatgacaaaatgggtagagatgtaacaaagtagcagcaattcattttgctagaggctcagggtgctgtctaggttttgtgtgtgtgtgtgtgtgtgtgtgtgtgtgtgtgtgtgtgtgagagagagagagagagagagagagggagatcttggaatgcctattctatatagttactctgagaactctgaattgggactgacagatgctaatctcagcctgggtcagttgcacgaatgttctgagtaaggagctgtggatgatgatataaggagcatagagacgcagagaaagttgatcagtaaagaggggtgatggagactgtaacgccctataggagagagagcccgagagyggtagctgccttcttgccagcattccaggctccgcgtctagtccttt

SEQ ID NO: 152435 - DNA, 653 bp, Homo sapiens
tttgtataccttttttccctctatatcctcccaaatccaaatacttcttcctgccatttgactttgctcatgcttacttctttgaaatctcccctcttcctccacacttttctaaatcctattcatgtgctcaagtccattttctccaccaagscttctccagttatctcagtccatgttgactttttcgcctgtttgaaaacttctggagttatttttaactgctttacatttgtcaattttgcttctcctactaaactgtaagacccttaaggccaagtaccagagcttacatatcatttgcgtttctctcaacacagaaccaggagtttatcagaggaattgaaaatgttttgttgttgttgacaaactgaattaggggaccagttaagatgactgagcaaggaactctatccaatgagaaaagtggttctctaggaacacagcatggtccagtgtggggaatgcagtggaatggagggaaggagaatttgtgtcagaataagacattttaggcaaatttgtgaataattttgtgaatgctgctgaaagttacctgaactttatttccaaatgcatagatggtcaaggacatagtgcagaaatactattaaaatatcctctgtgtctcaagatgtgaatctggtaatggt

SEQ ID NO: 152436 - DNA, 653 bp, Homo sapiens
tttgtataccttttttccctctatatcctcccaaatccaaatacttcttcctgccatttgactttgctcatgcttacttctttgaaatctcccctcttcctccacacttttctaaatcctattcatgtgctcaagtccattttctccaccaagccttctccagttatctcagtccatgttgactttttygcctgtttgaaaacttctggagttatttttaactgctttacatttgtcaattttgcttctcctactaaactgtaagacccttaaggccaagtaccagagcttacatatcatttgcgtttctctcaacacagaaccaggagtttatcagaggaattgaaaatgttttgttgttgttgacaaactgaattaggggaccagttaagatgactgagcaaggaactctatccaatgagaaaagtggttctctaggaacacagcatggtccagtgtggggaatgcagtggaatggagggaaggagaatttgtgtcagaataagacattttaggcaaatttgtgaataattttgtgaatgctgctgaaagttacctgaactttatttccaaatgcatagatggtcaaggacatagtgcagaaatactattaaaatatcctctgtgtctcaagatgtgaatctggtaatggt

SEQ ID NO: 152437 - DNA, 607 bp, Homo sapiens
aaattgagtatgtaattgtagcttggattttggattacaaagaaacacattgcttttgcaaaagacatttctagaacaattgccaaaatttcaatttggactgtattagatagtattgtatccatattcgattttctgaatttgataattgcaacatggttatataagaaattgtccttgttctcaggagacagacactgaagtagttagggataaaatgttataatatctgtaaccttctttcagttggttgagggaaaaaaagtgacaagaagaataaaaaacaagctcagcgcagtggctcacacttgtaatcgcagccctttggaaggatgagatgagaagatccctkgagcccaggagtttgaggccagcctgcacaacatagtgagaccaactacctacaaagaagattaaaattttaaaaattagaaaaatattagccaggtgtgattacaaacacctgtagtcctagttactcaggaatctgaggtgggaggattgcttaagcccagaaggtcaagggtgcagtgagctatgagtgttcaaatgcactccagcctgggcaacacagtgagacccagtttctaaaaacaaacaaacaaaa

SEQ ID NO: 152438 - DNA, 607 bp, Homo sapiens
aaattgagtatgtaattgtagcttggattttggattacaaagaaacacattgcttttgcaaaagacatttctagaacaattgccaaaatttcaatttggactgtattagatagtattgtatccatattcgattttctgaatttgataattgcaacatggttatataagaaattgtccttgttctcaggagacagacactgaagtagttagggataaaatgttataatatctgtaaccttctttcagttggttgagggaaaaaaagtgacaagaagaataaaaaacaagctcagcgcagtggctcacacttgtaatcgcagccctttggaaggatgagatgagaagatcccttgagcccaggagtttgaggccagcctgcacaacatagtgagaccaactacctacaaagaagattaaaattttaaaaattagaaaaatattagccaggtgtgattacamacacctgtagtcctagttactcaggaatctgaggtgggaggattgcttaagcccagaaggtcaagggtgcagtgagctatgagtgttcaaatgcactccagcctgggcaacacagtgagacccagtttctaaaaacaaacaaacaaaa

SEQ ID NO: 152439 - DNA, 566 bp, Homo sapiens
gaaaatagggcaccagaggaaactttgtgcaaggacacaaagcaaaaaaatggtagcactaggatttgaacccaggtaatatggcccctgaacctacaatcagaggcatcatgtctaccattcattcatcatgaaataaataaatatttattgagtaccttccatgtaccagaatccatgccaggctctaaacatgagatgagtgagcacccatgctggaggcagagtataccctaaaaaaagcatgggaaaaagcagaagagggaggtggttagaatgtgtggaataaaagagatgaaggaatagaattctatctttgcttatcatatgtttactggtcacaaaacttrtaactccccacaggatttggcttctgctttaaccaccagtcttgcttctttcagagtagcctctgagcacggcttccggagactattcgccctactaaaggctgactccatcacttatgacctggagcaattatccattagtctctctgagtttcattgctgaaacagggatgttaactcttacagcctgcctcatcaaactggtagttaagtttg

SEQ ID NO: 152440 - DNA, 596 bp, Homo sapiens
tttgcatttgggggtctaaatctgttcaaggcaagattttcacaatgcattgtgtttttggtctgcagactgtgagacttattcttactataaacactctctccctctttctctgtaataggaytcttgtttaactatctccctcttacccaacttttgaccctctttgactttttcactggagaacaacaggtaaatagggaaaagtctagccccataattatcctttgcagatatttttcactgagtttcacattagtctcacactcttgttgaactgtttggaacatacctggctcattttgacaccaaaaaagttcatgctagctggcatattcggtaactacaattgtatcatgtactattctaaaaataattctgtgtgtttaaagccacctgtatgcaatttagccaggaatttagaaaggaagctttaacaataagtatgaattgatgattatcttggataaccagtacctggcacagtacctgacatagataagcacttggtaaatgtatttgaatgaatgaatattctattacctgtgattctaaatattccttgccaaggcagtcttctcttatactgctaatca

SEQ ID NO: 152441 - DNA, 527 bp, Homo sapiens
  misc_feature (1)...(527): n = A,T,C or G
ngaattctcttctagtcttgttttatagttgttgttttaaagagtctgcccaggtacagtgtctcatacctgtaatcctagtgctttgggagtccaaggygggaggatcgcttgaggccaggagttcaagtacagtctgaacaacatagtgagtccatgtctctacaaaaaaaatataaaatttagctttgtggtgtgtgcctgtaatcctagctactcagaaggctgaggtgggaagattgcttgatcccgggagtttgaggctgcagtgagctatgatcacaccattgcattccagactccagcctcggtgacggagaaaggtctcctaaccgccattttcagaatttccattgtctctcctctgtgctagactctctatttattaaatcctatgtcttattttccttagtattctcccttgtttgggtagagactgtgttccagtgcttatagagatttggcgtgtaaagaaaaaagtttgtattctgtcctcacattggattaatatttttttttgtcagtag

SEQ ID NO: 152442 - DNA, 527 bp, Homo sapiens
  misc_feature (1)...(527): n = A,T,C or G
ngaattctcttctagtcttgttttatagttgttgttttaaagagtctgcccaggtacagtgtctcatacctgtaatcctagtgctttgggagtccaaggtgggaggatcgcttgaggccaggagttcaagtacagtctgaacaacatagtgagtccatgtctctacaaaaaaaatataaaatttagctttgtggtgtgtgcctgtaatcctagctactcagraggctgaggtgggaagattgcttgatcccgggagtttgaggctgcagtgagctatgatcacaccattgcattccagactccagcctcggtgacggagaaaggtctcctaaccgccattttcagaatttccattgtctctcctctgtgctagactctctatttattaaatcctatgtcttattttccttagtattctcccttgtttgggtagagactgtgttccagtgcttatagagatttggcgtgtaaagaaaaaagtttgtattctgtcctcacattggattaatatttttttttgtcagtag

SEQ ID NO: 152443 - DNA, 527 bp, Homo sapiens
  misc_feature (1)...(527): n = A,T,C or G
ngaattctcttctagtcttgttttatagttgttgttttaaagagtctgcccaggtacagtgtctcatacctgtaatcctagtgctttgggagtccaaggtgggaggatcgcttgaggccaggagttcaagtacagtctgaacaacatagtgagtccatgtctctacaaaaaaaatataaaatttagctttgtggtgtgtgcctgtaatcctagctactcagaaggctgaggtgggaagattgcttgatcccrggagtttgaggctgcagtgagctatgatcacaccattgcattccagactccagcctcggtgacggagaaaggtctcctaaccgccattttcagaatttccattgtctctcctctgtgctagactctctatttattaaatcctatgtcttattttccttagtattctcccttgtttgggtagagactgtgttccagtgcttatagagatttggcgtgtaaagaaaaaagtttgtattctgtcctcacattggattaatatttttttttgtcagtag

SEQ ID NO: 152444 - DNA, 380 bp, Homo sapiens
caataatatcttggtgtccaagtggccccawtttaaaaataatagttacttatatgttttgtattcgaatgggtctgctactctcccattctcccacctaccttatcccacaaaagaatagtccatagagaggtattatgtatatgtgggatattttttctcttttaatttttatcttgtcttctaaataaaaggcataaagatttatgtaaaatggtaagtgtaaacagaatataaagtctgctcaactgtaagtatcagaagcttcaggatattatttttctaattttgaagttcagaaatgtagcaacaaaacctcacttgcaagaacagatgatcaagtttcaacagatcatagatcagatcaagtgagaaaaaca

SEQ ID NO: 152445 - DNA, 380 bp, Homo sapiens
caataatatcttggtgtccaagtggccccaatttaaaaataatagttacttatatgttttgtattcgaatgggtctgctactctcccattctcccacctaccttatcccacaaaagaatagtccatagagaggtattatgtatatgtgggatattytttctcttttaatttttatcttgtcttctaaataaaaggcataaagatttatgtaaaatggtaagtgtaaacagaatataaagtctgctcaactgtaagtatcagaagcttcaggatattatttttctaattttgaagttcagaaatgtagcaacaaaacctcacttgcaagaacagatgatcaagtttcaacagatcatagatcagatcaagtgagaaaaaca

SEQ ID NO: 152446 - DNA, 557 bp, Homo sapiens
aaaactcatatccattgacttccaactcaatgccttttctgcccaatctcattgtcttggamagaattaacgtataaatgggaatcttgcctgtgctaaaagatgtttgaagaagactgttcccatgaagcaatattttaagggaacgattttgtttggctcttgaaccaaaggattggcacgttcaatcttggtcaagttgtgataatatagttagatacccatactgtctgtggccattcatttttcttttttggaaggtttttattaagccaaagcagccaactacaatttagaaaaattgaacttaaggataaagtgctttgtgtgatagcatctgagcctactgttttggatagcctattctcaatactttttatttgaactcttcagccaatggctctggagaaaagcgtggcctattaactggtgcagttagtgtgctaggtgccaaatggaatgagccagtttctgctcatcttcagaatggcgtgctttggcagtccccatacaactaattggtaacacttcttcctttcctaacttggtagagaagg

SEQ ID NO: 152447 - DNA, 557 bp, Homo sapiens
aaaactcatatccattgacttccaactcaatgccttttctgcccaatctcattgtcttggacagaattaacgtataaatgggaatcttgcctgtgctaaaagatgtttgaagaagactgttcccatgaagcaatattttaagggaacgattttgtttggctcttgaaccaaaggattggcacgttcaatcttggtcaagttgtgataatatagttagatacccatactgtctgtggccattcatttttcttttttggaaggtttttattaagccaaagcagccaactacaatttagaaaaattgaacttaaggataaagtgctttgtgtgatagcatctgagcctactgttttggatagcctattctcaatactttttatttgaactcttcagccaatggctctggagaaaagcgtggcctattaactggtgcagttagtgtgctagrtgccaaatggaatgagccagtttctgctcatcttcagaatggcgtgctttggcagtccccatacaactaattggtaacacttcttcctttcctaacttggtagagaagg

SEQ ID NO: 152448 - DNA, 462 bp, Homo sapiens
atgggtcaaatacaatgaaatgaaataaataactgctgccgaaaatattaaaaaaaagtgactaaaagcaaaatggycttgacggaaaactttgaaagagatgtatagcaagacctcagcttttgcctgtatcgtcctaccatgtgaagattgattaagcaatgcttcataaacaaagttttatggcagataaaggggactgactctatggtgcacatattggccccaggcaagaaaacatcatctggagagatccattctcctcagatactatgaaatttttagtggtttattctacaaacttcaggtgtgaaaaaaaggggcaatagtgtgttgatatatcaagtacttgagactgcttgctagaggcaatcacagttcttataaaaagagctgtttgcagtttaactgcaaggagagaaatggcagttattttactttagttgtttgtgttaaacacta

SEQ ID NO: 152449 - DNA, 462 bp, Homo sapiens
atgggtcaaatacaatgaaatgaaataaataactgctgccgaaaatattaaaaaaaagtgactaaaagcaaaatggccttgamggaaaactttgaaagagatgtatagcaagacctcagcttttgcctgtatcgtcctaccatgtgaagattgattaagcaatgcttcataaacaaagttttatggcagataaaggggactgactctatggtgcacatattggccccaggcaagaaaacatcatctggagagatccattctcctcagatactatgaaatttttagtggtttattctacaaacttcaggtgtgaaaaaaaggggcaatagtgtgttgatatatcaagtacttgagactgcttgctagaggcaatcacagttcttataaaaagagctgtttgcagtttaactgcaaggagagaaatggcagttattttactttagttgtttgtgttaaacacta

SEQ ID NO: 152450 - DNA, 634 bp, Homo sapiens
gagtgggaacttcttcagccaggaattataatatakagttatattaagcattaattaaaagaacattccgggtaaagaaatatatattcagataagtgaaatgtaacaattcatttgtaaattcaaatacgtgtaataatttagtgtcatgaagaaagcagctttcaaatcaatataaaaagatagattttcactgtattcagaaaatttgtcagatactcaagaagaaaaaaatggatctgtactactcattctttacaacataaaatatttcacataattaaggttaagttactaaaataaaaacaggaaagcactaaaagcaaatatggatagagtcttttagttttagcaattaaagactcccttggcagacacagaaattctaaacaaatatggcaagtctacttttatttgaggggagaataggaacagaggatgttgttgatacttagtggcttgggttttaaggtaacaatcaatcaatcaatgtactgtaactttactaaaagtcacgtactgtttgaaagtaaaatctttaaaacataaatagataagtaaaaagtaagggatggaaaaaaaagatgtctgaggaaaataccaactgaaataaagctagtgacttcctttgatg

SEQ ID NO: 152451 - DNA, 634 bp, Homo sapiens
gagtgggaacttcttcagccaggaattataatatatagttatattaagcattaattaaaagaacattccgggtaaagaaatatatattcagataagtgaaatgtaacaattcatttgtaaattcaaatacgtgtaataatttagtgtcatgaagaaagcagctttcaaatcmatataaaaagatagattttcactgtattcagaaaatttgtcagatactcaagaagaaaaaaatggatctgtactactcattctttacaacataaaatatttcacataattaaggttaagttactaaaataaaaacaggaaagcactaaaagcaaatatggatagagtcttttagttttagcaattaaagactcccttggcagacacagaaattctaaacaaatatggcaagtctacttttatttgaggggagaataggaacagaggatgttgttgatacttagtggcttgggttttaaggtaacaatcaatcaatcaatgtactgtaactttactaaaagtcacgtactgtttgaaagtaaaatctttaaaacataaatagataagtaaaaagtaagggatggaaaaaaaagatgtctgaggaaaataccaactgaaataaagctagtgacttcctttgatg

SEQ ID NO: 152452 - DNA, 352 bp, Homo sapiens
ctttgggtaaatatgtaagtatgatatatgtggcaaattgcttacatagcaaattgattttctgggtcaggcaggaaagactttcacaaaaatcttacaggaagtaagatgatttagatggagtatccagtcaccttctgttgaaccatttcagayctaatttatattttttgttctgtctccctttaaaattgagcttcctcacatttccatacctttcattttaacctactttaatgataaggtttttggtttgttgggttttgtttctgactgttttcatttattgtcttggtattcatttatgcttacttagcaaggtatatttcagacagaaacagctcactggttt

SEQ ID NO: 152453 - DNA, 352 bp, Homo sapiens
ctttgggtaaatatgtaagtatgatatatgtggcaaattgcttacatagcaaattgattttctgggtcaggcaggaaagactttcacaaaaatcttacaggaagtaagatgatttagatggagtatccagtcaccttctgttgaaccatttcagacctaatttatattttttgttctgtctccctttaaaattgagcttcctcacatttccatacctttcattttaacctactttaatgataaggtttttggtttgttgggttttgtttctgactgtttkcatttattgtcttggtattcatttatgcttacttagcaaggtatatttcagacagaaacagctcactggttt

SEQ ID NO: 152454 - DNA, 607 bp, Homo sapiens
tcaatagcaagcatacttttgctaacataagaaaaaaaaacaaaaagtaaaaaataaaaatacacaaaacatagtctgtaaatgccatctagtagttttgactgagtacaaatatacatattcctccaagtttcctaactgttcagcaggatgttagggactacctgagtcagaattccaggggttcaggtagagaggtgttttcagtctatgggagggtgctgcaattttctttgtgaacacctgcaagactctgcatggtccagtcctgcttgcctcrcatcttcattgcttcgcccttcccttccctcttggggctccagccattctgcacatctgttttctctatgactgcaccatacccttttccgtgtcctaaatcttgtgccatctcctccctttgtctgaaatatttccctccctatctttgcctaactactggcttttcaagtctcagttcaatgccacttcctttggaggtctttgctggcctctctaataagatttagactaaaagctctctgaagtccctggtgcttaacatggtgttgtaaaaccttatgattatttagaatccagatatgcattccttaggccttgatgttta

SEQ ID NO: 152455 - DNA, 607 bp, Homo sapiens
tcaatagcaagcatacttttgctaacataagaaaaaaaaacaaaaagtaaaaaataaaaatacacaaaacatagtctgtaaatgccatctagtagttttgactgagtacaaatatacatattcctccaagtttcctaactgttcagcaggatgttagggactacctgagtcagaattccaggggttcaggtagagaggtgttttcagtctatgggagggtgctgcaattttctttgtgaacacctgcaagactctgcatggtccagtcctgcttgcctcacatcttcattgcttcgcccttcccttccctyttggggctccagccattctgcacatctgttttctctatgactgcaccatacccttttccgtgtcctaaatcttgtgccatctcctccctttgtctgaaatatttccctccctatctttgcctaactactggcttttcaagtctcagttcaatgccacttcctttggaggtctttgctggcctctctaataagatttagactaaaagctctctgaagtccctggtgcttaacatggtgttgtaaaaccttatgattatttagaatccagatatgcattccttaggccttgatgttta

SEQ ID NO: 152456 - DNA, 461 bp, Homo sapiens
ttaatgattaagtggcaaattagtgcaaaataaaatataaaggtatgttttgtcatattagtgaggcctcaaactcctactttaaatttatgtttttcagttttcaggcactgaaatggcatttgctatggtacttagtacaaagtaaatctgtgtgacctgaattgaattctgtaatttaggtttgagaagggtggaatgaattggtatactttctagaaaatgaaatattcaatatttgcgtttggatcatctcacagcttatacttgtataacatcggatatgttccagaacatttcacctctcttgtctcttatccccatgtgttgggggagagagcrtggacttctgccacagttcccattgtaccatggaggtggggtgacttgggggcccaagacatgttaggataacgactggaaatagccagcctcctagctctctgctgcatgctttatct

SEQ ID NO: 152457 - DNA, 394 bp, Homo sapiens
gtgagagctcattcactatcacaagaacagcaaggagaaaatccacccccatgctccsatcaccttccacctggtccctccaccatcatggggaattacaatttgacatgagatttgggtgggagacatagagccaaagcatattaccttcttttatgacttgatttttataagtttttaacccctcattttcttttatgactagactccctatgtgactaatctgagctacttttgtgctgtgatgccaggaggtgaatttctcaaaagaagctggcatctctgattcaaagagcaacacaagtgaggaggattcccaaaggtctaattacatagcatagcattttaactaatgggggcaactgttcatttgctatggccagattgcaatctt

SEQ ID NO: 152458 - DNA, 394 bp, Homo sapiens
gtgagagctcattcactatcacaagaacagcaaggagaaaatccacccccatgctccgatcaccttccacctggtccctccaccatcatggggaattacaatttgacatgagatttgggtgggagacatagagccaaagcatattaccttcttttatgacttgatttttataagtttttaayccctcattttcttttatgactagactccctatgtgactaatctgagctacttttgtgctgtgatgccaggaggtgaatttctcaaaagaagctggcatctctgattcaaagagcaacacaagtgaggaggattcccaaaggtctaattacatagcatagcattttaactaatgggggcaactgttcatttgctatggccagattgcaatctt

SEQ ID NO: 152459 - DNA, 494 bp, Homo sapiens
aaccccaaacttccgcttaatgttaccttatcaaccaaattgttctaccacgakacacttaatttcctatttttcctttaagaaaggtgaaaaaaaaacaaagtcgatatattgctacatacatgagctttgctttaaattaaaacccacttccttcccagagccatgagagatgaaatctgagtttatgttcccccaacaaattggaggacacatttatttcagaattcaacagaagatagggaaagactaataggaagaaaaaaaagaaagactattataaataattttacagcagaacaagagatttatgtctttttcgattgtacacaaggttgtttcataatctcttgtgaaagattaaaaactgctgagcatactaagacacttctctgtatttataacccattctgaaattgtgatttagaaccctgggccctaattagttaagtgatattgacagcagatgtgatacttattgaaaaatgtaacct

SEQ ID NO: 152460 - DNA, 494 bp, Homo sapiens
aaccccaaacttccgcttaatgttaccttatcaaccaaattgttctaccacgatacacttaatttcctatttttcctttaagaaaggtgaaaaaaaaacaaagtcgatatattgctacatacatgagctttgctttaaattaaaacccacttccttcccagagccatgagagatgaaatctgagtttatgttcccccaacaaattggaggacacatttatttcagaattcaacagaagatagggaaagactaataggaagaaaaaaaagaaagactattataaataattttacagcagaacaagagatttatgtctttttygattgtacacaaggttgtttcataatctcttgtgaaagattaaaaactgctgagcatactaagacacttctctgtatttataacccattctgaaattgtgatttagaaccctgggccctaattagttaagtgatattgacagcagatgtgatacttattgaaaaatgtaacct

SEQ ID NO: 152461 - DNA, 373 bp, Homo sapiens
tcatttccaaagccacttatctcacctactttgcccacctctgttccacacaccccatcccaccccaattcaaagaaagcttcaccattccctatttattcatacacctggtttcttctttggcttagtgtttccctgctgcaccttccttacctcgtttaactacactggaccactgtttacactatatttttaattgcctgtttcatttgtcagtcrcctcaccttaacagtttcaaacacagggactaactcctcctgctcaccatggtgttcattgcacctcgcatagtaactgacatacagtgggcatttataaacactcactgtgtgactgaatgaataagtaaattaactaattagctaattaata

SEQ ID NO: 152462 - DNA, 591 bp, Homo sapiens
acatgtggaatgggtgaaaatatacgcaaactatatgcccaacaaaagactaatagaataaacaagaaactcaaacaatttaacagcaaaaacctaataatccgattttaaaaatcagcaaaagctctgaatagacatttcacaaaagaagaaatacaaatgaccaacaagtgtatgaaaaaatattcaatatcactaataataaggaaaatacaaataaaaactgcaatgagatattatctcaccccagttagaatgactattattagaaagacagaaataacaaatgctggcaaggatgtggagaaaagggaactcatacactgtggtacaaatgtaaatatgtacagccacatggaaaacagtatggaggcttctcaaaagactaaaaatagaagtacctaagatctatcaatcccactactggatatttgtccaaaggaaagggaatcagtatatttaagagatacctgcmcacccatatttatcacagcactattcctgttagccaagatatggaatcaattcaaatgaccatcaacaaatggatgaataaaaaaagtggttgaaatactatttagacataaaaaa

SEQ ID NO: 152463 - DNA, 479 bp, Homo sapiens
tagaatgcttttagctattagtgagggaattttttaaaatttagttttattatttaatgtaaaaaaaaagtctgaaggtagagagttccaaaattaagcgattcagtagctcagggacttttccttaattctcttgatttttgtctcagagtcacaagatggttgccacagcacctcatcatcatgaaaacacccaaaggcccagggagtaaggaggagatgttctgcctctctcttgctggaggcacaagaagaaatttaattagaagcctctatatttttctttgttaaatacattatttatcaggcagttttaggtttacaagaaaatgaagagaaaggtacagagatttccaatatactccctgaccctacacatgkgtagcctcccccattatcaatatccctcaccagagtggtacatttcttacaactgacgaacctacattgacacttcattatcacccaaagttcatagt

SEQ ID NO: 152464 - DNA, 291 bp, Homo sapiens
tttatggagccttgcggtttcgggagtccctttttggctgaagcagttcccactacatggctagagggactgaatccagaacacgttcaagttctgcagacacaaacccagggatgtcagtcttctgtgccgtggcctgcaggccttgctgcagtgtgttccaccaacctcttcctttcccttcctgctgttttatgttgtttccatsccttatgtgtggacagctggtcttcataatcctcaaccagcggatagttggtctgttactgtcactccacgtgggtgcttcgt

SEQ ID NO: 152465 - DNA, 529 bp, Homo sapiens
ctggttgggagatcctgcccagtgaaaaggaatgggattggagacccatgtaaaaaagcggtctggccacttttttgtagagcagctgtgctgcgcttgtggtctgctccagtccccagtcacctcagattctccaaagccygaaagcaagaagggaaaaggtggtcaaacagtaaaaacggtggcctgccccttcctctagggagctccttcccagggaggattgaaactgctgttggcaagaaaacactggcaggggcgactggaaaccccagtcaggagattctgcccagtgaagagaaatgggatttggggtctgtgtgaataagcagtttgcctgcttctctatagagctgctaggctgtgctgggggacgaatccagtccctagtcaccttcaactccctagagccctaaggcaacaaatggctaaagctgtgaaacagcagagatggtggcctgcccttaaccctgggagttccatctccgggaggtgtaacgctgcttctggtgtctggctggagttcaag

SEQ ID NO: 152466 - DNA, 526 bp, Homo sapiens
tttaggctgagcaacagagtgagaccctatttctaaaaaataaaaataaaaaagaagtagtcgcagctataatactattatttattgtggcttgtgatgactccaacttggaaggctgtgctacttcctctcacagtaagtgtgcaggtttcttctgtggcttcatcaacccaatggagcctgacagatgggaagagggggtcgatttcatgcccagactgccaaagaaattccaaattgtttcagatcaacctatcaaaccctaaaaatgggagtaccrttctcatttcttaatttttaccttatatgacctgtgagatttggatttattttgaagctttgaacaaacagaacaatgtaaatagattcaattaagtaatttttttacattttagtttatctcggaataatgtgtcgctaatgttagaggtacatacccacagagatttatgcagaaattaatgctgaaatgctcaggtgcatttcaaaatgtactcttcccatttgtgagaaaaaggatttataa

SEQ ID NO: 152467 - DNA, 413 bp, Homo sapiens
ataagtgttagagtaaaattgtttttttttttcttttttacgccaaccttcaaagcagctcaragtattttcacattcagccaggaccacaagatgaaaaaaaattctttcctctttgattctaaatacaactaagtagttttttagaaatgaggcagaaggacagatggaagctgaaagtaccctgcatcagggccacacatagaggtttcgatacaatatttgaaaggagagatccacatagccatgcaggggtctactgccacgtactagctgctggatgcaattacattaggaacttcacgattcaaagagcaaagcatttgctaaattaattgcatgtgtggccggaatattaatgactactatcatactcagcctgtaataatacccaagtgagtcatttcacaaaa

SEQ ID NO: 152468 - DNA, 413 bp, Homo sapiens
ataagtgttagagtaaaattgtttttttttttcttttttacgccaaccttcaaagcagctcagagtattttcacattcagccaggaccacaagatgaaaaaaaattctttcctctttgattctaaatacaactaagtagttttttagaaatgaggcagaaggacagatggaagctgaaagtaccctgcatcagggccacacatagaggtttcgatacaatatttgaaaggagagatccacatagccatgcaggggtctactgccacgtactagctgctggatgcaattacattaggaacttcacgattcaaagagcaaagcatttgctaaatkaattgcatgtgtggccggaatattaatgactactatcatactcagcctgtaataatacccaagtgagtcatttcacaaaa

SEQ ID NO: 152469 - DNA, 527 bp, Homo sapiens
atgcataaatgccataataactctgtcaatggctctggactcacacacctcagggaactgcaattaaactctgctgagtcacagatgccctgcctggagagtcgtgtgccttctcagcatccctgtaacctcctctgtccccaggttcacagctcccctactcagaggctctcggctcctccctctgcggctgcaggctgctctctctgtccctgcccgctggccwagtgggtggtgacacagcacggtgcattcctgcaggcaggctcaggcccctgtgtagttggcttgacccaggcaagctcctgcacttgtcgctgaagagcaagggctcaggtgggcgttccggtgcgggaaccttgcaggaaggcaatcagtcggtttgtattcaagctgaaaagccccctctgaagcctgcgatccagacacaaagcgggatgaatgtgcttcgctgcagagcgtacagctgggttattgactgggactgagagaggcgttgaaatgaaatagggagactgaagagatct

SEQ ID NO: 152470 - DNA, 643 bp, Homo sapiens
ccctgcctggagagtcgtgtgccttctcagcatccctgtaacctcctctgtccccaggttcacagctcccctactcagaggctctcggctcctccctctgcggctgcaggctgctctctctgtccctgcccgctggcctagtgggtggtgacacagcacggtgcattcctgcaggcaggctcaggcccctgtgtagttggcttgacccaggcaagctcctgcacttgtcgctgaagagcaagggctcaggtgggcgttccggtgcgggaaccttgcaggaaggcaatcagtcggtttgtattcaagctgaaaagccccctctgaagcctgcgatccagacacaaagcgggatgaatgtgcttcgctgcagagcgtacagctgggttattgactgggactgagagaggcgttgaaatgaaatagggagactgaagagatctgctcttttgattcggtctcttccaggattttgcaagctccagatagctttggtccaaagtgaaaaatctccctragatcctatctaaaatttgggggaatcagctgcgtaaatcatttttcttttgataaaaagcgtgctgttttctccccctcccatgttctgatgtggctggctcacctgtagctgagctgtttgaatgag

SEQ ID NO: 152471 - DNA, 466 bp, Homo sapiens
taaactctgagaaatctgaataacaaaatgaaataacaaaattataaaaaggaggaaataaaacagcccattatccccacttcacagttataaacattatacacattttrtgcatagatccatccattcatcaatccactcacctattttactatggaattttgtgtcacatgttatagtaaatctctcatttataactggccacccgacctgaagagtcactttcttctctgcttaccatctaaacatgtcccttttttgctgccagtgctggtaagtccattctccttgtcttcattcacatccctcccttcctcagctactcctattcattgaacctgcaagtatttatagagcacacattgctggtatgaaccagacagactctcttgcctccagagtaccagatcatcacccctattgatgatctgaactcctaagattgaaaacacagaaggttcctaca

SEQ ID NO: 152472 - DNA, 480 bp, Homo sapiens
tacatctttttaaacataaatgagtgcccaaaacacccaacggaacagggatggcaaagatgtcctgtagattgagaatggggggggggaataatcatctgtgttttctgaaatagaaatcttaagggggacagctgcctacatgtagagaattaccagggagtgggttctagactcatgaacattttttytggagcccagtcattcagggattcttcactcttcacttcttaggacatgttattgtcttaattgcaagctccacaaacctctgatcaacactgcccctcctaagagacgagcacacgtgcaatccctttggaaaagcttaatcagccctaattgagtcacaataccaactcaaattaattagactttcagaaagttgtcaacatccttcaagataacctgggctgactgctccatagccttcacaggggagtacatgttcaaattctaaaagcttgaaattctaccagt

SEQ ID NO: 152473 - DNA, 444 bp, Homo sapiens
gaagggcatgtgtgcatgaacacataggggcacacacacacatatacacacacaggcatgcacaacacacctcccaccacytgagccaggcagcaagcggccccgctgaaagctcttctctctgcttgtcacatccagtaaatactgaagcagcctacacccagcgggcagcggctcagctcccgggcacagtctgcacgcccatcctcattggcaggatgcagaaggtgcccctgagctgagctcagcctcactaacctgaagctcctctggctgcagctcagggagaagtccccacagcccacagctgcctccctctgcacccagaggctgtgcggggggcagcaaagaataggtattaactctttccagtcaccagtgagctaaaaatcaagtgtccaggggaccctcttctaatgagccccgctgctggctgaaggttgg

SEQ ID NO: 152474 - DNA, 444 bp, Homo sapiens
gaagggcatgtgtgcatgaacacataggggcacacacacacatatacacacacaggcatgcacaacacacctcccaccacctgagccaggcagcaagcggccccrctgaaagctcttctctctgcttgtcacatccagtaaatactgaagcagcctacacccagcgggcagcggctcagctcccgggcacagtctgcacgcccatcctcattggcaggatgcagaaggtgcccctgagctgagctcagcctcactaacctgaagctcctctggctgcagctcagggagaagtccccacagcccacagctgcctccctctgcacccagaggctgtgcggggggcagcaaagaataggtattaactctttccagtcaccagtgagctaaaaatcaagtgtccaggggaccctcttctaatgagccccgctgctggctgaaggttgg

SEQ ID NO: 152475 - DNA, 471 bp, Homo sapiens
tcttttagcagtcaaatcctcggcgagtgaagggcatgtgtgcatgaacacataggggcacacacacacatatacacacacaggcatgcacaacacacctcccaccacctgagccaggcagcaagcggccccgctgaaagctcttctctctgcttgtcacatccagtaaatactgaagcagcctacacccagcgggcrgcggctcagctcccgggcacagtctgcacgcccatcctcattggcaggatgcagaaggtgcccctgagctgagctcagcctcactaacctgaagctcctctggctgcagctcagggagaagtccccacagcccacagctgcctccctctgcacccagaggctgtgcggggggcagcaaagaataggtattaactctttccagtcaccagtgagctaaaaatcaagtgtccaggggaccctcttctaatgagccccgctgctggctgaaggttg

SEQ ID NO: 152476 - DNA, 491 bp, Homo sapiens
tgttgctagaacggcacataggtyccaggatctggggtcttgggtgtggaggcccatctggagataggacatgggacctcaggccaagtttaggcaggacactatgactagaattgtcggatttagcaaattaaaatacaagatggctggttaaatttgaatttcagataaacaatgaatcattttttagggtaagtatgttctacaagttgaaaggaacatatttatggtaaaaaaaaaaaaggttgtttatctggaattcaaatttaactgggcttcctgtattttatgtggtaatcctgtgacagagtcttgtcaataatctctggagcctaggagaaggggtgcctcatctgtgaggaagggactatggaaaatactgacaattgttatgaagaggaggaaggaaacttgtagttggtctatggctgtgggtgggaaaaatgtgtttcccaggcatttaccatgagtagatgtaggatttgggagat

SEQ ID NO: 152477 - DNA, 528 bp, Homo sapiens
aggtctttgctgtaaccacgagcgccggcggcgcgcgcccccgaccccgcggcgccggctgagcccgcagggacccacacgcccagtgcaggaggctggcgggatccgggctggttctcctggagctcgccccgcagggccggctgcggtgaagagagcgcagggtcccgaggcgacccgaggcgcggggcctcggcgcccaccgggcaggctacactgaagggcaccccgaagacgctgggggcgcggggcccagggccaacggccgcaaccccgccgcgatttgggcacggaraggacgcgggctcggcggtgcgcgaagggcgacgggcgcaggggcgggagacccggggtcgggctggtctaagagtcgggcggcggatcctcctgggccaggggcgcggagccgcgcaggccccacagccgccctggggagatggcggagcccggcccgctctcccgagcgcaggtatctcacctggatcaggcgagggtcacgccaagccggctacacaccacggaaaggag

SEQ ID NO: 152478 - DNA, 464 bp, Homo sapiens
tcaagagactgttgccaaaaccaccctcccttggtttgtatcctgtccaagctctcaagggcccaggacagacagagaatgctgtaatacttccagaagccaagtagaggggcaytctgaacatgggcaggggcggatgtgcttagacacagctgccaaagccactaagccaggccgggggagcaaaggctccgtgccatgaccctgattaggagccaggcacggggctcaagtgttcttctggctgagagaagtcctccttcctgcccacgggaaccctccctcctccctgcctggcagatccacctccaatgtcagtcctcctgggacgccctcccaagttcccctccagcacatgacggtggttatgagtcagctggtgaagacttgatcctgcttctgtggaacaccagatcacttttcaaaattcttttatttccattctgtcccacgttttcaaggtc

SEQ ID NO: 152479 - DNA, 464 bp, Homo sapiens
tcaagagactgttgccaaaaccaccctcccttggtttgtatcctgtccaagctctcaagggcccaggacagacagagaatgctgtaatacttccagaagccaagtagaggggcattctgaacatgggcaggggcggatgtgcttagacacagctgccaaagccactaagccaggccgggggagcaaaggctccgtgccatgaccctgattaggagccaggcayggggctcaagtgttcttctggctgagagaagtcctccttcctgcccacgggaaccctccctcctccctgcctggcagatccacctccaatgtcagtcctcctgggacgccctcccaagttcccctccagcacatgacggtggttatgagtcagctggtgaagacttgatcctgcttctgtggaacaccagatcacttttcaaaattcttttatttccattctgtcccacgttttcaaggtc

SEQ ID NO: 152480 - DNA, 548 bp, Homo sapiens
gagaccctgctctccgagggaggcatctgtgtcatgctgtgagggctgaggacggggccctagtctctggttttctggtcttaacatccttatctgtgtccgccacggaggtgactgagctgctagcgagttgtcctgtcccaggtacttgagttttggaaaagctgactcacgcccatccatctcacagcccttccctggggacagtcgcttccgccttgacacctcactctcagttgaataactcaagcttggtcatcttcagactcgaattcttgagtagacccagacggcttagcccaagtctagttgcagctgcctcggcaagtccccatttgctcaggcagccctgaatgggcctgtttacaggaatggtaaattgggattggaaggaatatagcttccagcttcataggctrgggtgaccacggcttaggaaacagggaaagaaagcaaggcccttttcctgcctttcccgggatctgtctactccacctccacgggggaggccagtggggaagggctgtcacctcttccccatctgcatg

SEQ ID NO: 152481 - DNA, 496 bp, Homo sapiens
ttattaatttaaaataaacccattctttaggttttaagtcttaaaatgtctgggaggcaatatcactacacagagccaaagagcatttattgtattctgtagaaattatctgttttggcttgaaaccactcttaccaggttcaagattcttttctcttcattatatcagagaatagcttccttggtacttagttgatctaaaaatgacacatttatggaggaaagaaatgggtgagtttttcactaaatggggtaatgccctacataaaccccaggatcttttttttatcaaggaattttctgcagaaaatcaaatgattttgagtggatgacatttttttatgaatygaataacagcaacaagaagcagcctgctaagtttgtttcttatctgattcaatggattgtattttcattcctaattgctctttattagctctgacatttctaggtttcgggaaaacaaaaaaaatgcgtatttacttatggtattgtc

SEQ ID NO: 152482 - DNA, 576 bp, Homo sapiens
gaggtacttaattattcttagcctctctgtctctctctgtctctctctctgaaggtaacttctaccagccaaagcttaatgtttactgtttggtcttcttagaagaaaagattctttaaaacagccatgaaacccctcatcaggccagggcaagatctatcctccagcaggagttagagtctcattgcccatcttggagctgagtttgaaggaaaagtccctgctctggggtacctctctcatctcacttggtcaacacagagttattagattactaagctcatattctctctccaratagaagtaacaaaaggcagaaaaccaacagaatgttatacgttactcattttcaacttagtgtgaataatttggcagaacttgataagggcaaaagcatgattttgctactgatgagaaatatttacgtatgctttcatcacacagctgagcacccaaatgagaggcattgttctgaacaatgccactgcctttctcctgaaagcctgttgtcattaactgaaatcagagaaaggggctgatttcaccaacctgaatcactcacttgatggccaaagt

SEQ ID NO: 152483 - DNA, 576 bp, Homo sapiens
gaggtacttaattattcttagcctctctgtctctctctgtctctctctctgaaggtaacttctaccagccaaagcttaatgtttactgtttggtcttcttagaagaaaagattctttaaaacagccatgaaacccctcatcaggccagggcaagatctatcctccagcaggagttagagtctcattgcccatcttggagctgagtttgaaggaaaagtccctgctctggggtacctctctcatctcacttggtcaacacagagttattagattactaagctcatattctctctccaaatagaagtaacaaaaggcagaaaaccaacagaatgttataygttactcattttcaacttagtgtgaataatttggcagaacttgataagggcaaaagcatgattttgctactgatgagaaatatttacgtatgctttcatcacacagctgagcacccaaatgagaggcattgttctgaacaatgccactgcctttctcctgaaagcctgttgtcattaactgaaatcagagaaaggggctgatttcaccaacctgaatcactcacttgatggccaaagt

SEQ ID NO: 152484 - DNA, 511 bp, Homo sapiens
agtttgtgctctggggccctgagactggattctttctgcctctgatttggcaactgatgcccactcatttgttaaggattagaggaactcttgagtctcttcttttaaaataaaagccaactttgccattttgttctttcacaaagaacaatctctttgctgaatgaaaaaaaaattgtaattcttctagctgttgagccatgatctctgctaaggggtaagargatcacaatattccctttcatgaagtgtgttaatggtgtcctccctctgtaaaggcctgaatgtatagtttctgcctggtttaatgtatcatttttgaacaatatgtacctgagccactaaggaccaatgagtaggggctggcaggtggccctcaacccttcctcttgatacctttaatcctcctccttcagccagagaagctctgctttacttctgtttcatatgttgaatttctgcaaaagaagtcatttgacaaaatgatttggaggtttggaaaagatggaaa

SEQ ID NO: 152485 - DNA, 614 bp, Homo sapiens
tattatataatttctagttagctagcactttgactcttaaaattgtcaagtgccctaagggagaataggtggatcgcaagcattatatcagaaaagccatcttcccaagttggctaccaaaagcatttcagctatccatacgaggatcaacaccagacagttggttagcataatgaatgtcagatatatttctttaatttgtgacatttgtggctaggtaacatgatggatactagaaacaggctcacattgataacattaaagttattcaagacatgtagtttggctaaaatatttttaaagatacttcccacttttgcataaagaaattctaacaaataataaattctataacctgttctttaagaatgttgcttgaagcttaattcctaagtaatactgtgtctagccattaagtaggaagatttcaagtaggttaacactaatgtcagagaacctggaccctaccttctgaaaattgtgtccacctcacaaaaacctttcatggaaggtgatggtttgacaccaaaaggagakctaggacttcactgaactcacagaaaaagattgcattgactattttgttcttccttgctaatgaagctagtcagtca

SEQ ID NO: 152486 - DNA, 614 bp, Homo sapiens
tattatataatttctagttagctagcactttgactcttaaaattgtcaagtgccctaagggagaataggtggatcgcaagcattatatcagaaaagccatcttcccaagttggctaccaaaagcatttcagctatccatacgaggatcaacaccagacagttggttagcataatgaatgtcagatatatttctttaatttgtgacatttgtggctaggtaacatgatggatactagaaacaggctcacattgataacattaaagttattcaagacatgtagtttggctaaaatatttttaaagatacttcccacttttgcataaagaaattctaacaaataataaattctataacctgttctttaagaatgttgcttgaagcttaattcctaagtaatactgtgtctagccattaagtaggaagatttcaagtaggttaacactaatgtcagagaacctggaccctaccttctgaaaattgtgtccacctcacaaaaacctttcatggaaggtgatggtttgacaccaaaaggagatctaggacytcactgaactcacagaaaaagattgcattgactattttgttcttccttgctaatgaagctagtcagtca

SEQ ID NO: 152487 - DNA, 475 bp, Homo sapiens
gcctcctggcactgttctctttaatccttgatgtggattaagaggagttttgacccccgaagtttctcacctacattgggcyttcatcttttatctattaaagtataaggttattcatgtataagactggctgcaaattccttcacaaataaaatatgccctataagttcaaataatagacaccctttttatagaggcataaacaaagaaaaaatattcaaagataagagtctgatgataatagaagtcttgatctgtgatctcgggaaaagttgttgacatcaaggatgccatctttttctggggagaaacattcctggttagttttaccttaaggtttccaatgggtgcacagttccaggagtgtggtgggacccttctcagttgtgagattatgaacccaaagttcaagtctccaaagatttgctgtagtgtggatggcaaggacagtctttctccgatgttttcagaaaat

SEQ ID NO: 152488 - DNA, 623 bp, Homo sapiens
atcaatatattcagtttggattattttatcttttccatgatgagtcatggaatgcagaacctttaataacaaaagctttaaggactcaraaaggacaagcgtggctgtcctggttgttccagagtctgtgcttaacattgaacttatgtcctcttgaatagcagttgtttctccaatttaggtgcatagcactgataactaatgggttatcacaggtaatttgacttagaccatggagttcattcaaattgtatatttaaacaattttaatattggctgattaagcatgataatctcaagcttgattttgaaaggtttgttaaataccaaagtcttaaaaacattggatattacaaaatagaatcttaggaccataagtcattcattaggcaaaatgataactcaaaattttttttaagtaaaaaacattattctgagagacaggagtctcagctttccaaacaagacccaatgaagacagcataaagccaactgactctcttttctttccctgctcccctttttcttttatagtttacttaagaggtaaacaaaaaccttttgttatcttttaatattacataaaaatcctttttaaaaggccaaattttatgtttccatta

SEQ ID NO: 152489 - DNA, 556 bp, Homo sapiens
caatatttgttgttctgcagcctccgctggtgatatccaggcaaacagggtctggaatggacctccagcaaactccaaaagacctgcagctgagggacctgactgttagaaggaaaactaacaaactgaaaggaatagcatcaacatcaacaaaaaggatatccacaccaaaaccccatctgtaggtcaccaacatcaaagaccaaaggtagataaaaccacaaagatggggagaaaccagagcagaaaagctgagmattccaaaaatgcagagcagctcttctcctccaaaggactgctgctccttgccagcaagggaacaaaactggatggagaatgactttgacaagttgacagaagtaggcttcagaaggtcggtaataacaaacttctccgagctaaaggaagatgttcaaacccatcgcaaggaagctgaaaaccttgaaaaaagattagataaaaggctaactagaataaacagtgtagagaagaccttaaatgacctgatagagctaaaaaccatggcatgagaactacgtgacacatgcagaagctt

SEQ ID NO: 152490 - DNA, 556 bp, Homo sapiens
caatatttgttgttctgcagcctccgctggtgatatccaggcaaacagggtctggaatggacctccagcaaactccaaaagacctgcagctgagggacctgactgttagaaggaaaactaacaaactgaaaggaatagcatcaacatcaacaaaaaggatatccacaccaaaaccccatctgtaggtcaccaacatcaaagaccaaaggtagataaaaccacaaagatggggagaaaccagagcagaaaagctgagcattccaaaaatgcagagcagctcttctcctccaaaggactgctgctccttgccagcaagggaacaaaactggatggagaatgactttgacaagttgacagaagtaggcttcagaaggtcggtaataacaaacttctccgagctaaaggaagatgttcaaacccatcgcaaggaagctgaaaaccttgaaaaaagattagataaaaggctaactagaataaacagtgtagagaagaccttaaatgacctgatagagctraaaaccatggcatgagaactacgtgacacatgcagaagctt

SEQ ID NO: 152491 - DNA, 624 bp, Homo sapiens
aaaacaaaaataaaacccgctttcttcttttgtttagctaagactccttctcattttttttaatctattccccattaaatcctatttcttaaccctttcttcaccactcactttaaagatctccacatataccttaaggcagagatgtaggctgaatttcaaactcctaacatcttacttaccaaaactgtggcaagattacacatgtgagttgccttttcctggccttattgttcattgacccacagaagtggtctcctgtgtctgatactcctttgaccatcacycatcaaccaggcaatcacctttgggattcatcagttgcctaatgttgcagaatttgactttaggtccaggatctttgccgtctctggggaagtatactgaaaaaggcattttacatcaggggtctactaaaattgtcagctttctaaacctaaattcatctcttcaggtttgtaattcagttgctctaataaacagcaacacaaaaacaaaagcaagacaaaaaaagaaacaagttccttaccttcttacaaatacacacccttgtgaaatccggtctggtctctgtacaggcagcactatgttggtaagccattatctcttaccattctttcaagc

SEQ ID NO: 152492 - DNA, 500 bp, Homo sapiens
ccttctagataaaggaactgagacttgaagaggttaaataacttattaaagatcgcagaaccagttagtggcataactagaatatgaacttctgttagtgtgactccaaagcccatgacttgagaacatcaagtcaccaaggggacaatcaaaacaaacactgtttacaccatatctttatgtacattcagacctgggtacataagaggatcatgccaaataagggataggtagtggtagagccatggctccagtccccttctttggtcacccttggttatggataagttatggatactaggaagcactttgaatcaatcccagtgtgttttcactctgaggtttctgtggtagattgtgattgtagtggtcttctcctgcttgtgtgtaccctctttatgacaactactaacagcttgcctttctttgtctgagtattgctatgkttaaacaacagtatagggaaagcaatatggtactaattagggcattccaggaat

SEQ ID NO: 152493 - DNA, 497 bp, Homo sapiens
tgttgattctcaccttcaatctgccacctttggtaagtattcaggaatatagatcaagtcatttaaattggcttagctcaggctctgctcatggaccaggctcagccagacagcacattgttttatttggtctgtgttaatgccccacagctagtgagatggttttcatctgtcatctctctgttgacagacacactctccccttgctgggcttcttgctacctgaacctcaaatgttcccccaaagtcttttacaagacttccccagaaagtgatgaatgctgcaaaaagggaaaacccaagtcagtgaggagggsaaattggcaagaatttagagttagaatgagtgactggaaaagagaactctggaagtaaacaggggtgaagcataggcaggtaaaagagaaaaccaaagagatggtgcaaacgtacctagattctgctattccagtgagcaatggagaggcctaatgatgttaacagggaaggagctatgc

SEQ ID NO: 152494 - DNA, 428 bp, Homo sapiens
tattggaacagtttagtccagataatacttgggttacagatgcatgagaagaatcttaaaaaggaatataagtttgcttcagrttaatgggtaccatcagcaaagaatatagatttgtttagagatcaaacagaaaatgtactatggcttgatcagcaatgactttgaatgtgtaccaaagagtttattatataaataatttattctagagacattagaaaaaattaaatagctttcaggaaaaggaaaacataatttgacctatttattggaaagagaaaaggtattaccagcgaaaacaccagatttagagacaagaggttagaaataaggataactgttaagtgtccactccagaaacctatagcaaaatgactaggttcaagtagaaaattgtcaagaaaataaagagtggattcagcagtatt

SEQ ID NO: 152495 - DNA, 496 bp, Homo sapiens
ttattaatttaaaataaacccattctttaggttttaagtcttaaaatgtctgggaggcaatatcactacacagagccaaagagcatttattgtattctgtagaaattatctgttttggcttgaraccactcttaccaggttcaagattcttttctcttcattatatcagagaatagcttccttggtacttagttgatctaaaaatgacacatttatggaggaaagaaatgggtgagtttttcactaaatggggtaatgccctacataaaccccaggatcttttttttatcaaggaattttctgcagaaaatcaaatgattttgagtggatgacatttttttatgaattgaataacagcaacaagaagcagcctgctaagtttgtttcttatctgattcaatggattgtattttcattcctaattgctctttattagctctgacatttctaggtttcgggaaaacaaaaaaaatgcgtatttacttatggtattgtc

SEQ ID NO: 152496 - DNA, 569 bp, Homo sapiens
gctcaggtgctatgccgtgtgaacacccatgggccactgcattcagggttggggactggtaccttcaggtgtctagtgttgagaaaagagtattggctgaggccttgggaaaccagagttcaattcccagctctgccctttctagctgtgtgagagtgggcaagttccttaacctctctgagcctcagtttacccacctgtaaaatggaagcaataattcttgcccatcccatgttgatattacacaggtcgaatgaagtgctttatgaattgtaaagctttagagaaatctaagcaattgcttgaagggggaaaggacatcaagaaagaagagccatctatgttggcagacaaggcacaagccccctggtatgatgggatttgggtcctgctttggggtcatcaggacttatcctagctccaggacaaatagtttgcctggaaaacgctgacaaagagccagagctcactgaagggcagctgattaaaaatcaacctggtgaggctctgccaccgttaatgaggtgtgatcctgaaagtgcaagrcctgggtggattctgcaaagagc

SEQ ID NO: 152497 - DNA, 456 bp, Homo sapiens
ctggtgacagtctaaaatggtatagccccttcagaaaattttagaaatttcttataaacttaaatatacatttattatatgacccagcaattgtacccctaggcatttactcaagagaaatgaaaacgtgtctatatgaagacccatctgtaartgttcataacaccttaataaaaaccaaaaacgaaaaccaaccaaaatgtacatgcataaactggtgagtggataaataaattgtggtacatgcatataatggaatcatgctcaaccataaaaaatgactattgatacatgaaaccacatggataagtctcagaataattacgctgaatgagagaagccgggtgtgaaagagtacatacttatgacttcattcatttgaaactctagaaactccagaaataacaaatctgtgttccagtgacaaaaagctgatcagtggttgccttaagctgg

SEQ ID NO: 152498 - DNA, 387 bp, Homo sapiens
tatggattgaggctgtttcagggcttgagctgttctgttaaactgaccttttcagggttcggatccacattaatttctcaatccttggagttcctgtagcatrtgatccctggtataccagccagcaggtaaaggcctaatgtgccttgtttgctgattatcttatgagcatgatctttggctccctaacttgtgagcttgctgaagctagagattaggtctgattctttttagtagctttcacagcattcatcaaagggctatgcatgccagttagagtgtgttgtggatttttcgaataccaggtatagacatataagatttggcaggatttggagcaaacctaaaacattccctgttgctgcttggacaaaatctctactgtta

SEQ ID NO: 152499 - DNA, 593 bp, Homo sapiens
tattagatatctaaagaaatgtattaaatacattggaattaaacatggttcatgcttggactgaatgaggagrggaattagactactttgggggataaaagcaaaaagtaaaacaaaacaagacggggatgtattttcctattgcggtcataacaaatttccacaaaattaatggcttaacacaacacaaatttattacctgacaagtgctggaggtcagaaatgcaaaatcagtttcactgggctaaggtcagctgtcagcagggctgattccttctggagactctgagaaaaaactggcttccttgtctttgcctttccttgtagagactgcctgtatttcttggcagatgaccactttcctcccctctctagccagcagtactgctttgtcacatctctccctctgactctgcctcgggcctccccgttataagaacccttatgatgaccttgggcccgcccagataatccagtatcatctcccatccttcacttaatcacatcagcaaagtctgttttgctgtatgaattaatacattcccaggttcctggacatggagacatttggggggccattattctgcctacca

SEQ ID NO: 152500 - DNA, 552 bp, Homo sapiens
taaagagaatattctttaaaggagtccatggggccaggcatggtgggtcacggcctgcaatcccagcactttgggagactgaggtgggaggattgcttgagttcaggagttaaagaccagcctgggcaacatagggagaccttgtctctacaaaaaattttacaaattagccgggtgtggtggcacatgcctggtctgtagtctcatctacttgagaggctttcgtatttttttcattggagacggggttttgccatgttggccaggctagtctcaaattcctaacccatctacttgcttgagcctgggaggtcgaggctgcagtgagccactgctgcactccagcctgggtgataaagtgagaaagaaaaaaaaaaacaaaaaagaaaagaaaagaagtmtatagtgaaaagacacataccttcaaaagcacaataaaaagatgaaagccagaagacaatggaatgatatcttcaaatttataaaataaaaataattgacaatctaggattctgtagccagtgtaaaaactttcaaagtgtatgcgaaata

SEQ ID NO: 152501 - DNA, 585 bp, Homo sapiens
agcagcagggctgcggggtgatgcagggcgcttgggtgagcagaggacatagcacctgtggagcccaaggtggggaaagacgtcatctttatgggagctcaagtgatgcctatgaaagcacaagatgccttcagggagtgtgaggaggcatctgaaaaatgatccatgaggcaatgacacctccttcacagaaacttcttcaactggtagaaaggccacaggcttctgtccttctgactggcgtggacgcagtcctaccctagtctcccccacctcctgcaaaaatctccaaaggcttctcattacctatcaaatgaaagccatactcctcattatgacattaaaaatcccccacaatgtgactccaaattatttttcaactcttgtctttttatcactcyttccccccaaccccgcaaaaaatttgatcatccccaaagaaaaagattaaaatgtaaaactttatcagagccttatttatagccagagagtgtcctccaggggatctgtccctggcatttgagacaatgctggctgcaatggctcataacctttaggcaacatctgaaagtggtagaaagaacc

SEQ ID NO: 152502 - DNA, 538 bp, Homo sapiens
aaactttatttggcaacatatgaaaaagattatacatcatgacaaagtggcatttatcctaggaatgcaaggttgattcaacatatgaaacaataaatgtaatgcaccatattacaaaggacaaaggacaaactccatatgatcatctcaataaatgcagaaaaagcatttgagaaaatctagcatcttatcttgttaaaaaacaatgaacaaactaggaaagaagagaacttcttcaacctgataaagggtatctatgaaaaacccacagctaaccccatacttaaaggggaaagacttgaaaacatttcctgtaagatgaggaataaaacaagtatgtccrctctcaccacttctagtcaacatagtacctgatgttctaatgagggcaattaggcaagaaaaagaaataaaagcaccccagctggaaaggaataagtaacactatttctatttgtagatgactttatcttgtatatagaaaattctaaggaatccacacaaaaatttaagaattaataaatgaattcaccaaatt

SEQ ID NO: 152503 - DNA, 596 bp, Homo sapiens
atgaatgaatgagataatgcatcaraaatactgtgtccattttaaggcatggtctcagttgtctattcctgcataaacaatctaccccacaattcagtagctcaaaacaaccattttattgtatcttatgattttgtgggtcagtaatttggacaggtctcagctgagcaatttgttttccccatgcagtattgactgggtcacttgctggtattcagtggaaggcagggctgctctggaggtcccaggtaacttcacttatattgtgtgcctgatgcctttgaggactgctggtggcctcaagacctctcctctctatagctccagcaaggtagtcagatttctttcatggcagctcagtatatcaagaggcctactggaaactgcaaggtttcttattgcccaggttcaggagtttatggcctagaactgcattctattggtcaagcaagtcatgaagaccagcttagatccaagagaggggaattagattctacctctgaataagagaagtagcaaaaaatttgtagccatcttgaatctaccacattccttttcctctggccacagacattattaccacaagcaaaataaac

SEQ ID NO: 152504 - DNA, 596 bp, Homo sapiens
atgaatgaatgagataatgcatcaaaaatactgtgtccattttaaggcatggtctcagttgtctattcctgcataaacaatctaccccacaattcagtagctcaaaacaaccattttattgtatcttatgattttgtgggtcagtaatttggacaggtctcagctgagcaatttgttttccccatgcagtattgactgggtcacttgctggtattcagtggaaggcagggctgctctggaggtcccaggtaacttcacttatattgtgtgcctgatgcctttgaggactgctggtggcctcaagacctctcctctctatagctccagcaaggtagtcrgatttctttcatggcagctcagtatatcaagaggcctactggaaactgcaaggtttcttattgcccaggttcaggagtttatggcctagaactgcattctattggtcaagcaagtcatgaagaccagcttagatccaagagaggggaattagattctacctctgaataagagaagtagcaaaaaatttgtagccatcttgaatctaccacattccttttcctctggccacagacattattaccacaagcaaaataaac

SEQ ID NO: 152505 - DNA, 596 bp, Homo sapiens
atgaatgaatgagataatgcatcaaaaatactgtgtccattttaaggcatggtctcagttgtctattcctgcataaacaatctaccccacaattcagtagctcaaaacaaccattttattgtatcttatgattttgtgggtcagtaatttggacaggtctcagctgagcaatttgttttccccatgcagtattgactgggtcacttgctggtattcagtggaaggcagggctgctctggaggtcccaggtaacttcacttatattgtgtgcctgatgcctttgaggactgctggtggcctcaagacctctcctctctatagctccagcaaggtagtcagatttctttcatggcagctcagtatatcaagaggcctactggaaactgcaaggtttcttatwgcccaggttcaggagtttatggcctagaactgcattctattggtcaagcaagtcatgaagaccagcttagatccaagagaggggaattagattctacctctgaataagagaagtagcaaaaaatttgtagccatcttgaatctaccacattccttttcctctggccacagacattattaccacaagcaaaataaac

SEQ ID NO: 152506 - DNA, 596 bp, Homo sapiens
atgaatgaatgagataatgcatcaaaaatactgtgtccattttaaggcatggtctcagttgtctattcctgcataaacaatctaccccacaattcagtagctcaaaacaaccattttattgtatcttatgattttgtgggtcagtaatttggacaggtctcagctgagcaatttgttttccccatgcagtattgactgggtcacttgctggtattcagtggaaggcagggctgctctggaggtcccaggtaacttcacttatattgtgtgcctgatgcctttgaggactgctggtggcctcaagacctctcctctctatagctccagcaaggtagtcagatttctttcatggcagctcagtatatcaagaggcctactggaaactgcaaggtttcttattgcccaggttcaggagtttatggcctagaactgcattctattggtcaagcaagtcatgaagaccagcttagatccaagrgaggggaattagattctacctctgaataagagaagtagcaaaaaatttgtagccatcttgaatctaccacattccttttcctctggccacagacattattaccacaagcaaaataaac

SEQ ID NO: 152507 - DNA, 211 bp, Homo sapiens
tttagttattgttatcactatggatttttaaagcagtctagattgattgacacatgctcctttgacttgtactggaactacttgccccatcctggaaaatgactcggattttagygatggtgtgattgtcatgaatgccttgaaagctatttatgaatttattccagtattgtttctggtcccagaaatgtatttattgaccctaacatca

SEQ ID NO: 152508 - DNA, 419 bp, Homo sapiens
aggcatggacatacatcactgttataccttgacctgacatagccttaactcgaattcacttcagtatgctatcagcacagccatcttttgtagctcatctttcttccagattttccacccttaggatccttaatgctgaaattatacttcttgaccacaggtcaagtcccccacttcctcrttctttctgaatgttgtttactgcgtcatgtattccagttcctcaactctctgtatcttccaggccatctgctgtttattcacctccatactgaacctagacgtcagagtcagctctttgaatcgtgttctcaacgctgctttagaatctctaactgccttaaccatctcccggcttggtaacccttagtcaattttattttaaaatcctagaggattctatgagtgttgttttagta

SEQ ID NO: 152509 - DNA, 581 bp, Homo sapiens
atgctatcagcacagccatcttttgtagctcatctttcttccagattttccacccttaggatccttaatgctgaaattatacttcttgaccacaggtcaagtcccccacttcctcattctttctgaatgttgtttactgcgtcatgtattccagttcctcaactctstgtatcttccaggccatctgctgtttattcacctccatactgaacctagacgtcagagtcagctctttgaatcgtgttctcaacgctgctttagaatctctaactgccttaaccatctcccggcttggtaacccttagtcaattttattttaaaatcctagaggattctatgagtgttgttttagtatgttataaaaccgcactgagaagagagactctagattcattcttgctaatcctcaacaggtctataatgctgctgagaaattctcctcctcctcccacctgcctctttctcctgctcctccttccctgactctttctcttcctctaaaaatatattcctcacaacctttgatttccgtagtgtaaataaaagcaagatgcagaactgttacattcaatattatttcc

SEQ ID NO: 152510 - DNA, 419 bp, Homo sapiens
tcactgttataccttgacctgacatagccttaactcgaattcacttcagtatgctatcagcacagccatcttttgtagctcatctttcttccagattttccacccttaggatccttaatgctgaaattatacttcttgaccacaggtcaagtcccccacttcctcattctttctgaatgttgtttactgcgtcatgtattccagttcctcaactctctgtatcttccaggccatctgctgtttattcacctccatactgaacctagacgtcagagtcagctctttgaatsgtgttctcaacgctgctttagaatctctaactgccttaaccatctcccggcttggtaacccttagtcaattttattttaaaatcctagaggattctatgagtgttgttttagtatgttataaaaccgca

SEQ ID NO: 152511 - DNA, 579 bp, Homo sapiens
ccatcttttgtagctcatctttcttccagattttccacccttaggatccttaatgctgaaattatacttcttgaccacaggtcaagtcccccacttcctcattctttctgaatgttgtttactgcgtcatgtattccagttcctcaactctctgtatcttccaggccatctgctgtttattcacctccatactgaacctagacgtcagagtcagctctttgaatcgtgttctcaacgctgctttagaatctctaactgccttaaccatctcccggcttggtaacccttagtcaattttaytttaaaatcctagaggattctatgagtgttgttttagtatgttataaaaccgcactgagaagagagactctagattcattcttgctaatcctcaacaggtctataatgctgctgagaaattctcctcctcctcccacctgcctctttctcctgctcctccttccctgactctttctcttcctctaaaaatatattcctcacaacctttgatttccgtagtgtaaataaaagcaagatgcagaactgttacattcaatattatttccatttgcagaattc

SEQ ID NO: 152512 - DNA, 594 bp, Homo sapiens
tgctatcagcacagccatcttttgtagctcatctttcttccagattttccacccttaggatccttaatgctgaaattatacttcttgaccacaggtcaagtcccccacttcctcattctttctgaatgttgtttactgcgtcatgtattccagttcctcaactctctgtatcttccaggccatctgctgtttattcacctccatactgaacctagacgtcagagtcagctctttgaatcgtgttctcaacgctgctttagaatctctaactgccttaaccatctcccggcttggtaacccttagtcaattttattttaaaatcctagaggattctatgagtgttgttttagtatgttataaaaccgcactgagaagaragactctagattcattcttgctaatcctcaacaggtctataatgctgctgagaaattctcctcctcctcccacctgcctctttctcctgctcctccttccctgactctttctcttcctctaaaaatatattcctcacaacctttgatttccgtagtgtaaataaaagcaagatgcagaactgttacattcaatattatttccatttgcagaattca

SEQ ID NO: 152513 - DNA, 423 bp, Homo sapiens
aggtctataatgctgctgagaaattctcctcctcctcccacctgcctctttctcctgctcctccttccctgactctttctcttcctctaaaaatatattcctcacaacctttgatttccgtagtgtaaataaaagcaagatgcagaactgttayattcaatattatttccatttgcagaattcacacaggcaaataaactgaagaacaactaaatacatacaaatctttatcaatgttgccttcaggtggtagaattttaaagattatttttatttttctctgtacacttttctcttttccaaaatttctacgaggcatgtacttcttttaaaatcatcaaaaatagacattgtaaagaaaagaaactgaaagattatgtgaatataaaagtaggtggaaaggggaaaaaaatcacctgtttc

SEQ ID NO: 152514 - DNA, 423 bp, Homo sapiens
aggtctataatgctgctgagaaattctcctcctcctcccacctgcctctttctcctgctcctccttccctgactctttctcttcctctaaaaatatattcctcacaacctttgatttccgtagtgtaaataaaagcaagatgcagaactgttacattcaatattatttccatttgcagaattcacacaggcaaataaactgaagaacaactaaatacatamaaatctttatcaatgttgccttcaggtggtagaattttaaagattatttttatttttctctgtacacttttctcttttccaaaatttctacgaggcatgtacttcttttaaaatcatcaaaaatagacattgtaaagaaaagaaactgaaagattatgtgaatataaaagtaggtggaaaggggaaaaaaatcacctgtttc

SEQ ID NO: 152515 - DNA, 434 bp, Homo sapiens
taatcctcaacaggtctataatgctgctgagaaattctcctcctcctcccacctgcctctttctcctgctcctccttccctgactctttctcttcctctaaaaatatattcctcacaacctttgatttccgtagtgtaaataaaagcaagatgcagaactgttacattcaatattatttccatttgcagaattcacacaggcaaataaactgaagaacaactaaatacatacaaatctttatcaatgttgccttcaggtggtagaattttaaarattatttttatttttctctgtacacttttctcttttccaaaatttctacgaggcatgtacttcttttaaaatcatcaaaaatagacattgtaaagaaaagaaactgaaagattatgtgaatataaaagtaggtggaaaggggaaaaaaatcacctgtttc

SEQ ID NO: 152516 - DNA, 423 bp, Homo sapiens
aggtctataatgctgctgagaaattctcctcctcctcccacctgcctctttctcctgctcctccttccctgactctttctcttcctctaaaaatatattcctcacaacctttgatttccgtagtgtaaataaaagcaagatgcagaactgttacattcaatattatttccatttgcagaattcacacaggcaaataaactgaagaacaactaaatacatacaaatctttatcaatgttgccttcaggtggtagaattttaaagattatttttatktttctctgtacacttttctcttttccaaaatttctacgaggcatgtacttcttttaaaatcatcaaaaatagacattgtaaagaaaagaaactgaaagattatgtgaatataaaagtaggtggaaaggggaaaaaaatcacctgtttc

SEQ ID NO: 152517 - DNA, 434 bp, Homo sapiens
taatcctcaacaggtctataatgctgctgagaaattctcctcctcctcccacctgcctctttctcctgctcctccttccctgactctttctcttcctctaaaaatatattcctcacaacctttgatttccgtagtgtaaataaaagcaagatgcagaactgttacattcaatattatttccatttgcagaattcacacaggcaaataaactgaagaacaactaaatacatacaaatctttatcaatgttgccttcaggtggtagaattttaaagattatttttatttttctctgtacacttttctcttttccaaaatttctacraggcatgtacttcttttaaaatcatcaaaaatagacattgtaaagaaaagaaactgaaagattatgtgaatataaaagtaggtggaaaggggaaaaaaatcacctgtttc

SEQ ID NO: 152518 - DNA, 617 bp, Homo sapiens
gggtcttgctcactgtcacccaggctggagtgcagtggtgtgattacagttcactgtaggctcaactcctgggctcaagtgatcctcccacctcagcctccagagtagctggaactagtggtttgcactaccatccctagataatttttaaatttttttttgtagagacaagatctcgctacgttgcacaggctggtttcgaactcctggccttaagtgatcctcctgcctcagcctcctgaagtgttgaaattataggcatgagccactgaacgtggcagcaatattttttttttctaattcagaatccaatccaagatctgaactaggatcatgcattccatttagttattgttatcactatggatttttaaagcagtctagattgattgacacatgctcctttgacttgtactggaactacttgccccatcctggaaaatgactcggattttagtgatggtgtgattgtcatgaatgccttgaaagctatttatgaatttattccagtattgtttctggtcccagaaatgtatttattgaccctaacatcagtcccttcaatttttgagaactgatayctatgttcaaatcaaggagaattattcatgtaattc

SEQ ID NO: 152519 - DNA, 572 bp, Homo sapiens
ggtgctaatgaaggtgttggcttatttggaaatggaatcactagttcctcctatttagattgatgcagattgaaatyctaccagattcctgcctctctaggtaaactgtaaatccacttttgtcttccagtattctctattacatgatttttactctattaattctgaactgcttgcaattcaaagctgtttcatactttcatttatttgtacctgctgttccctctgccttgaaaaccttttctctcctattgtttatttggttaaagtttactcatccttcaagattcagctcaggtgcctttttaaatttatttattttttaattttaggatgccttctcttactctctaatcccagaatatataccaagactctaagctccttgagggcagaaaacacctcttgcccattcttttctagtctctagaatatagcataatgtagtacatagtaagtgctcagtaaatattcatcaactaaactagctgaaaagtattaaaaattagatatcctattggatttgtatctcttctgcctctacctggtattcacaataagttgaatagttt

SEQ ID NO: 152520 - DNA, 572 bp, Homo sapiens
ggtgctaatgaaggtgttggcttatttggaaatggaatcactagttcctcctatttagattgatgcagattgaaatcctaccagattcctgcctctctaggtaaactgtaaatccacttttktcttccagtattctctattacatgatttttactctattaattctgaactgcttgcaattcaaagctgtttcatactttcatttatttgtacctgctgttccctctgccttgaaaaccttttctctcctattgtttatttggttaaagtttactcatccttcaagattcagctcaggtgcctttttaaatttatttattttttaattttaggatgccttctcttactctctaatcccagaatatataccaagactctaagctccttgagggcagaaaacacctcttgcccattcttttctagtctctagaatatagcataatgtagtacatagtaagtgctcagtaaatattcatcaactaaactagctgaaaagtattaaaaattagatatcctattggatttgtatctcttctgcctctacctggtattcacaataagttgaatagttt

SEQ ID NO: 152521 - DNA, 572 bp, Homo sapiens
ggtgctaatgaaggtgttggcttatttggaaatggaatcactagttcctcctatttagattgatgcagattgaaatcctaccagattcctgcctctctaggtaaactgtaaatccacttttgtcttccartattctctattacatgatttttactctattaattctgaactgcttgcaattcaaagctgtttcatactttcatttatttgtacctgctgttccctctgccttgaaaaccttttctctcctattgtttatttggttaaagtttactcatccttcaagattcagctcaggtgcctttttaaatttatttattttttaattttaggatgccttctcttactctctaatcccagaatatataccaagactctaagctccttgagggcagaaaacacctcttgcccattcttttctagtctctagaatatagcataatgtagtacatagtaagtgctcagtaaatattcatcaactaaactagctgaaaagtattaaaaattagatatcctattggatttgtatctcttctgcctctacctggtattcacaataagttgaatagttt

SEQ ID NO: 152522 - DNA, 474 bp, Homo sapiens
aataagaagtagccactaataagggggtggtagtgtgagaatgaagaakgttccatgcataggaaatagcttgaatcaagatcccgatgagagaaagaaccatagtcagtattcctagagaatgggatgtaaggaatgcagagaactgaaaccagagaaaagagagaggagtcatcatacagagtcttgcaagttatgtaaaggcttttaaattttatctgagctcaagggaactgctgaaagcttttagacagagaggtgacatgatcagattttcctcttagaaagatccttttggcttccttatggcctctgcataggaggagtagtctagaggcagagaaaacagttgcagtattccaggcaaaggttggtggagatgccagtataaaaattagagaaatggacaggtgaaagaaatttcagaggcagaattgatagagctaagccattgactggatgtagaaccagtga

SEQ ID NO: 152523 - DNA, 295 bp, Homo sapiens
attccaggcaaaggttggtggagatgccagtataaaaattagagaaatggacaggtgaaagaaatttcagaggcagaattgatagagctaagccattgactggatgtagaaccagtgaggctgaagaaacccaaagaygactgatcaccaattcatctcttcactcacatcctacccactgtcaccttgtcgtaaacttccagactaccttcacctctctcttcaataacgtgagttatttgttcaaagtctgccttttctgttagaacatgagctcactatagcagggacagtg

SEQ ID NO: 152524 - DNA, 552 bp, Homo sapiens
ggttatgccctccactgagaaagagaacaactggaacagacaggcacatgtagtacttttatgaccaytgaagcaacagcaacacaaacaaaaaacagtaaagcgatttctgtttttggaagaaaagtaaagaagattcttcctgttgttaaggaactccagatctactggggagagagtcaaacagataatcccaatatactgtgaaatgggccacaataagagtaggtccgcagtgctgtggaagcattcaggagaagcccttgcccaggcattagggccagataggtttcttttagtaggtaatatctgacttagatccttatgggtgagttgggattagttaagtgagagatgggtgggaattaaagagaagtgaaattctaggctaatgctgctacccatgcaaagtcctggaggcagcatgagcctggtgaattcagaaataggaggctttctgtcatggatggagcaagggagggtcaatcggggttcatgttggctctatcttttcccttatccccctacttctggtcaaggcattattgttgc

SEQ ID NO: 152525 - DNA, 552 bp, Homo sapiens
ggttatgccctccactgagaaagagaacaactggaacagacaggcacatgtagtacttttatgaccactgaagcaacagcaacacaaacaaaaaacagtaaagcgatttctgtttttggaagaaaagtaaagaagattcttcctgttgttaaggaactccagatctactggggagagagtcaaacagataatcccaatatactgtgaaatgggccacaataagagtaggtccgcagtgctgtggaagcattcaggagaagcccttgcccaggcattarggccagataggtttcttttagtaggtaatatctgacttagatccttatgggtgagttgggattagttaagtgagagatgggtgggaattaaagagaagtgaaattctaggctaatgctgctacccatgcaaagtcctggaggcagcatgagcctggtgaattcagaaataggaggctttctgtcatggatggagcaagggagggtcaatcggggttcatgttggctctatcttttcccttatccccctacttctggtcaaggcattattgttgc

SEQ ID NO: 152526 - DNA, 552 bp, Homo sapiens
ggttatgccctccactgagaaagagaacaactggaacagacaggcacatgtagtacttttatgaccactgaagcaacagcaacacaaacaaaaaacagtaaagcgatttctgtttttggaagaaaagtaaagaagattcttcctgttgttaaggaactccagatctactggggagagagtcaaacagataatcccaatatactgtgaaatgggccacaataagagtaggtccgcagtgctgtggaagcattcaggagaagcccttgcccaggcattagggccagataggtttcttttagtaggtaatatctgacttagatccttatgggtgagttgggattagttaagtgagagatgggtgggaattraagagaagtgaaattctaggctaatgctgctacccatgcaaagtcctggaggcagcatgagcctggtgaattcagaaataggaggctttctgtcatggatggagcaagggagggtcaatcggggttcatgttggctctatcttttcccttatccccctacttctggtcaaggcattattgttgc

SEQ ID NO: 152527 - DNA, 586 bp, Homo sapiens
gggttttatttccaactgaaaagagtatttattaccatggatataactagaagaatcatataaatatatgtaattccattagaaaatatttttcttaaaatttgaaatgacaagaacttaatgaatcttaaatatctcttgttttattttgaaaaattgttttcataagatacaattgagcaattgagatttgttctcccagtatctgaagatttttttggtcttgttttgttttttgggtttttggccctaaaattaggtgaattcagctttgggtctatttcatccattctggaaggtccttgggtcactgatctgaggcattcttgatgtggttaggacttcccagcattattttttttagatcctgtttatttaaaatgaaaaggattagcatgagggatggtaacattcctttttgatatctgtagcagcaagttttcttatgattcattattcttcttcttacagctttaaatcatctaggaacttcatataaaatttaattccagtttcaactagttgtggagcatttgatccaaaataaaatgaaagtcctytctgaagttgtagaggagactcaaga

SEQ ID NO: 152528 - DNA, 440 bp, Homo sapiens
tgatctgaggcattcttgatgtggttaggacttcccagcattattttttttagatcctgtttatttaaaatgaaaaggattagcatgagggatggtaacattcctttttgatatctgtagcagcaagttttcttatgattcattattcttcttcttacagctttaaatcatctaggaacttcatataaaatttaattccagtttcaactagttgtggagcatttgatccaaaataaaatgaaagtcctctctgaagttgtagaggagrctcaagaatcagaacaacctgaagttctttaagctgtcagttgaaggactaggtaaaaaacaaatatcatttagtgtgatcattaatgcacatgagtcattattccatgtggttgctgtcgactggtcaggggcacttcaagccctaatctgtactttgtcctgtctctcta

SEQ ID NO: 152529 - DNA, 465 bp, Homo sapiens
aaagcatgaatcaatacaccttgggaggcagggtgtsaaatacttgatgccatttcctttgcttgtaaattgttcatttcatttgaatataaatataaaaggacttctaccaagaacatgaaactaacattttgccaagctaaattttaatgaatttatttggacttttttataatcacttaatattttcagttcatgtgctaatatttacttactggagagaaagaaatggtattcaatatgataactgccttgttactgcagaaatgtagaagtttggcattttaagtatcaaatattttaagtcaaaaaattaccagtgtcccacagcacagagagagaatatatgtttgcttgtgtccttttaatctttcccctgtaaaattaagcctaggggccttacactattttaaattttcaaaattaggtcatgtaaatgttgtgtcagatttccaattcataagt

SEQ ID NO: 152530 - DNA, 465 bp, Homo sapiens
aaagcatgaatcaatacaccttgggaggcagggtgtcaaatayttgatgccatttcctttgcttgtaaattgttcatttcatttgaatataaatataaaaggacttctaccaagaacatgaaactaacattttgccaagctaaattttaatgaatttatttggacttttttataatcacttaatattttcagttcatgtgctaatatttacttactggagagaaagaaatggtattcaatatgataactgccttgttactgcagaaatgtagaagtttggcattttaagtatcaaatattttaagtcaaaaaattaccagtgtcccacagcacagagagagaatatatgtttgcttgtgtccttttaatctttcccctgtaaaattaagcctaggggccttacactattttaaattttcaaaattaggtcatgtaaatgttgtgtcagatttccaattcataagt

SEQ ID NO: 152531 - DNA, 465 bp, Homo sapiens
aaagcatgaatcaatacaccttgggaggcagggtgtcaaatacttgatgccatttcctttgcttgtaaattgttcatttcatttgaatataaatataaaaggacttctaccaagaacatgaaactaacattttgccaagctaaattttaatgaatttatttggacktttttataatcacttaatattttcagttcatgtgctaatatttacttactggagagaaagaaatggtattcaatatgataactgccttgttactgcagaaatgtagaagtttggcattttaagtatcaaatattttaagtcaaaaaattaccagtgtcccacagcacagagagagaatatatgtttgcttgtgtccttttaatctttcccctgtaaaattaagcctaggggccttacactattttaaattttcaaaattaggtcatgtaaatgttgtgtcagatttccaattcataagt

SEQ ID NO: 152532 - DNA, 465 bp, Homo sapiens
aaagcatgaatcaatacaccttgggaggcagggtgtcaaatacttgatgccatttcctttgcttgtaaattgttcatttcatttgaatataaatataaaaggacttctaccaagaacatgaaactaacattttgccaagctaaattttaatgaatttatttggacttttttataatcacttaatattttcagttcatgtgctaatatttacttactggagagaaagaaatggtattcaatatgataactgccttgttactgcagaaatgtagaagtttggcattttaagtatcaaatattttaagtcaaaaaattaccagtgtcccacagcacagagagagaatatatgtttgcttgtgtccytttaatctttcccctgtaaaattaagcctaggggccttacactattttaaattttcaaaattaggtcatgtaaatgttgtgtcagatttccaattcataagt

SEQ ID NO: 152533 - DNA, 530 bp, Homo sapiens
tgagactattcatgtactccagtcctggggagaaggaagaaatacctaatagaagtttaatttcagcttcatcattgaaactttttcttgagttagatgggcgaacactcctttggaggcatgaagaaagagaagtgctttcttcccatctcccctttcttgagtacataaatttccttagatatcttgacaaagagccaagaagacttggtgatamaataagcaaatgcagttaatttggaatctactgatggtataaaagaatttaacaatttacacatgaatatttagtaatggagaatgaataaatgtgataagctatatgatgatttttctacagaaagaaggtgcaagaaggttagactttgatgtaagattattgcttttaaccttgaaaacccttctggatttcagctatcctagttagagagggtaaattgttattgtttttatagttaataatagttatcattttctgaatactgactgcatgccaggcactgtgcgatgtgatttttgtgcataatttc

SEQ ID NO: 152534 - DNA, 530 bp, Homo sapiens
tgagactattcatgtactccagtcctggggagaaggaagaaatacctaatagaagtttaatttcagcttcatcattgaaactttttcttgagttagatgggcgaacactcctttggaggcatgaagaaagagaagtgctttcttcccatctcccctttcttgagtacataaatttccttagatatcttgacaaagagccaagaagacttggtgatacaataagcaaatgcagttaatttggaatctactgatgstataaaagaatttaacaatttacacatgaatatttagtaatggagaatgaataaatgtgataagctatatgatgatttttctacagaaagaaggtgcaagaaggttagactttgatgtaagattattgcttttaaccttgaaaacccttctggatttcagctatcctagttagagagggtaaattgttattgtttttatagttaataatagttatcattttctgaatactgactgcatgccaggcactgtgcgatgtgatttttgtgcataatttc

SEQ ID NO: 152535 - DNA, 515 bp, Homo sapiens
gccagagcagggagcaaggcaaaagagaaaaatatgttcacggtgacttttgaaaacatatggatgaaactcctgaggaggctgaggaactaaaccttttcttttggcagtaggcrcagagtgcagattcatctctctgtgaattactctagctcctgctgtgtgagttctattttagcccagtaatgcaaaaagaaagaaaaactaagttctgacaagcacttacatttcttgaatttttgttgaaggtcccagaggtcattgtaagcagcctgaacaggtagttagggctcctggattctagtctcagcttggctactaatttaccgtgtgacgttaggcaaattactattctgagctttagtcatcttatctttaaaatgaagggtttattctttagaggaagctgagtgaatggcatacgggaacactctgtactatttttataactttgctataagtctaaaattatttttaaataaatggttttcttaaaaagtgaaaggattatgtag

SEQ ID NO: 152536 - DNA, 542 bp, Homo sapiens
taaaaaaaaaaaaatttacagagatgcagtcttgctatgtttcccaggctggtctcaaactcctgggctcaagtgatcctcccaccttggccttgcgaagtgctgggattactgacatgcgccaacatgccaggcctaaacattttgtgtgtgtgtgttaaaatatacatataataaaatttgccattttaactattttaaagyatatagttctatggcattaagtacattcacatagttgttcaaatatcactatccatctccagaactttttcccaaatgaaactgtagccactaactccccattccctcctccccacaacccctggcaaccatagttccactttctgtcttcattatttgactactctaggtacttcatttaagtgaaataataaatatttgtcctttagggactgactttacttagcatgacatctttaaggttcactcatgttacagcacatgtcagagtttcatacctttctaaggctaaataatatccagtgtctatatagcccacattttgtttatccactcat

SEQ ID NO: 152537 - DNA, 542 bp, Homo sapiens
taaaaaaaaaaaaatttacagagatgcagtcttgctatgtttcccaggctggtctcaaactcctgggctcaagtgatcctcccaccttggccttgcgaagtgctgggattactgacatgcgccaacatgccaggcctaaacattttgtgtgtgtgtgttaaaatatacatataataaaatttgccattttaactattttaaagcatatagttctatggcattaagtacatwcacatagttgttcaaatatcactatccatctccagaactttttcccaaatgaaactgtagccactaactccccattccctcctccccacaacccctggcaaccatagttccactttctgtcttcattatttgactactctaggtacttcatttaagtgaaataataaatatttgtcctttagggactgactttacttagcatgacatctttaaggttcactcatgttacagcacatgtcagagtttcatacctttctaaggctaaataatatccagtgtctatatagcccacattttgtttatccactcat

SEQ ID NO: 152538 - DNA, 468 bp, Homo sapiens
tgtcctttcttaatatgcctccaataaccccatacagtatttatcccattctattttagatgccagtttggttgatgatacatttcatctagtcagatcttcccactgyctcttataaagaaaaccaggagccatattatgatattcttgttctctaatttttctgctgccctgatcttaaaccactttcttctccctttgttgacaattaccccaccccttatttcttaattagctcaacaagattagatagaaatgtatctacaaaggatatatgtatataaattaactagataacaaaacttcacactgaagtgaacattctacaagtatttctttcattgctgaccattaggttgcagcatgcaactctcaacaatgagctgcccctctccactcctatagaagctccaaatactatggtaccactatgtaggttttcagcctttcaaaggcttttattatgaa

SEQ ID NO: 152539 - DNA, 512 bp, Homo sapiens
ctacaggggccaatagacaagatctgtggagcacagcaattaactttcacatactggagtcttgtttaaaaggccatcaaaaactcagattactgaaaatcacaaatgtcaccaacaaaaggaatgttgattagagtcaaaaaaaamaaaaaaacaaaaaaacaaaaaaaaaaacaccttcccaaaggactgccttctttgaaggaatttcagaatgttgctagcacaggttgactaagttaaatctcattgatggctccatcagagaatgagaatgccccagccagtgctgtttttaaaatgcactgggagggaaaaaacgaaataacaatctactattccctaatatatatggcttggcacccagagaaagcctctgcccccgaaagagactttctacatagggttaagcttcattaaatgaggtgcaacctttcattttcaggacatctcttttcttgcaaggtctttagaggcagaagttccacttggattctaatacacatctctgt

SEQ ID NO: 152540 - DNA, 512 bp, Homo sapiens
ctacaggggccaatagacaagatctgtggagcacagcaattaactttcacatactggagtcttgtttaaaaggccatcaaaaactcagattactgaaaatcacaaatgtcaccaacaaaaggaatgttgattagagtcaaaaaaaacaaaaaaacaaaaaaacaaaaaaaaaaacaccttcccaaaggactgccttytttgaaggaatttcagaatgttgctagcacaggttgactaagttaaatctcattgatggctccatcagagaatgagaatgccccagccagtgctgtttttaaaatgcactgggagggaaaaaacgaaataacaatctactattccctaatatatatggcttggcacccagagaaagcctctgcccccgaaagagactttctacatagggttaagcttcattaaatgaggtgcaacctttcattttcaggacatctcttttcttgcaaggtctttagaggcagaagttccacttggattctaatacacatctctgt

SEQ ID NO: 152541 - DNA, 404 bp, Homo sapiens
tgtatgacaaaaccttacacactcactcactcaaaatttggtatttaaagagtgtgaaggtaaatgaataactgctcactactcaaaaaaaggttaaagtttgtagttcataataaaagaaaactcacttactaatgaatatatagcatggctgaattcaaaaatacttattaaggaacctatttgtgaccatttctgtgggggatatataaggagtatgtgaaacagatataaaatacataagcactatctttaaagagcttacatgtccacattaaacacttaggtaatattkaaatatcaggtaaatatacatatacttttaacctaattttacctaattacctacacttttaaaattatataaagggctgggtgttgtggctcatgcctgtaatcccagc

SEQ ID NO: 152542 - DNA, 609 bp, Homo sapiens
atttctttcatggccatcaaagtactgaggtaggaaattaaaagttctgagttggccaggcacggtggctcacacctgtaatcccagcactttgggaggccaaggcaggtgaatcatgaggtcaggaaatcgagaccatcctggctaacacagtgaaaccccgtctctactaaaaatataaaaagttagccaggcgtggcggcacacgcctataatcccagctactcaggaggctgagccaggagaatcacttgaacttgggaggcagaggttgcactgagctgagatcacaccaccacactttagcctgggtgacagagcaagactctgtctcaaaaacaaaaacaaaaaaaccaaaacagttctgwctttattcctggatttgccactgtccatggttaaccaaactcttggttgaatatcaaaatctaggctttgattatttcatttgtaagatgtaaaggtataattagacgaccattcaggagaaatgtcctttgaatacctttaaattagaagtatttgctatctaaggctgctatcagaatccttagaggaattaagacccactatagtaagcctttcctgaaaacagaaattttcaaacag

SEQ ID NO: 152543 - DNA, 609 bp, Homo sapiens
atttctttcatggccatcaaagtactgaggtaggaaattaaaagttctgagttggccaggcacggtggctcacacctgtaatcccagcactttgggaggccaaggcaggtgaatcatgaggtcaggaaatcgagaccatcctggctaacacagtgaaaccccgtctctactaaaaatataaaaagttagccaggcgtggcggcacacgcctataatcccagctactcaggaggctgagccaggagaatcacttgaacttgggaggcagaggttgcactgagctgagatcacaccaccacactttagcctgggtgacagagcaagactctgtctcaaaaacaaaaacaaaaaaaccaaaacagttctgactttattcctggatttgccactgtccatggttaaccaaactcttggttgaatatcaaaatctaggctttgattatttcatttgtaagatgtaaaggtataattagacgaccattcaggagaaatgtcctttgaatacctttaaattagaagtatttgctatctaaggctgctatcagaatccttagagraattaagacccactatagtaagcctttcctgaaaacagaaattttcaaacag

SEQ ID NO: 152544 - DNA, 377 bp, Homo sapiens
ttcagaacaaagccttagtcactcaaaaagacaaaaagaagtggaatggaaaaggaagcagaagctaaaacttcagcaagtaaacatcagaaaaaatgtataaatattatatcagtgtaacaaatagcttctccatattgtttgctcccttgatagagagaagtgaggggcaaaaacttaccaaattcaataaaggaatagggtygggacacagtgggcaccttctttccatgctgttcatcaaattctgagtgcaaatcttctaggtaggcaaaagccaacgtcttagggaaggcagcttcacataaaaccaaatcacacaccccctgctcaataatgtagctggtgagacataaaaagcaagacaaagttgtctg

SEQ ID NO: 152545 - DNA, 556 bp, Homo sapiens
tactgacctttagtttgctttcaagatcaaagtcacaaagggcccacagttagccagtccacctaaaaatatttagatatcctcattgwgttttctacttcatctagaaaagattaatgaaatttgtatatgatatgattatgagatatctattagtaatccaataatgcagtggatcagaataactggaaaaactgtgaaacaaatttgaggttatccaacagcaaatgtaggatttggatctatatattacaaaagatagaaggtagtaacttgacacacaaccgcaatacttttcgttgctgtcacctaagactgctgaacaactagttgtatcaataacaacttttgccttcatagctcttatcattttcatagctgagttcagtgggtatcaatacccactgaactcagctggtcaaagaccagcagcaccaagaaccaaccactttcctctaaaagcagttacagtaagtggattaatcaaccctcagtgattgggagcgtgagacaatttaactgtataacatgttatctatctgctttcttggagctt

SEQ ID NO: 152546 - DNA, 590 bp, Homo sapiens
agatctcacaaaacaacctaaccactgttttacatactgacctttagtttgctttcaagatcaaagtcacaaagggcccacagttagccagtccacctaaaaatatttagatatcctcattgtgttttctacttcatctagaaaagattaatgaaatttgtatatgatatrattatgagatatctattagtaatccaataatgcagtggatcagaataactggaaaaactgtgaaacaaatttgaggttatccaacagcaaatgtaggatttggatctatatattacaaaagatagaaggtagtaacttgacacacaaccgcaatacttttcgttgctgtcacctaagactgctgaacaactagttgtatcaataacaacttttgccttcatagctcttatcattttcatagctgagttcagtgggtatcaatacccactgaactcagctggtcaaagaccagcagcaccaagaaccaaccactttcctctaaaagcagttacagtaagtggattaatcaaccctcagtgattgggagcgtgagacaatttaactgtataacatgttatctatctgctttcttggagctt

SEQ ID NO: 152547 - DNA, 557 bp, Homo sapiens
cctaaccactgttttacatactgacctttagtttgctttcaagatcaaagtcacaaagggcccacagttagccagtccacctaaaaatatttagatatcctcattgtgttttctacttcatctagaaaagattaatgaaatttgtatatgatatgattatgagatatctattagtaatccaataatgcagtggatcagaataactggaaaaactgtgaaacaaatttgaggttatccaacagcaaatgtaggatttggatctatatattacaaaagatagaaggtagtaactwgacacacaaccgcaatacttttcgttgctgtcacctaagactgctgaacaactagttgtatcaataacaacttttgccttcatagctcttatcattttcatagctgagttcagtgggtatcaatacccactgaactcagctggtcaaagaccagcagcaccaagaaccaaccactttcctctaaaagcagttacagtaagtggattaatcaaccctcagtgattgggagcgtgagacaatttaactgtataacatgttatctat

SEQ ID NO: 152548 - DNA, 557 bp, Homo sapiens
cctaaccactgttttacatactgacctttagtttgctttcaagatcaaagtcacaaagggcccacagttagccagtccacctaaaaatatttagatatcctcattgtgttttctacttcatctagaaaagattaatgaaatttgtatatgatatgattatgagatatctattagtaatccaataatgcagtggatcagaataactggaaaaactgtgaaacaaatttgaggttatccaacagcaaatgtaggatttggatctatatattacaaaagatagaaggtagtaacttgacacacaaccrcaatacttttcgttgctgtcacctaagactgctgaacaactagttgtatcaataacaacttttgccttcatagctcttatcattttcatagctgagttcagtgggtatcaatacccactgaactcagctggtcaaagaccagcagcaccaagaaccaaccactttcctctaaaagcagttacagtaagtggattaatcaaccctcagtgattgggagcgtgagacaatttaactgtataacatgttatctat

SEQ ID NO: 152549 - DNA, 591 bp, Homo sapiens
tagatctcacaaaacaacctaaccactgttttacatactgacctttagtttgctttcaagatcaaagtcacaaagggcccacagttagccagtccacctaaaaatatttagatatcctcattgtgttttctacttcatctagaaaagattaatgaaatttgtatatgatatgattatgagatatctattagtaatccaataatgcagtggatcagaataactggaaaaactgtgaaacaaatttgaggttatccaacagcaaatgtaggatttggatctatatattacaaaagatagaaggtagtaacttgacacacaaccgcaatacttttcgttgctgtcacctaagactgctgaacaactagttgtatcaataacaacttttgccttcatagctcttatcattttcatagctgagttcagtgggtatcaatacccactgaactcagctggtcaaagaccagcagcaccaagaaccaaccacttkcctctaaaagcagttacagtaagtggattaatcaaccctcagtgattgggagcgtgagacaatttaactgtataacatgttatctatctgctttcttggagctt

SEQ ID NO: 152550 - DNA, 602 bp, Homo sapiens
gcaactttattatctgtatcaccactctcctaaaagtgaaagtaactatatttccaaatcaaacctaaaaaggcatataaccaaatagaataatagttccttactactggatcctactgttaccttagtgtcataccttctgggaagactttcctgatttcctaaaaccaacttagatatattttccatgttcaagcacaaaaccctcttccttctccttagcagttaaactacattttaatagtttgttggttatctgatttttccactagactgtaagctccacaaaggtagagactgtgtactctaactccctgcattaacactatgcctggcacatttgatgtrctcagtaaaaattttttgcattaatatatgaatgaaaagtccaacagaagaaatgtgcaaactattttttcaatatctcatctttttttaaggctcaaggttttacttagactgtatggaaaagtaaaataaaattgatcactttaaacaaattatataaattccattctcagctttgtcttcagaacctcccaagcttgctccagaaacttgtcttacttcagaaatttccactgcgtttctaaaacacaaaa

SEQ ID NO: 152551 - DNA, 606 bp, Homo sapiens
tttcagttattactagtctttgctatcgttcctgggaaaaaagtttaggcaaattcattcagctctacctgccaaagaattaaatctaataygacattaaaggtgacaaagtgggtcataatctaacttgctgttgttgtttgcttgtggtgaattctctagcttccaaagatgtaatttttgttaatcagtccctcttggttcttcccctaatccctagcccatcctcttactccatcactacctgatatgagacctttttctttgttttttattagggagcatgatcctctggttctggaaatctgaagtcaggccccaaactctgtgtgccatttctctacggaggtctacctccaagctctcgggcagataataaccaaaatttcaaagttctaggaggaatttcctttttaaaaaatctgctatttatgcagactgtcacttcttgagaatattacaatgaaagctttgagttgaagttttaggagctcaagacataatcctttcttcctcttttaagttcagatcaaattgggaaatagagaagtcaaacagagaattaataatgctacagtacttttattactgatcaaactaagtgga

SEQ ID NO: 152552 - DNA, 599 bp, Homo sapiens
agatctttcagttattactagtctttgctatcgttcctgggaaaaaagtttaggcaaattcattcagctctacctgccaaagaattaaatctaatacgacattaaaggtgacaaagtgggtcataatctaacttgctgttgttgtttgcttgtggtgaattctctagcttccaaagatgtaatttttgttaatcagtccctcttggttcttcccctaatccctrgcccatcctcttactccatcactacctgatatgagacctttttctttgttttttattagggagcatgatcctctggttctggaaatctgaagtcaggccccaaactctgtgtgccatttctctacggaggtctacctccaagctctcgggcagataataaccaaaatttcaaagttctaggaggaatttcctttttaaaaaatctgctatttatgcagactgtcacttcttgagaatattacaatgaaagctttgagttgaagttttaggagctcaagacataatcctttcttcctcttttaagttcagatcaaattgggaaatagagaagtcaaacagagaattaataatgctacagtacttttattactgatc

SEQ ID NO: 152553 - DNA, 603 bp, Homo sapiens
gctatcgttcctgggaaaaaagtttaggcaaattcattcagctctacctgccaaagaattaaatctaatacgacattaaaggtgacaaagtgggtcataatctaacttgctgttgttgtttgcttgtggtgaattctctagcttccaaagatgtaatttttgttaatcagtccctcttggttcttcccctaatccctagcccatcctcttactccatcactacctgatatgagacctttttctttgttttttattagggagcatgatcctctggttctggaaatctgaagtcaggccccaaactctgtgtgccatttctctacggaggtctacctccaagctctcgggcagataataaccaaaatttcaaagttctaggaggaatttcctttttaaaaaatctgctatttatgcagactgtcacttcttgagaatattacaatgaaagctttgagttgaagttttaggagctcaagacataatcctttcttcctcttttaagttcagatcaaattgggaaatagagaagtcaaacagagaattaataatgctacagtactttwattactgatcaaactaagtggagaacttgcatttagatct

SEQ ID NO: 152554 - DNA, 520 bp, Homo sapiens
accccatgaccaaatgaactttattcaagtcatgcaagactttgttaacagttgaaaactaatgaaatcttcataatagtgggctgaagaaaaaaatcagagtaatcttaccattttacatggactaatttccacatccatttcagaatgatttttttttaaaactagaaatagagggaaacgtctttgacttgatgtagtgcatctacagagcacccacagckaacattatacttaatagtgaacgtcaaatgctgtttttctaagattgggaacaaggcaagggcgtttgcttttgcaacatttcttcaacataatactggaagatcatgccactgtgagaaggggaaaaaaagaaaaaaaatcgtacatacagattgaaagaaataaagcttttttttcgatgacatgattgtctatgtagataatcccaagggagatacacacacacacacacacacacacacacacacacgcgcgcgcgcgcgcgtgcacacacacacacacacaatctcctaga

SEQ ID NO: 152555 - DNA, 494 bp, Homo sapiens
tttgttttaaagatattctataatttatatttcattactcttttattgtaaattggaaggtaaaatatatgtttctgtgtgatgtgggcatgtgtgtgtagaagtccactgtgccttgtcaataaaacatcacgtagtaattttaaatagggttttctttctgatgagctctaaaatcatcaccattatatgcaaaatatgaaagtagtaaataatataaaataaaccattatgcggctgggcacagtggctcacgcctgttatcccagcacttcgggataccaaggcgggcgaatcacttgaggtcaggagttcgagaccagcctgaccaacatggtgaaacccatctctacccaaaatacaaaaattagccaggtgccatcatgggtacctgtaactgctcgagaggctgaagcatgaaaatcacttgaacccwggacacggaggtagccataagccgagatcgtgccaatgcactccagcctgggcaacag

SEQ ID NO: 152556 - DNA, 611 bp, Homo sapiens
gtacaattatatttatgttatatagaaagaagccgcagcagagacttaagcaatttactcaaggacacacaactgttaaatattaaagaagtaaaaccaagaaaagtactaggattaaagtactyataaatgtaaccacagtaattattcaatatttatttgcatcttttagtatattaacattctggcctccttcctgtcctgtttaactatctccttagcactggcccctcatatttttcttcaacgtatgtattttaaaatatgtaattataaactgttgcaggaagtcagggaccccaaacagagggaccggctgaagccatggcagaagaacgtggattgtgaagatttcatggacatttattagttccccaaattaatacttttataatttcttatgcctgtctttactgcaatctctaaacataaattgtgaagatttcgtggacacttatcacttccccagtcaatacccttgtgatttcctaggcctgtctttactttaatcccctaatcctgtcatctcgtaagcctaggaggatgtatgtcacctcaggaccctgtgatgattgcgttaactgcacaaactgtagagcatgtgtgtttga

SEQ ID NO: 152557 - DNA, 566 bp, Homo sapiens
gtttggctcacttttgaggtccaagaatatctagtaatggcatggcaatgcatgataaattggtgtgtcatgactgaagataacattttacatagattaaaaatatattctaaaaattaatatgtcagatatttattttatagtacaatcagatgttctgtctttcaaaatatatttgctgtatctatagtttacattttaaaaatgcacacttgctcttaaatgtaggttttctacttgggagtttagaatggatattacataattgtgttttatacatcaccgaaatattgcatatgaaattccttatagttataacaaatttatgtgttttagttttcattttccctgttatattttcattttttcatcctacagtgaaaaatcaatactttacgaattttttyctcatttttttcagaaattcttaaggaatattggaattataacatattttctcattttatgtatttaaaagtatgtagaacatgtcccatattagagaaaaatgtattatttcagtgaacaaagtgaacaattatgtcagctaagatgttattcacaaa

SEQ ID NO: 152558 - DNA, 597 bp, Homo sapiens
ctagcacttcactcacactatactatttcttttgtcacctccaactacactatccattttagctttattcatattcataaaaattatattcagttccataacagaagccatttagcattatccctatagttaaataytttttattgccatgtaagcaattatcccaaagcttcatggtgtcaacttgcaaacgtttgctacttgtccatttctgtggaccaagattccaaatgttgcttagctgagtgcctctggttcctgatctttcataagctacaggctggaatgcagttgttgacaggattccacacctgatggtaggcagaagccctgagtttctcaccgactcagggcctccccacttacgcatctccttactgcagctcacataatgacagctggcttatttcagagcaagcaagggagaaacaggacacaagaataaagacatggtctttttgcagtctatacttgaaattgtcttctgtcatactcttttcatgaaaaggaaacatctaaatgtagcccacattcaaagggaaggaaatattcaagggtgttaagtaccaggaggcagggaccattaggaggcctctt

SEQ ID NO: 152559 - DNA, 597 bp, Homo sapiens
ctagcacttcactcacactatactatttcttttgtcacctccaactacactatccattttagctttattcatattcataaaaattatattcagttccataacagaagccatttagcattatccctatagttaaatattttttattgccatgtaagcaattatcccaaagcttcatggtgtmaacttgcaaacgtttgctacttgtccatttctgtggaccaagattccaaatgttgcttagctgagtgcctctggttcctgatctttcataagctacaggctggaatgcagttgttgacaggattccacacctgatggtaggcagaagccctgagtttctcaccgactcagggcctccccacttacgcatctccttactgcagctcacataatgacagctggcttatttcagagcaagcaagggagaaacaggacacaagaataaagacatggtctttttgcagtctatacttgaaattgtcttctgtcatactcttttcatgaaaaggaaacatctaaatgtagcccacattcaaagggaaggaaatattcaagggtgttaagtaccaggaggcagggaccattaggaggcctctt

SEQ ID NO: 152560 - DNA, 597 bp, Homo sapiens
ctagcacttcactcacactatactatttcttttgtcacctccaactacactatccattttagctttattcatattcataaaaattatattcagttccataacagaagccatttagcattatccctatagttaaatattttttattgccatgtaagcaattatcccaaagcttcatggtgtcaacttgcaaacgtttgctacttgtccatttctgtggaccaagattccaaatgttgcttagctgagtgcctctggttcctgatctttcataagctacaggctggaatgcagttgttgacaggattccacacctgatggtaggcagaagccctgagtttctcacsgactcagggcctccccacttacgcatctccttactgcagctcacataatgacagctggcttatttcagagcaagcaagggagaaacaggacacaagaataaagacatggtctttttgcagtctatacttgaaattgtcttctgtcatactcttttcatgaaaaggaaacatctaaatgtagcccacattcaaagggaaggaaatattcaagggtgttaagtaccaggaggcagggaccattaggaggcctctt

SEQ ID NO: 152561 - DNA, 477 bp, Homo sapiens
ccagtttacccagcacatttattgaagagactgtcttttccccactgtatattcttggcacctttatcaaaaacgagttcactgwgtggtgtgtggattagtttccaggttctgtattctcttccgttggtctatgtgtctgttgatatgccactaccatgctatttcggttattatagctctgtagtagaattcgaggtcaggtaatgtgattcttctagtttggtcctttttgcttaggatacctttggctgttctgggtcttttgtggtttcatgtaaattttaagattgttttttctatttctgtgaagaatgtcattagtattttgataaggatggcattgaatctgtagattgctttgggtagtagggacattttaacaatattgattctttcaatctataaacatggaataactttttatttttgtgtgtcctcttcaatttatttcattagtcttttatagctttcatt

SEQ ID NO: 152562 - DNA, 457 bp, Homo sapiens
tagtttcatttttctgcatatggataaccagtttacccagcacatttattgaagagactgtcttttccccactgtatattcttggcacctttatcaaaaacgagttcactgtgtggtgtgtggattagtttccaggttctgtattctcttccgttggtctatgtgtctgttgatatgccactaccatgctatttcggttattatagctctgtagtagaattygaggtcaggtaatgtgattcttctagtttggtcctttttgcttaggatacctttggctgttctgggtcttttgtggtttcatgtaaattttaagattgttttttctatttctgtgaagaatgtcattagtattttgataaggatggcattgaatctgtagattgctttgggtagtagggacattttaacaatattgattctttcaatctataaacatggaataactttttatttt

SEQ ID NO: 152563 - DNA, 610 bp, Homo sapiens
gctacaaatattcaaattttttattgggaagaagtgacaagttttactatgtagttcaaaagagcaaaatacattctgggagatagaagagtgtgaataaagataaagtttagggcgctttgctgtggctcacgcatgcagttctagcactttgggaggcagaggcaggcagatttcttgagcttatgacagttcgagaccagcctgggaacacagtgaaatcctgtctctacaaaaaaatacaaaaattagcccagcatggtgatgaacgtctgtggtcccagctactcaagaggctgaggtgggaggatcaccctagcccagaaggcaratgttgcagtgagctgtgatcacgccactgcactccagcctggacagcagagtgagactctgtctcaaaaaaaaaaaaaaaagacaaagaataagacgtggacaagtgaaagaaacactgtcatctatattactcacacatatatgtacacaagtatgcatacactcatacatgtacatgtatacatagaagtatgcatgcatgtatttatgcacacaatccatatatagttcatgtatgcatacaaacatgtatacacatatatatgtgcgtatacag

SEQ ID NO: 152564 - DNA, 583 bp, Homo sapiens
aagcttatgctggtggctggagctgtttgcmctgacaagtgcagcctgctaggctgaggggcagaatgagtccaatgggcctgagtaaaactcaggcaaaggcaccaccccagccacagaggtttccagctggaaaagccacacctcaaagattctgtgacaatatcactggtttaaatttccattaattcatttctcaaatcttccctgagtatctacttgtttcaggcaagtttttagacattgggctttaaggagtatctttcctaaggggggatacacagttgtataaataggtaggtagataaactggcagatattgaaagaggctagaaaaaagtagatgattaaataatgacaagataactaattttaaaagcgcataaagcattattttatttttctagagatgaggtctcactatgttattgcacaggtcgaagtgcaatggctattcccagctatcgccttagtgtactacaacctcaaattcttggactcaagctctcctcctgacaaggcagaatttttaagagcacaccaattaggctgaaatatactctactaaaataaccaggaagta

SEQ ID NO: 152565 - DNA, 583 bp, Homo sapiens
aagcttatgctggtggctggagctgtttgccctgacaagtgcagcctgctaggctgaggggcagaatgagtccaatgggcctgagtaaaactcaggcaaaggcaccaccccagccacagaggtttccagctggaaaagccacacctcaaagattctgtgacaatatcactggtttaaatttccattaattcatttctcaaatcttccctgagtatctacttgtttcaggcaagtttttagacattgggctttaaggagtatctttcctaaggggggatacacagttgtataaataggtaggtagataaactggcagatattgaaagaggctagaaaaaagtagatgattaaataatgacaagataactaattttaaaagcgcataaagcaktattttatttttctagagatgaggtctcactatgttattgcacaggtcgaagtgcaatggctattcccagctatcgccttagtgtactacaacctcaaattcttggactcaagctctcctcctgacaaggcagaatttttaagagcacaccaattaggctgaaatatactctactaaaataaccaggaagta

SEQ ID NO: 152566 - DNA, 583 bp, Homo sapiens
aagcttatgctggtggctggagctgtttgccctgacaagtgcagcctgctaggctgaggggcagaatgagtccaatgggcctgagtaaaactcaggcaaaggcaccaccccagccacagaggtttccagctggaaaagccacacctcaaagattctgtgacaatatcactggtttaaatttccattaattcatttctcaaatcttccctgagtatctacttgtttcaggcaagtttttagacattgggctttaaggagtatctttcctaaggggggatacacagttgtataaataggtaggtagataaactggcagatattgaaagaggctagaaaaaagtagatgattaaataatgacaagataactaattttaaaagcgcataaagcatwattttatttttctagagatgaggtctcactatgttattgcacaggtcgaagtgcaatggctattcccagctatcgccttagtgtactacaacctcaaattcttggactcaagctctcctcctgacaaggcagaatttttaagagcacaccaattaggctgaaatatactctactaaaataaccaggaagta

SEQ ID NO: 152567 - DNA, 583 bp, Homo sapiens
aagcttatgctggtggctggagctgtttgccctgacaagtgcagcctgctaggctgaggggcagaatgagtccaatgggcctgagtaaaactcaggcaaaggcaccaccccagccacagaggtttccagctggaaaagccacacctcaaagattctgtgacaatatcactggtttaaatttccattaattcatttctcaaatcttccctgagtatctacttgtttcaggcaagtttttagacattgggctttaaggagtatctttcctaaggggggatacacagttgtataaataggtaggtagataaactggcagatattgaaagaggctagaaaaaagtagatgattaaataatgacaagataactaattttaaaagcgcataaagcattattttatttttctagagatgaggtctcactatgttattgcacaggtcgaagtgcaatggctattcccagctatcgccttagtgtactacaacctcaaattcttggactcaagctctcctcctgacaaggcagaatttttaagagcacacsaattaggctgaaatatactctactaaaataaccaggaagta

SEQ ID NO: 152568 - DNA, 419 bp, Homo sapiens
ttttaggaaatatataagaacagtataggatgcattacacactataaggtaattacacaaggacatttttgcttaattttatatatacacacacacttaatcacaatgtaraatgtgttattgtagtaaaaataattaagtaaaaaatagtttacattttaatggtacttcttatatgcaacacattgttctaagtggctgtgttaagtcatttaattctcacaacttttcaatgatttttctcattttagtccctgaaacacagcaaagttgagtgatgtacctgactttacagaactattcaaagctaagcagttcgctgcttatgctgctgtcataacctataagctatctatactattctctaaggacactgaaaatactggcatagaggaccacagacatagggcaggaagaaa

SEQ ID NO: 152569 - DNA, 419 bp, Homo sapiens
ttttaggaaatatataagaacagtataggatgcattacacactataaggtaattacacaaggacatttttgcttaattttatatatacacacacacttaatcacaatgtaaaatgtgttattgtagtaaaaataattaagtaaaaaatagtttacattttaatggyacttcttatatgcaacacattgttctaagtggctgtgttaagtcatttaattctcacaacttttcaatgatttttctcattttagtccctgaaacacagcaaagttgagtgatgtacctgactttacagaactattcaaagctaagcagttcgctgcttatgctgctgtcataacctataagctatctatactattctctaaggacactgaaaatactggcatagaggaccacagacatagggcaggaagaaa

SEQ ID NO: 152570 - DNA, 529 bp, Homo sapiens
gaattctcttaagcagtgaaaatcctttgcaagctcaaaaacgactgccttagattccttctgggaatagcaatggtgaccgccccatgctgtggctcactagctaaggctttgtcctttcactatggtgacaagcgttcaattcctagctgagggaatgaatcctttctggtttaatacttgcaggacttttgccattgattatttttcctgtcatagatagcttctgatttcttgtcttcaattttattttctctgagctacctctggggcaactctagatcttgtaaaaactgcttgccatctctttaaagacacctcatgcatccatggttaagtcataaccttagctagagcttactggtttcacgtgggaggttacttgtggtcaaamattcaaaagccagaaataccagctgtttgtcctggctaacgtctgctaatagaatattttcttctgagagttcagtagttaaaaattaactgaattaatgtttatatttgggatatatgtgtacagatattgttt

SEQ ID NO: 152571 - DNA, 600 bp, Homo sapiens
aaatggcagccattgctgaaatcacctgaaggccttataaaacaagatgcccaagctagctcaattacataactggtaattcatgctggctgttgtgtaagagttcagctagggctctttgcctacatatgtcttttccatgtagctttagattcttaccaaatgtttcctagattttatggggaagcattatcagagcaagtattatgagagattaaggtagatgctacaagactttttagcttgaaagtaacatgatgtcacttctgttgcattctattagttaccaaaagcaaacccaaattcaataaaaaagggaactatacaagtgtgtacttgaatacatactaggaggcctggtccataggcaggccatctttgaattctagataccacaatcttccctctagctttaatgagttacaacycgcccacagttaaaatacactaaggtaatccagcgaaacctccccaaatctaacttgggatgatatcaggcataagcttgatattcaggtgcagataaaggtcccaggctatggtttctcaggtgtgtttcctaaagtgtgtaacaaacactagtttagtaaagtatataat

SEQ ID NO: 152572 - DNA, 500 bp, Homo sapiens
agctaacagcggattcacttccttgcacattcctaccctgcatcccagtttcttctttgaaactcaaggaagaggctgagtgaaataataatatttgaaagcatctcaaaaatagctatcatccactaagtaacatgtggcctcgtgaattctaaggtcactagcatggtgcctaacttctcccaaaacatctcaatacctgacattggcaagctcactctctggggtgctgtacctgtggcctctcaaactttgcttctctgtggcatccatagctggatctctacagtaacaatttttatgctgtacaagaactgataaactacagtggcttatccttcggtaaaacacctcttcttagctaaaagaagagcaatttaattctctccaaattaaactatttttctgtaattgtggtmttcttgataaaattagaaggatttgaaaggaatagaaaagggaatttttagtaatttttaaaaaattttaatgcttttctg

SEQ ID NO: 152573 - DNA, 411 bp, Homo sapiens
catagagtttgagtgacttgtcaaagtctcaaagagggtaaaaggaaagtaaggattcaaaacaagctcagtcttcttcaacaggctatgatttgaatgtattrggagaaaacatgctactcctttaactctatgagtaaagctatgcctttattcaatataacatgattttgttttttgagcaaaacaattcctacgcccatgtaagtaatattttcccctgcagaggtggtcttctgcagagaccagtctgtcccacaatttttttttctaaatggcttatgaataatacaataaatatattactaatatttagtgttgttatagttgactttttaagtgaaatataaaattatattagctttactaaattttttaggacatgacccaaaatttagatcctccagagct

SEQ ID NO: 152574 - DNA, 451 bp, Homo sapiens
gtgtaaaggcacagagaaaaatacattggttgcatttcctattctactgcagtttatctctcagttttagtaagaaagagggtttgcagttttaaccttctatggacaaactccagaaaataatgcatacagaaagtgttatattttcatctccttttgccatgcacttgttcctcacaatcattcctgctgaccctttacctgagttaacacttctcatgtatatcctgtttattttttatttttttaaaatcagtctctctctccttctttccctccttcccccttccctccytcccttccttcctgccttccttttttttgtttttttttgtttgtttgtttttttgcttgctttcttctatttactatttttggagggatgattacttcttaaatatttattggatattgtgcttcattaaaatataactaccttgggtactatatt

SEQ ID NO: 152575 - DNA, 544 bp, Homo sapiens
ctggagccccaaagaggttgcagtgagctgtgatcacaccacagcactctagccagggtgacagagtgagaccctgtctcaaagaaacaacaaaaaaagaaagtatgtgaaaactgaattatgatgttaggtatagaagcagtgacactaataatgagcttgtacacaataaaaataagtgatggagatgtgaattatggtagtggcagtagaggtggtaagaatgtgtagagtttattagattcaatcaaaatagaaggaaataaagcaaagtaatggcaaagattaattgaatggggtatcttcaaagcagaaataaattgagggtgatccataggcatatgaaactaaacaggtaatggaaatactcactgagatggagaatactttgggaggaataattttrgtaagaattaagaatgtatacaaagacatggttcagttttggccatttgtgtttgagttttggccatttgtgtttgagatgtctttttacatgcccagtgagcaaaatatataaatctgtggttaaaaggaaaggttt

SEQ ID NO: 152576 - DNA, 568 bp, Homo sapiens
aaagtaaataaaaggctgaaatcctctttcatctcctcagttatcaacagagcacagaaattttaaagttgaagttcttttaagtgtaagctaaaagaattacaaacagcagctcacaatgtcagctttgttcatttttaatactgaaaatctttattaaagtataatctttattttaatgtatatttggccctaatgtcagatttgatacmatgccatcttaaagtttatcattaagtcaagctttttctcacataattactttgaagttaaatagtttcctaactattattaaagttcatgctaaaccttaaacactatctttaataattctaacctaatataaatatattttttctaaaaatcatatttcatatcactcaggaatgataaaatagtataaaaatccataacatgaagcctttcagagtatgtactgcagtaaaagatgtttgaggcaaacacatataaacagactcagatgataaacaccgaaggtcttctgtagccataattctatgaaaatgtcattataaacatgtatagcaagtaatttatttaattgtaa

SEQ ID NO: 152577 - DNA, 568 bp, Homo sapiens
aaagtaaataaaaggctgaaatcctctttcatctcctcagttatcaacagagcacagaaattttaaagttgaagttcttttaagtgtaagctaaaagaattacaaacagcagctcacaatgtcagctttgttcatttttaatactgaaaatctttattaaagtataatctttattttaatgtatatttggccctaatgtcagatttgatacaatgccatcttaaagtttatcattaagtcaagctttttctcacataattactttgaagttaaatagtttcctaactattattaaagttcatgctaaaccttaaacactatctttaataattctaacctaatataaatatrttttttctaaaaatcatatttcatatcactcaggaatgataaaatagtataaaaatccataacatgaagcctttcagagtatgtactgcagtaaaagatgtttgaggcaaacacatataaacagactcagatgataaacaccgaaggtcttctgtagccataattctatgaaaatgtcattataaacatgtatagcaagtaatttatttaattgtaa

SEQ ID NO: 152578 - DNA, 368 bp, Homo sapiens
gaactcagatatgctctggccacagttgaccctatgactttgagctttttactttatcttgattgctacagctgagaaaacgggaatagtaatgctgaactttatggctattacaaaggttaaataaaatatatgtcatctagcatctagttacctgaaatttattaggagattaaactttaaaacaaataaaaggggaaataagaaaagatggaaactctcagctttccatcctcatcyacatctctggaatcttcaggactcctagaatcccaagaaggacttattctgacttatagatcctgaggccatgagactattctcttcaggacaacttagaccagtaaagctatgatgcctaattgcct

SEQ ID NO: 152579 - DNA, 368 bp, Homo sapiens
gaactcagatatgctctggccacagttgaccctatgactttgagctttttactttatcttgattgctacagctgagaaaacgggaatagtaatgctgaactttatggctattacaaaggttaaataaaatatatgtcatctagcatctagttacctgaaatttattaggagattaaactttaaaacaaataaaaggggaaataagaaaagatggaaactctcagctttccatcctcatccacatctctggaatcttcaggactcctagaatcccaagaaggacttattctgacttayagatcctgaggccatgagactattctcttcaggacaacttagaccagtaaagctatgatgcctaattgcct

SEQ ID NO: 152580 - DNA, 574 bp, Homo sapiens
ctgtgcccttgatggagagatgttgcaatcgtttggaggggaagaggcactctggccttttgggctttcagcattttttcattgattctttctcatctttgtgagtttgtctagatttggtctttgaggctgctgacccttaagtggggtttttgtgggggccttttgttgttttgttgatgctgttgtgtcactttctgcttgtttgtttttctttcaatagtcaggtccctcttctatagggctaccacagtttgctgagggttcacttcaggcccrattcatgattcactcccttgcctggatatgtcactcaaggaggctggagagcagcaaagatgggtgcctgctccttcttctgggacctctgacctcgaggggcaccaacatgatgccagtaggattgttcctatatagggtgtctgacaacccctgttggagggtctcactcacttgggtggcatagggggcaggacccatttaatgaagcacttgttccttggtggagagtgtgtttcactgaggggaaacccactcatctgggcagcctggattcctcagaactaccaggacc

SEQ ID NO: 152581 - DNA, 462 bp, Homo sapiens
tgcttcctggctttcccactgctgcataagtgttgagtatctttgggccttctaagtccatgatcacttgttcttgcacattccatactccaaaaagttgtgcctaatatgctttgatttattctatttatttttgtgagttacattttaaaatcaatttacttttattttttagaagttttgtgagggaccagaaataaatatatatggacaaattgtcctctttaaaggacagtttgagtagtaaacatttattccaatataactatatgcatgtatacatattatgtaaatgtataaataaagtgtaaaatgtttatcaaccttcttaaatgaccayttttgaaccccacgtaagagttaattgtgtagccatttgtcatttctttcattaccttttttctgcctttgaaatagtcttagagctcctttgttttgctgaactaggaaatagatagaaat

SEQ ID NO: 152582 - DNA, 611 bp, Homo sapiens
aaatgcaaaaatcattgttatcactcacaggctgcttggaagcagaaagtgggagagattgattgattgtagtttgccagttgttttgttaaggtatggctctttgcttaaaagcatatggagaaaatgcaatgaataatttcttccagtttccagcacagccatacagcaaatataagatatttctattacaaattacagtagcatttctttctgaactattttcaataagattttcatggtaaatttgagatccagtttattcaagttttatggtttcagtattatgacaatgatgtttatcaaaacattttgttcatctgttaaagttttcattggattcaaacaaatcatctaytattattttatttctttcaccttactcaaaaccctaattatatttgactactccctctccctgcatctctcccccaacccccaaagacaattaatttcttaattttgtcagttttccttttcttcaagtcctaaatgtcttcttttctgtccccactcacagcccagttcaggacctcatccatggctatattttgtgaaataaacattttatatactcgatttctgttctgtcaatcacctgtcactataat

SEQ ID NO: 152583 - DNA, 611 bp, Homo sapiens
aaatgcaaaaatcattgttatcactcacaggctgcttggaagcagaaagtgggagagattgattgattgtagtttgccagttgttttgttaaggtatggctctttgcttaaaagcatatggagaaaatgcaatgaataatttcttccagtttccagcacagccatacagcaaatataagatatttctattacaaattacagtagcatttctttctgaactattttcaataagattttcatggtaaatttgagatccagtttattcaagttttatggtttcagtattatgacaatgatgtttatcaaaacattttgttcatctgttaaagttttcattggattcaaacaaatcatctactattattttatttctttcaccttactcaaaaccctaattatatttgactactccctctccctgcatctctcccccaacccccamagacaattaatttcttaattttgtcagttttccttttcttcaagtcctaaatgtcttcttttctgtccccactcacagcccagttcaggacctcatccatggctatattttgtgaaataaacattttatatactcgatttctgttctgtcaatcacctgtcactataat

SEQ ID NO: 152584 - DNA, 510 bp, Homo sapiens
gtttttattcttcttcttacagttgaaaatttctgttacaacatctattgtgcagttgctttttcaratccataaatgaaatatccggatcacattgacatgaaacctttcaatggaacaaaataccagcttcttagcttttgtagtttgttttaaaagaatccactaaatagaagagcataataataatcttgaattttgaaggacattattttcttgcatataatgacttctgtttctgaagttttgaaatctcaaggcattgttcctctcgtattttctttgttcttctgagctttgcgagcatggactggtttccacaattcctttcattcctttttttctttttgtaagatattgaaagtcaaatttcagaattattcatttctgatgtagcccttcaaattttttaatttttaaagatattgctggaagcttctacaaaagaaaaccagggcaaaagcgagttgaaatagcaatgacccagctggaattcagcaatcattttct

SEQ ID NO: 152585 - DNA, 574 bp, Homo sapiens
aatgcttataaataattatgcagaactggctataaggagtagcaacagtcatgtttacccattccttgtcctcaaagctgtgtatatctccacagtatagcaaatgtgtatgtgaatgtatttttgggcccctattgctatattgcagttttccagtaatgtaagcctaggtaatttgtcaaatatttatgtattctcatttttattcctcagtaacatagaaatataccccattcccggctgggcctggtagctcacgcctgtaatcctagcactttgggaggccgaggtgggcagatcacctgaggtggggagttcgagaccagcctggccaacatggcaaaaccctgtctctactaaaaatgcacaagttagcatggtggctyatgcctgtaatcccagccacttggaaggctgaagcaggagaattgcttgaacctaggaggcagagattgaagtgagccgagatggtgccactgcactccagcctggatgacagagcgagactctgtctcaaaaaaaaaagaggaagaaaaagaaatacaccccattcctggtgccagtcagtgtctgt

SEQ ID NO: 152586 - DNA, 659 bp, Homo sapiens
ctggcaaaactgacttgtagggagagaagtcagatcaaaggtgggaggattgtaattgatgggaacgccctctgggtgatgggaaagttctgtattttgacatgatttgggttatatggatgtatgcacttgtcaaaactgattttaacacttaatgtctggaaattacacttcaaaactttgttgaatcactttgttggtcctttccatcrcctgcttcacagaccaggggaatgtaccttttggtaaaagcagaaaacaaacaaaacgatgagaccagaactacggcaaccagcccaagcaccacttcgagctccaggaaagctgtgtgatgctgaatagactgctcaacctctctgaggctggtgttcttatcttcaaacggggataaaagatctaccagtctaggtgagtgtgcacaacaaatggtatattcatttgctagggcttcagtaagaaaataggacaaactgggtggcttaaaactgcaggaatttactgtcttatcatcctgcaggctagaagtctgaaatcaaggcatcgggaggccatgctccaagactctgagtggaaccctctttgccttttcctgacttctggtggtgccggcggcccttgatgttcttggctctttaagcatctctgcaacctctgccatc

SEQ ID NO: 152587 - DNA, 613 bp, Homo sapiens
tgcggtgcttggttttttgtccttgcgatagtttgctaaattttatattagaaaattcactcaaataatttggcactttaatatattaaagagaaatgcccatattatgatctcaatatacgtggaaaatttttcaggagtattttattgatctgcttctacatcttctattcaatattttactggagaatctggcaatccaaataagctaagaagaagaaataaataatgtaagttttggaagtgacaatatttttwaaatccttatcaataaatgataatttatattaaaatatagaatctacaagacaattgtcaaaaattaataaaggatcttggcaaagttatattgacttgtgatcaattaacaaaaatccattccatttctatataccaagggcaaacaaatttaattttaaaaaggtactatctacaggagcaatgaaaaatcatgtttctacaaatatatccggcaaacatgtatataagacctcaatggaagaaattttaaaactatgttaaaagacactaaaaactaacctaataaaatagaaacacatcagatatatattaatagataggaagactcactactgaaatcacatcaactcta

SEQ ID NO: 152588 - DNA, 613 bp, Homo sapiens
tgcggtgcttggttttttgtccttgcgatagtttgctaaattttatattagaaaattcactcaaataatttggcactttaatatattaaagagaaatgcccatattatgatctcaatatacgtggaaaatttttcaggagtattttattgatctgcttctacatcttctattcaatattttactggagaatctggcaatccaaataagctaagaagaagaaataaataatgtaagttttggaagtgacaatatttttaaaatccttatcaataaatgataatttatattaaaatatagaatctacaagacaattgtcaaaaattaataaaggatcttggcaaagttatattgacttgtgatcaattaacaaaaatccattccatttctatataccaagggcaaacaaatttaattttaaaaaggtactatctacaggagcaatgaaaaatcatgtttctrcaaatatatccggcaaacatgtatataagacctcaatggaagaaattttaaaactatgttaaaagacactaaaaactaacctaataaaatagaaacacatcagatatatattaatagataggaagactcactactgaaatcacatcaactcta

SEQ ID NO: 152589 - DNA, 557 bp, Homo sapiens
ctttttggctatttccccagcccttttttaactagtatagttctgcttttatctgctttatacaatgaacatcactggcctgcagaatatgccctaactgactcagcctgcattcacatggccacatgattctccagcccactggccaaccccacagcaagaactcccttctctggccacatgttcctatcttggacagtgagcttcctgactgaagcagcctttgtgtaccgcttcatcctaaatcaactcttccaagcctatgactgcccctcaggcaacatctccacaaagtcctctctgataccttcacaacacaaccattctcccatctcaatgcctctaaagygctttttcaggcactgcctgatccctttatatggatctgaaccctggtgacctgagaatagcatgtgggaattggtaaactacagagtcttcacacattgaccctctctctgagagcctctgtgggtggggcccgagatactgaatgtttcacattggccagatgattgtgtggccatcagggttggaacctcttctctgcagggagc

SEQ ID NO: 152590 - DNA, 576 bp, Homo sapiens
aggtgagagttcagtggctattcacaggcacgattcctctactgatcatcacaggagttctgacctgctccacttctgacctgggacagttcatccctccttagtcaacctggtggtctcctgctcccaggaggtcaccatattgagtcaaacttggtgcagacactcgatcagcatagggcactacagctcagaactcctgggctgctcgagcgatcctcctgcctcagcctcctgagtagctgggactacaggcacaagctaccatacctggctaggtggttttatttctcatagaaaagtaggtgcaatgattatttttgtgtgtcaacttgactgggccatgaggttccagatgtttggtcaaatactattctgggtgtttttatgagggcgtttttggaagagcttaacatttaaatcagtgggctcagtaaggcagatggctctgcctaatgcagtgggcctcatccaaacaatggaaggcctgaatakagcaaaaaggattaccctccccaaataagagaatgctcctcctgcctggctgcgtttgaactatgatgctggggttttttt

SEQ ID NO: 152591 - DNA, 427 bp, Homo sapiens
gaattcaagcaaatctttacgaaagggagttctcatggatgaggccactgttgggggctgggccaggactagatggagccatggattccagcctggcagcttcgatggggaatgtgatctacatgaatttgggtaggagaaagaacagatcatgtgtgactttggggaacttttctcctctgctcttgtgattgtgtgaaacatgggaaatgaagataaaatattgcagtcctggagacactcaatccagaggctccttttctctgtgtgtctgagagaaggttgtgagcyctgaccaaggggcctttgggttccagattcattcagcggggaagggagtgcctgggaggcagagatctagcagtggtgacaagactcaacagatcctgctgtcctggagcaagtattccatggggctgacaggggt

SEQ ID NO: 152592 - DNA, 427 bp, Homo sapiens
gaattcaagcaaatctttacgaaagggagttctcatggatgaggccactgttgggggctgggccaggactagatggagccatggattccagcctggcagcttcgatggggaatgtgatctacatgaatttgggtaggagaaagaacagatcatgtgtgactttggggaacttttctcctctgctcttgtgattgtgtgaaacatgggaaatgaagataaaatattgcagtcctggagacactcaatccagaggctccttttctctgtgtgtctgagagaaggttgtgagctctgaccaaggggcctttgggttccrgattcattcagcggggaagggagtgcctgggaggcagagatctagcagtggtgacaagactcaacagatcctgctgtcctggagcaagtattccatggggctgacaggggt

SEQ ID NO: 152593 - DNA, 588 bp, Homo sapiens
gaggaatgaattttaacaccagagtctggatttgctttttatactggsttggtcacatttttctaaattttcagtggacagaactaggtaaaaaaaatgcatatatgatatattgtgagttcatatggacatttccaattcgaaatcagaacaacaagatttttacttcgatgttactgttggaaaataattctccatggatctctcatgtttctgaaaattttgaatacagaggtattgactgtctttgttctatactattttttgaaggatatttgtatagtaaacagacctgaaaaataaagataatatctccctgtggacaaagggtagatttgtttactcttcggtataataaacatatctctatccaggacaaaggacactgtattagtcagggatctgtagagaaacataactaatagaatatatataaagggatttactttaaggaattggctcatgtgattggggaattgacaggtctaaaatccatagggcaagccagcagtatgctagaaactcaacaggagttgatgttgcaatattgaagcagaatttctcctccaggttttatcttaagttctt

SEQ ID NO: 152594 - DNA, 588 bp, Homo sapiens
gaggaatgaattttaacaccagagtctggatttgctttttatactgggttggtcacatttttctaaattttcagtggacagaactaggtaaaaaaaatgcatatatgatatattgtgagttcatatggacatttccaattcgaaatcagaacaacaagatttttacttcgatgttactgttggaaaataattctccatggatctctcatgtttctgaaaattttgaatacagaggtattgactgtctttgttctatactattttttgaaggatatttgtatagtaaacagacctgaaaaataaagataatatctccctgtggacaaagggtagatttgtttactcttcrgtataataaacatatctctatccaggacaaaggacactgtattagtcagggatctgtagagaaacataactaatagaatatatataaagggatttactttaaggaattggctcatgtgattggggaattgacaggtctaaaatccatagggcaagccagcagtatgctagaaactcaacaggagttgatgttgcaatattgaagcagaatttctcctccaggttttatcttaagttctt

SEQ ID NO: 152595 - DNA, 521 bp, Homo sapiens
ttaaggatcacatttcgatttccaagrgtaaaattttaagccgggctttgttttcatttgttttttatctaaatgagtgggacttgacatagacaccctgcctcacaacaattgggctgtgcacaagcagacattactgccacctcttgctctccagagatccagtgagtggaaacaataaagatcctgtgttttgtctccactccaggcagggtttgatgcttactctgatagcggagatgggcaagcaaacatattcaaacaacctacaagttctcaaggaatctggtcaagtttcttgtccatcagaggagaaatggccaataatggaatggatctcaacaagtgaaagtaaagcagcactcaccagatgagcaacctttgcctttgattctccggaagggtggtcctcaggtcttccatcttgtgggatcagctgggcacaggtctgcttcttattaaagatggtcaaaaccagggtaagattgcctctcacatgaagagtgaatggtcatgttaag

SEQ ID NO: 152596 - DNA, 575 bp, Homo sapiens
caggtcacccaatgttgtttatcaattttcattctcactaacagaattaagctcccaaaccatttcaaatcagttttctccccttcattttggaggctttcaattgaagggatacatttagcacggtcagagcccattaattaccagaggaatggtggcttctcctttgtgccaaagctgagctttccaagagagcatcccctacccaagatatcaactatatcttagtgcaaataccatctattccaaatgtacttttggaaatggcaggttttaaatcaggtagtttgcagtttctgatattagagttatatgaattattttttattgtcgttaatttttttaaagatgtccttgttatgaactattttagtctggtgattaaacctagatttaagatataaaatcttaattattatttgaaaagtgtctgttcctcaartaaagccatttgtttttatattatttttccaataatgaaggtaggttcaactgaattcaagcctcatttttttacttattcttcatagggccactggctcagatgacttacaatgtcataactaggcttgatt

SEQ ID NO: 152597 - DNA, 575 bp, Homo sapiens
caggtcacccaatgttgtttatcaattttcattctcactaacagaattaagctcccaaaccatttcaaatcagttttctccccttcattttggaggctttcaattgaagggatacatttagcacggtcagagcccattaattaccagaggaatggtggcttctcctttgtgccaaagctgagctttccaagagagcatcccctacccaagatatcaactatatcttagtgcaaataccatctattccaaatgtacttttggaaatggcaggttttaaatcaggtagtttgcagtttctgatattagagttatatgaattattttttattgtcgttaatttttttaaagatgtccttgttatgaactattttagtctggtgattaaacctagatttaagatataaaatcttaattattatttgaaaagtgtctgttcctcaaataaagccatttgtttttatattatttttccaataatgaaggtaggttcaactgaattcaagcctcatttttttacttaytcttcatagggccactggctcagatgacttacaatgtcataactaggcttgatt

SEQ ID NO: 152598 - DNA, 657 bp, Homo sapiens
aataattatctggaaccaaatagtggattgaatggaaactctgctgtccacacctttgacaattataccactggttcctcataaaggaacctccaaatgtcaaagcatagaagaaagaatgagaactttctgcagtccatcatctgtaataaaggaatgttatggaatacatggagagaacgcctgaacacagcattggaaagtgaagaatttgaattgtatagagtagaggacagatgagcatctttttaaattaattgaattaaccaaacttagtacagtattaatagccctttatgagaaacaattaaatatagcaaaaattgtggtattccaaggaactattctaaaagacatacaaatggaaagcctaagtgtgaatatgcatgcatgataacttggagaaaattccaaagtttgagttttccaatccttgaggctgttctattaataatattcatcaaaatattsgtttcactcaaaggaattgagactgtggcttcagaaggaaacatttaaccagatatatttatatattcaaccagtggaaagaagaaaatacattacttctctttcaataacacaacatctttattttacccttctacctggagggtacagatagagtccagaggaaaatcagctatttctgaattt

SEQ ID NO: 152599 - DNA, 454 bp, Homo sapiens
tatgtgcaagggacatatttatatttgctagaaacaaatgttgtgagatcaaaattattcttctcagtggtttacaaggwtcaaattaattggctaatttacaattgcaatgccacattctgttgtttatatacaactgaatcataaattactactagttttcataaagggaaatgaaggaaattcaagattcatggttaatatttctttcatatattcgggaacaaaaatcctaagctcacaatagcaccctcttattaatttttgaaataagtacaacttcttggttatttctgatctacactgtataagcttcctggagaacttatcagttctccctgtgtttgcccacactgcttccttctgcagttgcattgtagtcaatggctaagattcctctaactgcctgtctatctcagtagacatctagatcagtatgattctaatctgaatt

SEQ ID NO: 152600 - DNA, 454 bp, Homo sapiens
tatgtgcaagggacatatttatatttgctagaaacaaatgttgtgagatcaaaattattcttctcagtggtttacaaggttcaaattaattggctaatttacaattgcaatgccacattctgttgtttatatacaactgaatcataaattactactagttttcataaagggaaatraaggaaattcaagattcatggttaatatttctttcatatattcgggaacaaaaatcctaagctcacaatagcaccctcttattaatttttgaaataagtacaacttcttggttatttctgatctacactgtataagcttcctggagaacttatcagttctccctgtgtttgcccacactgcttccttctgcagttgcattgtagtcaatggctaagattcctctaactgcctgtctatctcagtagacatctagatcagtatgattctaatctgaatt

SEQ ID NO: 152601 - DNA, 541 bp, Homo sapiens
atggcagggagtccagatacactttaaataaaagtaatgaacaattaccaaacagtatccagtatggatgactgatggctattcatgtactgaaatctaaaagtcaggtgtgggccgggcatggtggctcacacctataatcccagcactttgggtggccgaggggggaggatcacttgaggtcaggagttcaagaccagcctggccaacatggtgaaatcctgtctctaataaaaatgcaaaaattagtcaggaatggtggtgtccacctgtaatcccaggtactctgaaggctgaggcaggagaatcgcttgaacccaggaggtggaggctgtagtgagccaagattatgccactgcactccagcctgacagagtcagactccttctcaatacatacatacatacatacatacatacatacatacatamattcaggtgtgggcatgatagctgtcattggtcagttctcttttttaaactgtgtgctggccccacagcatacccagccaggtacaatgtgaaagaaaatgtcttgattt

SEQ ID NO: 152602 - DNA, 671 bp, Homo sapiens
tgcttaaacgacattccacaaattttggtatgttgtattttacatagagtcaattcaacattttatttctgttttgacccatgggctaggtagaagtgtaatgcttaattttcaaatatttggagactttacaagtatctttctgttacttatttctactttaacttcattttttgaaaaaaaacaccatttatgtaaatttacatttcagttggtgagatttgaattataactcagaaaatagtctattttggtgaatgtgtcctgtgtatttgaaaagaatgtgcattctgccattgttgtgtgaagtgtcttttaaatatcaactatcaaaattgttccataatattrttcagctcttttatgttcttagtgattttctgttgacttgttccatcagtcactgagtaattgaaattcccaactatatttatatatttctcaatttattttttcagttgcttttttcttatgtattttgaagtattttgaagcatttttgttgggtccatacatatttatgacaatgatgtctttgtgatataattttaaattatttatccataggatatattatttatattattcctctttattttcaataatagtgcttattctaaggctaccttgtgtaatattaatagatacttccactttttttgtagtgttta

SEQ ID NO: 152603 - DNA, 509 bp, Homo sapiens
tggttgatgatgtgtcaatgtaggttcatcacctataacaaatgtaccactgtggtttgggatgtcgayagtgagggcagctaaatatgtgtgggaacaggaagtatatgggaacgctctgtgctgttgcttaattttactgtaaatctaaagctgctcttaaaaaaatccaacttcattaatttttaaaacataaatccttaaactgtttatttgcaggaaggtataatcacaaatgtgaagaaaacattgctgatattctggagggttagctgactggatctctgaaaatctccagacgggcttgtgggtaaatctatgagtttaaagcagaggttggcaaactttttctgtaaagggacacgcattgaatatcttttttttttttttctgcaatctgctgtctgtcataagtatgcaactctgttgtgtgaaagcagccgtagacaatatgtaaacaaatgggcatagctgtccataaaactttattttccaaaacagagatagtt

SEQ ID NO: 152604 - DNA, 521 bp, Homo sapiens
gccctggcatagagttttcgatgagttcgtgtttctgcaggatcagtgggctatagtcatgtagttatgactataactctgcttgcctagctagctaactactctcatttctagaatcaaaagagaaaaatgtctatgtatgagaatagagttgcycttctggatttcaagaatatgacaaatgtgggttatttcattagtattttgaaaaggttgtcaatattccacctcagaatgaatgtagatctatggtatattagtccatttgcatgctgctgataaatatatacctgagactgggaagaaaaagaggtttaattggacttacagttccacatggttgaggaggcctcagaatcatggtgggaggtgaaaggcacttcttatatggcagtggcaagagaaaatgagagagatgcaaaagggaaaatccctgataaacccatcggatctcatgatacttattcactaccacaagaacggtataagggaaactgtccccatgattcaaattatctccc

SEQ ID NO: 152605 - DNA, 521 bp, Homo sapiens
gccctggcatagagttttcgatgagttcgtgtttctgcaggatcagtgggctatagtcatgtagttatgactataactctgcttgcctagctagctaactactctcatttctagaatcaaaagagaaaaatgtctatgtatgagaatagagttgctcttctggatttcaagaatatgacaaatgtgggttatttcattagtattttgaaaaggttgtcaatattcyacctcagaatgaatgtagatctatggtatattagtccatttgcatgctgctgataaatatatacctgagactgggaagaaaaagaggtttaattggacttacagttccacatggttgaggaggcctcagaatcatggtgggaggtgaaaggcacttcttatatggcagtggcaagagaaaatgagagagatgcaaaagggaaaatccctgataaacccatcggatctcatgatacttattcactaccacaagaacggtataagggaaactgtccccatgattcaaattatctccc

SEQ ID NO: 152606 - DNA, 535 bp, Homo sapiens
ggaaattcatgtatggacttggtcacactggtgtaaaaaacagctgagaaggcaaacagcggcttattaattaacccaggcagtagtcacaacaagagrttgctatcacccaaaggagagaaatgttgtttccagaacccagaagaagccagagccacctgaggagatgtcgaatcacagtttgggtttcctgcaggagctgggaacccaaagaaaccaaagacggcagcgatactggtagagaaacacaattccttgacttgatattttgtgacacagatatagatatagatatagatatagatatatagatagatttagatatagatagcacgcaattcccttcttctgctgtagagctaagaatgagacacaacttggtttctccccttttccctttccctcctgccagttctctacctatgtctcacattgtctaaaacccatggaaactagtcagcaaaggagtctgctagctggaatttgcaagctaaagagggagaatatatcttagttcaatcaggcaataactgac

SEQ ID NO: 152607 - DNA, 535 bp, Homo sapiens
ggaaattcatgtatggacttggtcacactggtgtaaaaaacagctgagaaggcaaacagcggcttattaattaacccaggcagtagtcacaacaagagattgctatcacccaaaggagagaaatgttgtttccagaacccagaagaagccagagccacctgaggagatgtcgaatcacagtttgggtttcctgcaggagctrggaacccaaagaaaccaaagacggcagcgatactggtagagaaacacaattccttgacttgatattttgtgacacagatatagatatagatatagatatagatatatagatagatttagatatagatagcacgcaattcccttcttctgctgtagagctaagaatgagacacaacttggtttctccccttttccctttccctcctgccagttctctacctatgtctcacattgtctaaaacccatggaaactagtcagcaaaggagtctgctagctggaatttgcaagctaaagagggagaatatatcttagttcaatcaggcaataactgac

SEQ ID NO: 152608 - DNA, 430 bp, Homo sapiens
ctgtcacactaaagcacaggtgaagactctgaggctggggaaggaaacagattaaaagaagagaaccacgaccctggagggacacaggtgtatatcccaagcccagatcattagcaatctcctgctatggggctggaacaggaccacagcaataaagagcaccaggatttgccggcagagagctgttgatgctctgatcactgagccatcagttttattacttaaatatctcacctcaatgctaaacattgaggtttttaaaaacatcattactgactcctaaatttttgtctaaaaattaactcctggttttccccagtcatgttacaagacgtagctttttgaatggctgccaaagaatggggtttaracaatctctttactttagggctttgaaaatagacaacaaatagagaagggggagaaaaat

SEQ ID NO: 152609 - DNA, 495 bp, Homo sapiens
taaagggtgtgtgtgtttgcatgttttcaggaagtggtggggtctgagattggccagagagtctacccagaaatagtaacactgaagctggttcagtgtaaaagtcaggtgtaactgggccagagcagacaagaaagggagtttcagcaggaaccccaaacacagaagtgtggcaaagcatggagtgtttcaggaatgcactgtgattagggaatagaatgtaacrgaggaggacagagcaaagagcaagtctgcccagattgaatttggttgccaaagaaaaagatgatccatagtaggtaaaggggtgttatggaaaattttaagtagagaattggcatgctccagttcagactcttgaaagataatagtagggcagtgtgttagagcgacagggtaaaggaaagctgaaggcaggaagattagatataaggttttagaaagagtcagaaatatactcttgcacgtgtgtgtgtgtgtgtgtgtgtgtgtgtg

SEQ ID NO: 152610 - DNA, 588 bp, Homo sapiens
tttggttggccaaggcaggaggatcacttgagcccaggagttcaagaccagcctgagcaacatagggagacccccgtctctaccaataaaaaatgagaaacagccaggtgtggtggcacatgcctgtggtcccagctggatgggaggctgaagtgggaggattgctggggcccgtgagattgaggctgtgcagtgagccatgacttcatcactgccctccagcctggatgacagagcaagaccttgtctcaaaaaaataaatacataaaaataacacagtctttaraatattgaggttaatttctctacccagaaagcaatctttaattttattaataagaacacaaaagaaggtaggtagtatcccagacagccaactgcttacatttggaacggtggcagcagcgatatcacaggaagcacatctgtgtgtcaggcactgttagtggccagtctcttcctccgtctggtgaacctaggctccgttcagctgctgggcaagagtctgcttcagcgggacaagcccctccccagcccccaggggcaaaccttgattcatctgtaccagacatggtaagtctattccct

SEQ ID NO: 152611 - DNA, 587 bp, Homo sapiens
tttggttggccaaggcaggaggatcacttgagcccaggagttcaagaccagcctgagcaacatagggagacccccgtctctaccaataaaaaatgagaaacagccaggtgtggtggcacatgcctgtggtcccagctggatgggaggctgaagtgggaggattgctggggcccgtgagattgaggctgtgcagtgagccatgacttcatcactgccctccagcctggatgacagagcaagaccttgtctcaaaaaaataaatacataaaaataacacagtctttagaatattgaggttaatttctctacccagaaagcaatctttaattttattaataagaacacaaaagaaggtaggtagtatcccagacagccaactgcttacatttggaacggtggcagcagcgatatcacaggaagcacatctgtgtgtcaggcactgttagtggccagtctcttcctccgtctggtgaacctargctccgttcagctgctgggcaagagtctgcttcagcgggacaagcccctccccagcccccaggggcaaaccttgattcatctgtaccagacatggtaagtctattccc

SEQ ID NO: 152612 - DNA, 588 bp, Homo sapiens
ctttggttggccaaggcaggaggatcacttgagcccaggagttcaagaccagcctgagcaacatagggagacccccgtctctaccaataaaaaatgagaaacagccaggtgtggtggcacatgcctgtggtcccagctggatgggaggctgaagtgggaggattgctggggcccgtgagattgaggctgtgcagtgagccatgacttcatcactgccctccagcctggatgacagagcaagaccttgtctcaaaaaaataaatacataaaaataacacagtctttagaatattgaggttaatttctctacccagaaagcaatctttaattttattaataagaacacaaaagaaggtaggtagtatcccagacagccaactgcttacatttggaacggtggcagcagcgatatcacaggaagcacatctgtgtgtcaggcactgttagtggccagtctcttcctccgtctggtgaacctaggctycgttcagctgctgggcaagagtctgcttcagcgggacaagcccctccccagcccccaggggcaaaccttgattcatctgtaccagacatggtaagtctattccc

SEQ ID NO: 152613 - DNA, 504 bp, Homo sapiens
aattaaacacgactcttcttgaggaagagtagaaattgtctaaaaatagcagcctaattttacaaagtcctttcatgcagaagtgttcagaataatgttttaagagggtgacttttcatttatcttactggawatgttttacatctttattcttgaaagtggtttcatgagaagatgcaaagaaactgtggcaggctaacatgtaccttgtaagctgcaagcttatatgatgtctacttatcctcttaacagtaaggctgacctactcgttactttctgagagaagaataattttcttttgtttcactgtgtactgtttttataaaataaacaataaaatttgatcatataagtgtcaagtaatcatatatctctgaacagatttgattgtcaaattgcagcacaattaaaacacaaacttaaatttctgctggtcatacttggtgaaagcatatttttattcctgagactttgaattaagtttagaattgctcatatgatagt

SEQ ID NO: 152614 - DNA, 504 bp, Homo sapiens
aattaaacacgactcttcttgaggaagagtagaaattgtctaaaaatagcagcctaattttacaaagtcctttcatgcagaagtgttcagaataatgttttaagagggtgacttttcatttatcttactggatatgttttacatctttattcttgaaastggtttcatgagaagatgcaaagaaactgtggcaggctaacatgtaccttgtaagctgcaagcttatatgatgtctacttatcctcttaacagtaaggctgacctactcgttactttctgagagaagaataattttcttttgtttcactgtgtactgtttttataaaataaacaataaaatttgatcatataagtgtcaagtaatcatatatctctgaacagatttgattgtcaaattgcagcacaattaaaacacaaacttaaatttctgctggtcatacttggtgaaagcatatttttattcctgagactttgaattaagtttagaattgctcatatgatagt

SEQ ID NO: 152615 - DNA, 354 bp, Homo sapiens
tggaattcaggcacagctgatcagcattaacattacaacacaggtcttatgactgatctttgtaggaataagataccaaattccaacctgactctggtgtagcatcacacgacagatagcacgccctgaaaaaaatcaaagtattttaccccaaaatatattcctttgacatatttttaaaggccctgcaaagctgtctcttgtgggggaaatgcattttgcagagaatctccttccctttccaggtctttttctgatcctgaagagattaactgagagtctakaaccttttaaaggtaggaatagaaagcatttgccatctattgcctctaagggcagccacctatgcaactt

SEQ ID NO: 152616 - DNA, 514 bp, Homo sapiens
  misc_feature (1)...(514): n = A,T,C or G
ttcttttaaatgttaaatagaattacctgatcctggcctcatttgaaatgctyttaaatatattggtatatacatttagttctattggcatgttagtctgctgtcttggaaaaacatggtggtcagtattgttgtgatggaccacatcttctgtattcttaacaaatgataatttcagattatgacattgttttccttctcctctttgttagtattataccttctagaaaacctgtatttgagttaaaagtgatagaaaatccactcatttctgatacagtactaggttagttatgggataacagtgaaacatttttaaccataataaatttgatactggagttttagattgaattgtaatgaccaatttattccctaatttatttaatttaatcacagctcattaatatgtaatagtgcttttaagacgttctaattaagatagtgtaataatgagataataactatgtcatgacagtaaaatttttagctctgtgtaaatatttaatannnn

SEQ ID NO: 152617 - DNA, 514 bp, Homo sapiens
  misc_feature (1)...(514): n = A,T,C or G
ttcttttaaatgttaaatagaattacctgatcctggcctcatttgaaatgctcttaaatatattggtatatacatttagttctattggcatgttagtctgctgtcttggaaaaacatggtggtcagtattgttgtgatggaccasatcttctgtattcttaacaaatgataatttcagattatgacattgttttccttctcctctttgttagtattataccttctagaaaacctgtatttgagttaaaagtgatagaaaatccactcatttctgatacagtactaggttagttatgggataacagtgaaacatttttaaccataataaatttgatactggagttttagattgaattgtaatgaccaatttattccctaatttatttaatttaatcacagctcattaatatgtaatagtgcttttaagacgttctaattaagatagtgtaataatgagataataactatgtcatgacagtaaaatttttagctctgtgtaaatatttaatannnn

SEQ ID NO: 152618 - DNA, 514 bp, Homo sapiens
  misc_feature (1)...(514): n = A,T,C or G
ttcttttaaatgttaaatagaattacctgatcctggcctcatttgaaatgctcttaaatatattggtatatacatttagttctattggcatgttagtctgctgtcttggaaaaacatggtggtcagtattgttgtgatggaccacatcttctgtattcttaacaaatgataatttcagattatgacattgttttccttctcctctttgttagtattataccttctagaaaacctgtatttgagttaaaagtgatagaaaatccactcatttctgatacagtactaggttagttatgggataacagtgaaacatttttaaccataataaatttgatactggagttttagattgaattgtaatgaccaatttattccctaatttatttaatttaatcacagctcattaatatgtaatagtgcttttaagacgttctaattaagatagtrtaataatgagataataactatgtcatgacagtaaaatttttagctctgtgtaaatatttaatannnn

SEQ ID NO: 152619 - DNA, 587 bp, Homo sapiens
aaggagaaatatttaaagggattccattgtttattgaataatacattaagagacaacaggcaataagttaataacagacacaataagaaacttcagggcttggcccagcataacagtggactgggcaactagtagaatagggccacatccctgctaggggatgttcaatgcctttaattcttctgtaaaataggtgttttatttctctgtgcctccaaacttttggtgtatctycagagtgtctttttgaattgtgaaaattaaatctttcagttcaattctgaataggctcagcgtatttggtgaaaagcaggagctatagtttggctgggttgagtttgtgctgtgacactggaagacctagaattttcctcttggcattgtaaagccacagggtatctctcagcctgacagttacttgatggaaatgcggtttttttgggggaatatctgtggaatgaaactgggaaaagggaaggagagatgtgtattcatcattttatctgtccctcaagtggatattccaatatttacttcacaggagcagatgacttagttctttaccactagaagaattcaatttaatt

SEQ ID NO: 152620 - DNA, 587 bp, Homo sapiens
aaggagaaatatttaaagggattccattgtttattgaataatacattaagagacaacaggcaataagttaataacagacacaataagaaacttcagggcttggcccagcataacagtggactgggcaactagtagaatagggccacatccctgctaggggatgttcaatgcctttaattcttctgtaaaataggtgttttatttctctgtgcctccaaacttttggtgtatctccagagtgtctttttgaattgtgaaaattaaatctttcagttcaattctgaataggctcagcrtatttggtgaaaagcaggagctatagtttggctgggttgagtttgtgctgtgacactggaagacctagaattttcctcttggcattgtaaagccacagggtatctctcagcctgacagttacttgatggaaatgcggtttttttgggggaatatctgtggaatgaaactgggaaaagggaaggagagatgtgtattcatcattttatctgtccctcaagtggatattccaatatttacttcacaggagcagatgacttagttctttaccactagaagaattcaatttaatt

SEQ ID NO: 152621 - DNA, 596 bp, Homo sapiens
tttgaaattcaagcgtctctttggagaaggattttwaaaaaatcctttaaaacattttaaaacaagacaataaactgttaaactgtgacaattttatggcctatcataaaatgtcaaaataaagattttaaaatgttaactttatgtaaccttgatacattggcaatactcaaccattttaaaaccttcattttcactgaaaggcatacttctaggatcctcacatttggcagttaagttttgaagattttacatatattggtcaatttcattttagtactctagggttccaggaaggccacatctattcctcagtaaagcatttgcctctcagtctgttcagctcctcctcaccttaattcttctgagttcatctgtaattttcataacaaagtgtactttcttcataaatttagtaaataatgctcagaacttcagcagtgagagaagtaagatgccagtggacatgggtgcatctgtgcacagtgggcaactgtgatgtgtggctgtcccttcccctaggagccaacaggacatagtgcagactctagacctggattgcctgggcccaatcctggatctacaccttcctgttt

SEQ ID NO: 152622 - DNA, 596 bp, Homo sapiens
tttgaaattcaagcgtctctttggagaaggattttaaaaaaatcctttaaaacattttaaaacaagacaataaactgttaaactgtgacaattttatggcctatcataaaatgtcaaaataaagattttaaaatgttaactttatgtaaccttgatacattggcaatactcaaccattttaaaaccttcattttcactgaaaggcatacttctaggatcctcacatttggcagttaagttttgaagattttacatatattggtcaatttcattttagtactctagggttccaggaaggccacatctattcctcagtaaagcatttgcctctcagtctgttcagctcctcctcaccttaattcttctgagttcatctgtaattttcataacaaagtgtactttcttcataaatttagtaaataatgctcagaacttcagcagtgagagaagtaagatgccagtggacatgggtgcatctgtgcacagtgggcaactgtgaygtgtggctgtcccttcccctaggagccaacaggacatagtgcagactctagacctggattgcctgggcccaatcctggatctacaccttcctgttt

SEQ ID NO: 152623 - DNA, 489 bp, Homo sapiens
tcatcctgtaccaagcactcttgttatgaacccctgctctcaacacctgacttcaatcccaccagggactacaccttccccatcttagtccttatcacaccaactggggatctccactcaactcactttaccttgcaaagggaaacacrgaacagtccatatattttttccactgtttatttcccacaatgtcccacagtgagattccagaaagggaaaactgctttgtatgtgatacagcttctggccctaagaaacacatatgtaaataaacatacattttcatttccatctatcagtctcataaagagtatttaaaatttcaggtatccagtttttctaatcagcaattcatgagacactttgcaaatgtaatagtatcctaatgttaaaaaccatatataattcaaattattttcataaaattaactttattaaaaaaggcaaattggaaagaatgggaaagagaattctatttttaatattgtt

SEQ ID NO: 152624 - DNA, 489 bp, Homo sapiens
agaaacacttaacagaccataacaagcagtgagattgactcaggaattttttaaaaattttaaaaatctgacaaaaaaagcccagagccagayggattcacaaattcttccagacaaagaagaattggtactaattctactaaaactattccaaaagatgtaggagggaatccttcctaactcattctatgaaggcagtatcaccatgatacaaaagccagaaaagaacataacaaaaaaagaaaattacacaccagtatctcttatgaatatatacacaaaatttctcaacaaaataatagcaaactgaattcaatgcacatcaaaaaaattgaccattataaagtgggttttattccatggatgattcaacatatgcaggtcaataaatgtgattcatcacataaaaagaatttttttattatactttacgttttagggtacatgtgcacaacgtgcaggttagttacatatgtatacatgtgccat

SEQ ID NO: 152625 - DNA, 501 bp, Homo sapiens
ccaggctagctaactccatttaatcatgctgaactctttaaaaaagggaggggtggtgtgacaaacagaaccagggtcttgaaaataaactgcccaaaacttgatttccatactggagtctgtcttctaagccattagaacatttcactgggtrgaagaaacacttttcccattttactagcatgcagcaacaaagaacaggaagaaaagaatgtgggttggaatgagagaagaaaagcttcccagatttaacaagaaataaaaagtagggggaaaaaatcatctcccaggaaggctggaaagaagagaacagcaccatccctaaggatatgaaatagatgagtagagggactttcaataaatcagagattttggagacgacggccaataaaaagaaacactgtggaagcagcccctgagtgtccatttcctccctttattctgaaataacatgaattttaagtatcaccagagataaatttacaatgattccaaaatgtt

SEQ ID NO: 152626 - DNA, 524 bp, Homo sapiens
catccttgtttaataaatgcacactgaactatttatgaataaaagggcacattgactacaatttgttcacaaactagaaaaaacatctatgtaagaggaagaaagaaaaaaagagacagagaaattgagtggaataaaatataaacaattggcaaatctgagttaaacaaatctaagaattcctttttataatttaatttcaaattatcctaaaattcaaccctgtattatttatttattaaatgaacataattcctgttgtcagttaatggtctagtagagagaaagatatttaaacaaacacatgaaacatcttatcagtagagatttttactctcagcacagttgtggcctgaaataagaagtgattacctcsgtttggggaagtcagtgcacctggtgttgaagtttgtatcagaagcgagaagggcaggaactagacagtgagcaggatgagggtgcagatacaagaaacattacagaagataaatcagcaaaactcagtgaccaaatgaacagtttca

SEQ ID NO: 152627 - DNA, 497 bp, Homo sapiens
aagtattttctgataaaagcctttttcctcctctctacaggcgaattttttagtatggacagcaggccaagagtgaacacttcaaagatagctttggtctgggagaagtagacagcaccagaagacgagtttcatcagctcaatcctgcagaagtctagagacaaaacacattttgcatgaatttttcacttcccarctctttgcttcgtcttcttagtagacaccatttttagcactcctaactctggtgctccatcttagatttgtagacaattctaatgtctgaactgtgagaaagaaatttatgtgtttcaacttcattcccagggcacattgagtttttggaggattctgaagcttaaaggaaacaacagaaagttatgattataaaattaagcatgaaagtgaatattaagaatgagaaacaaaatcacaacagattttcaggaccttggagatccagatctctttttctgaagcctccttgccaatttac

SEQ ID NO: 152628 - DNA, 559 bp, Homo sapiens
tgtgtgacctatatctggctctgtctgaggaggatgggccaaaagatttgcttactcagcgctttttcacatttgcccaaatctcctaataaatgtagcatacataatatagcataaaatgtccttagtatggtatattggaatgaggagacaaagacctgtgttagcatcgtggagtagtgttcctaagtaaaatttatcttctgcacggagacttcagtttcttcatttgtaaaatgaggagcagggataagataatctgttaaatttctttccaacttttgagttgttatcatggtgagttctataataacatttaacattaagagttctataaataacatttggttctgatttagactgaaagtgtgttcaaattcttgctctacaacttactagcagtgtgtctttggccatgttactgaacttttatgaacctcagattctatttctgtaaagtggagctastaatactttttattttttgtggaaagacagctcaatgcctagcacaaagtcattctatgagaaatgaagacatggtaatgatgatgatgcc

SEQ ID NO: 152629 - DNA, 662 bp, Homo sapiens
ttatgtactttctcctgcacctttctgaggtctgtgattgttgatgtgggcatggaacagatgtaggagcacatggacacctcagagaaagtttacaaactcaagatgtcttcattgggatagtcctaaaagtaagcacaaggataaagtggtatatctttcttagttcttttctgtagaaayggaagtgtatttcatggttggtctctacatatactaaagtaacagtattggttttggggtcaaataaatttgagttttaaaaccaactctgttactgatcacttgcttaacatcaggctagttacttaacttcaataaatctttttattttatgtctatgaaatgggtgttatacctagttggagggtttttaggaagaaataaatgggtagcacatataatgtgcttgacccaaagtactggtttgtggttagggtctatggtgagttgagtcatgaacaataatttgaagctgttcccattgggagctggattctatttcccatcttttgaatttggctctgtcttgtgatatgctttaactaatataatgcagagaaaataacattatgtgagtccttgagcccagggctcccaaggcttgcagtgctttccaaggctatcttcttggaatgctgcttccatggggtggcttgaaa

SEQ ID NO: 152630 - DNA, 638 bp, Homo sapiens
tgagcctacttggctgaacggtacctcactctcccactggggataatgaactaaaatgaagagtaaattgggtcttcgaggaacctaggttcaaaggtgaagccaaggcagggctttgtgcatggatacagttagtctcagaaatgttgaacctcataacttctcaaaactatccgcgtcccaaaaccaaaggcgcgtgacccagcttctcagagttcttgtttagcagaaaaaataaacacagataaaaattcatcaccccataaacttatacaaaactccaataaaaactamttgaagtagacaaaatataaaaaatgaggaaagcactctctattcataataatttgatcctcattctgatttattccaatcttaaacataatttataaaagacatacgcagacctcaccagcaatgaaaaacaaattaatgatatagcttattacccttataaatgttagtaatttaaaaagaagagtaggcaatgtggtcaaatgcatagaaatgggccatctctcatattgctagtacatgcagtaaagacgcacaaataggacaaaagtgaataacagataatagaaggggaaggaagaaatgaccctagattcatcatcagaaaaaaataataatctaac

SEQ ID NO: 152631 - DNA, 584 bp, Homo sapiens
tttctgaatttggcgaaagatataaaactacatattcaaaaaactgagcaaccataaataattagagaaattatggctataaatatcatacataaatagcttaaaactaaagacaaacttaagagcaagcagagcaataaygcattatctataacagcataccgattctaatgaaaacatatttctcatttgaaaccatggagttcagcaggaagcagcacagcatttctcaagtgttgaaaaaatactgtcaaatatttctatatctagctaaagaactctttagaaatgaatgggaaataaagacattctcaaataaaatcaaagaaatttgtttctagaaaaactacccttaaagaatggctaaatgaagctctcaaagcataaaagaaattatcaaaagaaggtgtggaacttcagaaaggatatttttaaaaacagaataaaaaataagggaaaatataatgactattcttctccacatgagtttttaaaattgtatttgatggttgaagcaaaagttataatattagttgtgttggtcaataaatgtagagaaaatactgataaaattacatttaaaa

SEQ ID NO: 152632 - DNA, 663 bp, Homo sapiens
tgtgtccatatgcatttgcattttatataaaaatcacaactacagaattgtcttatatattttgatatttattgtataataacaatctgatcgagttgtggcatggttcttataattaggttgccactctatagggtaaggaattataatttatctcacctttatcttactatgcatgatttttttctttgcttgattatttacttaggataaattctcagatctctgaaactttgtcatagagtttgaagattccacatgtttagtgctgttaattatctcattcttctcaaatagacataaaattttgcattgagactggcaatgtctacatatacaacacaagcttatcataattccaagaatatttagagttacgatttttaagttggytacatataaaggtaaatcttccttttttcacttaacagaaaattttatctttttaacaattagcccattctagtttgtcatataatatttttaaaattcatctcccaaggtcttgatagttttcataatttgaatgagctactttataataaaacttagtttcataactgataaagtttcagatttttatttagttttagctttttattagacagatgtttttcgcttcattttcttctgtagctttgagcagcagaatcccctcactcc

SEQ ID NO: 152633 - DNA, 663 bp, Homo sapiens
tgtgtccatatgcatttgcattttatataaaaatcacaactacagaattgtcttatatattttgatatttattgtataataacaatctgatcgagttgtggcatggttcttataattaggttgccactctatagggtaaggaattataatttatctcacctttatcttactatgcatgatttttttctttgcttgattatttacttaggataaattctcagatctctgaaactttgtcatagagtttgaagattccacatgtttagtgctgttaattatctcattcttctcaaatagacataaaattttgcattgagactggcaatgtctacatatacaacacaagcttatcataattccaagaatatttagagttacgatttttaagttggctacatataaaggtaaatcttccttttttcacttaacagaaaattttatctttttaacaattagcccattctagtttgtcatataatatttttaaaattcatctcccraggtcttgatagttttcataatttgaatgagctactttataataaaacttagtttcataactgataaagtttcagatttttatttagttttagctttttattagacagatgtttttcgcttcattttcttctgtagctttgagcagcagaatcccctcactcc

SEQ ID NO: 152634 - DNA, 591 bp, Homo sapiens
aacacatgtaatcattccattatgaggcctggcactaagtttaagctgagtgtgcagatttattggatcttgtaccaggaaacgagtgaggcaggggtttagagggatttcccaaggggatgtaaaatgttcatgaggccttgtacttagaggcaattctatgctcctgtgggagcctcaactgtccttgcagattgcatttctccatctacttttgagatattcaggcagcctactgctgtgggctgacaggtaacaagcaacctgtacactgaacactcacagcagccccacttaatgacgagaacgcatgccactactgacttactgttttagtgcaaagatgagctgcatacaatttgaacacctgttcatttgaaaatgcayttggcacactgggctagtttgctttcctcatatgcttgtgagttcctcttcttggaaaagatagatattagaggcagatgacaagtgtccagtgggtattctaacattccccaactgtttacctgtgccttttgccccaggaatgtgtgttttccaaatcttcttcaaactttaaggcccaacttaaatcccacctcctctaaa

SEQ ID NO: 152635 - DNA, 245 bp, Homo sapiens
agatctgctctatcttttgcaagtagcttttcacttatttgaagagagcaaagagtttcattcatcaaacattcatcaaaasgctgctcttcatgtagagatgagcatggggctacagtgtgattttacagttgtatactacacaactccagggagccccattcacagaaaccatcacttgcacaatcatatgaggctgcaccacataagcactacatagcttttccccttgaggcacatacaga

SEQ ID NO: 152636 - DNA, 245 bp, Homo sapiens
agatctgctctatcttttgcaagtagcttttcacttatttgaagagagcaaagagtttcattcatcaaacattcatcaaaacgctgctcttcatgtagagatgagcatggggctacagtgtgattttacagttgtatactacacaactccagggagccccattcacagaaaccatcacttgcacaatcatatgaggctgcaccacrtaagcactacatagcttttccccttgaggcacatacaga

SEQ ID NO: 152637 - DNA, 636 bp, Homo sapiens
tccaaagggagtcctgaacccaaagctgtttcagcttgcatgcgattgttaggatcattcactcatacctcttcgtttaggatagagaacaatcaggcaaagaarggggaggactaacccaaggtcagataattagctaagggcatcagaacccacagttcagggttgttagtaccacatcaagctcccttgcaaattagcttcataaattctaagcccacaggctcagggctcatctgaaagagatggaccagagaggaggagatggagaaaaaagtctcctaccacacactggaaccacttttacagaagtgcctgttgtctcccctgcacccctgcactcccaaccccaacaatgccaggcagcaagctgttgcagaaaggaagcaggctgctgcccctgcagtgttcaggcctcctcctggcagggctccctctacctgaatccatctcagggaaatggtcatctctgactatgctgcacagagcctgcaaagctatgttaataatctctctgggccttaaactgaataaccaagatttcgcacatgtaccattcacttcccacttaatatgcacactcaatttacacaggaagtatgcctaaggctctttcaatgactgtatgtgactaca

SEQ ID NO: 152638 - DNA, 587 bp, Homo sapiens
ctcgcttcccttgatgtaagctagattttttctccaatagtgatgagatggctaccaggattgctaggcttatatcttatggaagaagatctatttttcataggatctggcaaaagtgccaggttacaatggtgtctctttacttggttttagtcagctccctaggccacactaagtatttactgtgactagaaagctagaatattttgattggccagcytatgttggggacaaacacaaaaaatgaggagaataccaacgatgccctgcttcccttcttcaagatgcttcttatccaagaaaacgctcacccattaaaaactccctcctaagagaagccccaggagtaagatgtgccagaagatctactaagtaagatcttgaaatcatcaccggtcagctgatagctgataagcccaatttggtgtaataaagctcaatctatggattaatatggagagcatgaatagccaactgcatagaaagtgacgatcacattcactacaccctcttcatgcattttggtgctcatccaggaatctggggctagaaacattatccaaaagcataaacagtagaatcaaaag

SEQ ID NO: 152639 - DNA, 523 bp, Homo sapiens
ggtgacaccacagcacatgtgatatcaggagagagttagacaagcagcatagtagttctccatgggagcaatataacttaatctgcctttaggttcacagggtagccttcattgcttggggcagatgaatctgtgtgattcttggaaaatgtgggamaaggagacccgtaatgagaactagtcaattttaggaacatggtcttttaccatagtaaaaggtaaaaatatatttttcccccattcgaagagtcaatatagtatatccagccattagcctaaggcctgtgttttcctctgggccatacaacatatacttagttgggcatctctttaaaagattcacttaatgtaaaatggaaagacaacttggagcagggcagacttcttgacaactggattgagagctatgaaaatgaaagaatagagaacagatttttaaaaggtaggaagtttcagactctcggagggaaatctggggagaactcaagcagcttgagttgacaatgctttcaaaacaagtcaa

SEQ ID NO: 152640 - DNA, 523 bp, Homo sapiens
ggtgacaccacagcacatgtgatatcaggagagagttagacaagcagcatagtagttctccatgggagcaatataacttaatctgcctttaggttcacagggtagccttcattgcttggggcagatgaatctgtgtgattcttggaaaatgtgggacaaggagacccgtaatgagaactagtcaattttaggaacatggtcttttaccatagtaaaaggtaaaaatatmtttttcccccattcgaagagtcaatatagtatatccagccattagcctaaggcctgtgttttcctctgggccatacaacatatacttagttgggcatctctttaaaagattcacttaatgtaaaatggaaagacaacttggagcagggcagacttcttgacaactggattgagagctatgaaaatgaaagaatagagaacagatttttaaaaggtaggaagtttcagactctcggagggaaatctggggagaactcaagcagcttgagttgacaatgctttcaaaacaagtcaa

SEQ ID NO: 152641 - DNA, 404 bp, Homo sapiens
gtttctccttgatggcagcaactggatcctacattgtcctataactctcagaacatataccacaaacctaagcataaaattcagtaagtgttcagtaaatatttactcactagagaacaaaggttttttttcttaaaaaaaaaaaaaaaagaaaagaaaacaacccagggaacaaaatctctaatggtgaaatttcagttactttgacaggaatatgcaagatattttggaaaagaacaccttttttttttcacctccagtcgtatctgtrgtgttcttatagagtgcagacctccagaagcttctgagaactacatccaaggatgtctgctggggctatgaaagctcaagccttcttattgcaatggtggtagctaatatgaggcctaaatattggggtgaaa

SEQ ID NO: 152642 - DNA, 526 bp, Homo sapiens
atatatgtgtgtgtgtgtgtgagtgtatatattatatacactccccatatatattttatatatatatatgtatatattatatacactcagatggcttccccatctgagtaaatgtctattactttctacccttggcaatcaagacaaattcctgagaatcagcttttctttcttttctctcactcccacattcaatccatcaataactcctattggcactgcctccaagatatatccaaactaatacatgtctttccatctctactaaaactatctttttccaaattttgtcatctcagattaattatttcaatagtctccccttttttttctgcttgacttcccttcctccagtccattttccactccttagatacarcgatctttttgaaatgcaaatcaaattacaccattcccccattaagaccctctaatgactttcccatatctttacaataatacctaaactcctgttttggtctcaaggcctttgccttcttctccaaccaaatcttttaattttctc

SEQ ID NO: 152643 - DNA, 484 bp, Homo sapiens
tgctgttgacttgaactgaaatattgaacacaatacattttaagttgtttttaactaaaagctaatgtagatttttggaatgtgtaccaacataaacatactgtgtttaagattgtattcaaatcgctttttaaaaaaacatatcatgttccttctactaaatatcttaaaggatagaattcactctctgaatcatgatgtaattagattatattttattagacattctttacaaatttaaaatactgytatttttacatgcacaaaggaaaatcaatttggataattatatttaggcattcattaaaatcaaccacaaaatagagacacttcagtgtgtcatttatcaacatacttgatatgtatatctagagtgcattatgttacaaaaaatatagaaattcagcagcaccaagatacatttacaaaataaatacatcaatggacaaaataaattatggtaaatgtgataataataattgga

SEQ ID NO: 152644 - DNA, 330 bp, Homo sapiens
agccggcggtccccggcgcgccgagctggacgagcgggcgccaagaccaccaggggcggaccgacgaggaggaggccaaggagctgggccggggaccgcgggcaaccgggagcctgcgcggagaggacgcgggctgttggcctgtgaatttaaggagcccgaagctcgcctggcagctcggggcgatgcatgagaaccttcctccctggcccattcccgggatgaactgagtggggagcatsggctagagagagggagatcttttgcttagaagaacaaaaacagttccagatttcatatctaaattgcactttttgctgtttcagaact

SEQ ID NO: 152645 - DNA, 556 bp, Homo sapiens
ctccctctgctccccaggcccccaacccccacccagtcccagagccacattcttgacctgtgggaggcagaggaatctgggcagccgagggccagtgctagggcccctgcagtggtggggggcacactgggattcccctgagaagtgagcagcagatcccacagtcacagcctggctctccacggtggcttcttgcaaacaaagtcagttggtggctgccatgataaagatagggaagcaaagagtaaagcctggggctccagcattgggcacacctgagctgacgtccccagcacacccttgtgggcggtgggcacagggctggttgcatcaccttcctgacctctgtctgcttgtctgggaagacaggaatggtagtgtctacccctctggggtctctacattaaatccagtaatttaggcaaagagccaggaatatagtacagtctttataaacagaagctattactgcttttccatttagctatagtagaaagcaatgtcaatgtcaatattgttactctccttgtayggatgacagattttgggacacagg

SEQ ID NO: 152646 - DNA, 620 bp, Homo sapiens
tgctgaggaggaaagagctgcacagagagaaaaatgccttgagaattgagccatgcactcgtcaccatrtgcacatgaggaaaactaccccaggttgggcaaagaactaccagaaaggatcagaggcaacagcacccacgctaatgccaggcaaagcatggcacctgttcctgcctgcaagaccgtaaaacctaacagcttgtagggcgtaggacagaatatacagaagggttttccctcagtagtgggaaataattagctctgtactgagtactctggttccacctaacaaatcttagaggcaacatctgtaaggatcaaactctttccaagaatctacgttcataccagaaaaaggctgaagaatatttatggaaatacagaaacattcatcacccaaccatttaaaaatcacagtgtctggcaactaattagaaataacaggaatgcaaagaagcaggaaaatgtagcccataatgaggagaaaaataaaaagcaatcaattgagacaaacccagaaatgacacagattttagaattagcaaagacattaaaacagtttttctaactgtattctatatgatcaaaaagtagacacatgaaagttatttttttaaaaa

SEQ ID NO: 152647 - DNA, 561 bp, Homo sapiens
ggaagtataatcttgtaagatctttatatcatacatgaaggggtataatatcacttaatgtagactgtgataagttaaagatgtataccataaaccctaaagcaattcctayagcatgaagagagtgagatttttactaataagccaacaaagcagatagaatgaagtcattaaaaacaaaaaacaaaaactccatccaaaacaagacaagaaaagagaaaaaggacagatagaaaacagaagccagacttaaatctaagcatcccaataatcacattataaataaagcttatcagattggataaaaagcaggacccaactatatgcctgataaaaaatgcacttaaaatgtaaagacacaaataagttaaaaggatggaaaaagataacatcatactgacactaatcaaaagaaaactggatggctatatttatatcaaggatttcagaccagagtaaaaaatatgactagggataaataaggtcatttcataatgataaagaggtcagttcttcaagaggacataacagtcctaaatatttatgctccataacagcttc

SEQ ID NO: 152648 - DNA, 561 bp, Homo sapiens
ggaagtataatcttgtaagatctttatatcatacatgaaggggtataatatcacttaatgtagactgtgataagttaaagatgtataccataaaccctaaagcaattcctacagcatgaagagagtgagatttttactaataagccaacaaagcagatagaatgaartcattaaaaacaaaaaacaaaaactccatccaaaacaagacaagaaaagagaaaaaggacagatagaaaacagaagccagacttaaatctaagcatcccaataatcacattataaataaagcttatcagattggataaaaagcaggacccaactatatgcctgataaaaaatgcacttaaaatgtaaagacacaaataagttaaaaggatggaaaaagataacatcatactgacactaatcaaaagaaaactggatggctatatttatatcaaggatttcagaccagagtaaaaaatatgactagggataaataaggtcatttcataatgataaagaggtcagttcttcaagaggacataacagtcctaaatatttatgctccataacagcttc

SEQ ID NO: 152649 - DNA, 570 bp, Homo sapiens
cattctacccactagatctgagttgtcttggtyggggaggggggcataattaagactgaaggaagaggcagtccctaaggtcctggatcccagccctagccagggagctgttgtacacacagctcagagacaaagaccatccagagtgaagaggccaactgttaactgggttgcttgtgtgattggacagactcaggttgtcagctccccagccctgccctgagaaggcagtctcatgactgtctctgcactcccatccccaacaggccccacagctaaaaaccacccctgaggtggggtgggcattggcagggccagggcttcacctggagctcaatgtggcagtgcctgccggagccttctaatgggtggtgcctgcaggcctctagccatgtggggctcctgggtaggggtggagggcactctgcagagactggccagtctgactctgaagacacaggcagggaaaccatggctcagagcagagaaaacatgtgggcagcagaccctgcctgcccacctgagagaagcctgccggcccctggttggtgagagcttctgctgagccct

SEQ ID NO: 152650 - DNA, 570 bp, Homo sapiens
cattctacccactagatctgagttgtcttggttggggaggggggcataattaagactgaaggaagaggcagtccctaaggtcctggatcccagccctagccagggagctgttgtacacacagctcagagacaaagaccatccagagtgaagaggccaactgttaactgggttgcttgtgtgattggacagactcaggttgtcagctccccagccctgccctgagaaggcagtctcatgactgtctctgcactcccatccccaacaggccccacagctaaaaaccacccctgaggtggggtgggcattggcagggccagggcttcacctggagctcaatgtggcagtgcctgccggagccttctaatgggtggtgcctgcaggcctctagccatgtggggctcctgggtaggggtggagggcactctgcagagactggccagtctgactstgaagacacaggcagggaaaccatggctcagagcagagaaaacatgtgggcagcagaccctgcctgcccacctgagagaagcctgccggcccctggttggtgagagcttctgctgagccct

SEQ ID NO: 152651 - DNA, 549 bp, Homo sapiens
ggttgaatatctgccaggatattcaggaagttccgaatgtgccatgggtctggaacagtggccagagcttcaattctgaaggcaaatgcttaacaaatatcaatgtagcacctcctagcagccaccattaacagcttactggatttcagcaccatctagaagctccatctgtttttcacaagttttcacaaagacactgaggggtagatgtccttggtcctgatgaggtccccaagattaagaccctggggacatcagaattcacaattcacactcagcatgtttcttgacaacacctmtccagtttccatgccgggctcctggtctggaatcaggacaagaaaaagacaaaatcaagaaagccccctgggtgagtctctcttataattggctctgatttaggggtgggatagggttagtgtaagaaaccagcataatatcaaggcttcaaatagtatgctagtatccacgctgctgggccaaaaatggggttgatgggaccacatgtctctcatggagacttttacagtcagtctaccaaagaaggga

SEQ ID NO: 152652 - DNA, 518 bp, Homo sapiens
ttcaggtctttttgggtctttcctgatcattcacacaaccttggcatgtgtatttgtatgttacagcttttcaaagtccttactcttcaaagcatcttgtttaccagccttttctccagagctttaggttagtctattttttgctccaactattatccaccacctgaggcagcagtgagtaaaacattttcctctaaatgtttttgacaaaattccacagatatctgctttagcattggaagagttctgkgttaggtgagatgaaggcaagcctttgaaccagcttttgggtaactaccaaataggtcaaaacaaataattttagctatttgcagatgaagtccattgtgcttcctacagtaatgatactgtcaccagggctgtcatttgcaagactcttgcttattggagagctggaatgggactagggtaagttaaattgcaacaaaccttgctgttcttactgagactcagctgggttttcctgattaagcattcccctggctgatgcaagctgt

SEQ ID NO: 152653 - DNA, 518 bp, Homo sapiens
ttcaggtctttttgggtctttcctgatcattcacacaaccttggcatgtgtatttgtatgttacagcttttcaaagtccttactcttcaaagcatcttgtttaccagccttttctccagagctttaggttagtctattttttgctccaactattatccaccacctgaggcagcagtgagtaaaacattttcctctaaatgtttttgacaaaattccacagatatctgctttagcattggaagagttctgtgttaggtgagatgaaggcaagcctttgaaccagcttttgggtaactaccaaataggtcaaaacaaataattttagctatttgcagatgaagtccattgtgcttcctacagtaatgatactgtcaccagggctgtcatttgcaagactcttgcttaytggagagctggaatgggactagggtaagttaaattgcaacaaaccttgctgttcttactgagactcagctgggttttcctgattaagcattcccctggctgatgcaagctgt

SEQ ID NO: 152654 - DNA, 538 bp, Homo sapiens
cccacgctggcctctgaagaggccctggcatattggaggttcttggaagatgtgtttagaatgaacctaggaatgtgtgggaggtccatggwtgctatgtgtctggcagtccacacccagtggggagcccatagtctctgacgtagggcataggatgctcatcctacaggcaggaacacaaaatgcagatgtgggactagaggactcctgtaaaggggcttcactgccacacccaggatctaggtcctcacttcgtgggctgcgataggggtcagtgaaggttgtgggttgcttatacttggccatcagagccccaagaggagagtcatcctgcagcagcacagataggggctgaccaggaccaggctggaagcagaaaggccacttagatggggctggtgttctaatatcagctgaggccaagaaaatcctcaccatgctggaacaagggctgggggccttggaagaagcaggggagggaacatggcaggtggagtttggaatccacacttccccctcccacctacctgccatggct

SEQ ID NO: 152655 - DNA, 538 bp, Homo sapiens
cccacgctggcctctgaagaggccctggcatattggaggttcttggaagatgtgtttagaatgaacctaggaatgtgtgggaggtccatggatgctatgtgtctggcagyccacacccagtggggagcccatagtctctgacgtagggcataggatgctcatcctacaggcaggaacacaaaatgcagatgtgggactagaggactcctgtaaaggggcttcactgccacacccaggatctaggtcctcacttcgtgggctgcgataggggtcagtgaaggttgtgggttgcttatacttggccatcagagccccaagaggagagtcatcctgcagcagcacagataggggctgaccaggaccaggctggaagcagaaaggccacttagatggggctggtgttctaatatcagctgaggccaagaaaatcctcaccatgctggaacaagggctgggggccttggaagaagcaggggagggaacatggcaggtggagtttggaatccacacttccccctcccacctacctgccatggct

SEQ ID NO: 152656 - DNA, 538 bp, Homo sapiens
cccacgctggcctctgaagaggccctggcatattggaggttcttggaagatgtgtttagaatgaacctaggaatgtgtgggaggtccatggatgctatgtgtctggcagtccacacccagtggggagcccatagtctctgacgtagggcataggatgctcatcctacaggcaggaacacaaaatgcwgatgtgggactagaggactcctgtaaaggggcttcactgccacacccaggatctaggtcctcacttcgtgggctgcgataggggtcagtgaaggttgtgggttgcttatacttggccatcagagccccaagaggagagtcatcctgcagcagcacagataggggctgaccaggaccaggctggaagcagaaaggccacttagatggggctggtgttctaatatcagctgaggccaagaaaatcctcaccatgctggaacaagggctgggggccttggaagaagcaggggagggaacatggcaggtggagtttggaatccacacttccccctcccacctacctgccatggct

SEQ ID NO: 152657 - DNA, 528 bp, Homo sapiens
agaggccctggcatattggaggttcttggaagatgtgtttagaatgaacctaggaatgtgtgggaggtccatggatgctatgtgtctggcagtccacacccagtggggagcccatagtctctgacgtagggcataggatgctcatcctacaggcaggaacacaaaatgcagatgtgggactagaggactcctgtaaaggggcttcactgccacacccaggatctaggtcctcacttygtgggctgcgataggggtcagtgaaggttgtgggttgcttatacttggccatcagagccccaagaggagagtcatcctgcagcagcacagataggggctgaccaggaccaggctggaagcagaaaggccacttagatggggctggtgttctaatatcagctgaggccaagaaaatcctcaccatgctggaacaagggctgggggccttggaagaagcaggggagggaacatggcaggtggagtttggaatccacacttccccctcccacctacctgccatggctgatgcaa

SEQ ID NO: 152658 - DNA, 533 bp, Homo sapiens
agaggccctggcatattggaggttcttggaagatgtgtttagaatgaacctaggaatgtgtgggaggtccatggatgctatgtgtctggcagtccacacccagtggggagcccatagtctctgacgtagggcataggatgctcatcctacaggcaggaacacaaaatgcagatgtgggactagaggactcctgtaaaggggcttcactgccacacccaggatctaggtcctcacttcgtgggctgcgataggggtcagtgaaggttgtgggttgcttatacttggccatcagagccccaagaggagagtcatcctgcagcagcacagataggggctgrccaggaccaggctggaagcagaaaggccacttagatggggctggtgttctaatatcagctgaggccaagaaaatcctcaccatgctggaacaagggctgggggccttggaagaagcaggggagggaacatggcaggtggagtttggaatccacacttccccctcccacctacctgccatggctgatgcaacatta

SEQ ID NO: 152659 - DNA, 422 bp, Homo sapiens
atgaggctgcctgaaggggtagaccccaggagtgactcagggcaagtcacaggcaccctgtttggcacggagtctagtgcaaggtcctggcttaccacagagcaaccagaactttgcaaagaggacccactcaccctgaaaagggcactccctggggtttggaagaggccatgagctctgagacctgaagatccttgagggctccaccagggtttccagcttaggctgcaagtctaccccaggtctcaggccccaggccctgggctcattcatgrctcccagctggacttccacaggctcagggcctgagctgtgcaacactgaaagtaagagctttaggggctgtggccagttgggagggatagggagggtgcagggagccggtgttctgagttcaaagcccctgctctctgcagaacatg

SEQ ID NO: 152660 - DNA, 422 bp, Homo sapiens
atgaggctgcctgaaggggtagaccccaggagtgactcagggcaagtcacaggcaccctgtttggcacggagtctagtgcaaggtcctggcttaccacagagcaaccagaactttgcaaagaggacccactcaccctgaaaagggcactccctggggtttggaagaggccatgagctctgagacctgaagatccttgagggctccaccagggtttccagcttaggctgcaagtctaccccaggtctcaggccccaggccctgggctcattcatgactcccagctggacttccacaggctcagggcctgagctgtgcarcactgaaagtaagagctttaggggctgtggccagttgggagggatagggagggtgcagggagccggtgttctgagttcaaagcccctgctctctgcagaacatg

SEQ ID NO: 152661 - DNA, 611 bp, Homo sapiens
taatcctagcactttgggaggccgaggccggtagatcacctgaggtcaagagttcaagaccagcctgaccaatgtggtgaaaccccgtctctaccaaaaatacaaaaattagctgggcgtggtggcacatgcctctaatcccagctacttgggaggctgaggcaggagaattgcttgaacctgggaggtggaggttgcaatgagccgagatcatgccactgcactccagcctgggcaacagagtgagactccatctcataaaaaaaaaaaaaaagatgatgtataggatactctcaggcattgtgcaatgctgtgccataggtattatcattagccctattttctaaaatagcattatggagatataacttacatacccaagtgtcacccactttaagtgtacaatttattgacttttagtrtatttacaaaattatgcaaccattaccacaatgtgactttagaacatttttatcaccccagaaagagatcctgtgtacccattagcagttactctccattcccttcttccactccccgcccaccttagcccaagccctacacagccactaatctacttgctgtctctgtaggtttgccttttctgcaca

SEQ ID NO: 152662 - DNA, 362 bp, Homo sapiens
ttaagtaataagtggctattacactgagaatgttggttccttaagttctgtcaggaggcccatgacagggttgaaagaaataaaactacattttcaaatgaaaaactagttttgttagaggatagcaaagaatttcaataagattgtcacatgaattgcaaatgcttggaggaggatgctgtagacrttttgcagaacagaatcaagttataaaatgtagaggctacaaagggctttggggttcatctcatccaatcttctgtgtgtatagatgggaacatgagagtccagagtggtgacatgatttgtgcaaggtcacatagtaaaataaatgctgaagagggaaggcaaattagtttctt

SEQ ID NO: 152663 - DNA, 604 bp, Homo sapiens
tttttgtttcccgttattctctttaccacctggatggttatggtgtgtggtctttctatctggcctggaaaataggtttcaaaagtgaaattggattctgaagtttgttgcacaccccactcctgatcctaaagtgaacttcacacaggttaaaccaatatagttcatctttgctctcatggagttccttatccttatagaaacagagcagaactctaggagaggacaggcctaacctcatccccaaagagtagcaaaccctatagaaaacttgattatagcaagatgtctctcataaagatataatcttataaggagaccatcaaaatagacaactcctcaaaggtcattgactttaaccatcttatttggcagatggggataatgtggctcagagagaggaaatgagttgccaaaggtgacagatcwatctaataaaataaatgggaatagacccagggaaggtaacttccaaatgagactcctttccctattacattttgctagacttcatgactgggttataaatcaacgattcctaaaataaagcctatttgtttacatttgaggcaaaaccttgatttaagttggaataagtcctcag

SEQ ID NO: 152664 - DNA, 525 bp, Homo sapiens
caataactgctaatatctgcacacctatttgtatcttttttttgtagagatggtggggggatctcactatgttgcccaggctagtcttgaaccctgggcttaagtgatcctcccacctcagcctcccaaagggctaggattacaggtgtgagtcactgcacccagtctgcacacctctttggaagttacagaacatctggacaatcccatgacatgaggaggaacacaactamttgttgttgagaacccactatatgtaagctggagctgtctatattcaatgctatacataagtatctcactgaattatgacaaggactctgtgaggagggtgttatttttttccttttgcataataggaaattgagaaaggttaagcaacttgtccacggtcacaaagctagaaattgatagagctagggtttgaattctgaggcaattcaggttcaaatcccttgtttccaggtcaagtatttctattatctcaatgctacagctgaggaaattgacttagagatgttaatg

SEQ ID NO: 152665 - DNA, 408 bp, Homo sapiens
ggcaatattctgtatctgaaatgtccaataagtagccactggacacatgtggtgactaagcacttaaaatgtggcttgtgaacctgaggagctacattttaactatatktaattttaattaatttaaatataaatagatacatgtgccttgtggctgccacattggaaagcacaatcctatatatcctatggtttattgataagatattgtagtttatttttatgtactcttcattattcattattgtatttcctataaattacctcaaacctttgtggctggaggtagaaaaaaaaaagaaaggaacaaagcacaattaaatgaacaattgactttgcagggcatgtcagcacgttcatagggttgaaggaagtggcaagtatacagcaacagtggatcttaaatcc

SEQ ID NO: 152666 - DNA, 623 bp, Homo sapiens
cctgtcttcataacaatacctctcttttcaaccccttcagctactactcttttcccataaactgaaactgcccagaagagttggctaaattttctacaattcttcctctttcattcttcttcttgcatatacatcagtcagacttccatccccaatatctcaccccatctactcttaacaagagctccagtcctcaatctgacttagtggtatttgaccaatttaattactcccttcccctgggaaagttttcttcacgtggcttcctgcacacaactctcccagtgttgctcttctcattgactcttatttctcagcctcctatgctgattcctcttcatttccttaacttctaaaattaggcttgctcagagtgtcagattttgggtcacttctttttacctacatttggkgatcttatccaatcctactctgatgactcaagttcgtatctttatggctctcacctctgaattgtagacttgcatattctattacttatagataccactactgcaatgtttaatagtaacctcaaacttcggggacctaaaatcacgcttttgcttttccctctaaacctaaatttcctgggggctttcccattttgtcatatagcatct

SEQ ID NO: 152667 - DNA, 592 bp, Homo sapiens
agctattcttgaggcttgaggtaacaatgaccagctgtgacgaagctgacaaaagcattatgtcctcctgttcactaccttgacttactggcccaggcctatggaacccactgctaccctccagatagtggatagagttcccagaagacaggtatcaatttacacagtacagattagaagaatgaaatcatcccagaaagagaaaggaaccctgatatggtttggctctgtgtacccacccaaatctcatcttgtagctcccataattcccatgtgttgtgggagggacccagtgggagataatggaatcatggggagcagrtctttcccctgctgttctcatgatagtgaatgagtctcatgagatctgatggttttaaaaacgggaatttccctgcgcaagctctctctctttgcctgctgccatccatgtaagacgtgacttgctcccccttgccttctgccatgattgtaagttccccagccatgtggaactgtaagtccactaaacctctttcttgtctaaattgcctagtcttgggtatgtctttttcagcagtgtgaaaatggaataatacaaaccctaaggtga

SEQ ID NO: 152668 - DNA, 525 bp, Homo sapiens
tgctgtttctgcatttcttcttaatgctaggattccagtaaccccttttcagatgacattgttttgaatctcctcacrgctctgctttctctactataaaagttcctgagtttgtgtacatgcctatgcagtgcacttattttaaaacaaattgattgatattgcctatctaaaatgagacaagctagaatattgaatgccttgatttgggtggacattggcaaacatttgaaatccagaaatctattgcaatcagtctctttttatgttctatgatttaccaccctcattgtctcaaattccagtaaatttttgtaaggattaatatccttactgacaattctgaaaaaaattcagtgcctctgctttcatggtcaccaggagccctgagcatctattaactctaaattttaattgcatgatgattgtcctaatgtcctttgttgcctgtgctttccttctaatatcttattagccctgatgtgaacttagcaccttttctattctttcatcacacttctacat

SEQ ID NO: 152669 - DNA, 525 bp, Homo sapiens
tgctgtttctgcatttcttcttaatgctaggattccagtaaccccttttcagatgacattgttttgaatctcctcacggctctgctttctctactataaaagttcctgagtttgtgtacatgcctatgcagtgcacttattttaaaacaaattgattgatattgcctatctaaaatgagacaagctagaatattgaatgccttgatttgggtggacattggcaaacatttgaaatccagaaatctattgcaatcagtctctttttatgttctatgatttaccaccctcattgtctcaaattccagtaaatttttgtaaggattaatatccttactgacaattctgaaaaaaattcagtgcctctgctttcatggtcaccaggagccctgagcatctattaactctaaattttaattgcatgatgattgtcctaatgtcctttgttgcctgtgctttccttctaatatcttattagccctgatgtgaacttagcaccttttytattctttcatcacacttctacat

SEQ ID NO: 152670 - DNA, 602 bp, Homo sapiens
aagttccacagctcattcagcaagttacattcctttcagtcatcttcttttccctcagatatattcttttgggggaattgtctaaaatatcagcctgcctcttcctttagatctctgcctatatttttgttttattttatgttatttttagtttttgagatggagtcttgctctgtcacccaggctggagtgcaatggcatgatctccattcactgcgaactccaccttccgggttcaagcaattctcctgcctcagcctcccaagtacctgggattacaggcgtgcactgccacgcccagccaatttttgtatttttagtagagacaaggtattaccgtgttggccaggctggtctcgaactcatcatctgcccacctcagcctcccaaagtgctgggattataggcttgagccaccttgcccggccctatatatggtttktaatgagataacaaaaggtccacgctcaccaggtctttactagccttggtgttaagagtggatgttgcaccctacccaggagggatctgtcaggagacagacataaagataaaatgatatcaataatagaagtatcattttaggacatagtgtggattat

SEQ ID NO: 152671 - DNA, 572 bp, Homo sapiens
tataaaaactgtaattttcattctaaccacacatctaagggcacagagccctgaagatatgaactgtcttagccttgattcatgactgttttaatacctccagttagcatttggtgcacacagtttcaacttcaataaaaacactgtgactactgccaaagaggtagaatggtagagcaagctgcacaaatcacagaggatgctaaattcattttgaccaaaaatctaagattcctattgtggcttatttaagcagcagaattataaagcttggaatttcatttgcaagagtcagtttcacagatgttaaatgttttggctttctttccactttgcaagcttgatcacaaattatgtcttggccctgctttatttcttagtcacytgaactccaattgtggggtcgagttctgatggttctttatctatcccagatcaaaattagggcattttctttaaaacctcccaggcttggaatgacaaagaaataggccaactgctaaatggttgctgctactctaaataagattggggatgtaacataatggacagaatctcatattatcttaaga

SEQ ID NO: 152672 - DNA, 587 bp, Homo sapiens
ggaaagaacacagaactcccaagtaaaccatgacacaatggtaaacttcacacagggagtgtttattctataatcatgaaagtgttgttttcagacatttttaaccacatgtatttatcttcttttcatttttgtgcaaatacaaaaatgaaaacctaagtaaaattaattacgatggcatgtctaatagttttctacaatctgagcctgactcagctaaattattctctgactcagattaattgaattccatgatttacaaacaatattatcctccttgttttcaaaaacaccaagaagcaacactgactaaaataggaatctgttgttgattctggattactttttcaaatccttgacaactcattcttctattgttattgcctttttagaggtgctaatggaaggttttgttaaggggtgggtgagggggaatctaggatataaggggagtgatattagcaagaagccctgaaatctccttcctttcaggcaagaagctctgaaatatcctccyccaccccatgaacactgtgattcttcaacactacatagacgaattccctttatgagaaataaactggttg

SEQ ID NO: 152673 - DNA, 392 bp, Homo sapiens
ttggcgagttctgagttcttgtctcacaaccaagagggatgaggcacgcagttatcagatagtgagtaaggcagagtaaaattttattgaacagaaagctcttaacagtgagaggggacttgaaagtgggttgcgggctatgaggctaagtccagggtttttattggcttagaatggagaaawgtgtgctgattgctttataggtagacttgggaaaagcaccattcagaaagaggtacaatagtgtaaagaaccaatcaggggctgaagtgaagtcttggcctgggaccaatcaggggctgagcacaccaaatgggaatgggaatggaagttctcactccagtttgtggactctatccagatctggtactttggttttctgccttcagacc

SEQ ID NO: 152674 - DNA, 303 bp, Homo sapiens
acacatgcaaccatatgttcayagcaacactattcacaatagcaaaatattgaattaatccaggtgcccatcaaaggtgaattggataaagaatatttgttacatgtatactgcggaatactatgaagttattaagaagatcaaaatcggccaggtgcagtggctcatgcctgtaatcccagcactttgggaggccgaggcaggtggatcaccttaggtcaggggttcaagaccagtctggccaaaatgctgaaaacccatctctactaaaaatacaaaaatcagccacatgtggttgcgggc

SEQ ID NO: 152675 - DNA, 347 bp, Homo sapiens
gtgcaattttgcctacactttgtgcaaagcaaggttttacatgatatcaatccatcaagattcaatatcattatggaatgtcagcttaaagtycctgaacataattttaaaactatgcactccctctgagcagtagtacaaaacagaaaaaaatctcaaatggcatgtaagctattgattgatattacagaaagaaaacaaggctttccttattggtatataaaatatcaatgaatagaattgcggagctgaattgtgtcaaagtaacaggtagctatacgtttgctaaaagtaatacatttggggaaaacataatactgttttttaaacggtcataagatttatct

SEQ ID NO: 152676 - DNA, 347 bp, Homo sapiens
gtgcaattttgcctacactttgtgcaaagcaaggttttacatgatatcaatccatcaagattcaatatcattatggaatgtcagcttaaagtccctgaacataattttaaaactatgcactccctctgagcagtagtacaaaacagaaaaaaatctcaaatggcatgtaagctattgattgatattacagaaagaaaacaaggctttccttattggtatataaaatatcaatgaatagaattgcggagctgaattgtgtcaaagtaacaggtagctatacrtttgctaaaagtaatacatttggggaaaacataatactgttttttaaacggtcataagatttatct

SEQ ID NO: 152677 - DNA, 602 bp, Homo sapiens
aagaaacttttaagaaattagtctactttccagtttgaatatttgagcatctaaattaaaaattattttagataccatgtataattgatattattatagtactggtctttctgtgcctggcttatttaatctagaataatgttctctagatttatccatggtattgcaagtgacagtttttgaaggcacattgtattccattgtgtatatatgccaccttttttaaatgattaattcattgatgggtactttggttgcttccatatgttggccattatgaacgatcctgcaatgaacgtggtaatgcagtcacctggggtgggggtgtacgggaaaagggcagatgatggtcaaagtgtttcaaaagtttcactgagwcaggaagagtgagttctggtgattgatttcacaacatggtgactgtagttaataatgtgttacatatttcaaaactgctaaaagagtggattttaaatgttcttagcacaaataagcaagtatataaggttagatatgtttgttagccgaattcgttcactacacaaggtatacatgtatcaaaacatcacattgtacctcacaaatatagaaaattattattt

SEQ ID NO: 152678 - DNA, 534 bp, Homo sapiens
caatatctactgtcaccagcaatgtatgacaagtttcagtccttgcaaatatgtaactccttaattttcagatttttgtgactggtagatggggttgaatatcatgttatatagacatcccgatcatatatcaagactcaggttggggattagctctctcaggacatttttgccagtcttcttctttgtgttcccttgcacaacactagcagagaatataaaacagtattttgaaatcatttgttttctctcctacttgacctacaggactgtgatctcatcaagggttgatatctattcttgtttgccttcgagttaccaaatcacacaacaatggcaaacacaccagtatatgatcaatgaatgtttgtttaagtgagcaaaaatataatagtgaatagttccaagctcaaaacaggtttggagcacatttcatggagatttktgagtaacagggcataagagaatctcagaattgaccctcacacccttggccttgtgtggtcctggccatagcacagactgtttccatgt

SEQ ID NO: 152679 - DNA, 565 bp, Homo sapiens
atatagcaatgccattttccccatgtcamaaactctatttctttttaaataaatggtgtaactgtattaatagtggtaggttaccctttttgtacaaagattatttttaatcatcactggaaatgggattgggtttgtactgtttatccagggaggagatgagttttcccagaattgttcatacccttgcacgttactccatgcactggcataaacattagatgagagtatgggtatagtccatatctgtaaaacagaacgtagctaaatgagaaacacaggatttcaatccaaggttatctggacttctgagccaaatcaccatatgttcatgtcatgtactgcggcaagtgtcatagcatttcaagatgggaggacacttagaaatagtgaagcttaaaatcctcttaaacatttagctaaaattatgttaggaatgaagaggagtccaaaataaaacccaagatggagatctgactaaaaaggaaaaaaatagagcaatgccttctgatggttttcagatttaggctaattctgcattcataaatttaggacatttgctgac

SEQ ID NO: 152680 - DNA, 532 bp, Homo sapiens
ctgactgctactatgggcacagtgctcaaataatgagtatgtagctgggacaattgctccccagattcagtacgaatattaatatttgatctgcggcaggccatttaacctttctgaccaaagtttttcattcatgagttagaataaatgctccatgaagcttctttatgactctactaactcatagtatgcaagggcctacaaattgattccatgtagcaaaactatcactattctattaaggttcctaaactttcctctatttcttctaaataaaatcctgyttgcctatttaggttctcctctccaatttttcctgactgttgattttgagattttataatgcagagtaagaacgaagggttggtgtagaagggtaatgtcaacatacttgtcagggctggggaaaatagttttgtgaaggtttccaaagtaagaaataaggaaacatctataatatgtggggaaagcagaaggtaaaaaaagtagtaatgctctgccatatttactcctttcactgtgtttgaaaaat

SEQ ID NO: 152681 - DNA, 444 bp, Homo sapiens
tcatatgtaagccacacatacagacccatctatgtctcttttcatatttacttataaaggtctgtattgcctggtatttaatcatacagactctgaagctcaattgtgttaactcaaacatagcctaattatttactggctctgagacctcagccatattaccttttgtaaaacctcagtatactcatctttaaaatgagagtgataataggtcttgtgtcctaagtttctcattaggaatayaggaattaatgtttgtaaagcaattagaagagtgttgggcatattttttaagtactgtataaatattagctttcatcactggttgtccttccttccttctttctttccttccttcctctcccgcagtgtgcgcacgcacacacacacacacacacacacacacacacacacacacacacaagagctaaggtttcttctcaa

SEQ ID NO: 152682 - DNA, 559 bp, Homo sapiens
acatttgttagtaaaagttagaaattaatgatgccaaaaagatagaaacatattattaaataaagaatatataattttgtatatacaaagatgaaatatcaataaatgaatttagcaaggttcttagatacaaggtaaatatataaaaataaattatatttttcacaaatattagaaaatgaaatagcaaataacttacagcaaatatttttaaatgcacaaaataaatacattaaaaatgtataggacccctacaaataaaatatacatcattttgaagagaaacagaatacttaaataaatggagggttacsccatatttatcagtggaaagattcaatattgtaatgatgtaaactctctgcaagttattttttaaatttaatgcaattccaataaaatgtaaatttttgtttgtttgtatgtattgttggcacttgataagttgactttaaaatttatttgcaaatgctaagaatagctaaactattcttgacatagaataagggagctaggggaaagactcactttttcagatatcaaggattaatttaaagct

SEQ ID NO: 152683 - DNA, 607 bp, Homo sapiens
tttagttctatgcaattttatcacatgtagatttgtgtatttaaactagaatgaagacacagaactgttccattacctcaagtgtccctcatgttgtccttttaaccacattcacttttctcttccccacctctcccggctaccagttcctaatctctggcaacactgctctgttctccacatctataattttgtcattaaaaaattatatacataaatacatttaatatttaaccttttttagatttttttctttctcttttagcttttacttagcataattttctcgagattcatccaaattgttgagtgtattgatttctttttgtcctttttattactgagtgctagcccatgaaatggtgtatcacagttttttatccatttacccattgaagtggacatctgggctgcttacagtgtttagctactagaaataaaatttctttgaacatttaygtacaggtctgtgttaacataggtttccccctcccaggataaatgcccatgaatgcaattactggttgcatagtaattgcttgtttacttttataagaaactgatgcttctttgagaagctatgccattttactttccaccaacaatg

SEQ ID NO: 152684 - DNA, 481 bp, Homo sapiens
ctatcccctgttgatcttattttggggttgatgtatcttatgactctaagaaaatggaaatatctgcatatggagaaggtacacaaaggtccttcagaaatcacagtaccactgaagtcaaataagatgataactcaacaaacaaataagagataacgaagattgtagtaaatttatttcaggctttcagcctgtttccatgggggttcatcattgttcaattttatatgttaagattcagcttaccttccccaaaaagctttcttggatacccccagtcaaattgatgtgttattcttttgaattcctctgtgtcttcattcttgactctcttaaaatactactcattctgctttatgtttcagcaatttgtatagaatcagtttcsattttccaagcacattatcttccagtgttcatttaaaagccacttgtttgggagtccaaagtacttatttctgtagaactaatcatacaagtg

SEQ ID NO: 152685 - DNA, 457 bp, Homo sapiens
attacaatggtgtacagtattcaacacagcagcatgctgtacaggtttgttgcctaggagtaataagctataccatatagcytaggtgggtagtaggctataccatatagctacactggtaggctataattagtaagtttttgtaaggacactctatgatgtttgcacaatgatgtaatcagctaacaacacatttatcagaatgtatccccagtgttaagtgacccatgacccaaccagtacaaatggataccaacccatccgaatagacacccagctacacagaatggaagttcattttacttgctgaataccagacttgaaatcagcactattaggacaagataaagtagggaaataaaattaaagtattgagtaaggagaatattcaaattttgaactgagtaggtgacttttgagtcaaactctgaagaaagtaaggagtgagtcatgtaga

SEQ ID NO: 152686 - DNA, 462 bp, Homo sapiens
cattgtattacaatggtgtacagtattcaacacagcagcatgctgtacaggtttgttgcctaggagtaataagctataccatatagcctaggtgggtagtaggctataccatatagmtacactggtaggctataattagtaagtttttgtaaggacactctatgatgtttgcacaatgatgtaatcagctaacaacacatttatcagaatgtatccccagtgttaagtgacccatgacccaaccagtacaaatggataccaacccatccgaatagacacccagctacacagaatggaagttcattttacttgctgaataccagacttgaaatcagcactattaggacaagataaagtagggaaataaaattaaagtattgagtaaggagaatattcaaattttgaactgagtaggtgacttttgagtcaaactctgaagaaagtaaggagtgagtcatgtag

SEQ ID NO: 152687 - DNA, 458 bp, Homo sapiens
attacaatggtgtacagtattcaacacagcagcatgctgtacaggtttgttgcctaggagtaataagctataccatatagcctaggtgggtagtaggctataccatatagctacactggtaggctataattagtaagtttttgtaaggacactctatgatgtttgcacaatgatgtaatcagctaacaacacatttatcagaatgtatccccagtgttaagtgacccatgasccaaccagtacaaatggataccaacccatccgaatagacacccagctacacagaatggaagttcattttacttgctgaataccagacttgaaatcagcactattaggacaagataaagtagggaaataaaattaaagtattgagtaaggagaatattcaaattttgaactgagtaggtgacttttgagtcaaactctgaagaaagtaaggagtgagtcatgtagat

SEQ ID NO: 152688 - DNA, 545 bp, Homo sapiens
aaattccccagcttttagaaacagaactggtccgaccttctcacacartgacttgtgcactgccctgagcttgatttgtaagtgttctacctgagtgcacttcttgtcttaactacactgaaaactttaagatgacaaattgtaggttgatggcactgaatttactgctatgtaaatgctatgactgtttcataaaaatatttgctgatgtattatattgttataagatagaactttaacaaaaattataaatgggggaatatatatgaaaatattaaaaaaatataactctcattcataaagacttccctttttctttaacttttattttaagctcaggggtacaggtgcgggtttgttatgcaggtaaacttgtgtcatgggggtttactgtacagattattttgtcactcaggtattaagcctagtacccattagttatttttcctgatcctctgcctctttccaccctccacgctctgataggctccagtgtgtgttgttcccctctatgtgtccatgtgttctcaccatttagctcctac

SEQ ID NO: 152689 - DNA, 618 bp, Homo sapiens
aagaaacctcacagaatgggagaaaatatttgcccaatcaaaaatgggcaaaatatttgaatagacatttctcaaaaaatgcatacacatggcaaacaggcataagaaaaggtgcttgacatcactgatcatcagagaaatgcaaattaaaactacaatgygatatcttctcagccctagttagaagggctgatatccaaaagacaggcaataacaaatactggtgaggatgtgaataaaatggaacccgtgtacacttttggtggaactgtaaattagtacaatcattacagagagcagtttggaggttcctcaaaaaactaaaaatagagctaacacatgatccagcaatcctgctgctggggtatatacccaaaagaaaggaaatcagtgtattgaagagatatctgcactcctatttttattgtagcaccatttacaacagctaagatttaaaagcaacctaagtgtccatcaccagatggatggataaataaaatgtaagacatacacacaatggagtactattcagccataaaaacaaatgagatcttgtgatttgtgaaaacgtggatggaactggagattattatgatacatgaaataagccagacacag

SEQ ID NO: 152690 - DNA, 536 bp, Homo sapiens
aactgtttttttctcacaactcttctgacactacatgtcaagggtggggttatcacaccaaccaattctccaactctctggacaccaactgagtgtcctacaattcaattcaattatgacgctctctactcagagttaacactgaccccataggtaarggctcagtcccacaagactttccctacttcagatgtcagtcttaagtcttaggttgccatgtgtacttctggctataaatgggggaggagcatcccacaaccccatgtgcagactcgataattttctaaaatagctcacagaattcccgaaggcactttatttactattgtggtttattataaaggttacaactcagagaaacagtcaaatggaagagatgcatggggcaaggtattgaagggggcatagcattttcatgccctctctccaggcacaccaccctctcagcaccttgatatgttgttcaccaaccctgaggctcttcaaaccccattgtctatggcttgaatggaggttacattaagggttgattaaat

SEQ ID NO: 152691 - DNA, 536 bp, Homo sapiens
aactgtttttttctcacaactcttctgacactacatgtcaagggtggggttatcacaccaaccaattctccaactctctggacaccaactgagtgtcctacaattcaattcaattatgacgctctctactcagagttaacactgaccccataggtaagggctcagtcccacaagactttccctacttcagatgtcagtcttaagtcttargttgccatgtgtacttctggctataaatgggggaggagcatcccacaaccccatgtgcagactcgataattttctaaaatagctcacagaattcccgaaggcactttatttactattgtggtttattataaaggttacaactcagagaaacagtcaaatggaagagatgcatggggcaaggtattgaagggggcatagcattttcatgccctctctccaggcacaccaccctctcagcaccttgatatgttgttcaccaaccctgaggctcttcaaaccccattgtctatggcttgaatggaggttacattaagggttgattaaat

SEQ ID NO: 152692 - DNA, 536 bp, Homo sapiens
aactgtttttttctcacaactcttctgacactacatgtcaagggtggggttatcacaccaaccaattctccaactctctggacaccaactgagtgtcctacaattcaattcaattatgacgctctctactcagagttaacactgaccccataggtaagggctcagtcccacaagactttccctacttcagatgtcagtcttaagtcttaggttgccatgtgtacttctggctataaatgggggaggagcatcccacaaccccatgtgcagacwcgataattttctaaaatagctcacagaattcccgaaggcactttatttactattgtggtttattataaaggttacaactcagagaaacagtcaaatggaagagatgcatggggcaaggtattgaagggggcatagcattttcatgccctctctccaggcacaccaccctctcagcaccttgatatgttgttcaccaaccctgaggctcttcaaaccccattgtctatggcttgaatggaggttacattaagggttgattaaat

SEQ ID NO: 152693 - DNA, 536 bp, Homo sapiens
aactgtttttttctcacaactcttctgacactacatgtcaagggtggggttatcacaccaaccaattctccaactctctggacaccaactgagtgtcctacaattcaattcaattatgacgctctctactcagagttaacactgaccccataggtaagggctcagtcccacaagactttccctacttcagatgtcagtcttaagtcttaggttgccatgtgtacttctggctataaatgggggaggagcatcccacaaccccatgtgcagactcgataattttctaaaatagctcacagaattcccgaaggcactttatttactattgtggtttattataaaggttacaactcrgagaaacagtcaaatggaagagatgcatggggcaaggtattgaagggggcatagcattttcatgccctctctccaggcacaccaccctctcagcaccttgatatgttgttcaccaaccctgaggctcttcaaaccccattgtctatggcttgaatggaggttacattaagggttgattaaat

SEQ ID NO: 152694 - DNA, 498 bp, Homo sapiens
tagggaaaagtacgtgtccaagcattaggcaactgaagattgaccaagcagggtagcaagagggaatagtctccttccagaataaaaacaaagcccagtcacccatgtttggaagtaggttaaatttaatagmtaccatttactcagaatttactatgttctaagcactgttctgttttgcatatattatctcaattattaggttgctgtaataatcttgtgatagaagtattacagattttattttgcagtgagaaaactaaggaatagagatatttaactaatttacccaagtcataaacctagtaagtgatggagacagttctgtaacttagatccgtctgcatccaaagcctatgcttgtaactactccaccactaccaacctactgaggagggtgggtttccaagtggggagaaatagtagaaccagtcagctcagattctcactgccaaggttctgcttccctttggatctcattaatagccactgccacct

SEQ ID NO: 152695 - DNA, 489 bp, Homo sapiens
catttttttgagtgcttactacgagccaggcaaactaattacttatacaactattatacccattttgaaagtgaattaactaataaggttcagagaagttcargcagcttgttctagatcacactgaaaagcaaggattggaactgagcctatttgcctgaagtgtgttctctgagttaccaagccatatccccacctgagctagatgccttctggaaattcctactggccacctgagtcctgccacacagtgcaggcaacatatgtacactctgaggctttgtgtctataaaatgggagtaatattcaacccacagcgttttgcaagggtgaaatgaggggccacacataaatcacatagtttaggtcctggttgttgggagtactcagtaaatggtggctagtatcagtttactttccttctagcgatttggaaacatgatataaaaatagaaaatgaatgggtccctgaggtttgttgtaaaaagt

SEQ ID NO: 152696 - DNA, 419 bp, Homo sapiens
tctccctggggtgccagagcagctttggggtatgtgcatggcctgacggcagtctgagtgtcaccaagggaaacttcatgccaaaagctatgctaagttatgtcagtgtccttagcaggctcaggggacactaacctcactgccaagagcaagcaactcagcacttgcccatgaggggttgagccacagatctagaaatctctggtcttttctcaggggtctctaatcccctgggcaggaagcttaaagcctgagttctcagcactggtrttaaggctgcccttccccagctgcctggctctgggttaatcccaacccaaccaccaagagacaagaacttcatttcccccatgataggctgtgagtccttgccaggacatgagtccttattcctgtcagactcttctcagggctggatc

SEQ ID NO: 152697 - DNA, 543 bp, Homo sapiens
atctctggtcttttctcaggggtctctaatcccctgggcaggaagcttaaagcctgagttctcagcactggtattaaggctgcccttccccagctgcctggctctgggttaatcccaacccaaccaccaagagacaagaacttcatttcccccatgataggctgtgagtccttgccaggacatgagtccttattcctgtcagactcttctcagggctggatcctgctataacaacccaaaggaactgtgattctggaaggcaaggcctacccacatcatctccgtgtagtgaggttctggtactgaggaggggtgtgtcaggttgaggaatgaattaatgaatgaagaaatgaagacagacacaaatgagaatcatctctatccacragagcttttgttaaggagatgtgtccagaggaggaggcaatttctattcttttgctgccagtatccagaccttggtagaatatgggtgtgctctgatgacagaaaggcaggtatctgtaaaccactattaccaaatcattaatcaggtatttatgt

SEQ ID NO: 152698 - DNA, 523 bp, Homo sapiens
tttctcaggcattgcagaagattgagaatgggaaaccaaccatgcagagatgcggactttctcttttgctgtggggactttctctgtgctgggggatcttcatcaggaaagataccattctctaccgcctttggatggaattaacacacccctggatgaaccctttatcttagtccattttgtgctgccgtaaaagaatagcacagactgggtaatttataacaaacagaaatgtattagcacatggttcttgaggctggaagtctaagatcaaggttccagcatctggcaagagccttctttctgtgcctcacatggcaggagrtggaaagataaaagaggttcaaagtcatccttttgtaaggaccccactcctgtgataatagcattaatccatttatgatggcagtgctccccatgactcatggggtgtcctcatgacccaaacacctcccaataagcttcatctcccaacactgccacatcgggggtcaagtttttaacacataaactttgggggacc

SEQ ID NO: 152699 - DNA, 525 bp, Homo sapiens
tttgtggctaggcaagatagtgaacatttttcaccccatgtttttacatttrtaaaatgaagataataaagtttatctcacacgattgcaggaatatggaaaaacttcttacaaagagcactaagtcaatgtcagcctcctctaattttcacaggtgttttggtccttgaagactgtaagccaatactttttacaaaacacaggtattctaaatttttgctgtaaaactgacctcctcaacacttacatggagccttgtatttaagaactttattttacagtccttgaatatatctgagtattccagatgactcacatgaatattcaaggccattgaggtgttatgttacattaggtgaatatcttctctaataaagttgtctacacaacgtcaggtaactttgatttggtcagctcagtaggaaaaactcaactactgcttaaacttatgtgtggttcctgatttaacttgtaattttggtcaaagtggtagatctggtaactttaggctgactcctcatgaac

SEQ ID NO: 152700 - DNA, 571 bp, Homo sapiens
gaattctagagacagaagactccacctactatggtaaatctgtggagaaagaagtcaacctggttcatgctttagttactttaagaatttgctcctggcccagcgcggtggcttagagctttagtcgcagcactttgggaggctgaggcaggcggatcacctgagatcaggagtctgagaccagcctggccarcatggcgagatccaactctactaaaatagcttctatctgtataatgaaaagaactttttaatggaatatcaggagaagctagaaaaataaaaccatcaagtttattaatacagacacttctagtttacagaatttcaagtctacatgtggtaactttcttccactgaaatttatttatgaaaataaatttggtgtacattatttggaagtctattgatgttcttgctgaaaaatgatttcataaaaaataataatgcttatctttgtgcttgatagagtctacttgataggtcaaataggaaatatttacatttctaatagctgggctggttgcagtggttcatgcctgttatcccggcactttgggaggccgaggcg

SEQ ID NO: 152701 - DNA, 437 bp, Homo sapiens
cactccagcctgggtgacagagcaagaattatgattattcttgagtttattttccaaagttgatttttttatttatataaaaattcaaatatatattttgtttgtttaccagggaaattatttacattagtaaaaagatctaatcttttacatccaattttgctttcctgttaaattgtatttcccttcarataatcaatgttcttcaccaaatcttcttttctacccaaaaatatctttttttctatataaactaaggtgagagattttcttagacaccatactttatcttctgtgttgctatttttcagtacagcattacatattcacacctacacatacactcaaacatttcttcaaaaatcagttgaaaaaattaaaataaagtataaatgtcagaaagtggataattccctttacaggttcaaagtaaaatg

SEQ ID NO: 152702 - DNA, 437 bp, Homo sapiens
cactccagcctgggtgacagagcaagaattatgattattcttgagtttattttccaaagttgatttttttatttatataaaaattcaaatatatattttgtttgtttaccagggaaattatttacattagtaaaaagatctaatcttttacatccaattttgctttcctgttaaattgtatttcccttcaaataatcaatgttcttcaccaaatcttcttttctacccaraaatatctttttttctatataaactaaggtgagagattttcttagacaccatactttatcttctgtgttgctatttttcagtacagcattacatattcacacctacacatacactcaaacatttcttcaaaaatcagttgaaaaaattaaaataaagtataaatgtcagaaagtggataattccctttacaggttcaaagtaaaatg

SEQ ID NO: 152703 - DNA, 480 bp, Homo sapiens
ctttaaactggggtggatgctaaaagactcctcaaatcttccttgcaactattagcttagaatccaggccatttttttttttcaaaatatatccaaatgactttaatcaactcttattttttaaccacagtgcccacaaaaccaaatattattacttttctattctttcaaaaatcatgccatatgaaaaaccaataaaggcacaatattttatgtattaaacttagcaraaagccctgtgaaattttacattagtattacaatgtgttaatgacaaaaagcaaagtggatttacaaatctaatgttgaaaaatacacctggaactctatcttactttaataaagaaggggggtgtcttttcaagagcttaatttccaaaattgaaagaaaatatacatataattactagataatttaagaaatgaggtggcagatggtaattatacttattattgagctatcagcctacaaaatagtag

SEQ ID NO: 152704 - DNA, 546 bp, Homo sapiens
gagttggggcagaggactggaaagctggaaagccttattataatctacattaaatatctatttggtgttcttaggggtgtgtacaaacttcaatcatgttttttcagtcaaattctcacatccatacaattacattctgcatatctagaaatgtgacatgattcaattaagaacaggggactttatcctattccatctttcattggagyacattaagaacttagaaaaggacattactgtacctcattcaggccagaggtccatcgctgttgagagattttcctaatttctccaaacctttaattttctagtagaaataagcaaaatggtgcccatggtgccccagtggtcttgatgacttatgattccttcgggatcttatttactatttgggggtaacctagattttgcaggcaataagactagcttggtttttagcatcttaaaattcatgtgatgtatgctgtgacatttatttaaaagcaaatccactgaaaaagtgagggaaaacacattcatcattgttgtaattttattgtttctctc

SEQ ID NO: 152705 - DNA, 551 bp, Homo sapiens
tatgaaacaactcataacaacttttcagaaaattgcacatttgaagatccaattttgttytttcacacaaccactgaaacagtctcctttctgatcaccaggcaatttcccaatctccttaaaatttatctttctaaacaatttcttccagaaaagcttttggcaataatttaacacttcagtctgccctagtgagttgggtgaattagaaaagtctgaaaatagattgcagtgaaaataaagcagggggaccaagcccttacctgagtgtcaatgcctccctggtgagagctttgctccatcacattcaaagataaactcaataagtgaagacatgttgcttttaatttttgtgcttagcttttagcactcactgataaagcatgcaaataactaacctataatgcttcacccacataattctaattgttttaaaaagactaaatttgaaatcaatattggctatttttttgcatacctatgaggtgagtgtgtgtatgagacacagtgagatagcataactaacaacacactatctgggatctgactat

SEQ ID NO: 152706 - DNA, 601 bp, Homo sapiens
tccttgttgtcttttgataaggttttcacttgtctgttaagaaataagaacgttaaatgcaatgactttataaaattaaattatttctttttcaaaggattgccttttattctttctttttcatgaagatgttcttttttaaaattaaatgatgatgtcagacaagagaaagttataaagagcatccaaattggaaacaaaaaagtcaaattatccttatttgcagatgatatgatcttatatttggtaaaacctaaagactytacaggaaaactattagaactgataaagaaatttagtaaattttcaggatacaaaatcaacatacaaaaatcagtagcatttctatatgccaacagtgaacaatgtgaaaaagaaattaaaaagcaatcccatttatagtagccacacataaaattagataatacctagaaattaaccaaagaaacgaaagacttctgtaatgaaaactataaaaccctgatgaaagacattgaagagaacaccaaaaaatgggaaagtatttcatgttcatggattaaaagaatcaatattgttaaaatgtccatattacccaaagcaatctacagattcaatgaac

SEQ ID NO: 152707 - DNA, 534 bp, Homo sapiens
tatccaggtggcaggtgagggtgaccaagctttgcaggcagaggaactaatatgtacaggcttccaaggctggaagaagcatgggtattgactgaagtgaaataaggtccatatggctactaggtgtaaaaggaggggaaaatagtatgacatgagattaggtaaaacagatcataccgagactcaaaatccatgtcagggcttttcaactttatttgaagaacaactggaattcacaaactatttcagacaaaggtatagcattattgaattggcattataaaagatcagtctagccattggagaatgaattaaaaggaatgtaaaatagatgcattgrgaccagttgaaagatgtttgctgtattctaagcaaagaagcattttggcttggactaatgtggtagaaaggagatgaagagaagaaaactgaatcaagaaatacagtcaaggtagaagagacaggacatgacaattgattaaatgaaataaggatagggaagtagggatgaaggataaaggttaaaattaaaaa

SEQ ID NO: 152708 - DNA, 543 bp, Homo sapiens
tttcttgcccaaaatcacagttaggaaatgatggagttgtctccagattttatattcttaatcaatatgtttttgttttttcatgaaatatgaaatcatgaatgatatttatttatttatttatttattttgcctgaagtatctcctttaacatgtcttgtagtgcaggttgcctggtgatgagttctttcatcttttgtatgtctaaaaacactttactttgtctttattttctgctaggcatattcattgggtatagaattctagatttacagtgtcccctttcccaatacttaaaatatactgctccactgtcttcttacttgcattatttccaataagaaatctgatatgattcctaggtttgtttctttctgcataacatgtctttttctcyggtgcttttatgattttctctctatcactgcttttaagcaattttgattaagctatacattggtattgttttattcatgtttcttgatttgagtttcattgagattcttgaatatgtggatcaacattttccatcaggcctggcag

SEQ ID NO: 152709 - DNA, 543 bp, Homo sapiens
aaatccctgacttacttgaaaaagagttcactaggttggttattaagctaaggcatcagagaaaggtgaagcccaatgtaaggatattaaaaaaaaaaagatacaagaagtaaagggagaaatattcaatgaactagatagcataaataaaaaacaatcaaaactttaggaaataatggacatacttatagaaatataaaatgctctggaaagtcttagcaatagaattgaacaagtagaagaaggaaattcagagcctgaagacaaggtcttctaattaaccgaatccaataaagasaaagaaaaaagaataagaaaatatgaagaaagccttcaagaaatctggaattatgttaaatgaccaaacctaagaataaccagcattcctgaggaagaagagaaatctaaacgtttgttaaacatatttgggggaataattgaggaaaacttccccagctttgctagagacctagatccaaatacaagaagcacaaagaacatctgggaaattcatcacaaaaagatcgtcatctaggcacattg

SEQ ID NO: 152710 - DNA, 543 bp, Homo sapiens
aaatccctgacttacttgaaaaagagttcactaggttggttattaagctaaggcatcagagaaaggtgaagcccaatgtaaggatattaaaaaaaaaaagatacaagaagtaaagggagaaatattcaatgaactagatagcataaataaaaaacaatcaaaactttaggaaataatggacatacttatagaaatataaaatgctctggaaagtcttagcaatagaattgaacaagtagaagaaggaaattcagagcctgaagacaaggtcttctaattaaccgaatccaataaagacaaagaaaaaagaataagaaaatatgaagaaagccttcaagaaatctggaattatgttaaatgaccaaacctaagaataaccrgcattcctgaggaagaagagaaatctaaacgtttgttaaacatatttgggggaataattgaggaaaacttccccagctttgctagagacctagatccaaatacaagaagcacaaagaacatctgggaaattcatcacaaaaagatcgtcatctaggcacattg

SEQ ID NO: 152711 - DNA, 543 bp, Homo sapiens
aaatccctgacttacttgaaaaagagttcactaggttggttattaagctaaggcatcagagaaaggtgaagcccaatgtaaggatattaaaaaaaaaaagatacaagaagtaaagggagaaatattcaatgaactagatagcataaataaaaaacaatcaaaactttaggaaataatggacatacttatagaaatataaaatgctctggaaagtcttagcaatagaattgaacaagtagaagaaggaaattcagagcctgaagacaaggtcttctaattaaccgaatccaataaagacaaagaaaaaagaataagaaaatatgaagaaagccttcaagaaatctggaattatgttaaatgaccaaacctaagaataaccagcattcctgaggaagaagagaaatctaaacgtttgttaaacatatttgggggaataattgaggaaaacttccccagctttgctagagacctagatccaaatacaagaagcacaaagaacatctgggaaattcatcrcaaaaagatcgtcatctaggcacattg

SEQ ID NO: 152712 - DNA, 534 bp, Homo sapiens
ccacataaaattcattttaatgcacgtgtttwtgcatagctttctatttttctcttttctctttatattccaaattctaatcagagaagggaatcccctctgtacctccaggatattcagtaaagaccactggaggttcatgccctagtgacagtgctcatttagctccaaattacagatggctctagactaactccacaaagtttaaagagaagatttaaaacaacaacagacaaatacgcatcctgaagttactgaactgcctgccacaacattgttcaaaggtagccaataaaatctagatattcaatagcataacatcaaaatacccccccaaaaaaactctgacatgcaaagaagccgtaagatatataaaattaagatatatattaacaggataaaaataagtcatttataaatgacagaaaagaaggaaatttcaaggtccttaaagtaaatatattttataaatacatatagataaatacatgtatatgtcaaggtacttaaatgaaaattgaacatagcagaaaa

SEQ ID NO: 152713 - DNA, 534 bp, Homo sapiens
ccacataaaattcattttaatgcacgtgtttttgcatagctttctatttttctcttttctctttatattccaaattctaatcagagaagggaatcccctctgtacctccaggatattcagtaaagaccactggaggttcatgccctagtracagtgctcatttagctccaaattacagatggctctagactaactccacaaagtttaaagagaagatttaaaacaacaacagacaaatacgcatcctgaagttactgaactgcctgccacaacattgttcaaaggtagccaataaaatctagatattcaatagcataacatcaaaatacccccccaaaaaaactctgacatgcaaagaagccgtaagatatataaaattaagatatatattaacaggataaaaataagtcatttataaatgacagaaaagaaggaaatttcaaggtccttaaagtaaatatattttataaatacatatagataaatacatgtatatgtcaaggtacttaaatgaaaattgaacatagcagaaaa

SEQ ID NO: 152714 - DNA, 534 bp, Homo sapiens
ccacataaaattcattttaatgcacgtgtttttgcatagctttctatttttctcttttctctttatattccaaattctaatcagagaagggaatcccctctgtacctccaggatattcagtaaagaccactggaggttcatgccctagtgacagtgctcatttagctccaaattacagatggctctagactmactccacaaagtttaaagagaagatttaaaacaacaacagacaaatacgcatcctgaagttactgaactgcctgccacaacattgttcaaaggtagccaataaaatctagatattcaatagcataacatcaaaatacccccccaaaaaaactctgacatgcaaagaagccgtaagatatataaaattaagatatatattaacaggataaaaataagtcatttataaatgacagaaaagaaggaaatttcaaggtccttaaagtaaatatattttataaatacatatagataaatacatgtatatgtcaaggtacttaaatgaaaattgaacatagcagaaaa

SEQ ID NO: 152715 - DNA, 534 bp, Homo sapiens
ccacataaaattcattttaatgcacgtgtttttgcatagctttctatttttctcttttctctttatattccaaattctaatcagagaagggaatcccctctgtacctccaggatattcagtaaagaccactggaggttcatgccctagtgacagtgctcatttagctccaaattacagatggctctagactaactccacaaagtttaaagagaagatttaaaacaacaacagacaaatackcatcctgaagttactgaactgcctgccacaacattgttcaaaggtagccaataaaatctagatattcaatagcataacatcaaaatacccccccaaaaaaactctgacatgcaaagaagccgtaagatatataaaattaagatatatattaacaggataaaaataagtcatttataaatgacagaaaagaaggaaatttcaaggtccttaaagtaaatatattttataaatacatatagataaatacatgtatatgtcaaggtacttaaatgaaaattgaacatagcagaaaa

SEQ ID NO: 152716 - DNA, 245 bp, Homo sapiens
agacaactcactaaaaacataaagagaaaaatacaagtttaaaataattaaccagaagaagacgactctagagtttttaaatygctgataagattttaatttgctccaagttgaaaataattatattgcttgtgttttaaggcacataatgagcaattatatcacacatgatagtttcagcagtaaaatattatcagttaacagctggaactcataaaagcatagcactatgtgaagacggaatt

SEQ ID NO: 152717 - DNA, 245 bp, Homo sapiens
agacaactcactaaaaacataaagagaaaaatacaagtttaaaataattaaccagaagaagacgactctagagtttttaaattgctgataagattttaatttgctccaagttgaaaataattataytgcttgtgttttaaggcacataatgagcaattatatcacacatgatagtttcagcagtaaaatattatcagttaacagctggaactcataaaagcatagcactatgtgaagacggaatt

SEQ ID NO: 152718 - DNA, 481 bp, Homo sapiens
tgtcaactggtggagagttttccccaggagacatttgtcaatgtctagkgttattgtggggatgtcaagactggtggaggtgtgaaatttagaggtcaaacgaaacacctagcattgctagggcagcctcccacagcaaagaatcctctggtcctaaaggtaagtagcaccaaggttgagaaaccataatctagacagtaaacactacgtagctattccaagtgctcaggaaaacacatcagtgccctcggggggaaaagtgtgaacattttaattgccgtacatggtgacacaaatccatgttgttaatctaagtggaaggggctgaagcacaaaacgtaattcaaagagtttacttaagccaaaatgaggacagctgcctggaagaaacagacccaagtatccttggatatgaactccctttggagctttgcaacaagcagtttcttaaaggcaaaaaagggtccagaagtgggatgat

SEQ ID NO: 152719 - DNA, 481 bp, Homo sapiens
tgtcaactggtggagagttttccccaggagacatttgtcaatgtctagtgttattgtggggatgtcaagactggtggaggtgtgaaatttagaggtcaaacgaaacacctagcattgctagggcagcctcccacagcaaagaatcctctggtcctaaaggtaagtagcaccaaggttgagaaaccrtaatctagacagtaaacactacgtagctattccaagtgctcaggaaaacacatcagtgccctcggggggaaaagtgtgaacattttaattgccgtacatggtgacacaaatccatgttgttaatctaagtggaaggggctgaagcacaaaacgtaattcaaagagtttacttaagccaaaatgaggacagctgcctggaagaaacagacccaagtatccttggatatgaactccctttggagctttgcaacaagcagtttcttaaaggcaaaaaagggtccagaagtgggatgat

SEQ ID NO: 152720 - DNA, 481 bp, Homo sapiens
tgtcaactggtggagagttttccccaggagacatttgtcaatgtctagtgttattgtggggatgtcaagactggtggaggtgtgaaatttagaggtcaaacgaaacacctagcattgctagggcagcctcccacagcaaagaatcctctggtcctaaaggtaagtagcaccaaggttgagaaaccataatctagamagtaaacactacgtagctattccaagtgctcaggaaaacacatcagtgccctcggggggaaaagtgtgaacattttaattgccgtacatggtgacacaaatccatgttgttaatctaagtggaaggggctgaagcacaaaacgtaattcaaagagtttacttaagccaaaatgaggacagctgcctggaagaaacagacccaagtatccttggatatgaactccctttggagctttgcaacaagcagtttcttaaaggcaaaaaagggtccagaagtgggatgat

SEQ ID NO: 152721 - DNA, 481 bp, Homo sapiens
tgtcaactggtggagagttttccccaggagacatttgtcaatgtctagtgttattgtggggatgtcaagactggtggaggtgtgaaatttagaggtcaaacgaaacacctagcattgctagggcagcctcccacagcaaagaatcctctggtcctaaaggtaagtagcaccaaggttgagaaaccataatctagacagtaaacactaygtagctattccaagtgctcaggaaaacacatcagtgccctcggggggaaaagtgtgaacattttaattgccgtacatggtgacacaaatccatgttgttaatctaagtggaaggggctgaagcacaaaacgtaattcaaagagtttacttaagccaaaatgaggacagctgcctggaagaaacagacccaagtatccttggatatgaactccctttggagctttgcaacaagcagtttcttaaaggcaaaaaagggtccagaagtgggatgat

SEQ ID NO: 152722 - DNA, 308 bp, Homo sapiens
gatgaacacacagctcaaagaggagcaggacagaactgctgtstcatttgaatatctctctgggcctgattatttaaaaggacttgcatttctcacatgaaagttattttcttttctcaatgtccataaatgagaataaatagacgtaaaatagatcttttcgaggatgaagtaaatggaatgaaaaacaaaacccaagctgaccagaaatcatagagggaagaaaaggttataaatatatggatttgtcagagtgattttaagctattaggaatcagttaaatgttgggggattttgtctgagaatg

SEQ ID NO: 152723 - DNA, 308 bp, Homo sapiens
gatgaacacacagctcaaagaggagcaggacagaactgctgtctcatttgaatatctctctgggcctgattatttmaaaggacttgcatttctcacatgaaagttattttcttttctcaatgtccataaatgagaataaatagacgtaaaatagatcttttcgaggatgaagtaaatggaatgaaaaacaaaacccaagctgaccagaaatcatagagggaagaaaaggttataaatatatggatttgtcagagtgattttaagctattaggaatcagttaaatgttgggggattttgtctgagaatg

SEQ ID NO: 152724 - DNA, 308 bp, Homo sapiens
gatgaacacacagctcaaagaggagcaggacagaactgctgtctcatttgaatatctctctgggcctgattatttaaaaggacttgcatttctcacatgaaagttattttcttttctcaatgtccataaatgagaataaatagacgtaaaatagatcttttcgaggatgaagtaaatggaatgaaaaacaaaacccaagctgaccagaaatcatagagggaagaaaaggttataaatatatggatttktcagagtgattttaagctattaggaatcagttaaatgttgggggattttgtctgagaatg

SEQ ID NO: 152725 - DNA, 308 bp, Homo sapiens
gatgaacacacagctcaaagaggagcaggacagaactgctgtctcatttgaatatctctctgggcctgattatttaaaaggacttgcatttctcacatgaaagttattttcttttctcaatgtccataaatgagaataaatagacgtaaaatagatcttttcgaggatgaagtaaatggaatgaaaaacaaaacccaagctgaccagaaatcatagagggaagaaaaggttataaatatatggatttgtcaragtgattttaagctattaggaatcagttaaatgttgggggattttgtctgagaatg

SEQ ID NO: 152726 - DNA, 249 bp, Homo sapiens
tactgtaacatctttctgattttaggagaggtagcagttccccgtttagcctaaacgctatttttttttaaagctcagccaagagactccattataattttcaaatgtgtgtaacttaaattctcatatgaaatrccactatgcttaaattagtcaaaacattttccccatctacaactctatcttttcattgcaatcattttcacaaaagtgactgcagctcacagaccctaaaaggagaaaatccag

SEQ ID NO: 152727 - DNA, 249 bp, Homo sapiens
tactgtaacatctttctgattttaggagaggtagcagttccccgtttagcctaaacgctatttttttttaaagctcagccaagagactccattataattttcaaatgtgtgtaacttaaattctcatatgaaataccactatgcttaaattagtcaaaacattttccccatctacaactctatcttktcattgcaatcattttcacaaaagtgactgcagctcacagaccctaaaaggagaaaatccag

SEQ ID NO: 152728 - DNA, 455 bp, Homo sapiens
gcattctaagttcactcaacctaggagggagaaacataattttaaattaagagctgaagcattcttgtcctaacaaaaagcaaggaaaacgaaatatcacaccacaggagggatttcacaaattagtgtcaacatcaaaaccttaaaataggcaaggaraatgcagatttacaatgaactcttgtacttgttttgttcagagaagagatggttctgagagaatgacagtgaactaaccccagctggtttaattgatgctttcaactgctgcttctgatcaactccttcagctagaataaattgatgaggattttggcatgtggtattagagatggttattaattttttcctcttatttgcattgttcaatgtagtaaatactagctgtatagggctacttcaattcaaattaattacaatgaaatatacttaaatattgcattttttagtcactg

SEQ ID NO: 152729 - DNA, 455 bp, Homo sapiens
gcattctaagttcactcaacctaggagggagaaacataattttaaattaagagctgaagcattcttgtcctaacaaaaagcaaggaaaacgaaatatcacaccacaggagggatttcacaaattagtgtcaacatcaaaaccttaaaataggcaaggaaaatgcagatttacaatgaactcttgtacttgttttgttcagagaagagatggttctgagagaatgacagtgaactaaccccagctggtttarttgatgctttcaactgctgcttctgatcaactccttcagctagaataaattgatgaggattttggcatgtggtattagagatggttattaattttttcctcttatttgcattgttcaatgtagtaaatactagctgtatagggctacttcaattcaaattaattacaatgaaatatacttaaatattgcattttttagtcactg

SEQ ID NO: 152730 - DNA, 455 bp, Homo sapiens
gcattctaagttcactcaacctaggagggagaaacataattttaaattaagagctgaagcattcttgtcctaacaaaaagcaaggaaaacgaaatatcacaccacaggagggatttcacaaattagtgtcaacatcaaaaccttaaaataggcaaggaaaatgcagatttacaatgaactcttgtacttgttttgttcagagaagagatggttctgagagaatgacagtgaactaaccccagctggtttaattgrtgctttcaactgctgcttctgatcaactccttcagctagaataaattgatgaggattttggcatgtggtattagagatggttattaattttttcctcttatttgcattgttcaatgtagtaaatactagctgtatagggctacttcaattcaaattaattacaatgaaatatacttaaatattgcattttttagtcactg

SEQ ID NO: 152731 - DNA, 558 bp, Homo sapiens
tttttttacagattgaatgcattaagtcmatttattatttatgatgaatttatttatgtatttattttcgctatcacaagtagaaaaagcctataagttgctatgccaaaaacctgcctctagatggcaaacaaaccccgcaatacacaaaagagagccaaattcttagaaaccctgggaaaggaagagggctactgtcccattaacaacttggagcccttaaggcaagaatgaggtggaccatctggaacatctgggaggagacaccagggtgcggagtagtggggaacctgctctgtgctctgagactgaaagcccagccttgcctctcaccactgccttgactgtgtccccatctgctgtgaagtgaatggtgtcttctaaattcatgctgagccctaattgctgaaaagtgtaagacatgcaatggggggattatgtgcatcttcctgacaccaacatgatgctcaggaaggagacttcttgttttctcttaggattcttttactaaccaagattttgcctctactgcatatttccctttgctgattgtccctc

SEQ ID NO: 152732 - DNA, 558 bp, Homo sapiens
tttttttacagattgaatgcattaagtccatttattatttatgatgaatttatttatgtatttattttcgctatcacaagtagaaaaagcctataagttgctatgccaaaaacctgcctctagatggcaaacaaaccccgcaatacacaaaagagagccaaattcttagaaaccctgggaaaggaagagggctactgtcccattaacaacttggagcccttaaggcaagaatgaggtggamcatctggaacatctgggaggagacaccagggtgcggagtagtggggaacctgctctgtgctctgagactgaaagcccagccttgcctctcaccactgccttgactgtgtccccatctgctgtgaagtgaatggtgtcttctaaattcatgctgagccctaattgctgaaaagtgtaagacatgcaatggggggattatgtgcatcttcctgacaccaacatgatgctcaggaaggagacttcttgttttctcttaggattcttttactaaccaagattttgcctctactgcatatttccctttgctgattgtccctc

SEQ ID NO: 152733 - DNA, 574 bp, Homo sapiens
cttccacagagccacgttcattccatagaggaacccacyacctataaaaccagaaaagagacaaagccagaagtgcagggtggatttcttaacacaagctcactgcgacctctactcctcatcacgctgacactaagcttaaacccagacccttctacagttttgtctacaaagcacaatttgcccaaagcctttacaaacaccaacagcctttctttcagatatggcagcagggtcacatcttacacggccctgaccacattttgtctcctctgccatccccatctctctgactcagtcttcgcttgcagccataaaaaaggatgagttcatgtcctttgtagggacatggatgaagctggaaaccatcattctcagcaaactatcgcaaggacaaagaaaccaatcactgcatgttctcactcacaggtgggaattgaacaatgagaacacatggacacaggaaggggaacatcacacaccagggcctgtcgtggggtggggggaggggggggagggataggattaggaggtacacctaatgtaaatgatgagttaatgggtgcagcacacc

SEQ ID NO: 152734 - DNA, 491 bp, Homo sapiens
catatgactgttaatatctcacataacattctgagttactcaagaatgcataaaaggggcactagatactcttctcatgtatgtgtgtgtgtctgtctatacatgtatgtacacttcatggtgcatcagctggcagaaccctcaggacaccccttcacatcctcagtgccccatttcacacatgaggaaactgttcatgacagcacatggctgatttgcataaaagtcacttggtcagcagttgttgaagctgaacttggaatctaggtctatctgaccttaactatgttccttccacagagccacgttcattccatagaggaacccaccacctataaaaccagraaagagacaaagccagaagtgcagggtggatttcttaacacaagctcactgcgacctctactcctcatcacgctgacactaagcttaaacccagacccttctacagttttgtctacaaagcacaatttgcccaaagcctttacaaa

SEQ ID NO: 152735 - DNA, 574 bp, Homo sapiens
cttccacagagccacgttcattccatagaggaacccaccacctataaaaccagaaaagagacaaagccagaagtgcagggtggatttcttaacacaagctcactgcgacctctactcctcatcacgctgacactaagcttaaacccagacccttctacagttttgtctacaaagcacaatttgcccaaagcctttacaaacaccaacagcctttctttcagatatggcagcagggtcacatcttacacggccctgaccacattttgtctcctctgccatccccatctctctgactcagtcytcgcttgcagccataaaaaaggatgagttcatgtcctttgtagggacatggatgaagctggaaaccatcattctcagcaaactatcgcaaggacaaagaaaccaatcactgcatgttctcactcacaggtgggaattgaacaatgagaacacatggacacaggaaggggaacatcacacaccagggcctgtcgtggggtggggggaggggggggagggataggattaggaggtacacctaatgtaaatgatgagttaatgggtgcagcacacc

SEQ ID NO: 152736 - DNA, 574 bp, Homo sapiens
cttccacagagccacgttcattccatagaggaacccaccacctataaaaccagaaaagagacaaagccagaagtgcagggtggatttcttaacacaagctcactgcgacctctactcctcatcacgctgacactaagcttaaacccagacccttctacagttttgtctacaaagcacaatttgcccaaagcctttacaaacaccaacagcctttctttcagatatggcagcagggtcacatcttacacggccctgaccacattttgtctcctctgccatccccatctctctgactcagtcttcgcttgcagccataaaaaaggatgagttcatgtcctttgtagggacatggatgaagctggaaaccatcattctcagcaaactatcrcaaggacaaagaaaccaatcactgcatgttctcactcacaggtgggaattgaacaatgagaacacatggacacaggaaggggaacatcacacaccagggcctgtcgtggggtggggggaggggggggagggataggattaggaggtacacctaatgtaaatgatgagttaatgggtgcagcacacc

SEQ ID NO: 152737 - DNA, 326 bp, Homo sapiens
aaaacacaccccttccccttgcattggtttcctgttgctgcygtaacaaattaccacaaccttactgctccccataacacaagtgtattatcttacatttctggaggtcagaagtctcaatgaagtaaaatcaaggagtaatagggctctattcattctaggcttcaagagagagaatccaatatcgagcattccatctttctgatgttcccacattcctagcagcatggccccttcctccatcactccagtttccctgtccgttgtcccaggtcctctctggctgttaccttcctccctccctattataaggacccttgtgatta

SEQ ID NO: 152738 - DNA, 299 bp, Homo sapiens
gaaaccaaggaaaactcctaagctcctgatctatgctgcatccagtctgcaaagtgggattccctctcggttcagtgacagtggatctgggacagattacactctcaccatcagcagcctgcagcctgaagattttgcaacctattactgtcaacagagtgacagtamccctcccacagtgttacaagtcataacataaaccccaaggaagcagatgtgtgaggctgggctgccccaatgctccttctggtgcctctatctgctgagggaagttctcaaactcagtcaggtttggaaag

SEQ ID NO: 152739 - DNA, 299 bp, Homo sapiens
gaaaccaaggaaaactcctaagctcctgatctatgctgcatccagtctgcaaagtgggattccctctcggttcagtgacagtggatctgggacagattacactctcaccatcagcagcctgcagcctgaagattttgcaacctattactgtcaacagagtgacagtaaccctcccacagtgttacaagtcataacataaaccccaaggaagcagatgtgtgaggctgggctgccccartgctccttctggtgcctctatctgctgagggaagttctcaaactcagtcaggtttggaaag

SEQ ID NO: 152740 - DNA, 554 bp, Homo sapiens
ggctgccccaatgctccttctggtgcctctatctgctgagggaagttctcaaactcagtcaggtttggaaagtcatcgggagattttcctagaggaggccagggaggttcctctgaaccctaagcctctttcgccctcatccccagcagaaaagacgtgacaatgcctgtcctgactgaataaagaagagagataagtccagctgaggagtctgtgttatgggataatcggaatttgtacagcaaaagagaagctattctcagtatttcaaggagaaattattcaagttgaataaattagagtctaarccacagtctttccgaagcctatggagtgttattcatgaagcaggtactagacacaggggattctcaggtgctacttcagaagccaggatgcacctgcccctggtggtatgtgctgaacaccgtgtgatgatcctcagtcctgtctgggaagcccagggctgggggtgctgatgctctcagctgcctgcagcacatctccaggtgattctccagtccacacctaactgcatgtgttttacttcaggt

SEQ ID NO: 152741 - DNA, 554 bp, Homo sapiens
ggctgccccaatgctccttctggtgcctctatctgctgagggaagttctcaaactcagtcaggtttggaaagtcatcgggagattttcctagaggaggccagggaggttcctctgaaccctaagcctctttcgccctcatccccagcagaaaagacgtgacaatgcctgtcctgactgaataaagaagagagataagtccagctgaggagtctgtgttatgggataatcggaatttgtacagcaaaagagaagctattctcagtatttcaaggagaaattattcaagttgaataaattagagtctaaaccacagtctttccgaagcctatggagtgttattcatgaagcaggtactagacacaggggattctcaggtgctacttcagaagccaggatgcacctgcccctggyggtatgtgctgaacaccgtgtgatgatcctcagtcctgtctgggaagcccagggctgggggtgctgatgctctcagctgcctgcagcacatctccaggtgattctccagtccacacctaactgcatgtgttttacttcaggt

SEQ ID NO: 152742 - DNA, 253 bp, Homo sapiens
tggacctctctgagtggtcaaaaactgaagatatttgtaccctgtgtgagtgttgaccaacaagtgacttcagcagaggaggattttgataatcaagtggataagatgacccgttctgtggataccactcagcctctttcctcagacacccctgtcattgtccaatragcccatgaacatagtggccatggtggcagggatggaggttatgcatggattcagcaatgtggacttccactcaccaaggctgaac

SEQ ID NO: 152743 - DNA, 580 bp, Homo sapiens
ttaaaagagaaaaaatgaggtaaaggtaaatgtacagaatttaattactttttcttctataaaacccgagtcagtaccaagaagagtcaatttattagttttctaaaataaaaaaaatcaaaatcaccaaaaaagagcaatatccaagaaaacattgaaaaggaaacacaacatttagtaagaatagaaaacttgggcactgtatcaccctgttcctagataccgatttactgatgrccatttaaatagaattttattctatctaattcatttatactcccagagtttgaaattacattttacctacaataaatgagataacacttgtaaattatatggtactctgcctaacacacgttaataactcaatagatgttagcaataaacttttagtatagtagtcaaagtattaatttctcacattgcaatttccttcaaagacataaatacaacctttctaatgactccttgttcatcaagatacctcttcaaattattctatttgtttcattcagtatattatctgtgtataccgatattacactcttttctttttttgagatggaatctcattctgtta

SEQ ID NO: 152744 - DNA, 580 bp, Homo sapiens
ttaaaagagaaaaaatgaggtaaaggtaaatgtacagaatttaattactttttcttctataaaacccgagtcagtaccaagaagagtcaatttattagttttctaaaataaaaaaaatcaaaatcaccaaaaaagagcaatatccaagaaaacattgaaaaggaaacacaacatttagtaagaatagaaaacttgggcactgtatcaccctgttcctagataccgatttactgatggccatttaaatagaattttattctatctaattcatttatactcccagagttygaaattacattttacctacaataaatgagataacacttgtaaattatatggtactctgcctaacacacgttaataactcaatagatgttagcaataaacttttagtatagtagtcaaagtattaatttctcacattgcaatttccttcaaagacataaatacaacctttctaatgactccttgttcatcaagatacctcttcaaattattctatttgtttcattcagtatattatctgtgtataccgatattacactcttttctttttttgagatggaatctcattctgtta

SEQ ID NO: 152745 - DNA, 580 bp, Homo sapiens
ttaaaagagaaaaaatgaggtaaaggtaaatgtacagaatttaattactttttcttctataaaacccgagtcagtaccaagaagagtcaatttattagttttctaaaataaaaaaaatcaaaatcaccaaaaaagagcaatatccaagaaaacattgaaaaggaaacacaacatttagtaagaatagaaaacttgggcactgtatcaccctgttcctagataccgatttactgatggccatttaaatagaattttattctatctaattcatttatactcccagagtttgaaattacattttacctacaataaatgagataacacttgtaaattatatggtactctgcctaacacacgttaataactcaatasatgttagcaataaacttttagtatagtagtcaaagtattaatttctcacattgcaatttccttcaaagacataaatacaacctttctaatgactccttgttcatcaagatacctcttcaaattattctatttgtttcattcagtatattatctgtgtataccgatattacactcttttctttttttgagatggaatctcattctgtta

SEQ ID NO: 152746 - DNA, 620 bp, Homo sapiens
tacagaatttaattactttttcttctataaaacccgagtcagtaccaagaagagtcaatttattagttttctaaaataaaaaaaatcaaaatcaccaaaaaagagcaatatccaagaaaacattgaaaaggaaacacaacatttagtaagaatagaaaacttgggcactgtatcaccctgttcctagataccgatttactgatggccatttaaatagaattttattctatctaattcatttatactcccagagtttgaaattacattttacctacaataaatgagataacacttgtaaattatatggtactctgcctaacacacgttaataactcaatagatgttagcaataaacttttastatagtagtcaaagtattaatttctcacattgcaatttccttcaaagacataaatacaacctttctaatgactccttgttcatcaagatacctcttcaaattattctatttgtttcattcagtatattatctgtgtataccgatattacactcttttctttttttgagatggaatctcattctgttactgatgctggagtgaggtggcatgatctcggttcactgcaacctccacctcccaggttcaagcgattctcct

SEQ ID NO: 152747 - DNA, 580 bp, Homo sapiens
ttaaaagagaaaaaatgaggtaaaggtaaatgtacagaatttaattactttttcttctataaaacccgagtcagtaccaagaagagtcaatttattagttttctaaaataaaaaaaatcaaaatcaccaaaaaagagcaatatccaagaaaacattgaaaaggaaacacaacatttagtaagaatagaaaacttgggcactgtatcaccctgttcctagataccgatttactgatggccatttaaatagaattttattctatctaattcatttatactcccagagtttgaaattacattttacctacaataaatgagataacacttgtaaattatatggtactctgcctaacacacgttaataactcaatagatgttagcaataaacttttagtatagtagtcaaagtattaatttctcacattgcaatttccttcaaagacatraatacaacctttctaatgactccttgttcatcaagatacctcttcaaattattctatttgtttcattcagtatattatctgtgtataccgatattacactcttttctttttttgagatggaatctcattctgtta

SEQ ID NO: 152748 - DNA, 590 bp, Homo sapiens
tctaatcagttgtttttagtttgcagaaaaaacttcagcatgtgccaggaacacaacctcaccttgatcaggtaaagaaaaaaaatctaaatctraaattcctaatcaatgtttttaaaggacctctttaactagataggcaatgtttaggactattttattataaactttttctaaaatggtatttttgaactgtgttgataatttttggaatcttaaatgcttttgacatagtctaattctatttcttaacacataataggaattcatcaaaccagatttgttttagaatctgaggaaatcatgctttctagcctttccattctgtagattgcttagcatattggttagttctgatagggattactccttaaaagcagcctgggggttctataggcagtctgtttttaagtatgttgaattgtttaaggaaaggtctgatataagcatggcttatttaaataaaaattgacttggagtttcaccttcaggtagcactataaatttgaactccttaagatgtttttcatgctctaaaattctaatccctaaggtaaatatctaagatgctaggaacaatttaaatataa

SEQ ID NO: 152749 - DNA, 372 bp, Homo sapiens
taccatgccctgccctgccctgccctgactcagccctgactcagccttggccttggcattgcccctggtcctgccatatttcttgccctgtccctaccctagccttggccctgacccttaccttgctctggccctgcccttgccctaatgcrgcccctggccctgtcatgaccctgccctggacctgtcctggccctggcccttccctgcttgagaccttgccctggttctcccatggccctgaccctgaaatgcctggccctaccctggccttgccctgctctggcccttgccctgactctggtcctgtcactgacctagccccagccctgttgctggtcttaccatggcccagaccctgccttggccctg

SEQ ID NO: 152750 - DNA, 484 bp, Homo sapiens
gccttgtcctagacctggccatggccctgcrtctgccctggaccggcactggcactggcatggaccctggccctggcccttcactacttaaggccataccctggcccagccctggccctaatttggcctggctctaccctggcatgctattctggccctagccctgaccctgtccctgtccctgtcctggtcctagccccgttgctggtcctgccatggcccttgtcctgacattgccctttcctggttctggccctggccctgtcccagccctgctctggccctggtctgaaccctggccctgcaatagacctgccttggtcctgcccagaccctggctctggccctacctctgccctggccatacccttgccctggcctggaccccggtcctggtccttgtcctgccccagccgtggccctggccctgccctgcctgtgccctgttctatcctgggctggccctgccatggcctggtcttgc

SEQ ID NO: 152751 - DNA, 484 bp, Homo sapiens
gccttgtcctagacctggccatggccctgcgtctkccctggaccggcactggcactggcatggaccctggccctggcccttcactacttaaggccataccctggcccagccctggccctaatttggcctggctctaccctggcatgctattctggccctagccctgaccctgtccctgtccctgtcctggtcctagccccgttgctggtcctgccatggcccttgtcctgacattgccctttcctggttctggccctggccctgtcccagccctgctctggccctggtctgaaccctggccctgcaatagacctgccttggtcctgcccagaccctggctctggccctacctctgccctggccatacccttgccctggcctggaccccggtcctggtccttgtcctgccccagccgtggccctggccctgccctgcctgtgccctgttctatcctgggctggccctgccatggcctggtcttgc

SEQ ID NO: 152752 - DNA, 484 bp, Homo sapiens
gccttgtcctagacctggccatggccctgcgtctgccctggaccggcactggcactggcatggaccctggccctggcccttcrctacttaaggccataccctggcccagccctggccctaatttggcctggctctaccctggcatgctattctggccctagccctgaccctgtccctgtccctgtcctggtcctagccccgttgctggtcctgccatggcccttgtcctgacattgccctttcctggttctggccctggccctgtcccagccctgctctggccctggtctgaaccctggccctgcaatagacctgccttggtcctgcccagaccctggctctggccctacctctgccctggccatacccttgccctggcctggaccccggtcctggtccttgtcctgccccagccgtggccctggccctgccctgcctgtgccctgttctatcctgggctggccctgccatggcctggtcttgc

SEQ ID NO: 152753 - DNA, 551 bp, Homo sapiens
gcattttgggttgccaatgcaggaggattgcttgagcccaggagtttgagaccagcctgggcagaatagcaagactccatctctgcaaataataaaatattaaccaggtgtggtggtgcgcacctggggtcccagctacctgggaggctaaggtgggaggtttgcttgaggcttcagtgaactgtgaatgcaccatgcaccactgcattccagcctaggccacagaacaggaccttgtttataaataaagaaataagtaaaaatataaataaaaagtaaaaataactataagtaaatataaatataaaaatgcatacatgaaaagaaacaatttttaaatttaacatcastgagggcatcctatccatttcatttcatgattccattacatcatttcacttagatgaaatgatgacttgagatgaaatgatgagatgaaatgacgaaatgatgagatgagatgatgagatgaaattttgagatgaaatggtgagtagaaatgatgagatgaaatgatgagacgaaatgacaaaattgaaaagaaattgaaa

SEQ ID NO: 152754 - DNA, 551 bp, Homo sapiens
gcattttgggttgccaatgcaggaggattgcttgagcccaggagtttgagaccagcctgggcagaatagcaagactccatctctgcaaataataaaatattaaccaggtgtggtggtgcgcacctggggtcccagctacctgggaggctaaggtgggaggtttgcttgaggcttcagtgaactgtgaatgcaccatgcaccactgcattccagcctaggccacagaacaggaccttgtttataaataaagaaataagtaaaaatataaataaaaagtaaaaataactataagtaaatataaatataaaaatgcatacatgaaaagaaacaatttttaaatttaacatcagtgagggcatcctatccatttcatttcatgattccattacatcatttcacttagatgaaatgatgacttgagatgaaatgatgagatgaaatgacgaratgatgagatgagatgatgagatgaaattttgagatgaaatggtgagtagaaatgatgagatgaaatgatgagacgaaatgacaaaattgaaaagaaattgaaa

SEQ ID NO: 152755 - DNA, 551 bp, Homo sapiens
gcattttgggttgccaatgcaggaggattgcttgagcccaggagtttgagaccagcctgggcagaatagcaagactccatctctgcaaataataaaatattaaccaggtgtggtggtgcgcacctggggtcccagctacctgggaggctaaggtgggaggtttgcttgaggcttcagtgaactgtgaatgcaccatgcaccactgcattccagcctaggccacagaacaggaccttgtttataaataaagaaataagtaaaaatataaataaaaagtaaaaataactataagtaaatataaatataaaaatgcatacatgaaaagaaacaatttttaaatttaacatcagtgagggcatcctatccatttcatttcatgattccattacatcatttcacttagatgaaatgatgacttgagatgaaatgatgagatgaaatgacgaaatgatgagatgagatgatgagatgaaattttgagatgaaatggtgagtagaaatgatgagatgaaatgatgagacgaaatgacaaarttgaaaagaaattgaaa

SEQ ID NO: 152756 - DNA, 607 bp, Homo sapiens
tgtacaacaaattacactcttttacagaaaataataaaatatccaagtctctcaccaaattttcaaaaaagaggaaaagtgtaagcttccagatgaaagtttctatagctttccccaaatttagtaccaccatgaaaaagaaattcttcactcattcaaggcatacgactagaaaactaatttccatggcatcaaattaatttcctcctttggagataaaascatgagatcttttccaaagcattaaaatcgccaagaaaaaaaaaaaaagaaaaaaaagaccattaccagcattttaaaactgagtaagagaatgaagtaaacaaaaaagggaaagaaaaagcttcaaaagttcatttttctcctaatttcttgaactctctattccagaagtacctaatgtttttcttaaaagagaggctttcaatttttccctatgtctaaaggctgctttaagtagcttaagaccaaggacaggagagtgaaaacgaagagggttttggctctccaaggtgggggtggaattgcagctactgcttagggatattttccagtggtcatctcttcaaactccagtgagtctcacaaacagggtgcaccagccaat

SEQ ID NO: 152757 - DNA, 353 bp, Homo sapiens
aagtttaaaagtaaaaattaactttttaaaaaagtatacaaagtatattgtttctaaaacaggaaataagcatacccaaatacatctggaaccagaaaaaaattaaaaacagaaaaacaaaacttgctttaaaaaataattatgattttccttcaaacaataaatcacatatattccactcatacatcaataaaacatatatgcaaaaattcrcacaactgtcagattaagggctactttgtggttaataaaaagacgcttcactttagaaaaaatcattcataaatagtcagttatcctagtgatcttaaaaatgagtagatactcaaaatttttacggtggtcactttttt

SEQ ID NO: 152758 - DNA, 353 bp, Homo sapiens
aagtttaaaagtaaaaattaactttttaaaaaagtatacaaagtatattgtttctaaaacaggaaataagcatacccaaatacatctggaaccagaaaaaaattaaaaacagaaaaacaaaacttgctttaaaaaataattatgattttccttcaaacaataaatcacatatattccactcatacatcaataaaacatatatgcaaaaattcgcacaactgtcagattaagggctactttgtggttaataaaaagacgcttcactttagaaaaaatcattcataaatagtcagttatccyagtgatcttaaaaatgagtagatactcaaaatttttacggtggtcactttttt

SEQ ID NO: 152759 - DNA, 353 bp, Homo sapiens
aagtttaaaagtaaaaattaactttttaaaaaagtatacaaagtatattgtttctaaaacaggaaataagcatacccaaatacatctggaaccagaaaaaaattaaaaacagaaaaacaaaacttgctttaaaaaataattatgattttccttcaaacaataaatcacatatattccactcatacatcaataaaacatatatgcaaaaattcgcacaactgtcagattaagggctactttgtggttaataaaaagacgcttcactttagaaaaaatcattcataaatagtcagttatcctagtgwtcttaaaaatgagtagatactcaaaatttttacggtggtcactttttt

SEQ ID NO: 152760 - DNA, 590 bp, Homo sapiens
aacttatgataggcattatgccttttacagaggaggctttaaaagggtaaataagctccctaagaagacaatgagaaacagaccaaggattagaacccaagcagattccaaggtctgtgatcttcaacactacgcaacaatacctaccctccacatggagacattatatttttttatagtaaagtttaaggacattactattaaaataagatgaaatatgtggaaaaaatrtgaatttctttcttccacaatcattaatcatggcaaataatctcctaatgagccttacctttattgattcaatttataatatatactatatgaactgagatgacagattcaaaatctaatgtcagtagaacttataaatactaagaatagtaattttgagccaccatcacgctcaaagcattgtacacattaaagataaccaataataatagctaccgaatgtctctctgtatagggcttttattagttcaggtcttacaaaataattcaaaacaaagtccctgaactataacttcatttgaaaagtccatctttgttttcaaaaggaatgggagtctccagaacagtcagcaaaatga

SEQ ID NO: 152761 - DNA, 535 bp, Homo sapiens
acataatgtcataaaaacatagaagattacagttcagattttaggtattttccttcttacaaaactgttctggttctaaatattcattattacttattttaaaaaaaggataaccactgaaatatagtttcttagaatctaatatacttcccttcacaccaaacccccatattagaatctaaaatacttccctrcaccccagcccacaatcatgcaccacgtgaactcagtactaggcctttcaaacaccctagaaacaaataagtggtgggaaggctgattcagccctgattctagccaaaaagcagtttatcatttagaaacccatacttgctaatctggcctctcagtgcaactgtttattttactgacctctccagagtcaggctaactccaaaaaatattttgacactgacttagagcccaagtggtagtttccatctctctggaggcaagttttgttgtctgttttttttttttccccctcataatcctgtttacatccctaacgtcatcaacatcacaagcttcttct

SEQ ID NO: 152762 - DNA, 535 bp, Homo sapiens
acataatgtcataaaaacatagaagattacagttcagattttaggtattttccttcttacaaaactgttctggttctaaatattcattattacttattttaaaaaaaggataaccactgaaatatagtttcttagaatctaatatacttcccttcacaccaaacccccatattagaatctaaaatacttccctgcaccccagcccacaatcatgcaccacgtgaactcagtactaggcctttcaaacaccctagaaacaaataagtggtgggaaggctgattcagccctgattctagccwaaaagcagtttatcatttagaaacccatacttgctaatctggcctctcagtgcaactgtttattttactgacctctccagagtcaggctaactccaaaaaatattttgacactgacttagagcccaagtggtagtttccatctctctggaggcaagttttgttgtctgttttttttttttccccctcataatcctgtttacatccctaacgtcatcaacatcacaagcttcttct

SEQ ID NO: 152763 - DNA, 623 bp, Homo sapiens
tgggaaattacacttttaccctcattacctcaaacctcaatagaggttccctgtcacaataaaaagctggctactgaggtttagaggcaactagattatagtaatactctatatttgaagccaactttacaaatgaattaaatccttgaatctaactttataaattatatacatttttctcatttagctttcataataattatgggagatggctattttcatttataaaggacgaaactaaatctaacaccctcatcatcacaggatactatattttatatacaatcacagggacttttttttttaattgaacacacacccatcaagtaaaatgaacataattttaaagcctttgtgaaatcttttatgccacataaaatcagyctgtgtacaatgctacacaaatgtcaataaccatatatcagagccaaaccagtttcataattcatggggagatgatcattaggggtatctgaatagtttggaacctcagagcaagcaggtaataattttatttaacacgcttgattaggtctatagaagaaacattttttccttctaaaagttcagcaaattctattttgaggaaaacaaaactgaaataaaatcatggcaatgatact

SEQ ID NO: 152764 - DNA, 623 bp, Homo sapiens
tgggaaattacacttttaccctcattacctcaaacctcaatagaggttccctgtcacaataaaaagctggctactgaggtttagaggcaactagattatagtaatactctatatttgaagccaactttacaaatgaattaaatccttgaatctaactttataaattatatacatttttctcatttagctttcataataattatgggagatggctattttcatttataaaggacgaaactaaatctaacaccctcatcatcacaggatactatattttatatacaatcacagggacttttttttttaattgaacacacacccatcaagtaaaatgaacataattttaaagcctttgtgaaatcttttatgccacataaaatcagtctgtgtacaatgctacacaaatgtcaataaccatatatcagagccaaaccagtttcataattcatggggagatgatcattaggggtatctgaatagtttggaacctcagagcaagcaggtaataattttatttaacamgcttgattaggtctatagaagaaacattttttccttctaaaagttcagcaaattctattttgaggaaaacaaaactgaaataaaatcatggcaatgatact

SEQ ID NO: 152765 - DNA, 438 bp, Homo sapiens
gctccttttctttcatctttatttaartaatatttccctatgttttatccccagcccattgcttgcctctgtactgcctccctgtgagacttcattaagtatcagaattttaccaatagctcatatgcttatgatgcttaccttttcagattcgtatatttaaatgttttgtgattatttcatcctggatgtccaaactcaacatgttaaaattcaaatttatcatctctcaccccgggcctgcttttggtctgcatttcctacctctattaatagcttcagttattagccaccgacaccagacagtctcggagtcatcctgaactctatcttcccctccttccccaagtcaatcactaatcaagtcctgctaatacatttccttactatttctgaaatccatccctcttcctcattcctactaacatcctaatttaa

SEQ ID NO: 152766 - DNA, 438 bp, Homo sapiens
gctccttttctttcatctttatttaaataatatttccctatgttttatccccagcccattgcttgcctctgtactgcctccctgtgagacttcattaartatcagaattttaccaatagctcatatgcttatgatgcttaccttttcagattcgtatatttaaatgttttgtgattatttcatcctggatgtccaaactcaacatgttaaaattcaaatttatcatctctcaccccgggcctgcttttggtctgcatttcctacctctattaatagcttcagttattagccaccgacaccagacagtctcggagtcatcctgaactctatcttcccctccttccccaagtcaatcactaatcaagtcctgctaatacatttccttactatttctgaaatccatccctcttcctcattcctactaacatcctaatttaa

SEQ ID NO: 152767 - DNA, 438 bp, Homo sapiens
gctccttttctttcatctttatttaaataatatttccctatgttttatccccagcccattgcttgcctctgtactgcctccctgtgagacttcattaagtatcagaattttaccaatagctcatatgcttatgatgcttaccttttcagattcgtatatttaaatgttttgtgrttatttcatcctggatgtccaaactcaacatgttaaaattcaaatttatcatctctcaccccgggcctgcttttggtctgcatttcctacctctattaatagcttcagttattagccaccgacaccagacagtctcggagtcatcctgaactctatcttcccctccttccccaagtcaatcactaatcaagtcctgctaatacatttccttactatttctgaaatccatccctcttcctcattcctactaacatcctaatttaa

SEQ ID NO: 152768 - DNA, 438 bp, Homo sapiens
gctccttttctttcatctttatttaaataatatttccctatgttttatccccagcccattgcttgcctctgtactgcctccctgtgagacttcattaagtatcagaattttaccaatagctcatatgcttatgatgcttaccttttcagattcgtatatttaaatgttttgtgattatttcatcctggatgtccaaactcaacatgttraaattcaaatttatcatctctcaccccgggcctgcttttggtctgcatttcctacctctattaatagcttcagttattagccaccgacaccagacagtctcggagtcatcctgaactctatcttcccctccttccccaagtcaatcactaatcaagtcctgctaatacatttccttactatttctgaaatccatccctcttcctcattcctactaacatcctaatttaa

SEQ ID NO: 152769 - DNA, 606 bp, Homo sapiens
taccgtattttaaaaatccattcatctgttgttggaaatctaggttgattccatatcttggctattgtgaacactgttgcaataaacatggggatgcagatgtctctgcaatataatgcttttctttcctttggataaattcccagtagtgggattgcttgaggtgtttcaatactgttctccatactggctgctctaatttacattcctaccaacagtgcataagagttcctttttctccagctactcaggaggctgagggaggagaactatttgaaccctagaagcagagggagccagattacaccaccactgcactccagcctggacggagagtgagattctgtcaaaaaaaaaagtcccttttcttcacgtctttgtcagcatttgttatttttgtctcttctataatagccatcctaactgragtaagatgatgcctcactgtggctttgattagcatttccttgctgattagtggtgttgaacattttttcatatatttgttggtcatttgtatgtcttcttttgagaaatgtctgttcagagcatttgtttatatttaattagattgttgtgcttctttgctgttgatatgtttgaatt

SEQ ID NO: 152770 - DNA, 594 bp, Homo sapiens
ttattgtggtaaaaaacacttaacgtgagacctaccttcttccacaaatttttaagggtacaatatagtattgttaactgtmtgtacattgttatatagcagatctctagaacttttcatcttgcatgactaaaattatacccattgaacagcacctcccaattttcgtctccctctaacccctggtaaccaccattttactttctgatttgatgagttttactgttttagacacctgatattagtggattcatgcaatatttgtccttctgtgactggcttatttcacttagtgtaatgtcctcaagattcatccatgttgtagtatatgacaggatttttttaaggatacataatatttggttgtatgtatattaccacatttattttatccattcaactgtcctggacatttaggtggttgttagtgtcttgactgctgtgacaaaataagtacttttaaaagtctcacatttgcaagttcaatttgaacctttttttagtctgcttgcacttctcttatcaagcaagaaagcacttttctgctttttctattactagtaacagtggagattaatatctcatgtttttggg

SEQ ID NO: 152771 - DNA, 465 bp, Homo sapiens
ttgcatgactaaaattatacccattgaacagcacctcccaattttcgtctccctctracccctggtaaccaccattttactttctgatttgatgagttttactgttttagacacctgatattagtggattcatgcaatatttgtccttctgtgactggcttatttcacttagtgtaatgtcctcaagattcatccatgttgtagtatatgacaggatttttttaaggatacataatatttggttgtatgtatattaccacatttattttatccattcaactgtcctggacatttaggtggttgttagtgtcttgactgctgtgacaaaataagtacttttaaaagtctcacatttgcaagttcaatttgaacctttttttagtctgcttgcacttctcttatcaagcaagaaagcacttttctgctttttctattactagtaacagtggagattaatatctcatg

SEQ ID NO: 152772 - DNA, 465 bp, Homo sapiens
ttgcatgactaaaattatacccattgaacagcacctcccaattttcgtctccctctaacccctggtaaccaccattttactttctgatttgatgagttttactgttttagacwcctgatattagtggattcatgcaatatttgtccttctgtgactggcttatttcacttagtgtaatgtcctcaagattcatccatgttgtagtatatgacaggatttttttaaggatacataatatttggttgtatgtatattaccacatttattttatccattcaactgtcctggacatttaggtggttgttagtgtcttgactgctgtgacaaaataagtacttttaaaagtctcacatttgcaagttcaatttgaacctttttttagtctgcttgcacttctcttatcaagcaagaaagcacttttctgctttttctattactagtaacagtggagattaatatctcatg

SEQ ID NO: 152773 - DNA, 443 bp, Homo sapiens
catcttgcatgactaaaattatacccattgaacagcacctcccaattttcgtctccctctaacccctggtaaccaccattttactttctgatttgatgagttttactgttttagacacctgatattagtggattcawgcaatatttgtccttctgtgactggcttatttcacttagtgtaatgtcctcaagattcatccatgttgtagtatatgacaggatttttttaaggatacataatatttggttgtatgtatattaccacatttattttatccattcaactgtcctggacatttaggtggttgttagtgtcttgactgctgtgacaaaataagtacttttaaaagtctcacatttgcaagttcaatttgaacctttttttagtctgcttgcacttctcttatcaagcaagaaagcacttttctgctttttctattacta

SEQ ID NO: 152774 - DNA, 594 bp, Homo sapiens
ttattgtggtaaaaaacacttaacgtgagacctaccttcttccacaaatttttaagggtacaatatagtattgttaactgtctgtacattgttatatagcagatctctagaacttttcatcttgcatgactaaaattatacccattgaacagcacctcccaattttcgtctccctctaacccctggtaaccaccattttactttctgatttgatgagttttactgttttagacacctgatattagtggattcatgcaatatttgtccttctgtgactggcttatttcayttagtgtaatgtcctcaagattcatccatgttgtagtatatgacaggatttttttaaggatacataatatttggttgtatgtatattaccacatttattttatccattcaactgtcctggacatttaggtggttgttagtgtcttgactgctgtgacaaaataagtacttttaaaagtctcacatttgcaagttcaatttgaacctttttttagtctgcttgcacttctcttatcaagcaagaaagcacttttctgctttttctattactagtaacagtggagattaatatctcatgtttttggg

SEQ ID NO: 152775 - DNA, 452 bp, Homo sapiens
cacactcatcatcagtctctctcattttctgtcttatctccattccatctacatacagtttttgttttcaccaatgtttttaaataaacaaytgtacaagcacgacgacaacagaaaccttccttcccccagtgttgtagtgagcaaggaatatatttaacttcaaataaaagacaagaacaaatgctggataaagctgacagaaagaaatgcaactgtaggtgctctggcaatatagaaatgatacaactaagaaaaatggaagaaaaggaaagagaaagtattcctcagaatgattttactgactgctcatctgtaatgcctgggagtcaaaggatattgtttatagaaatgtaagcatacttaatggcaccaggggaaacaaagttaatatgattaaatcaaattgtgggatgaaaaatcacatagggaggacaagaaagagaatacag

SEQ ID NO: 152776 - DNA, 441 bp, Homo sapiens
atcttgcatgactaaaattatacccattgaacagcacctcccaattttcgtctccctctaacccctggtaaccaccattttactttctgatttgatgagttttactgttttagacacctgatattagtggattcatgcaatatttgtccttctgtgactggcttatttcacttagtgtaatgtcctcaagattcatccatgttgtagtatatgacaggattttttwaaggatacataatatttggttgtatgtatattaccacatttattttatccattcaactgtcctggacatttaggtggttgttagtgtcttgactgctgtgacaaaataagtacttttaaaagtctcacatttgcaagttcaatttgaacctttttttagtctgcttgcacttctcttatcaagcaagaaagcacttttctgctttttctattact

SEQ ID NO: 152777 - DNA, 463 bp, Homo sapiens
gcatgactaaaattatacccattgaacagcacctcccaattttcgtctccctctaacccctggtaaccaccattttactttctgatttgatgagttttactgttttagacacctgatattagtggattcatgcaatatttgtccttctgtgactggcttatttcacttagtgtaatgtcctcaagattcatccatgttgtagtatatgacaggatttttttaaggatacataatatttggttgtatgtatattaccacatttattttatccattcaactgtcctggacatttaggtggttgttagtgtcttgrctgctgtgacaaaataagtacttttaaaagtctcacatttgcaagttcaatttgaacctttttttagtctgcttgcacttctcttatcaagcaagaaagcacttttctgctttttctattactagtaacagtggagattaatatctcatg

SEQ ID NO: 152778 - DNA, 441 bp, Homo sapiens
tcttgcatgactaaaattatacccattgaacagcacctcccaattttcgtctccctctaacccctggtaaccaccattttactttctgatttgatgagttttactgttttagacacctgatattagtggattcatgcaatatttgtccttctgtgactggcttatttcacttagtgtaatgtcctcaagattcatccatgttgtagtatatgacaggatttttttaaggatacataatatttggttgtatgtatattaccacatttattttatccattcaactgtcctggacatttaggtggttgttagtgtcttgactgctgtgacaaaataagtayttttaaaagtctcacatttgcaagttcaatttgaacctttttttagtctgcttgcacttctcttatcaagcaagaaagcacttttctgctttttctattacta

SEQ ID NO: 152779 - DNA, 441 bp, Homo sapiens
tcttgcatgactaaaattatacccattgaacagcacctcccaattttcgtctccctctaacccctggtaaccaccattttactttctgatttgatgagttttactgttttagacacctgatattagtggattcatgcaatatttgtccttctgtgactggcttatttcacttagtgtaatgtcctcaagattcatccatgttgtagtatatgacaggatttttttaaggatacataatatttggttgtatgtatattaccacatttattttatccattcaactgtcctggacatttaggtggttgttagtgtcttgactgctgtgacaaaataagtacttttaaaagtctcacatttgcaagttcaatttgaayctttttttagtctgcttgcacttctcttatcaagcaagaaagcacttttctgctttttctattacta

SEQ ID NO: 152780 - DNA, 441 bp, Homo sapiens
tcttgcatgactaaaattatacccattgaacagcacctcccaattttcgtctccctctaacccctggtaaccaccattttactttctgatttgatgagttttactgttttagacacctgatattagtggattcatgcaatatttgtccttctgtgactggcttatttcacttagtgtaatgtcctcaagattcatccatgttgtagtatatgacaggatttttttaaggatacataatatttggttgtatgtatattaccacatttattttatccattcaactgtcctggacatttaggtggttgttagtgtcttgactgctgtgacaaaataagtacttttaaaagtctcacatttgcaagttcaatttgaacctttttttagtctgcttgyacttctcttatcaagcaagaaagcacttttctgctttttctattacta

SEQ ID NO: 152781 - DNA, 463 bp, Homo sapiens
gcatgactaaaattatacccattgaacagcacctcccaattttcgtctccctctaacccctggtaaccaccattttactttctgatttgatgagttttactgttttagacacctgatattagtggattcatgcaatatttgtccttctgtgactggcttatttcacttagtgtaatgtcctcaagattcatccatgttgtagtatatgacaggatttttttaaggatacataatatttggttgtatgtatattaccacatttattttatccattcaactgtcctggacatttaggtggttgttagtgtcttgactgctgtgacaaaataagtacttttaaaagtctcacatttgcaagttcaatttgaacctttttttagtctgcttgcacttctcttatcaagcaagaaagcacttttctgctttttctattactastaacagtggagattaatatctcatg

SEQ ID NO: 152782 - DNA, 560 bp, Homo sapiens
  misc_feature (1)...(560): n = A,T,C or G
nnnnnnnnnnnnnnnnnngttgtttctatgtctcaggtactagtgctgaacaacatacgtgcatcttgaatgcgtgaagaattcctatataagaaaaacacaaacaacaacatttaaaatgagcaaaaaaccckaataggaatttcacagaagagaaaacataaatggcccataaacataataaaagatactcaactacaattctaatcagggaaataaatattaaaaccccaaagagataccacttcatactctaggaaaaacctaaaaggctgtgaatatctagtttcattgaggaagaacaatgggaagactattcactgctggtgagggtgtagattggtacaactgccttggagaacagtatgatgccactcaatagagctgaacacacacatgcccaatgaccaagcaattccactccaggtacatactggaaaaatactcctgcacaagtagaataggagacactgcataacaaagttcactacaacatgaggctgaggtgggaagatggcttgagaccaggagttcgaggctgcaccagtagctgggactat

SEQ ID NO: 152783 - DNA, 560 bp, Homo sapiens
  misc_feature (1)...(560): n = A,T,C or G
nnnnnnnnnnnnnnnnnngttgtttctatgtctcaggtactagtgctgaacaacatacgtgcatcttgaatgcgtgaagaattcctatataagaaaaacacaaacaacaacatttaaaatgagcaaaaaacccgaataggaatttcacagaagagaaaacataaatggcccataaacataataaaagatrctcaactacaattctaatcagggaaataaatattaaaaccccaaagagataccacttcatactctaggaaaaacctaaaaggctgtgaatatctagtttcattgaggaagaacaatgggaagactattcactgctggtgagggtgtagattggtacaactgccttggagaacagtatgatgccactcaatagagctgaacacacacatgcccaatgaccaagcaattccactccaggtacatactggaaaaatactcctgcacaagtagaataggagacactgcataacaaagttcactacaacatgaggctgaggtgggaagatggcttgagaccaggagttcgaggctgcaccagtagctgggactat

SEQ ID NO: 152784 - DNA, 590 bp, Homo sapiens
ttttttgctactattgtggtttctgtattgttactatamaatctgtaaactaaatagtaaaggagagaaaagtgattttcaaagaagctggcttgggaacaggtactattctgggaagatgaaaggtttcacttaatgactggtacctgtgccactctggttattttaactgttaaccttttagcaagaggtttttcttttaaaagacatcctttaatatttgggaagctagtgcaatagtacacattgaggcccacataccacatgccaaatatttaaaaggcacatttctagctaaccactgtacatacatatattttttcttattttctgattttagtttttttccttgtcaacaatttatgtccacacatatcttctatcatcccactttgacaagtaatattataccttcaaaatgatgtggaagactagattggaatttagaaccgtagaaccttgtaattgtacaggcaagtttcttcctgggaaaaaataaaacaggaagaaaaggctgggcagcctctggttcaggaaggaaattcaggagtcccttatagcagcatctctagtacttgggaaccgaacag

SEQ ID NO: 152785 - DNA, 590 bp, Homo sapiens
ttttttgctactattgtggtttctgtattgttactatacaatctgtaaactaaatagtaaaggagagaaaagtgattttcaaagaagctggcttgggaacaggtactattctgggaagatgaaaggtttcacttaatgactggtacctgtgccactctggttattttaactgttaaccttttagcaagaggtttttcttttaaaagacatcctttaatatttgggaagctagtgcaatagtacacattgaggcccacawaccacatgccaaatatttaaaaggcacatttctagctaaccactgtacatacatatattttttcttattttctgattttagtttttttccttgtcaacaatttatgtccacacatatcttctatcatcccactttgacaagtaatattataccttcaaaatgatgtggaagactagattggaatttagaaccgtagaaccttgtaattgtacaggcaagtttcttcctgggaaaaaataaaacaggaagaaaaggctgggcagcctctggttcaggaaggaaattcaggagtcccttatagcagcatctctagtacttgggaaccgaacag

SEQ ID NO: 152786 - DNA, 590 bp, Homo sapiens
ttttttgctactattgtggtttctgtattgttactatacaatctgtaaactaaatagtaaaggagagaaaagtgattttcaaagaagctggcttgggaacaggtactattctgggaagatgaaaggtttcacttaatgactggtacctgtgccactctggttattttaactgttaaccttttagcaagaggtttttcttttaaaagacatcctttaatatttgggaagctagtgcaatagtacacattgaggcccacataccacatgccaartatttaaaaggcacatttctagctaaccactgtacatacatatattttttcttattttctgattttagtttttttccttgtcaacaatttatgtccacacatatcttctatcatcccactttgacaagtaatattataccttcaaaatgatgtggaagactagattggaatttagaaccgtagaaccttgtaattgtacaggcaagtttcttcctgggaaaaaataaaacaggaagaaaaggctgggcagcctctggttcaggaaggaaattcaggagtcccttatagcagcatctctagtacttgggaaccgaacag

SEQ ID NO: 152787 - DNA, 402 bp, Homo sapiens
gctgggcagcctctggttcaggaaggaaattcaggagtcccttatagcagcatctctagtacttgggaaccgaacagacttctckgcctgtgaggctggaatgggcccttctggagaacacgacagagaagttatctactgcctttgcccccagggcccaggcaacacttttaccctccattgtttccgaagttaaggggaggagacaatgttttgtttagtgacctcgacagaaaaagtgtcctcctgcaaccactcatttgttactttccttcttcctgaattgcctggacccactcctcctccatttgactggctctgtgcactgatcttatagtcaggagatttttgggaattgtggcttctaaaaatgtacacccgactctacccatagctggccct

SEQ ID NO: 152788 - DNA, 402 bp, Homo sapiens
gctgggcagcctctggttcaggaaggaaattcaggagtcccttatagcagcatctctagtacttgggaaccgaacagacttctcggcctgtgaggctggaatgggcccttctggagaacacgacagagaagttatctactgcctttgcccccagggcccaggcaacacttttaccctccattgtttccgaagttaaggggaggagacaatgttttgtttagtgacctcgacagaaaaagtgtcctcctgcaaccactcatttgttactttycttcttcctgaattgcctggacccactcctcctccatttgactggctctgtgcactgatcttatagtcaggagatttttgggaattgtggcttctaaaaatgtacacccgactctacccatagctggccct

SEQ ID NO: 152789 - DNA, 402 bp, Homo sapiens
gctgggcagcctctggttcaggaaggaaattcaggagtcccttatagcagcatctctagtacttgggaaccgaacagacttctcggcctgtgaggctggaatgggcccttctggagaacacgacagagaagttatctactgcctttgcccccagggcccaggcaacacttttaccctccattgtttccgaagttaaggggaggagacaatgttttgtttagtgacctcgacagaaaaagtgtcctcctgcaaccactcatttgttactttccttcttcctgaattgcctggacccactcctcctccatttgactggctctgtgcactgatsttatagtcaggagatttttgggaattgtggcttctaaaaatgtacacccgactctacccatagctggccct

SEQ ID NO: 152790 - DNA, 578 bp, Homo sapiens
ctgaacacacacatgcccaatgaccaagcaattccactccaggtacatactggaaaaatactcctgcacaagtagaataggagacactgcataacaaagttcactacaacatgaggctgaggtgggaagatggcttgagaccaggagttcgaggctgcaccagtagctgggactataagcatgtgtcaccgtgcctggctaattttttgctgttgtggttgttgttagagatgaggtcttcctttattgaacaagctggtctccaactcctggyttcaagtgatcttcccacttctgcctcccaaagtgctgggactacaggtgtgagccaccatgcccagccaagttctgcttcttaacctgaggtagatactttgatgtttcattttcctttattgtacagatatactttatattctcatatgtgacacaagtcaaaatttaaaaaaacaatttaatgtttattccctttagatgaatgatgggcaaatttacataatgaattcattactgaaacaatgtatagatttcagactaggaaagtaactatttataaaagaaaagcttaaaacctgaaa

SEQ ID NO: 152791 - DNA, 578 bp, Homo sapiens
ctgaacacacacatgcccaatgaccaagcaattccactccaggtacatactggaaaaatactcctgcacaagtagaataggagacactgcataacaaagttcactacaacatgaggctgaggtgggaagatggcttgagaccaggagttcgaggctgcaccagtagctgggactataagcatgtgtcaccgtgcctggctaattttttgctgttgtggttgttgttagagatgaggtcttcctttattgaacaagctggtctccaactcctggcttcaagtgatcttcccacttctgcctcccaaagtgctgggaytacaggtgtgagccaccatgcccagccaagttctgcttcttaacctgaggtagatactttgatgtttcattttcctttattgtacagatatactttatattctcatatgtgacacaagtcaaaatttaaaaaaacaatttaatgtttattccctttagatgaatgatgggcaaatttacataatgaattcattactgaaacaatgtatagatttcagactaggaaagtaactatttataaaagaaaagcttaaaacctgaaa

SEQ ID NO: 152792 - DNA, 556 bp, Homo sapiens
ttttttttagttcccagactaacaaaaataatctagctttttgtcttgactaccaaccactctggattttttttttttttttttgagatggagtctcgccctgtcrcccaggctagagtgcagtggcgtgatcttggctcacataacctccacctcccaggttcaagcaattctcttatctcagcctccgaagtatctgggactataggcacacaccaccacgcccggctaatttttgtattttcagtagagatggggtttcaccatgttggtcatgctgctcttgaactcctgacctcaggtgatccatctgccttggcctcccaaagtgctaggattacaggcatgagccaccatgcccggcccactctggatttaaggacagttcttccttcaatcagcagccaaagagtcctgattcctgattctaattaagaagtttaacttggtattctatttctgatggaaggatggctgaaagaagggagactcaaacaacagatgaaggcaaaatactctgtactgaattttcaatgtaatcttaaattctatgttt

SEQ ID NO: 152793 - DNA, 556 bp, Homo sapiens
ttttttttagttcccagactaacaaaaataatctagctttttgtcttgactaccaaccactctggattttttttttttttttttgagatggagtctcgccctgtcacccaggctagagtgsagtggcgtgatcttggctcacataacctccacctcccaggttcaagcaattctcttatctcagcctccgaagtatctgggactataggcacacaccaccacgcccggctaatttttgtattttcagtagagatggggtttcaccatgttggtcatgctgctcttgaactcctgacctcaggtgatccatctgccttggcctcccaaagtgctaggattacaggcatgagccaccatgcccggcccactctggatttaaggacagttcttccttcaatcagcagccaaagagtcctgattcctgattctaattaagaagtttaacttggtattctatttctgatggaaggatggctgaaagaagggagactcaaacaacagatgaaggcaaaatactctgtactgaattttcaatgtaatcttaaattctatgttt

SEQ ID NO: 152794 - DNA, 515 bp, Homo sapiens
cggaggccaagccactgtgctcccagaacacaacacagaagcctccacactgaagcagagcacaggtgccctggagtctccacmccacccagggatcctccagcagaagtgggtgtgcccctgcatacctgcaagtcccatatgcagacctactgttcagggccgtgggataacagccaaaaataggaaatcattttactcatcaatggaaaaatggtgacacagtcatataatggaactcaacaatgacgataaatcaatgtctgccatagacaagaacatggatgtgttctgtaatactgaaccaaagaagccaggctaaatagaatgtgctgtattttatagaagtcaaaaccaggcagaacaaatctacatcaggaactgggaaagtagctattttgtgggttggggcagcagtgcctgggagaggccacaggtcaaggctactgcttggtccagggcgtggcagcctggtgtgctacagttcatctagatgcacacttatgattcgggca

SEQ ID NO: 152795 - DNA, 509 bp, Homo sapiens
ccaagccactgtgctcccagaacacaacacagaagcctccacactgaagcagagcacaggtgccctggagtctccaccccacccagggatcctccagcagaagtgggtgtgcccctgcatacctgcargtcccatatgcagacctactgttcagggccgtgggataacagccaaaaataggaaatcattttactcatcaatggaaaaatggtgacacagtcatataatggaactcaacaatgacgataaatcaatgtctgccatagacaagaacatggatgtgttctgtaatactgaaccaaagaagccaggctaaatagaatgtgctgtattttatagaagtcaaaaccaggcagaacaaatctacatcaggaactgggaaagtagctattttgtgggttggggcagcagtgcctgggagaggccacaggtcaaggctactgcttggtccagggcgtggcagcctggtgtgctacagttcatctagatgcacacttatgattcgggca

SEQ ID NO: 152796 - DNA, 509 bp, Homo sapiens
ccaagccactgtgctcccagaacacaacacagaagcctccacactgaagcagagcacaggtgccctggagtctccaccccacccagggatcctccagcagaagtgggtgtgcccctgcatacctgcaagtcccatatscagacctactgttcagggccgtgggataacagccaaaaataggaaatcattttactcatcaatggaaaaatggtgacacagtcatataatggaactcaacaatgacgataaatcaatgtctgccatagacaagaacatggatgtgttctgtaatactgaaccaaagaagccaggctaaatagaatgtgctgtattttatagaagtcaaaaccaggcagaacaaatctacatcaggaactgggaaagtagctattttgtgggttggggcagcagtgcctgggagaggccacaggtcaaggctactgcttggtccagggcgtggcagcctggtgtgctacagttcatctagatgcacacttatgattcgggca

SEQ ID NO: 152797 - DNA, 528 bp, Homo sapiens
agctgctgctggtggcggaggccaagccactgtgctcccagaacacaacacagaagcctccacactgaagcagagcacaggtgccctggagtctccaccccacccagggatcctccagcagaagtgggtgtgcccctgcatacctgcaagtcccatatgcagacctactgttcagggcygtgggataacagccaaaaataggaaatcattttactcatcaatggaaaaatggtgacacagtcatataatggaactcaacaatgacgataaatcaatgtctgccatagacaagaacatggatgtgttctgtaatactgaaccaaagaagccaggctaaatagaatgtgctgtattttatagaagtcaaaaccaggcagaacaaatctacatcaggaactgggaaagtagctattttgtgggttggggcagcagtgcctgggagaggccacaggtcaaggctactgcttggtccagggcgtggcagcctggtgtgctacagttcatctagatgcacacttatgattcggg

SEQ ID NO: 152798 - DNA, 509 bp, Homo sapiens
ccaagccactgtgctcccagaacacaacacagaagcctccacactgaagcagagcacaggtgccctggagtctccaccccacccagggatcctccagcagaagtgggtgtgcccctgcatacctgcaagtcccatatgcagacctactgttcagggccrtgggataacagccaaaaataggaaatcattttactcatcaatggaaaaatggtgacacagtcatataatggaactcaacaatgacgataaatcaatgtctgccatagacaagaacatggatgtgttctgtaatactgaaccaaagaagccaggctaaatagaatgtgctgtattttatagaagtcaaaaccaggcagaacaaatctacatcaggaactgggaaagtagctattttgtgggttggggcagcagtgcctgggagaggccacaggtcaaggctactgcttggtccagggcgtggcagcctggtgtgctacagttcatctagatgcacacttatgattcgggca

SEQ ID NO: 152799 - DNA, 557 bp, Homo sapiens
tgcttgttgactatgggaatttcaataattctaggatgagagaactctgacatagactgtatactctgaagagggccaactctgaaataaatattgccctctgatcaattggaatttggtgtttcagaaactgaagctctctgttttgtgagatcttgccatcttcttttttggtgtgaactggtttttattggggtgtaggacacggggtaggaaatgtcaccttggygtatggcatgccttacacattctaatcttcctggggtagttgatggaactatttcttcttcttgaagttgctcttgctgtcagccacctctttaggtccactgctgaccatcctgcttgagagagaaatcttccaaggattcgtccaagaacttactttttcttggagacatcctgttgcttgccccttcaggatcactaactgtttcctccttgggggatgatttcaccctattgggaagcaatgttcaaacagaggaagtggctgctgagatcagtaggaagctggagaaacaggagaagaagccttaatgaagggaaagaaatga

SEQ ID NO: 152800 - DNA, 572 bp, Homo sapiens
gatgccatgatttctagactagtacttttcatatcatgagtccattgrgtatgagtgttctaggaaaccattcctaaaccaacaacactaccaataacttaactttacacaaaagttatggggagcaacagaaatatatctcactgaaacaaaatcacaaatattcccaagtcaaatcccttttgcttaccttccaaaaatgcccacgggttctctaaaatcatctgacacaaagggaagtgtgggtaagaggaagttggagtggaaaagggaacattcttatgtaactgcagataaattatctcacttttgaaaattttacaaaagcacatggctatgtgatcatactgctgtgacttttcctagttctttgtgtgaaggccatggcttaagtatacattgactttgtgggaagtccacctctaccgctgctgttcaaaaatagatagcatttttttttcagattgtttgctgttggtatatgtaaatgttattgatttttgtatgttgattttgtgtcctgcaactttactgaatttatcaattctgacagttttttggtggagtctata

SEQ ID NO: 152801 - DNA, 594 bp, Homo sapiens
tattttaccattgtttgcacttataaatagtataggcaaagaagaaaatgggcaagttatctaaggataaacagttgaactttgagaagattgcagataggtgttaggttctctaagaagcaaaagtgctcatcaagttatgcacatacagatattaatataaaggcttctacttgttttctagaaagaaaacaagacctagaaaactcttaaagcaatcttcaaaagacaagcacacatggatgtaagataactagtagctaaaactgaaatgctggyataatgttatattataaattaccaatcagtatctactttctaaataggtatagttaggggataaaaaactgagaatgtccctctgattttttcaataataaaaatatatatatacacttagcaggcaattaaatatccaaaaagaaaaagctcaaattttgttaaatcaaagattgtcttaatctgccatattttcccagcaaaaatgtatatagctggcttgtttataatatgtttggggataagaaatgaaagacattcgtagtcatcgctgtgcatatccatcttggaagatactgaaacacatggacttaa

SEQ ID NO: 152802 - DNA, 597 bp, Homo sapiens
atcttcaaaacacacagagtttgataaatcagacccttttctcctttctaccagcatcaccctagtatgggatccyatcactttaaaccaggaggctgcagtagcaatttcactggtttctttgcttagagtctttctcgctccaattccacctgcacaatgctgctagaaaatcttcctaaactccttttcattatgtctttactctacttaggagcctctggtggatccttttcactgatcagattaaatgtactcttctcaggctggatatcagggccctccattaacctttccctttgctccaaaagaccctttacttcctttctctaaagtcaaagtgaattcatgtctttatttatcatctatcttcttttgttctcaaatgcccatcctttcctgtttaaaatccagatcgttctatccagcagagaaccatcatgtccccagctagctgtcctggattgattccatccctcctactctttcttctcagagaaaaggtttatgtccaatgcccataacttgtcttcactggtttccttaaaattgcctccctgtcaaggctgcagtgagctgtgatcatgccactgcact

SEQ ID NO: 152803 - DNA, 438 bp, Homo sapiens
tgggtctactgaacctcaagtttggctggattatgcttttggctagaacaaaatcttatgatgccaccgcctgtcccacataagctttttttccacctgtgctttcatacctgtgggactcccctttgtgctagaatgtccttctcttccttcycataaattcattatttggttaattttagtcgtattttaaaacttagtccaagaattaattcctttaaaaagccttccattactgttgttcttctccagatagaacatctccagggggggctaactgccccttctttgtgttatcacatcaagctgtaaatacctctttgcctttaccatactgctgtttaataattcctgacttggaaactataagaaaatttgtgtttattacatatgctgtatgtatattttaatgtatttatttattgaagaataactcta

SEQ ID NO: 152804 - DNA, 447 bp, Homo sapiens
taacatgagctatcagaatgggtctactgaacctcaagtttggctggattatgcttttggctagaacaaaatcttatgatgccaccgcctgtcccacataagctttttttccacctgtgctttcatacctgtgggactcccctttgtgctagaatgtccttctcttccttctcataaattcattatttggttaattttagtcgtattttaaaacttagtcyaagaattaattcctttaaaaagccttccattactgttgttcttctccagatagaacatctccagggggggctaactgccccttctttgtgttatcacatcaagctgtaaatacctctttgcctttaccatactgctgtttaataattcctgacttggaaactataagaaaatttgtgtttattacatatgctgtatgtatattttaatgtatttatttattgaaga

SEQ ID NO: 152805 - DNA, 580 bp, Homo sapiens
attagtggtgtacagaaatgctacaaatttttgtacattgcttttgtattctacaactttactgaattcatttatcaaatctaagagatattttggtggaatcttcaggctttcctaaatatgaggtcatatcatcagcaaaaatggacaatttgacctctccttttccaatttggatgcattttatttctttctgattgctctggctaagacttccagggctatactgaataaaagtagtgaaagtgagcatccttgacttgttccagttctgacaggaaaggatttsaacttttccccatttagtatgctgttagttgtgtgtttgtcatatatggcctttgttatattgaggtgtgttctgtctatgtttagtttgtttttaatcctaaagggatattgaattatataaaatgttttttgtgtgtcagttgaaatcgttttttctttcattctattgacatgatgtatcagcttaattgatttgtgtatcttgaatcatccttgcagtcctgctataaatcctacttgatcatggtgtatcatcttcttgatttgctgttggattcagtttgcttgt

SEQ ID NO: 152806 - DNA, 580 bp, Homo sapiens
attagtggtgtacagaaatgctacaaatttttgtacattgcttttgtattctacaactttactgaattcatttatcaaatctaagagatattttggtggaatcttcaggctttcctaaatatgaggtcatatcatcagcaaaaatggacaatttgacctctccttttccaatttggatgcattttatttctttctgattgctctggctaagacttccagggctatactgaataaaagtagtgaaagtgagcatccttgacttgttccagttctgacaggaaaggatttcaacttttccccatttagtatgctgttagttgtgtgtttgtcatatatggcctttgttatattgaggtgtgttctgtctatgyttagtttgtttttaatcctaaagggatattgaattatataaaatgttttttgtgtgtcagttgaaatcgttttttctttcattctattgacatgatgtatcagcttaattgatttgtgtatcttgaatcatccttgcagtcctgctataaatcctacttgatcatggtgtatcatcttcttgatttgctgttggattcagtttgcttgt

SEQ ID NO: 152807 - DNA, 580 bp, Homo sapiens
attagtggtgtacagaaatgctacaaatttttgtacattgcttttgtattctacaactttactgaattcatttatcaaatctaagagatattttggtggaatcttcaggctttcctaaatatgaggtcatatcatcagcaaaaatggacaatttgacctctccttttccaatttggatgcattttatttctttctgattgctctggctaagacttccagggctatactgaataaaagtagtgaaagtgagcatccttgacttgttccagttctgacaggaaaggatttcaacttttccccatttagtatgctgttagttgtgtgtttgtcatatatggcctttgttatattgaggtgtgttctgtctatgtttagtttgtttttaatcctaaagggatattgaattatataaaatgttttttgtgtgtcagttgaaatcgtttttyctttcattctattgacatgatgtatcagcttaattgatttgtgtatcttgaatcatccttgcagtcctgctataaatcctacttgatcatggtgtatcatcttcttgatttgctgttggattcagtttgcttgt

SEQ ID NO: 152808 - DNA, 580 bp, Homo sapiens
attagtggtgtacagaaatgctacaaatttttgtacattgcttttgtattctacaactttactgaattcatttatcaaatctaagagatattttggtggaatcttcaggctttcctaaatatgaggtcatatcatcagcaaaaatggacaatttgacctctccttttccaatttggatgcattttatttctttctgattgctctggctaagacttccagggctatactgaataaaagtagtgaaagtgagcatccttgacttgttccagttctgacaggaaaggatttcaacttttccccatttagtatgctgttagttgtgtgtttgtcatatatggcctttgttatattgaggtgtgttctgtctatgtttagtttgtttttaatcctaaagggatattgaattatataaaatgttttttgtgtgtcagttgaaatcgttttttctttcattctattgacatgatgtatcagcttaattgatttgtgtatcttgaatcatccttgcartcctgctataaatcctacttgatcatggtgtatcatcttcttgatttgctgttggattcagtttgcttgt

SEQ ID NO: 152809 - DNA, 640 bp, Homo sapiens
tactgatttgtgcagtcttagctcaagagatgagaattatccttaaaagagtaccaactctcaattctgtaagttataggcacattttcaaatagggctctgattacatcctcctttttttaagaaaataaactatttatttgtgaactgtttgctaatgatagttaaattaactgagttttggcagttctctaatctactgcaagatcttactaatccagtcattctcttcagttttccttggaagcatgaaaacttgtttaaacatcataaaaatgttactatcagcccaaaccagaggaatgttgcaaaagaaaaattgtagagcaatgcctctagcatgtgaaggcagctctaacatccataaagtcaagagggatcttcctttctctcattcrtggaaaaaacagtttatatgatttaagaattcaggtaactacacaatttgaatttacaaaaattgtctttaattctatgaatttgtaaaaacctgttttttcttcctaaattaaataaatattttaaaatctgggatactctaaaatatcacttttgtttttcataaataaaaaaatttaaatataaataatgttaaacatgaaaccactgggaatgcatcacccattccccaacagtattt

SEQ ID NO: 152810 - DNA, 604 bp, Homo sapiens
cacctcattctgtcaccagacagagcagggaaccccgagctaggatgtgaggaccagctctgtatttccatacccaagtcaccatttatggagcctccattttctcacctgtaaaatggggacaaargttttcaccttctgcctttgtgggactttttgaggttcaaattaacagtgaataagaagacatgtgagcatttggctggaaccgtacgtcactgcccggtaatcactgcctgcaaccgtgtacaccactctggtctagaagaaataaggctttcctgtttttagataaaggttccccaggctctggggttgatgggttagggaactgattcctgcaaagagaatcaagaaacagagcttcaaggttggagctgtgttcactttgacttctctgtcaagtgacacgcactctggtgccagctggaccagtgaggtgagacaggcactttgttactgactttgcagctgcagcagggcagtgtgaaggtgctgatgtttgcataacacctggcagagtgcgttatcacagttactcctgatcatccgcttttttgatggggaggttgaggctttgagaggtagctaacttgtccaatga

SEQ ID NO: 152811 - DNA, 549 bp, Homo sapiens
tagtgggggcttgggcctcgagtcactgtgcctgcagctcccgtgggctcctggggagagtaacttatgactctgaggcacccggaccttctagtcagttctgratcccatcagactgctggcgaatggggagaagctgggaaaggtgacctcacaaggcagctcctgatctcagctttgggcaggggtccctgagtccagaccagctgaaacaagtacccgagagtcctgacaattgtgctgctgggctctgcagccctgacaaccccttcgccctccaagccacacattttccacttttaaaatgggctcacggccactcttcatgcttgctgcaggggtagagtgagccaacacaaatttggagcatccgtaccccaaggtgacccattaacagtggctgtggctctcacaggaaggctgggacccagccctgtagggactgtcagtccctggtgagaattcctgaatcctctccaggatccctccctactctctggactttccacttcatggagcccttaactctcagatccaaataccagagcc

SEQ ID NO: 152812 - DNA, 549 bp, Homo sapiens
tagtgggggcttgggcctcgagtcactgtgcctgcagctcccgtgggctcctggggagagtaacttatgactctgaggcacccggaccttctagtcagttctgaatcccatcagactgctggcraatggggagaagctgggaaaggtgacctcacaaggcagctcctgatctcagctttgggcaggggtccctgagtccagaccagctgaaacaagtacccgagagtcctgacaattgtgctgctgggctctgcagccctgacaaccccttcgccctccaagccacacattttccacttttaaaatgggctcacggccactcttcatgcttgctgcaggggtagagtgagccaacacaaatttggagcatccgtaccccaaggtgacccattaacagtggctgtggctctcacaggaaggctgggacccagccctgtagggactgtcagtccctggtgagaattcctgaatcctctccaggatccctccctactctctggactttccacttcatggagcccttaactctcagatccaaataccagagcc

SEQ ID NO: 152813 - DNA, 549 bp, Homo sapiens
tagtgggggcttgggcctcgagtcactgtgcctgcagctcccgtgggctcctggggagagtaacttatgactctgaggcacccggaccttctagtcagttctgaatcccatcagactgctggcgaatggggagaagctgggaaaggtgacctcacaaggcagctcctgatctcagctttgggcaggggtccctgagtccagaccagctgaaacaagtacccgagagtcctgacaattgtgctgctgggctctgcagccctgacaaccccttckccctccaagccacacattttccacttttaaaatgggctcacggccactcttcatgcttgctgcaggggtagagtgagccaacacaaatttggagcatccgtaccccaaggtgacccattaacagtggctgtggctctcacaggaaggctgggacccagccctgtagggactgtcagtccctggtgagaattcctgaatcctctccaggatccctccctactctctggactttccacttcatggagcccttaactctcagatccaaataccagagcc

SEQ ID NO: 152814 - DNA, 549 bp, Homo sapiens
tagtgggggcttgggcctcgagtcactgtgcctgcagctcccgtgggctcctggggagagtaacttatgactctgaggcacccggaccttctagtcagttctgaatcccatcagactgctggcgaatggggagaagctgggaaaggtgacctcacaaggcagctcctgatctcagctttgggcaggggtccctgagtccagaccagctgaaacaagtacccgagagtcctgacaattgtgctgctgggctctgcagccctgacaaccccttcgccctccaagccacacattttccacttttaaaatgggctcacggccactcttcatgcttgctgcaggggtagagtgagccaacacaaatttggagcatccgtaccccaaggtgacccattaacagtggctgtggctctcacaggaaggctgggacccagccctgtagggactktcagtccctggtgagaattcctgaatcctctccaggatccctccctactctctggactttccacttcatggagcccttaactctcagatccaaataccagagcc

SEQ ID NO: 152815 - DNA, 462 bp, Homo sapiens
tctttattgccttttctcccacccacagcctcaagcaatcctgtggtggcggaggttgggcasgcacctaaaactctggaggaggggatccttctttctggccagaggagctgtggtccacacatgtggaggaatccccattgcttttggcctctctctctctttttctgccatttgaccgtggatgaaggtccatttgcagtaagtttatggcaaagcagggaaattaattaaggtcccagtttttcatccagaagcctgataaaggggtctccatggacacggaaaatgtcagggagactgtagtgaggagggagcagaacagggatcgtgtgaagtggtgtgtgaacttctaggctcagctccaagttgtgcacaggtggatctgacctcgaacagcatatcaatgatattcagaaaagaactaagagataaaaaccaccaccatctccaagcttggtg

SEQ ID NO: 152816 - DNA, 511 bp, Homo sapiens
attcattcgttagcatacatacagctaaaataattagggattttattttattattattattattttttatttcgatagrttattggggaacaggtggtgtttggttacacaagttctttagcattgatctgttagattttggtgtacctgtcacccaagcagtgtacactgcaccctatttgtagtcttttatccctcactcccctcgtacagcttccctggcatccccagagtccattgtgtcattcttatgcctttgcatcctcatagctttgttcccacttataagtgagaacatacggtgtttggttttccattcctgagttacttcacttagaatgatagtctccaattccatccatgctgtgaatgccattaactcattcctctttatggctgaatagtattgaatcatatatatataaaccacagtttctttatgcacttgttgcttgatgggcatttgggttggttccacgtttttgcaactgtgaattgtgctgctataaat

SEQ ID NO: 152817 - DNA, 511 bp, Homo sapiens
attcattcgttagcatacatacagctaaaataattagggattttattttattattattattattttttatttcgataggttattggggaacaggtggtgtttggttacacaagttctttagcattgatctgttagattttggtgtacctgtcacccaagcagtgtacactgcaccctatttgtagtcttttatccctcactcccctcstacagcttccctggcatccccagagtccattgtgtcattcttatgcctttgcatcctcatagctttgttcccacttataagtgagaacatacggtgtttggttttccattcctgagttacttcacttagaatgatagtctccaattccatccatgctgtgaatgccattaactcattcctctttatggctgaatagtattgaatcatatatatataaaccacagtttctttatgcacttgttgcttgatgggcatttgggttggttccacgtttttgcaactgtgaattgtgctgctataaat

SEQ ID NO: 152818 - DNA, 496 bp, Homo sapiens
tctgttaagcctggtgacatktttaaaccccagaacaagtgcagcttcctttcattcaggaactaacttgtttatcaaactgacatgtaacatgagcaaaagccactatctggggctaagaggcgtcattccccttgggtcctgaaactgctctggacatgggctaagtgatccagaatttatgggcttgagtgctggggttcactgtggtaaagatgcctgaggactggtagaggacttcagtctcttcttgcacctttctttgttaagcaagaaccattggtatcagtgccaaagctgaacaaatgtccaatcaatttcctgaattaaaaatgaactcagagagcatggctgcctctggaaggaaggggtctgggagggcacagctcaggctaacctcatgtccccaaatgcttgcctggttctctttctaccaagacgtaaaaataaaactcttctgtaatttttccacattttttcgctataaaatagtggc

SEQ ID NO: 152819 - DNA, 496 bp, Homo sapiens
tgacatttttaaaccccagaacaagtgcagcttcctttcattcaggarctaacttgtttatcaaactgacatgtaacatgagcaaaagccactatctggggctaagaggcgtcattccccttgggtcctgaaactgctctggacatgggctaagtgatccagaatttatgggcttgagtgctggggttcactgtggtaaagatgcctgaggactggtagaggacttcagtctcttcttgcacctttctttgttaagcaagaaccattggtatcagtgccaaagctgaacaaatgtccaatcaatttcctgaattaaaaatgaactcagagagcatggctgcctctggaaggaaggggtctgggagggcacagctcaggctaacctcatgtccccaaatgcttgcctggttctctttctaccaagacgtaaaaataaaactcttctgtaatttttccacattttttcgctataaaatagtggctatctacatgccta

SEQ ID NO: 152820 - DNA, 496 bp, Homo sapiens
tgacatttttaaaccccagaacaagtgcagcttcctttcattcaggaactaacttgtttatcaaactgacatgtaacatgagcaaaagccactatctggggctaagaggcgtcattccccttgggtcctgaaactgctctggacatgggctaagtgatccagaatttatgggcttgagtgctggggttcactgtggtaaagatgcctgaggactggtagaggacttcagtctcttcttgcacctttctttgttaagcaagaaccattggtatcagtgccaaagctgaacaaatgtccaatcaatttcctgaattaaaaatgaactcagagagcatggctgcctctggaaggaaggggtctgggaggscacagctcaggctaacctcatgtccccaaatgcttgcctggttctctttctaccaagacgtaaaaataaaactcttctgtaatttttccacattttttcgctataaaatagtggctatctacatgccta

SEQ ID NO: 152821 - DNA, 516 bp, Homo sapiens
gccccacactttctgtacagcctgcagaaccatgagccaattaaacctctgttctttataaattacccagcctcaggtatttcattacarcaatgcaagaatacctgaacacactgggtttctaatccccttttgtggatttgcttgtgtatctttctgaacgaccttgattatattctatggcttattaatggtttaccaattagaaccacactaatctgtttgatcatgcatgcaatgtgcctgctgaaaaacaaggtttcagggtttcaaatagagagacttacttgtcttaccttttctcacaatcaaccatccctgtataggctctggtgtttcctccaatgtctacagtatgtttgaggaataaagaaaatgaaataacagtcaaggaagaattatgaggcatttcttttttcaaaatatgcaattaaagcaaaaagtacaaaatgcaattttcagatcagtaaggtaatttgtgtttccacagtgcaagtgttacaattattttttaag

SEQ ID NO: 152822 - DNA, 516 bp, Homo sapiens
gccccacactttctgtacagcctgcagaaccatgagccaattaaacctctgttctttataaattacccagcctcaggtatttcattacaacaatgcaagaatacctgaacacactgggtttctaatccccttttgtggatttgcttgtgtatctttctgaaygaccttgattatattctatggcttattaatggtttaccaattagaaccacactaatctgtttgatcatgcatgcaatgtgcctgctgaaaaacaaggtttcagggtttcaaatagagagacttacttgtcttaccttttctcacaatcaaccatccctgtataggctctggtgtttcctccaatgtctacagtatgtttgaggaataaagaaaatgaaataacagtcaaggaagaattatgaggcatttcttttttcaaaatatgcaattaaagcaaaaagtacaaaatgcaattttcagatcagtaaggtaatttgtgtttccacagtgcaagtgttacaattattttttaag

SEQ ID NO: 152823 - DNA, 516 bp, Homo sapiens
gccccacactttctgtacagcctgcagaaccatgagccaattaaacctctgttctttataaattacccagcctcaggtatttcattacaacaatgcaagaatacctgaacacactgggtttctaatccccttttgtggatttgcttgtgtatctttctgaacgaycttgattatattctatggcttattaatggtttaccaattagaaccacactaatctgtttgatcatgcatgcaatgtgcctgctgaaaaacaaggtttcagggtttcaaatagagagacttacttgtcttaccttttctcacaatcaaccatccctgtataggctctggtgtttcctccaatgtctacagtatgtttgaggaataaagaaaatgaaataacagtcaaggaagaattatgaggcatttcttttttcaaaatatgcaattaaagcaaaaagtacaaaatgcaattttcagatcagtaaggtaatttgtgtttccacagtgcaagtgttacaattattttttaag

SEQ ID NO: 152824 - DNA, 516 bp, Homo sapiens
gccccacactttctgtacagcctgcagaaccatgagccaattaaacctctgttctttataaattacccagcctcaggtatttcattacaacaatgcaagaatacctgaacacactgggtttctaatccccttttgtggatttgcttgtgtatctttctgaacgaccttgattatattctatggcttattaatggtttaccaattagaaccacactaatctgtttgatcatgcatgcaatgtgcctgctgaaaaacaaggtttcagggtttcaaatagagagacttacttgtcttaccttttctcacaatcaaccatccctgtataggctctggtgtttcctccaatgtctacagtatgtttgaggaataaagaaaatgaaataacagtcaaggaaraattatgaggcatttcttttttcaaaatatgcaattaaagcaaaaagtacaaaatgcaattttcagatcagtaaggtaatttgtgtttccacagtgcaagtgttacaattattttttaag

SEQ ID NO: 152825 - DNA, 610 bp, Homo sapiens
tcagatctcacaggaactcactcacacttgggaggatagtaccaagccattcatgaggaatccactcccatgacccaaacatctgccaccaggacctacctccaatactgaggattacatctcaacatgagatttrgaggggacatccaaactatatcacccagaaatggtccaacttcaaggtcttgcagtatttgagataatgtgtgcactgctcaggatcacaaaggcttctaaaaacatgggtcaatgagagagatatattgatcccagctttgagtaccaagaggaagaaaaggaggcagagtttaaatgttgtcagttctcaaacacagagatgaaggctcagggaataaccttagaagaaagatattgcattgtcagaagactgaaagaaaacaaaacaaattttttaaaaaatggtggaggctgaggtaagatttcaggttagcagtagtaaaattctcttttccactaagggcactttattcagagtctgcttaaaatgtgagagggcatcacacacattaataatgaataattccatttcattttttttaagtgatttacaagaaacttgttgcatagattttttaaaatcaaccaaatg

SEQ ID NO: 152826 - DNA, 452 bp, Homo sapiens
tgccaagatctgatgttgacataataccccatgctatccccaggcttcttcttgagagattgaatgtttccacgttgcttgcatctccagtggtcacttacatctccctgacgatctactctgctaagtacattgcttgcaaaatacttaaacaacaaacaaatatgcagataaacacatctccctgacaatctactctgctaagtacattgcttgcaaaatacttaaacaacaaacaaacaaatatgcagataaacacacctttgcaccttcctgccagctcatcatccaggtctatcttgttcctttgccgcatgcacaagttaacgaagagcaggcccctgtctaccccctgcaccatmctctctctctttagccctcgcagactggctctaaccctcctttgtgtggaaacccacaggtgcgctgaccatagctatatctgaggcatt

SEQ ID NO: 152827 - DNA, 452 bp, Homo sapiens
tgccaagatctgatgttgacataataccccatgctatccccaggcttcttcttgagagattgaatgtttccacgttgcttgcatctccagtggtcacttacatctccctgacgatctactctgctaagtacattgcttgcaaaatacttaaacaacaaacaaatatgcagataaacacatctccctgacaatctactctgctaagtacattgcttgcaaaatacttaaacaacaaacaaacaaatatgcagataaacacacctttgcaccttcctgccagctcatcatccaggtctatcttgttcctttgccgcatgcacaagttaacgaagagcaggcccctgtctaccccctgcaccatactctctctcttyagccctcgcagactggctctaaccctcctttgtgtggaaacccacaggtgcgctgaccatagctatatctgaggcatt

SEQ ID NO: 152828 - DNA, 496 bp, Homo sapiens
tgagttctggagtttataaacaactttatgggatcactttcctgagctccttcttctctgtgatctcctggatgcttcccagttctctgggactccctgttttggccatctagccagaaactttagggttcagttaccctgttctgccatacgcttccaagtttaggcccaagtctgggctcagaagtgagaagagaggcaataaacaacagggattgyccctaccctcttgggatcgggactctgatgaacagagaaaacaatttcccttcctcagagttctggcttctgcaggccactatgcgtagccatagccatttctgtcatgggattgtctgtggctgtttacttttcagagtcctcaagtagctgtctctgcattttgtttagtttttatagtagtattacccagaactgaagtattgaataatgaatgaaattatcaaattaaatatcacaactcataaaacaagaattaaaagaccagtaatgaaaa

SEQ ID NO: 152829 - DNA, 490 bp, Homo sapiens
tgacatagtctacccaaatgagaagtaatcagaaaaacaattctggtaatatgataaaacaaggttgtttaacacccccaaaggatcacacaccttaggggaaaaggattcacataaatacaaaaaattgacatagaatacctgacatcaagatggaaattaaaaaattctttgaactgaatgataatagtgacacaacctrtcaaaacctctgggatacagcaaaagtggtgctaagatgaaagttcatatcattaaatgcatacctcaggaagtctgaaacagcacagacagacaatctaagggcatacctcaaggaactggagaaacagcaaaccaaacccaaacccaacagaagaaaaaaaataaccaagatcagagcagaaataaatgaaattgaaaggacaacaacaacaaaacacaaaagataaatgcaacaaaaagctggttctttcaaaagataaataaaattgatagaccattagctaga

SEQ ID NO: 152830 - DNA, 512 bp, Homo sapiens
agaggtatgaaggttaggagctaggtgctggttatgcttgggtggattttacatttttcatgcttaacttggttttcatcagataagaggagagctaagaagctttcaattataagaatactccaggaatttgaatcagtaccacaatggacctagtaatcagtgttaaaagttggatatgttcaaatctaatctgtttcagaagagacttaaatcctcatactgatttcatttccttcacctggaaagaaagaaaaccaacttaagaatgggtaatgctagttttttgctaactattccagttggctaggtttgatggtcatctgtgaaaagaatcgaggttatagaaaccagtaaaccttgtgtgtatatttttttaaaaaawttaaataaaaaataggcttataaaaatgtaatgctctctcttattaaaatggcattgataagccccctgggttacaatattgttgaggtccttgtgaggacatgatagcatcagttgaactgattag

SEQ ID NO: 152831 - DNA, 540 bp, Homo sapiens
cagaaaatctctagaacaagacaggttattttatcatgtgacataatcatgaagtgataaagtgactcctatcacttttgtcatattctatagattagaatcaagtcaaatttcccacccaaggggagggtatgatacaaagggataatatagaaaggtgagtgttaggagctgaaaaatgccygcttccccacaacccacaaatttatatgtcaaagcccactgtaccccagaatgtaactgtatttagagataaggtactatcatctgaatgtttgcatacccacaacattcatatattgaaacctactcaccaaggtgatgatattagggggtgggacctttgggagatgattaggtcatgagggctctgctgttgtgaatgagattgctgtcctgataaaagagaccccagagagatgcctcaccctttcaccttgtgaggacacttgagaaggcatcatctttgaagcagagtgagccatcaccagacactgactctgctggtgccttcattttggacttcccagtgtctagaat

SEQ ID NO: 152832 - DNA, 477 bp, Homo sapiens
gttattttatcatgtgacataatcatgaagtgataaagtgactcctatcacttttgtcatattctatagattagaatcaagtcaaatttcccacccaaggggagggtatgatacaaagggataatatagaaaggtgagtgttaggagctgaaaaatgcccgcttccccacaacccacaaatttatatgtcaaagcccactgtaccccagaatgtaactgtatttagagataaggtactatcrtctgaatgtttgcatacccacaacattcatatattgaaacctactcaccaaggtgatgatattagggggtgggacctttgggagatgattaggtcatgagggctctgctgttgtgaatgagattgctgtcctgataaaagagaccccagagagatgcctcaccctttcaccttgtgaggacacttgagaaggcatcatctttgaagcagagtgagccatcaccagacactgactc

SEQ ID NO: 152833 - DNA, 577 bp, Homo sapiens
ctgctctttaaagtagttatcctaggttaaggatcarcctggtcatgttggagtgaatctaaattgcatgactggaaagagtttgcaatgttttccccttcccttttgtcaatgaagcaggatatgtctatcaaaggcagagaaaatgaaggggtgggaaaagaaactgcgtagcagcagcgtttctgtgtgtgtctagcagagcatgagaaaatgaggatgatgctggtttagtttccattctattcatccctgaagttgcgtagataacataataaatgaatactgtagttcctttaattcgacataatgcacacgcactctgtgaggtttatagctttcctaaggttttgtggcaatgtttgtagaaactttagaacaactgtgaggtctacaggggataaagtccctgagaaatggagtgctttgttagatggagtggagacgaagggcatacatcctgcttatcatgcacactcaaggcttgatgcaatgctgacttgacaggtagagagcagagaattaccgtgtctgttcacagtccctgaaatgacatcctctggatacagcttcctgc

SEQ ID NO: 152834 - DNA, 636 bp, Homo sapiens
tctaatggccccttcccagctagtttaaccaaaatgaccatattgaaatgtcatgtactcaaagtatttaaaaagccaacatccaaggacatattcaactagagaggagaaatgtccacttttctctcatcaccccccttttccttcacagctaaattttaaaaatcatgctttacatttaccacctcctttttgtacctgttggtctctttgtcctctctctgctccttattccagaaaacagttcttagtaaaggtaatagtaatctcacagtcactcaatgcagtgtacattttttagcattccttttccttgacacttgtagttctggaaacatatttttgctttgacttcatgacccaatctttctgagagatgctctcagtgtgtttttcagattcactcagccatgaaaatttgaagttcttcctggtttagyaccagacctccttatcctttttctttttatcttctcccatagtatctcttccctgcatatggttccactgaccatctccatatactgatgcttctcagtatatcagcctgatctctcctcttacacaaaatgtcacagtacttcaaattcaacatttctaattgataagtcgtgaatgttcctccacctcccccac

SEQ ID NO: 152835 - DNA, 636 bp, Homo sapiens
tctaatggccccttcccagctagtttaaccaaaatgaccatattgaaatgtcatgtactcaaagtatttaaaaagccaacatccaaggacatattcaactagagaggagaaatgtccacttttctctcatcaccccccttttccttcacagctaaattttaaaaatcatgctttacatttaccacctcctttttgtacctgttggtctctttgtcctctctctgctccttattccagaaaacagttcttagtaaaggtaatagtaatctcacagtcactcaatgcagtgtacattttttagcattccttttccttgacacttgtagttctggaaacatatttttgctttgacttcatgacccaatctttctgagagatgctctcagtgtgtttttcagattcactcagccatgaaaatttgaagttcttcctggtttagcaccagacctccttatcctttttctttttatcttctcccatagtatctcttccctgcmtatggttccactgaccatctccatatactgatgcttctcagtatatcagcctgatctctcctcttacacaaaatgtcacagtacttcaaattcaacatttctaattgataagtcgtgaatgttcctccacctcccccac

SEQ ID NO: 152836 - DNA, 589 bp, Homo sapiens
agcatgtgactcacgatggcatagcctaataaagtaaatcaatttgctacctgttaatgttgtgytttaaaggaattaggaagtgaaatttgcagtttggaaaggttcacatttataaattaagctacatctgccacctatataacgttaataactattagctctacaaacctgcatatcgcagttctaaacagaagatcacttcctggtcagcttgtgggtgaagaggtaataaaagaagtcaaatgttctaggacctttaaagaactagaacttcgacaataccagttaggcaaataaatacatgtgtatgaaataggattccacttatttttgaacaggaagagaatttaaagagaaggggagaaataaagaaagaaaaggtatctagtcattttctatgcatagtctcctgaaattgagaataggaaaaatatttcagttttatactgattttcttatagcttttggaagttatttatttacatgacactaaaataccacaataaagtttttgtttactatgatttaaagtaaagtaaatgttttatgaccaggatttaaagttacatttgtgactgcaagtaat

SEQ ID NO: 152837 - DNA, 623 bp, Homo sapiens
cctccagctccattcatgttcctgcaaaagacatgattcattcttttttatggctgcagagtctttgatgatgtatatgtaccacattttctttatccagtctaccactgatgggcatttaggttgattccatgtctttgttagtgtgaacagtgctacaatgaacaggagagagtggcatgacatacttaaagtactgaaagaaaaaaaaactttcattgtagaatagtatawccagtgaaaatatccttcaagcattaaaaataaataaagactttcctagacaaataaaagctgagaaatttcatcaacaccagacctatgctacaagaaatgctaatgggaggttttcaatctgaaagaaaagaatgttaatgagcaataagacatcattggatgatacaaaacatactggtgatagtaagtacacaaaaaaccacagaatattatagcactgtaattgtagtgtctgaactacttatatcttgagtagaaacactaaaagaacttatcaaaaataatagctacaacagtgtttcaagacacagacagtataatatataactaaacaaaatggcagaagtcctgacttatcaataataacattaaatgtaaacagacaa

SEQ ID NO: 152838 - DNA, 587 bp, Homo sapiens
tactaggaagcccatttttgctacatgcataagccaagttctatgatcaggactttactaatgatgaaactaatatcttgatctttcttaatctgtccttataaaattttttggcactattttacaaataatctataacttgggcagggaaaatggatgctgtttattgcccacccccacacaaaaaaacaccagctacttgtgaattcgtcagcaatattgagagatagctctaggtgagcaaaatgactttgtctagcatgtttttagtttgatgttgctttttcaaattgggtttttgaactttgccacaattcatcttgttccatgtggctgcattttacagctaagtgtccatttttaactgttataacccagtcgggcagctttacaattaagcactagtcatattagatttttacactgacagttcactacaacttaagatgttttttcccaaagcaagaagctctttttacccrggaaaaaagatgttatagagatagagcagtactcatgagactttgagcaaatgatgtatgagtcttacccactcttattcatagtctaggacagaaaatacaaaa

SEQ ID NO: 152839 - DNA, 448 bp, Homo sapiens
ttttctaaggaaccattgaaagaaactgatcctcttcatcatacaaatatgtgttgtcttaaaaacataatctaactacataattttctaattgtgggataaagaacttctcattaaacaaattttcctatcccaaaattaagttgctgatatccaatccttatcttactatyagaataatcatagtataattaagcaccatgatgtgtatttttctttttacttatagtgtctactccagaagtattattttaaaggcattaaattgcttactttaagaagatgaaagacatcttggctctctgttgagtgaagactccaaagatgctattaaaaagacacacagaaactagagagccttttaacaaaaattaaaccagctttgttacaatttcaaaagactaaaaagaccttgagaatttatctggagaatattctttttaagcaa

SEQ ID NO: 152840 - DNA, 448 bp, Homo sapiens
ttttctaaggaaccattgaaagaaactgatcctcttcatcatacaaatatgtgttgtcttaaaaacataatctaactacataattttctaattgtgggataaagaacttctcattaaacaaattttcctatcccaaaattaagttgctgatatccaatccttatcttactatcagaataatcatagtataattaagcaccatgatgtgtatttttctttttacttatagtgtctactccagaagtattattttaaaggcattaaattgcttactttaagaagatgaaagacatcttggctctctgttgagtgaagactccaaagatgctattaaaaagacacacagaaactagwgagccttttaacaaaaattaaaccagctttgttacaatttcaaaagactaaaaagaccttgagaatttatctggagaatattctttttaagcaa

SEQ ID NO: 152841 - DNA, 617 bp, Homo sapiens
aaaatcactctgctgctcttagagaaatggcaatgagcagggcttggaaaggcttgccaaccacacgctcctccacataggtctgcatttgctcctctgctgctgcccgtggtaggtgtaaatcttagcaaaattaatagaccttactggtgattatgagccttcaccactactgatcatataactcttctgtttttttccattttcccttgccttagggacttgaaagttttctgtgtataagtaggtggaggcagaggagggttaatatgaaccaattcaaacagtggccataacacttctcactcarccttacactccatatcagatgctctggattccttgtcagctccatcatcaacaaacatgtgatacctgagcacttaccaccaagctacaaccttagtcaacagctatataactggtctacctgccttcatctttgtcctgctaagtctgttctcacagagcagttaaattgatgttttaaaaactgagctcactaaatctctcctctgcttaaaccctttaatgcttcccaactcacttcaagtaaaagcccagggcctctgtacttgctgtttactctagcaggaatattcttgccccaggtttaa

SEQ ID NO: 152842 - DNA, 465 bp, Homo sapiens
ttaaaggtatgaggttttctagacaatgggtggactgcagtattgaggggaacacttaatatacttgaaagatattcacttacatgtgtcagtcctgggaatgagcaagacgtaaaatcttttaggataaaagtgtctttcttttactactgcttgaacttctgggtaagaatagcaagaaggcatgaagaagcccctaggactacttattgatatgaagataytcttcagaaaggtctggttaacagaatagtgagggaagggatcgataattttattacctatggttgttacctacacaattatcctatagggctctaacttgtacctcatcaaaactatccaaatccactactgatataccaataagctaacttcatctttttgaatgttaaaaatgttctttttgagcataaagaaattttctcaattaaaactccttcaggccgggcgcagtggctcatg

SEQ ID NO: 152843 - DNA, 463 bp, Homo sapiens
caaaggggcacctgccagatgccagccggagctctcctgtatgcggtgtctgtcaacccctactgggaggtgtctcccagtcaggaggcagggggrtcagggaaccacttgatgaggcagtctgtcccttagcagagctcaattgctgtgcttggagacccattgctgtcttcagagctgccaggcaggaacaggtaagtctactgaagctgtgcccacagccgccccttcccccaggtgctctgtcccagggagatgggagttttatctataaacccctgactggggctgctgcctttctttcagagatgccctgcccagagaggaggaacctagaggggcagtctggctacggtggctttgtggagctgtggtggagctgtggtgggctccgccaagttcaaacttcctggctgctttgtttacactgtgaggggaaaaccacctactcaagcctcagtaa

SEQ ID NO: 152844 - DNA, 463 bp, Homo sapiens
caaaggggcacctgccagatgccagccggagctctcctgtatgcggtgtctgtcaacccctactgggaggtgtctcccagtcaggaggcaggggggtcagggaaccacttgatgaggcagtctgtcccttagcagagctcaattgctgtgcttggagacccattgctgtcttcagagctgccaggcaggaacakgtaagtctactgaagctgtgcccacagccgccccttcccccaggtgctctgtcccagggagatgggagttttatctataaacccctgactggggctgctgcctttctttcagagatgccctgcccagagaggaggaacctagaggggcagtctggctacggtggctttgtggagctgtggtggagctgtggtgggctccgccaagttcaaacttcctggctgctttgtttacactgtgaggggaaaaccacctactcaagcctcagtaa

SEQ ID NO: 152845 - DNA, 399 bp, Homo sapiens
ttctcgctgtcattccaggtgccactggagtataaaaaaactcctgtagctagctcggtttctgcccaaatggtctgccagttttgtacttgaaacccagggccctggtggcrtaggcacccaagggaatctcctggtctgcccacagctggttggattgtgccccgtgcttgttgaaggtggatcttcctcactcagtccattgactgacaggtcagtctcccctggaaacacccttgcagatacattcagaaataatgctgcaccagttttctgctattaaccccgtcaagttgacacctaaaattaaccatcacatcttgattaagaaagtgaataggcaagccacaaagttgagggctttttagaaaatataatacatacatttgacatatgatt

SEQ ID NO: 152846 - DNA, 283 bp, Homo sapiens
acagaatgcttctagaagctaacacagcagaaacgtctcatgagctggatggctgcaaagatttatttaggtggacattaatgaaaagattcatatatgagactacatgaaaatgacaaacttctgttcagcaaatgacaccatcgagaacgcgaaaaggctactggaggcaggaggaggaagggaatatactggtcaaagcgtataaagtttcaattccgcagcakagttaagttctgaagacctcatctatggcacagtagctatggttaataacaatgca

SEQ ID NO: 152847 - DNA, 256 bp, Homo sapiens
cacaaaataaaaaaaatggtgtgttaggtaatggacatgttaaattagcttgaattcatcatttcacaatgtgtatgtgtatcaaaacatcacaycatataccataaacatacaatttttacttgtcaattacaccttgataaagctgggaaaaagtgaaagggtaggcctcttaggggagaatacatgtatattaaaatgtaaggccaggtgcagtggctcaggcctgtaatcttggcactttgagaggccaggg

SEQ ID NO: 152848 - DNA, 440 bp, Homo sapiens
gtagggcaagaagaaatccaatttttttatatagataactaacttgtgaggacctttttatttcatcattcatgatttctgagatttgaatttagcattttacccagattaaaatcatgcatggtatagcatragccacatcacttctttccttagacagactcttcatatcatgactgctttgctctgaatatttgtgtgtccccagaattaacgtttaaatctaatcaccaatgtaatggttttaggaggtagggtctttgaggggctattaggtcatgaggttggagccctcatgaatgagattagtgtcctaataaaaagatcccagagacctcccctgtcccttctgccacatgaggacacagcaagaagatagcatctatgaaccaggaagcaggccctcaccagacactgcatctgttggtgccttgattttg

SEQ ID NO: 152849 - DNA, 300 bp, Homo sapiens
aatgttcactgggtcaattgtctcctcttgtattgtaaagggtgcaaattcaagcttcttctagggatgtgtgagaggggccaccatatcctatcttgactacttgttcaattgagccaaggcctctttgcagcccaggtagaggttgcatggggagaagcaggcaagctggagaattgccaaattgccttctcacttcaacgagycatcaaagtttcatgcaaatgtacgcaggtactctcagtgaaactcatgtacatcagacctgaaacagggcttgaatcagtccagtctaccagc

SEQ ID NO: 152850 - DNA, 546 bp, Homo sapiens
aatgggaacaagcacatatttggcttctgaggagcctgccaggaagaggaggtcaaggckggctcatagaaaatacatggaatcccaaaggcgtatttgaaacacaactttttcagccaaagaacatataaggtattctttcttaaaagaggatcctcaatgagctatatgttgccagattgtgtgagaatagtgacattatttctcagtcttatgttaagccccttccatacattggcttatcaaatccttacaagaaccctgcaaagcatgtgtcatattccccactgtatatggaggaaaccgaggttctaagaggttgtaaaatttgcccagattccccagctaatatgttgcaaaggcacaatgtgaatcagtttctgcctttacttctttagcctctaacagtgaaatctatactgtctggaggcagagagggaaagaggaaaaaggaggagagaacaggagagaagggaactggggcaggagaaaatggatgtttgaagggtaggcaaaaatataactcagagcaatgcaaactcacta

SEQ ID NO: 152851 - DNA, 546 bp, Homo sapiens
aatgggaacaagcacatatttggcttctgaggagcctgccaggaagaggaggtcaaggctggctcatagaaaatacatggaatcccaaaggcgtatttgaaacacaactttttcagccaaagaacatataaggtattctttcttaaaagaggatcctcaatgagctatatgttgccagattgtgtgagaatagtgacattatttctcagtcttatgttaagccccttccatacattggcttatcaaatccttacaagaaccctgcaaagcatgtgtcatattccccactgtatatggaggaaaccgaggttctaagaggttgtaaaatttgcccagattccccagctaatatgttgcaaaggcacaatgtgaatcagtttctgcctttacttctttagcctctaacagtgaaatctatactgtctggaggcagasagggaaagaggaaaaaggaggagagaacaggagagaagggaactggggcaggagaaaatggatgtttgaagggtaggcaaaaatataactcagagcaatgcaaactcacta

SEQ ID NO: 152852 - DNA, 529 bp, Homo sapiens
gtaaacagggcttgggctggtgggcagagttgggacttagagtcagagaggtcgtctggaatccatacattacctgatatagttgggaagagaagctaaatcccattcatacatttctttgagagtcaggagaggaaggtggtcaagaatcagaaggaggcaatgctaacatcaaacccaaaaggggataaatggaattaaagatggaaaattggataaatgtaggagcaggttgggaagaatgtcacagatttttttttttgggaaaaagccgtagtaggacatatcggtgtaagataaacaccagtttctgccattttcaccgctactaccttagaccatcatctacaatcrgcatatcttaggatatacctggccaagtggccttcctgcttccactcttgcctccctgtagactaatcttccatagtggcctttttgtgtaaatcaagtaatactactcctctgcttagacaccccagtgcctttccactgaagtcagaataatatccaaatttcttattatggc

SEQ ID NO: 152853 - DNA, 375 bp, Homo sapiens
atacaatccacgagatagtgaagaatttaaatgcttccaagccaaatgtgaaaaaactggacctgtgctttattaatatggacaaaaggccagttagaaatctacagccaagccacatcagaagaaataaggaccacaggaagagagggagcagcaaagagggattagatataagagatcacagtgggtagggaggatgaaaattttggaacgtgttgactaactagaggaatgcagaagaaagaaaaatcaaaatgacttaggttttgaacttggatgttaaatttttagtagactgaatttgaattaatgatggyacatatggatgggtattcagtagggatgtttagtacattgataaattatgagtctaaa

SEQ ID NO: 152854 - DNA, 375 bp, Homo sapiens
atacaatccacgagatagtgaagaatttaaatgcttccaagccaaatgtgaaaaaactggacctgtgctttattaatatggacaaaaggccagttagaaatctacagccaagccacatcagaagaaataaggaccacaggaagagagggagcagcaaagagggattagatataagagatcacagtgggtagggaggatgaaaattttggaacgtgttgactaactagaggaatgcagaagaaagaaaaatcaaaatgacttaggttttgaacttggatgttaaatttttagtagactgaatttgaattaatgatggtacatatggatgsgtattcagtagggatgtttagtacattgataaattatgagtctaaa

SEQ ID NO: 152855 - DNA, 461 bp, Homo sapiens
gaattctgcagatcctaagtgaaaactggtcatcaactagcagtatgcagttcagagcctgctgaacaaactgcataaacctcagagtaggagaacatgacagaaggctgcgttatctgaaattttagctaatttttttttaactagcaggagccatctgtcatgattattctgattcaagggctaaattgaacggaaggcattgctgggcgattaaacaagttctctcaaaatattttcatacctttctgtctcgtcagaagcttttttttttttccaccraagatgtcatccgattgtggattttttttttttttttttttttttgggcagggggaggatttctgtctcccatgccataaaaaaaccttgtcactgggttggccctaaggaatggggggagatgcaagtaaaggggggggtcctattggaagcttattcttcacttttggctttggcag

SEQ ID NO: 152856 - DNA, 461 bp, Homo sapiens
gaattctgcagatcctaagtgaaaactggtcatcaactagcagtatgcagttcagagcctgctgaacaaactgcataaacctcagagtaggagaacatgacagaaggctgcgttatctgaaattttagctaatttttttttaactagcaggagccatctgtcatgattattctgattcaagggctaaattgaacggaaggcattgctgggcgattaaacaagttctctcaaaatattttcatacctttctgtctcgtcagaagcttttttttttttccaccaaagatgtcatccgattgkggattttttttttttttttttttttttgggcagggggaggatttctgtctcccatgccataaaaaaaccttgtcactgggttggccctaaggaatggggggagatgcaagtaaaggggggggtcctattggaagcttattcttcacttttggctttggcag

SEQ ID NO: 152857 - DNA, 619 bp, Homo sapiens
tatctttgctaggcttggcctttctgactggccagaaacagaaaggatcttataaatgtattagttttcacttatttcgatattaaatatatagcaaattttttcctgcattcatgaagtgatccagcttttgtcaacaagaaaaagaagaagcttcccctgtgttttccgtcatgggttacttgtaaaagaggaatgcagccattcatagaaacactgtagtaagtagcaaaactttgatctttacaattccagatgactagagttgtaatgagctgtgcacaacctggtgagagcaagtaggactgtactggggtaggggaaatgtgggagagatggtgtcttcctgccaagattgccttggataggagctgcgtttaatacaaaggagtgaaaaaagagccaataagaggcagtgtagtcagatgatctctttttaaagtttatgtagctatgtaggtaaaaaaaaaaacagagaggtaaaggtacctcctgctggtagaggaagggcaaatcatgggamagaaaaactttgagaatgtcatgttcttttctgttctatgcattagcaagtaaatacaatagcactatgtggaaacagcaaaggaattaaaatgtg

SEQ ID NO: 152858 - DNA, 598 bp, Homo sapiens
ggcacagtgaccctaaatacagggaagggacatttaacacaggtagtgactgagacatcactttgttgtaatttcctcagctgtggcacattccagtctctgaccaggactctctgtattagtgcctaactaactctttcaggacctttggaaggtatgtttgttatttttgtactaacctaatacatgccgtgtaagaaaaactggaaaaaaaaattcaaggcttggaatgagttctggtgatcacttttaatttatcttctatcattaaaatatgatctggggtccacatgttttaccaagggcagacatggatgcttttctgctttctattaccaactactctagggttttatagttacccgtaccaacgaggtctttgcaaggaatttcacggctagggttactyctggcatcaaagacgggcaattctttcttagcttcactaaatattcatgttttccaacagtgtgagtccatacaactttgtggtgagagttaatttggttttctctgggattaggcatggttctagaaagggcttcttaaattgaacaagcttaggaaccttaagtaaaatttccaaaggagagccgta

SEQ ID NO: 152859 - DNA, 544 bp, Homo sapiens
ccttaaggtttttaaacattctctagtacaggaatgatctaaagggtgaggcaggaggcacatagcagaatctcttgggaggggtgtctttcartgtaacatagttttatatttggaataagaagcccaactatttatttaaaaaactgcataatgtatattttaccaacatcttcttagctgtcaggaatagttaaagaagatagagggaaatttttcagtgacaggagggagggtctttacttgtggttcccaatcttggggatgtatcagaatcacctgcagcgccccaccccagagctgctcattcagtaggtctgcgatgcgtttctaagttcccaggtgatgatgcttctactggtcttgggatttcactcttggaaccactagtctctaagaatttttatgaggagaaactaatagttttctgtttatggaaagaggaaatgaactgtggaaacagcgaattataaaaacctagcatttttaaatataggaacagaaaccttactatctcatcttccttgatcaactgtgacgaata

SEQ ID NO: 152860 - DNA, 533 bp, Homo sapiens
ggctttcagatcccttaaggtttttaaacattctctagtacaggaatgatctaaagggtgaggcaggaggcacatagcagaatctcttgggaggggtgtctttcaatgtaacatagttttatatttggaataagaagcccaactatttatttaaaaaactgcataatgtatattttaccaacatcttcttagctgtcaggaatagttaaagaagatagagggaaatttttcagtgacaggagggagggtctttacttgtggttcccartcttggggatgtatcagaatcacctgcagcgccccaccccagagctgctcattcagtaggtctgcgatgcgtttctaagttcccaggtgatgatgcttctactggtcttgggatttcactcttggaaccactagtctctaagaatttttatgaggagaaactaatagttttctgtttatggaaagaggaaatgaactgtggaaacagcgaattataaaaacctagcatttttaaatataggaacagaaaccttactatctcatct

SEQ ID NO: 152861 - DNA, 544 bp, Homo sapiens
ccttaaggtttttaaacattctctagtacaggaatgatctaaagggtgaggcaggaggcacatagcagaatctcttgggaggggtgtctttcaatgtaacatagttttatatttggaataagaagcccaactatttatttaaaaaactgcataatgtatattttaccaacatcttcttagctgtcaggaatagttaaagaagatagagggaaatttttcagtgacaggagggagggtctttacttgtggttcccaatcttggggatgtatcagaatcacctgcagcgccccaccccagagctgctcattcagtaggtctgcgatgcgtttctaagttcccaggtgatgatgcttctactggtcttgggatttcactyttggaaccactagtctctaagaatttttatgaggagaaactaatagttttctgtttatggaaagaggaaatgaactgtggaaacagcgaattataaaaacctagcatttttaaatataggaacagaaaccttactatctcatcttccttgatcaactgtgacgaata

SEQ ID NO: 152862 - DNA, 533 bp, Homo sapiens
ggctttcagatcccttaaggtttttaaacattctctagtacaggaatgatctaaagggtgaggcaggaggcacatagcagaatctcttgggaggggtgtctttcaatgtaacatagttttatatttggaataagaagcccaactatttatttaaaaaactgcataatgtatattttaccaacatcttcttagctgtcaggaatagttaaagaagatagagggaaatttttcagtgacaggagggagggtctttacttgtggttcccaatcttggggatgtatcagaatcacctgcagcgccccaccccagagctgctcattcagtaggtctgcgatgcgtttctaagttcccaggtgatgatgcttctactggtcttgggatttcactcttggaaccactagtctctaagaatttttatgaggagamactaatagttttctgtttatggaaagaggaaatgaactgtggaaacagcgaattataaaaacctagcatttttaaatataggaacagaaaccttactatctcatct

SEQ ID NO: 152863 - DNA, 544 bp, Homo sapiens
ccttaaggtttttaaacattctctagtacaggaatgatctaaagggtgaggcaggaggcacatagcagaatctcttgggaggggtgtctttcaatgtaacatagttttatatttggaataagaagcccaactatttatttaaaaaactgcataatgtatattttaccaacatcttcttagctgtcaggaatagttaaagaagatagagggaaatttttcagtgacaggagggagggtctttacttgtggttcccaatcttggggatgtatcagaatcacctgcagcgccccaccccagagctgctcattcagtaggtctgcgatgcgtttctaagttcccaggtgatgatgcttctactggtcttgggatttcactcttggaaccactagtctctaagaatttttatgaggagaaactaatagttttctgtytatggaaagaggaaatgaactgtggaaacagcgaattataaaaacctagcatttttaaatataggaacagaaaccttactatctcatcttccttgatcaactgtgacgaata

SEQ ID NO: 152864 - DNA, 200 bp, Homo sapiens
gcgtttctaagttcccaggtgatgatgcttctactggtcttgggatttcactcttggaaccactagtctctaagaatttttatgaggagaaactaatagttttctgtttatggaaagaggaaatgaactgtggaarcagcgaattataaaaacctagcatttttaaatataggaacagaaaccttactatctcatcttcc

SEQ ID NO: 152865 - DNA, 610 bp, Homo sapiens
acttcctggttgtgtgtgaatgcagtgaacgttactcacttggaacatgaaatgactgtacaattctaaataaaatattttatcataggtagcatttgtccaccaagttgcaagatttgcccctgaaacaggaaataacagaattgatctaaagcccctcacctagcttccttccctgaaagtatactgtgaaaatgccactttttgaattttrctcagtttctggacagaggtgctggattgcctagctttcctgtcattaggagtgactgaaagcaaccatctggggcttctgacaagcttggtcatggaactcagaaacaagggacccaagttattttggtagcttcatacacagcaagctgagttcttcacagtggctgtatttggttgggaaaagaagatctccagaagaatcaaagagctatcctgggcttttggaatcttgagcccagctgaaggtgctgattactataaacaacaatcacttcatggtccatattcctgagatctctgctttcatgaaattgatcttgattacttcgtatcagttctgatcaagtcaccaagtggctatgtatctgatatgtgcaagaccaaaagaaggtct

SEQ ID NO: 152866 - DNA, 374 bp, Homo sapiens
tgtttcagtgttctatgaaactttagggctaataagcagtacccccatttccattgtatcccctaaaccaagagagctgctcagtggcctggccctggatatgccatagagatgctcagtgatgccaaacttctccaaattgcccttttcttttttcttgtagatcaacattcccagttgcttgccaactgtttgaggtgatttcacacaacagtatctggctggatcctcctttcatcccatcaccttttggatgactttgctactagctgttaactygttccccagcctcatcatcaaaaacatttttttggtatttgtagagggatttaggtgattcatgtattaaactccttccctggccccatcacttc

SEQ ID NO: 152867 - DNA, 526 bp, Homo sapiens
tctgttcaccctacagagccagaatattgtaaactcctacttaatgggaacttctttcgcatgccacagattaaattgccagaaaggttagggatgcatgaggtgagtttgttcctcattcactgatcartgctactggttttctttccatcatgagccaaggactgtgccaggtgcaggtcgatctttggtgaagaaaacatgcgccattgccgtgtgcaacttaagacctgttggtattagtaattgccagttgattgataggatgtttgctagcatctcccttcctccggaatgattctaatattatgttaatgtaacattccctccccttgcttttatgaaatggtggctttttggtgatgattaatggaatgatgaagaatgatgcaaaaaagcagtttgccctcggctctttccacattgtacagcaggccttggttgtcacatgtcatctttgaaaatgaacttcgtggtagtaatatttcctggtttcatcattcacattgtgacagctttcaagtgt

SEQ ID NO: 152868 - DNA, 526 bp, Homo sapiens
tctgttcaccctacagagccagaatattgtaaactcctacttaatgggaacttctttcgcatgccacagattaaattgccagaaaggttagggatgcatgaggtgagtttgttcctcattcactgatcagtgctactggttttctttccatcatgagccaaggactgtgccaggtgcaggtcgatctttggtgaagaaaacatgcgccattgccgtgtgcaacttaagacctgttggtatyagtaattgccagttgattgataggatgtttgctagcatctcccttcctccggaatgattctaatattatgttaatgtaacattccctccccttgcttttatgaaatggtggctttttggtgatgattaatggaatgatgaagaatgatgcaaaaaagcagtttgccctcggctctttccacattgtacagcaggccttggttgtcacatgtcatctttgaaaatgaacttcgtggtagtaatatttcctggtttcatcattcacattgtgacagctttcaagtgt

SEQ ID NO: 152869 - DNA, 299 bp, Homo sapiens
cattgagaatgtttttttatttttttatttttttcatttatgaaggatagtttmtctgaatataaacttcacagttgacaagtctctcctttcaccacttgaaaccgcttgattctggactccatggttacagattaaaaagcccagtcattagcttgattgtggtgaatatttcacaatgtatacatataccaaatcatcaagttgtagaccttaaatatattaaattttaatcatcactatacctcagtgaagctggagggaaaatgtgctgtcattgaattgatgttcatgtatcg

SEQ ID NO: 152870 - DNA, 528 bp, Homo sapiens
tcatctagtccagtgcttctcagccctggctgcacattagaatcatctggggagctttaaaaaatatgaatgccagggctacatccattaatcacaatctctgtgggtggggcccaggcatcttcttcagcttaaaagctccccgggtgaatttaatgagtagccagggtcgaggagcagcgaggtagtcctgcagttctcacactagtgtgtcctcagaatcacctggagggcttggtgaatgcactgcgaggcccacccccagaatttctgattcagtgggcatgagsgctgagaatgtacatttctaacaaattccccagctgatgctgatgctgttactataagggtttgaaaagtactatctaggcccttatgttgaatgctgacctcaaagaaaagaggtccctaaggtcatacaaaaagttggtggcaaggagcccttggtctgaatgtgccccatccccagtttttctagttgttagttttctagttttctagtagctgactcctgaccaatattcatga

SEQ ID NO: 152871 - DNA, 404 bp, Homo sapiens
ggttccaacagaaacagaattgagccatccatcaattcacttcagacaaaaccccaagataccacacaatgggaagccggcccgtgtccaaccctataaccatcctagtgagtccctaggcatcttttaactatggtttgaaccagmctgtcttctttctctggctatcaggttttctgaggcactctcttaggaagactgccattctccagcctgacctctgccaaccagggcctcaggttgttgctccctggggctatggatgacctttccagatttccagcccattcccctggggagcagtgattcctgttgtggagacagctggccccaggactccagctcagacttctcaacaaaggactggtccaagaagaagaacatagttccaatcagactgccta

SEQ ID NO: 152872 - DNA, 404 bp, Homo sapiens
ggttccaacagaaacagaattgagccatccatcaattcacttcagacaaaaccccaagataccacacaatgggaagccggcccgtgtccaaccctataaccatcctagtgagtccctaggcatcttttaactatggtttgaaccagcctgtcttctttctctggctatcaggttttctgaggcactctcttaggaagactgccattctccagcctgacctctgccaaccagggcctcaggttgttgctcyctggggctatggatgacctttccagatttccagcccattcccctggggagcagtgattcctgttgtggagacagctggccccaggactccagctcagacttctcaacaaaggactggtccaagaagaagaacatagttccaatcagactgccta

SEQ ID NO: 152873 - DNA, 568 bp, Homo sapiens
tggctgccaggccatagcaagtccccactcctctcttttccatactcaaagcccctcaccgacaggagctgaggtctgccagtgggcaggacccctccatgaccaggcaagtggcctagacacatttgcaaaaaccagtcacgtcatgactcagagattctacctctgatccaaatacccttctcagaggggacttggcacaagggagaaaacccacatattccaccaacttctcttcttttcaaagcgctatctcagcgggctcctaattctgtctccagcatatgtgcttctgtgtgagtgggggtgcgcacatgcaccacatctcagcatcctggtacccgcatggcattcccaggaggggcagaggaaatgaaagtcgagcaagcagcagcagatgttgctggagttcttcttcctggcttggtgctgctcatccttctgcaggtcagactggtaatragaggattaattttagttctcctccttcttggccccaatatggctggccaatgctagttcagctggtaacattttcattggcaaatcctccactcacccttgagac

SEQ ID NO: 152874 - DNA, 584 bp, Homo sapiens
aattttacaaatgagggcatttggcttatagaggctgagagccctgctcttgttagtggtaaagccaggagtmcaatctagcaatactggttgtagattttgctcttaatcactacccaacactgcctctcagatatgccagtgaggcagctccagcctagagggcagtaacttgctcacagtcacctcgctgttaatcttctccctctcaggcctgggctctttctgtgatgttgaactgattagtcatattcattgggagctgctagaaggacccatcttctgcagccagccagccgtccccagagtatcccagttacccctttcttctctaatgctgcccaaaagtgtcccctgaacacaaaaaaacagctttgtgcaggctcctgcagggactcccaggtaaggcctgagcactctcagccctcccttctgccaagatggatagtaccatccaaggacatgatgagatcagctccctcagccctccagaatctgttataaagagaaagcagcttccttgggatagttgccacccaagaactcagaagccaagctttccagcggtgagataagtgtcaggg

SEQ ID NO: 152875 - DNA, 687 bp, Homo sapiens
ctgtgtttaatatttgctgtagttgtaggcatcagaggcttaaaatttcttttgtatccttgtttttgtcttccttcttgactttctgtttgacttgacacctccagagatgacagtatgagaagggagaaaaaaatacctttgcagtgtggaaacctgacaagaaaaacctcatccrggtgatcaaggttaatatcaacattaataaatcatgttggtatggtgtgattaaaatgtcactttacctctgtgatctttctccaagaaaccaataagcccaatctgatacaaataaaaagcattgaagaaaaattcaaatagagatacactctaccaaatactggatcaatactcctcaaaactgtcaagatcatctcagaccatgaacatttaggaagctgtctcagccatctaaaaggacatgactattaatgtaatgtgatattgttgattggttcataaaacatagaaatcgctcaggtaaaaattaagaatatatgaataaagtttaccttttgttaataataacaatattgctcatttattgtaataaatgtaccatactacataaggtgttattaaatagaataaactgaggatgaaggatatgggatctttttgtacaatgtttgtaatattttgtaaatgtaaatttctctaaagtaaatgtttatttaaaaataatat

SEQ ID NO: 152876 - DNA, 687 bp, Homo sapiens
ctgtgtttaatatttgctgtagttgtaggcatcagaggcttaaaatttcttttgtatccttgtttttgtcttccttcttgactttctgtttgacttgacacctccagagatgacagtatgagaagggagaaaaaaatacctttgcagtgtggaaacctgacaagaaaaacctcatccgggtgatcaaggttaatatcaacattaataaatcatgttggtatggtgtgattaaaatgtcactttacctctgtgatctttctccaagaaaccaataagcccaatctgatacaaataaaaagcattgaagaaaaattcaaatagagatacactctaccaaatactggatcaatactcctcaaaactgtcaagatcatctcagaccatgaacatttaggaagctgtctsagccatctaaaaggacatgactattaatgtaatgtgatattgttgattggttcataaaacatagaaatcgctcaggtaaaaattaagaatatatgaataaagtttaccttttgttaataataacaatattgctcatttattgtaataaatgtaccatactacataaggtgttattaaatagaataaactgaggatgaaggatatgggatctttttgtacaatgtttgtaatattttgtaaatgtaaatttctctaaagtaaatgtttatttaaaaataatat

SEQ ID NO: 152877 - DNA, 687 bp, Homo sapiens
ctgtgtttaatatttgctgtagttgtaggcatcagaggcttaaaatttcttttgtatccttgtttttgtcttccttcttgactttctgtttgacttgacacctccagagatgacagtatgagaagggagaaaaaaatacctttgcagtgtggaaacctgacaagaaaaacctcatccgggtgatcaaggttaatatcaacattaataaatcatgttggtatggtgtgattaaaatgtcactttacctctgtgatctttctccaagaaaccaataagcccaatctgatacaaataaaaagcattgaagaaaaattcaaatagagatacactctaccaaatactggatcaatactcctcaaaactgtcaagatcatctcagaccatgaacatttaggaagctgtctcagccatctaaaaggacatgactattaatgtaatgtgatattgttgattggttcataaaacatagaaatcgctcagrtaaaaattaagaatatatgaataaagtttaccttttgttaataataacaatattgctcatttattgtaataaatgtaccatactacataaggtgttattaaatagaataaactgaggatgaaggatatgggatctttttgtacaatgtttgtaatattttgtaaatgtaaatttctctaaagtaaatgtttatttaaaaataatat

SEQ ID NO: 152878 - DNA, 513 bp, Homo sapiens
aaataagcatcatagagtgtgagtttcctttagaaacagcccatggaccccagggctacgtgataaaataataattcactgtaatagtaaaattaatttaacaattcactgtaaaagtgaagaaaatatacaycagtgcaaaagcttctgtaaggtggtttctaacacatagtttttctaaaaatataacctttataacaccttggaagttttgagttttggaagttcatagtttttagatcttttttatggatggatattctgatgttcagagttttagtactgtttataagctcataaccctagtacatttagaaagcagaatttggatgtcaggatcatctaactccaaggcccatctgctttctgatagcctattgtcctcttcttcctctaatatattccaacatgcacagtgaattagtaaacaggactgtatgacgtgaaattagtgaagtgtttagaagtataaagcacacctcagttattactggttacgacttattattatat

SEQ ID NO: 152879 - DNA, 513 bp, Homo sapiens
aaataagcatcatagagtgtgagtttcctttagaaacagcccatggaccccagggctacgtgataaaataataattcactgtaatagtaaaattaatttaacaattcactgtaaaagtgaagaaaatatacaccagtgcaaaagcttctgtaaggtggtttctaacacatagtttttctaaaaatataayctttataacaccttggaagttttgagttttggaagttcatagtttttagatcttttttatggatggatattctgatgttcagagttttagtactgtttataagctcataaccctagtacatttagaaagcagaatttggatgtcaggatcatctaactccaaggcccatctgctttctgatagcctattgtcctcttcttcctctaatatattccaacatgcacagtgaattagtaaacaggactgtatgacgtgaaattagtgaagtgtttagaagtataaagcacacctcagttattactggttacgacttattattatat

SEQ ID NO: 152880 - DNA, 500 bp, Homo sapiens
tgcctagaagaaactggctttcctgtaaagacacatatagactaaaagtaaagggttgaaaaaagacattctctacaaatggaaatgatcaggagtmtgtattcccatataagataaaagagacttcaaagcaataacagtagaataaagacaaggtaattatataatgataaaataatgagtacagtaaaagggtataagaattttaaatatgtattcagccaacactggagcattagattcatgaagtgaatactccttgatctaaagagagactgacatacagtatagtgagagacttgaacatgcctttcacagcattagaaagatcattttgacagataatcagctaagaaacatggaatttaaactgaacattagaccaaatggacctaacagacatttacaaaacattatatccagcaaatacacaatatactgttgttttattagcacatagaatattgcccaaaataaaccatatgtaagggcacaaaaca

SEQ ID NO: 152881 - DNA, 500 bp, Homo sapiens
tgcctagaagaaactggctttcctgtaaagacacatatagactaaaagtaaagggttgaaaaaagacattctctacaaatggaaatgatcaggagtctgtattcccatataagataaaagagacttcaaagcaataacagtagaataaagacaaggtaattatataatgataaaataatgagtacagtaaaagggtataagaattttaaatatgtattcagccaacactggagcattagattcatgaagtgaatactccttgatctaaagagagactgacatacagtatagtgagagacttgaacatgcctttcacagcattagaaagatcattttgacagataatcagctaagaaacatggaatttaaactgaacattagaccaaatggacctaacagacatttacaaaacattatatccagcaaatacacaatatactgttgttttattagcacatagaatattgyccaaaataaaccatatgtaagggcacaaaaca

SEQ ID NO: 152882 - DNA, 504 bp, Homo sapiens
ggaagtcccagccagagtgatcaggctagataaagaaataaaagacattaaaattgaaaacagaaagtcaaatagtgcctcaytgctgataagatcttttacataaaaatacctaaagactccaccaaaaaactcttagatttgacaaatgaattcagtaaagtttcaggatacaaaatcagtgcacaaaagtcagtagaatttttataaaccaagagtgatctagctaaggaccaaatcaagaagccaatcacatttataacagccacaaaaatacttgggaataagtttaaccaaggacgtgaaagatctctacaagaaaaaactataaaacactgatgaagaaaattatagaagacacaaatgaaaatagcatcccattctcatggattagaaaaattaatattattaaaaagatcatactgcccaaagtaatctatgagttcaacacaatgcttattgaaatattaatgttatttttcacagaataagaaaaaattccta

SEQ ID NO: 152883 - DNA, 510 bp, Homo sapiens
atgttttacttgtcaagataatgtcaacctatttgatgtggtatttctcaggaacctcccttttcccatcccatgtaccattatgtatgtatatcggtgactcaatgcaatagtggcagtgacctaaattcctattcattttggtttcaaatgtgtgtatgtgtgtgtgatgtgaacaaatgtaaaagtgcttgatccctcwttctaacattcaagttctaaatgtacatgattatgataaaggagagaagaaagtccagcccaccacaaaaatcaaaattatgtggcctccacatacacatatataagcagtagacataaagcaattctaagtttagaaaacaaaagtggtatttttagaatcatttatgattgtttattactttttaaaaatactattttatacaaaatgttctctcatataccctgcaaatatatatgtatacctaatatgtacccacaaaaattaaaaatgaaaaaatttaaaatgtttataactctctgttaagt

SEQ ID NO: 152884 - DNA, 435 bp, Homo sapiens
atttctagcatttgtcacttttgatagcattatcaaagtgtcctaaattcatttgtaataattcattccataggtttaggcaacctgggtagtattttttttttaattaataggctggtctttatttctagtctcattgccttttactacattgcaccaaaagagaaacactagagattgttcctgtgatattgtgttttaagttagcattaatctaactccattggcaaaggcagatttatgtggattaggcatagtggacaaaaataatccagaacatttttcttaaattctcattgatgaagtatgagtttatatttycatatgttcttctaatacattatggattgatacttttaaagatgtaataaaagtaaataatcagggaaatagttattataaccaggaatccagaataactagaaaagatacata

SEQ ID NO: 152885 - DNA, 563 bp, Homo sapiens
acttgaaatgaaaagttaatgtgcccactggcatttgacttggtgggctattttgaagaaaaaatgtaaacaattttccatgtcttttcctctcccaaatatgtcagaaattaacttattaaagaaaattagaaactggaagatcctgattgctcaaaattcttattagccatgtgctcttgtgctcttcgcacagaagatttagagtcagatacttttttgtgttttgaaattgaactactaggtcatgctacrgtgcaaagtatgctgatttgtaaattaacaggtaagtgtttacattttattataagagtattctgaaaattcaatatcaaatgcaaaactaatatataattatgaaatttggcatgccaacaagggtactatttgtggcagagaacaaatttctaaaagattattttcaaattgaaaccattgttgggtagctcaactccctgttgcatttctgcttttccattaagcagtcagtgaaaaatatctagctccagatcatttagtttgagcaacttcatgaggcacataaaatattccatgaactgcag

SEQ ID NO: 152886 - DNA, 547 bp, Homo sapiens
ggaccagctatagtggcctgtggaggtgaggccaggtacttcagtgacacaacttgacaaagggaaactctatgagttatttcaatgctgatatatagatagatactagatagatacagcccattcattttaattttgaggaatattaatgcaaccatctctttattgttgtgtaactatattctctacaacatattgcctatttaaaatcatggttcacaaacacgcttaaaacatgatttttttgtgctcatttgtgagtatgtctctagaatatttaattgtagaagtattttaaccactcacaaatgtaatttttcctccaaatgtcatacatttttcacttccacaaatggagtatgaatgaattacattacagcccctyctctatactacattatttgatatttttatatatacatttttgttttaatgtatatatctttggccactatttagattaaacatcagtatcttgtcatttttagggatctgctgtgtatactggaaaattttcctgtgtatattgtaagtgttgtaaacattt

SEQ ID NO: 152887 - DNA, 612 bp, Homo sapiens
tatttgtcttaaaaatattcaaaatttaaaaaaaaaaacatagttctattccatgtattgctccacatgatgtggatttagcagtaaattagaggagacttttttaactaaaagactttcacaccatggtagrgagaataatggacccctaaaaagatatgtctcccaatcccagaaacctatgaatatgttaccttaaatacaaaagaggctttgcagaagtaatcaaaataatgaccttaagatgtgggattattctggaatatccagatgggccttgttagtgaaacagtgaggcaggaaagtaagaagcagaaatggagatgtggagatatgaccacaaatgcagagtcaaagtgataaaattgctggttttgaagatacagggggaccatgagtcaagaaatgtgggcatactctagaatctggaaaagataaggcaacagaatctcctgtaggccctgcaggaggcatatagcactgcctacaccttgattttagcccagtgagatccatttcagatttctgaccttttaaactgtaagatattaaatatgtgttaagtcactaattttgtggcaattgttgtgataatttacttgactattttag

SEQ ID NO: 152888 - DNA, 387 bp, Homo sapiens
tgaatatgttaccttaaatacaaaagaggctttgcagaagtaatcaaaataatgaccttaagatgtgggattattctggaatatccagatgggccttgttagtgaaacagtgaggcaggaaagtaagaagcagaaatggagatgtggagatatgaccacaaatgcagagtcaaagtgataaaattgctggttttgaagatacagggggaccatgagtcaagaaatgtgkgcatactctagaatctggaaaagataaggcaacagaatctcctgtaggccctgcaggaggcatatagcactgcctacaccttgattttagcccagtgagatccatttcagatttctgaccttttaaactgtaagatattaaatatgtgttaagtcact

SEQ ID NO: 152889 - DNA, 483 bp, Homo sapiens
tgtttatgttttcaatgccatacttgctttagtgtgaagtaatattattcaagaactcatatcatttgaagagatattttatgagtccttgcaaattagtgtttgctgagacactgtaggaagcagaggtatataataactgcaatatatatcaactcacatatttataygatgtatttcaaaagattcaagtattctttattcctcattgtgtaactaccaaaataaatagaataattaaccacaatgactttaagtccctttctggaaaaagtcaggtaatttatactgtatacaattgctatagtgttgtggagaactttttcatgggtagctggggtgtctctttttatgggtatattctgaatctgagaattgatgcaggttttcaaactgagcaaaggactgtaaattttcattagagaagatagaaccttctgctcatccattcttcatctcatctgattataaatattaaacaat

SEQ ID NO: 152890 - DNA, 545 bp, Homo sapiens
cttgagttctgaatcattaaaaaaaaaaaaaagatrgggcaaagacaatgctactagtataacaaaatcatgaagtccaaaaaagaaatgtgaaaacatataataataaaactaaaaaagaagacagaatatatagaaacctaccagaaattacgtaacatatgaataggttacacacctttactgaaagatatatagactcttagaatgagtgtttaaaagaccaacttaaacatatttacatatatcatgaaaaaaagttaatatctgtaatatacaaaaaacttcctacaaatcaagtgatgagaaaataataaaaagtagagtaacaatatgttcaatagttatgagccagctagacataaaagaaaaagtaacaaaaatgaacattaataatacaaaaaaattagattatctattgcactgatacttatttcaataagattggtaattcatactatcaaggcggtacatgaaccagacagttggtaaaagagtaaaaatgccaatatatatatatatatgtataatataaaaactatggt

SEQ ID NO: 152891 - DNA, 649 bp, Homo sapiens
ttctatacatcctctgaaatctaggcaggagtttccaaacctcagttcttgacttctctttacccacagactcaatactatggaaagttgcygaggcttggggcttgcaccctttgaagcatggccagagctgtaccttggccccttttagccactgctagagtagttgggacatagggcatcaagtcctgaagctgcacacagcaggggaatcctggacccagcctaggaaaccatttttccctcctagacctctaggcttataatagaagaggctgccatgaaggtctctgacatgccctagagacattttcatcattgtcttggtaattaacatttagctactcgttacatatgcaaatttctgcagcgggcttgaattacttcccagaaaatggttttttcttcccagaaaatgggtttttcttttctatcacatcatcaggctgcaaattttccaaacttctatgctctgcttcctcttgaatactttgccacttagaaatttctttcaatagataccctaaatcatctctctcaagttcaaagtatcacagatttttagggcaggggcaaaatgccaccagtctctttgcaaagcaagaataacctttactccagtttccaacaagtttctcatctctgtctg

SEQ ID NO: 152892 - DNA, 649 bp, Homo sapiens
ttctatacatcctctgaaatctaggcaggagtttccaaacctcagttcttgacttctctttacccacagactcaatactatggaaagttgctgaggcttggggcttgcaccctttgaagcatggccagagctgtaccttggccccttttagccactgctagagtagttgggacatagggcatcaagtcctgaagctgcacacagcaggggaatcctggacccagcctaggaaaccatttttccctcctagacctctaggcttataatagaagaggctgccatgaaggtctctgacatgccctagagacattttcatcattgtcttggtaattaacatttagctactcgttacatatgcaaatttctgcagcgggcttgaattacttcccagaaaatggttttttcttcccagaaaatgggtttttcttttctatcacatcatcaggctgcaaattttccaaacttctatgctctgcttcctcttgaatactttgccacttagaaatttctttcaatagataccctaaatcatctctctcaarttcaaagtatcacagatttttagggcaggggcaaaatgccaccagtctctttgcaaagcaagaataacctttactccagtttccaacaagtttctcatctctgtctg

SEQ ID NO: 152893 - DNA, 484 bp, Homo sapiens
actttcattaactgcattaacatgagacttcctaacctacaaaaatattttatttttgtaatgctctgcagtgctttcctccacatacattataaaaaagaggaacatatgtctttctgtttatctctctagatgtgtgaaatayattttgtaaaataattcttatcttctcagcagaatatatgtaaacctcataaaatattgttacattattatcttcagaattgatgagtaaatctagtttttacagacccaacattaatataatggtaaaaacactaactgccttttagaaaattatagtttcttatttagaagtagatatgtaaaaatgaatttgttcttataagtaaaattattagtaggttaaattcctggagatttcttaaaaaagtgaacaaaaatctaattctcattggcaaaactattgactctaacttgcatggatagtagagtaaaagcctggcttatttgtaaaatcagt

SEQ ID NO: 152894 - DNA, 488 bp, Homo sapiens
tgtgtgtttttcttttgttgcctgtgctcttggaatcatgtctaaaaattcattgtccatatcaatgtcctagagcatttccactatgttttcttctagtaattttacaggttgaagtgttatattagtctttaatgcattttagttcatttttatatatagtgtgatgtaaagatctaatttaactcttcygcaggcagataaaacagttttctcaacataatttattggaaactgtgtttttttctgttgtgtgttcttggaaccttttcaaaatcatttcaggctggaaattacaggtgtctcacacccaggaggccgatgtgggagaatcatctgagccccagagatcaaggctgcagtgagctgagatcatgccactgcactccagcctgggtgacagagtgagaatctgtcaaaaaaaaaaaaattgaagacaaatgtatgggtttatttctgcctttgtgatgaaataaactgcctacatg

SEQ ID NO: 152895 - DNA, 367 bp, Homo sapiens
cttttcaaaatcatttcaggctggaaattacaggtgtctcacacccaggaggccgatgtgggagaatcatctgagccccagagatcaaggctgcagtgagctgagatcatgccactgcactccagcctgggtgacagagtgagaatctgtcaaaaaaaaaaaaattgaagacaaatgtatgggtttatttctgcctttgtgatgaaataaactgcctacatgaaataaactggcattctttttcttcaaaattctataaaattctataaaatgtaytgtaaggaaacgtcaatgtatatacggtggcatcatcaaatggcagggttacaagtcatttatcactgatttgcattttattattattatt

SEQ ID NO: 152896 - DNA, 484 bp, Homo sapiens
actttcattaactgcattaacatgagacttcctaacctacaaaaatattttatttttgtaatgctctgcagtgctttcctccacatacattataaaaaagaggaacatatgtctttctgtttatctctctagatgtgtgaaatacattttgtaaaataattcttatcttctcagcagaatatatgtaaacctcataaaatattgttacattattatcttcagaattgatgagtaaatctagtttttacagacccaacattaatataatggtaaaaacactaactgccttttagaaaattatagtttcttatttagaagtagatatgtaaaaatgaatttgttcttataagtaaaattattagtaggttaaattcctggagatttcttaaaaaagtgaacaaaaatctaattctcattggcaaaactattgactctaacttgcatggwtagtagagtaaaagcctggcttatttgtaaaatcagt

SEQ ID NO: 152897 - DNA, 524 bp, Homo sapiens
ctttattcattgaagaatcacgtaggccacttgaaacacaaaattatagaagtttatgatagttaaggattttagagtgaattaacaactcctgacctcatgttctaaaactcttctctgggctaatttcacatatacagatttttgtatgaaccattcgggaatattaaaggaaatataaatctgtcatctttctaggctcagtgtccatgcctgtaaaatgaaggagtttgcttaaatgcactctaaaatccttaacctcttagatgtttaaggtttccaatgattttggaaagtttacagccattattttttagactatttttcctgcttgcttctcaattttctatcctgatattcttttttacrtatgctggtgtgtttaattgtatctgccctatattctcctaaaagtttgtttgtttttcttcattattttgtttctgttcttcagaatgaaccataacttttattttcaacttcactgaatttatcttctgccagtttaaatctactgttgaatt

SEQ ID NO: 152898 - DNA, 524 bp, Homo sapiens
ctttattcattgaagaatcacgtaggccacttgaaacacaaaattatagaagtttatgatagttaaggattttagagtgaattaacaactcctgacctcatgttctaaaactcttctctgggctaatttcacatatacagatttttgtatgaaccattcgggaatattaaaggaaatataaatctgtcatctttctaggctcagtgtccatgcctgtaaaatgaaggagtttgcttaaatgcactctaaaatccttaacctcttagatgtttaaggtttccaatgattttggaaagtttacagccattattttttagactatttttcctgcttgcttctcaattttctatcctgatattcttttttacatatgctggtgtgtttaattgtatctgccctatattctcctaaragtttgtttgtttttcttcattattttgtttctgttcttcagaatgaaccataacttttattttcaacttcactgaatttatcttctgccagtttaaatctactgttgaatt

SEQ ID NO: 152899 - DNA, 592 bp, Homo sapiens
gaattaacaactcctgacctcatgttctaaaactcttctctgggctaatttcacatatacagatttttgtatgaaccattcgggaatattaaaggaaatataaatctgtcatctttctaggctcagtgtccatgcctgtaaaatgaaggagtttgcttaaatgcactctaaaatccttaacctcttagatgtttaaggtttccaatgattttggaaagtttacagccattattttttagactatttttcctgcttgcttctcaattttctatcctgatattcttttttacatatgctggtgtgtttaattgtatctgccctatattctcctaaaagtttgtttgtttttcttcattattttgtttctgttcttcagaatgaaccataacttttattttcaacttcactgaatttatcttctgccagtttaaatctactgttgaattcctccaatgaaatgtttattttgatgattttattttccactctttaatttccatttaakttatattttatttagtaaaatattgtcatcataccttcctttatttctttaagaatggtttcgtttatttagtcctttgattatatt

SEQ ID NO: 152900 - DNA, 567 bp, Homo sapiens
agcttcttatgaaattgagttctttaaacatctgtaagtaaaatttcaggccttactttattacacaagggaaagaaatacaatgacataagcaagattgctctagcagtcttgtttatagcagtttaaaactataaacactcaactgtccatcaacaagagagctgataattgcatcatggtagactcatatcatggaatagtacccattaataaaagggggtcaacwatgatgcacttgacaacatggataagcctacagatattattctgattaaaggaatttggatacaagcaagtacatattgtaggattcaacttatatatatacaaagaacagcagatattaatgtgtaacatagaaatcataaagttgttgcctctgcaggtgggggaaattgaatgcaattgctcaaaacagaactttctacagcaatgaatatatacatccacaaatgtccaaactcattaaaatgaacatgatatctgtacactttattatatggaagtgatactacaattttaaaaattaaatgttcggaagctaaaaaatctcataatttccca

SEQ ID NO: 152901 - DNA, 596 bp, Homo sapiens
ggtagtttgaccagaatagccgcttacataccagaagagaccattggttaagagcttctattagcctttggacttggctttaaaaagggcataacagagatattactatacacctattggaatggtcaaaatctagaacactgacaacagcaaatgttggtgagcaacagtaactcttttttttttttttttttttgagacgaagtctggctctgtcacccagactggagtgcagtggtgcgacattgrctcactgcaacctccacctcctgggttcacgccattctcctgcctcagcctccaaagaggctgggattacaggcatgcaacaccatccccagctaatttttctgtatttttttcagtagagatggggtttcaccatgttggccaggctggtctcgaactcttgacctgaggtgatccgcctgccttggcctccccaaagtgctgggattacaggcatgagccaccgcgcccggccccgccaaagcaactcttattcactgttggtgggaatgaaaaacgatgcagccactttggaagacagtttggcaatttcttataaaactaaacatactcttaccatataattc

SEQ ID NO: 152902 - DNA, 265 bp, Homo sapiens
ccaccaagcagcgtttgtcatagaatgttgtaacatctgaggaaaggcaaggctctcactggcttgcaggaaaatatccatayttagacagatggtctaacactgtcagtagctttaggtacttcctttaagactatagattgaactagtaacaaagcctaacagagctctcaattttaggaggcattttcctctcaagagctgtaccctaaggaaaatttgatggtaaagctgtcattaccagaactcaagtaaggtcactggg

SEQ ID NO: 152903 - DNA, 555 bp, Homo sapiens
atatggaactgctatttattattagaaatgcaaagmacagtgaaattcaagataaaactgcagaagcttgaggttttaaaaaaggatgacaagaaccaggacctggatcccagttcaggttccatttgtccccacgtctattgtatccagtgttatttaaggaatgcatataaggttcaaacaggacagggtgcccattgtgcttccttctatatgtctctcatcttccctcttcccccactgagttctttattaacaatgaaatgatttcttaatctcattactgagaaaagcacaaagcacagaaaagcatatgctacacaaattaagctgggtaatttgcatacctagggaaagggagaaacccctcccccttccttctccagagtcaattttcctcgatcttctgacaccatatgtcaataaatatctatatttcctcatgccctggacaggagatgctgttaaatgtcaaatataaagtaaagtttgtcataaaaatccctcataaaaaaatctcccaactaccagcattgaaagatggaggaagggaat

SEQ ID NO: 152904 - DNA, 557 bp, Homo sapiens
atatggaactgctatttattattagaaatgcaaagaacagtgaaattcaagataaaactgcagaagcttgaggttttaaaaaaggatgacaagaaccaggacctggatcccagttcaggttccatttgtccccacgtytattgtatccagtgttatttaaggaatgcatataaggttcaaacaggacagggtgcccattgtgcttccttctatatgtctctcatcttccctcttcccccactgagttctttattaacaatgaaatgatttcttaatctcattactgagaaaagcacaaagcacagaaaagcatatgctacacaaattaagctgggtaatttgcatacctagggaaagggagaaacccctcccccttccttctccagagtcaattttcctcgatcttctgacaccatatgtcaataaatatctatatttcctcatgccctggacaggagatgctgttaaatgtcaaatataaagtaaagtttgtcataaaaatccctcataaaaaaatctcccaactaccagcattgaaagatggaggaagggaattc

SEQ ID NO: 152905 - DNA, 421 bp, Homo sapiens
ttgtctcataaagacctccatgtaacttcttaatacctttatctacacttcgccctccttctgctgttgagtaaaagtatgaaagtgatgctgcatgtgcagtcaagatatagtacacctgctattaggtttccgctttacaatgatctgctttaagacaacaacttgagcaactctgcatctaaaagcctggattccttgtgcatactttgtgtcattgtccatgatgcacaacragctgagccccttcctgttcccacataacaacatggactttgccctactctgcttggaaacccctttccccttctgcacttgggaagtcagcaagaaactcatgcttcaaaccctagctcagagggttgagaacctagctcctctcccaggcaaatattcactcatctcatctgctcccagaatg

SEQ ID NO: 152906 - DNA, 559 bp, Homo sapiens
actaatttttctcagtaagcaaacaggccaggtactctaggattctgtgtgttatttttccttccatctgaggaccaccttgttcatccccctgtctctacacagtatgaacaccaccaccactcgccctgggtaaacagaaactccgtggcttccctcaggccatagtccctccctcatattcccttctcggtggtctcattaaagaagtcttgggttacccttttcagcccaaagatttataataaaaatgaaactaggatttaggagaaggctgctcttctctctctcttcaggtagaaaaataatggacctacatggcagtgaaagttttaggtcattcattcattcattcaataagtattaagcacctactatatgccagtcrctgtgcttggtgctaagaacacaacaggcaggggaaagacatgttccctgtctacgtggcactgtctttaaaaatgttcttatctaatccaaaagtgccagaaacgcctaatctgaatctaatgatgaaaataatccgtcaaatttagacccagtgactttctacaaaaca

SEQ ID NO: 152907 - DNA, 496 bp, Homo sapiens
cattgggcaatggtggatttaaatgattgaagttcagtggaataccaggttttgtgctcataaagctgtgtgtttatatgttgaaatatggctgaatggaagaattgagaaactttgctttcatttcctggctttaccacttgttgcatgaccttgccctgggayagacaaaaggaatcaagacaaattgagtgggaggctacatctagaagaagctctttcaacaggtacttcagggactcaaattttctcctgtgagtttagttcaatatcctgtttttttctaactgttttgtagtgccatctttgacctcagtattttttatcttgactttgaaacctgtacttgatttcacccttactgcccccgattttacctttgaatttaacttctctgtttctcacttgggcttagtgatgtggtcttgactttcatcaagcttttcttggtcattgttttataccctaactccataaacttgacacttaaatatag

SEQ ID NO: 152908 - DNA, 621 bp, Homo sapiens
cggtgttcaactcccagaggaatctctcttatggggtgaaaacaactatggagtctgttaactgaacagcacagcattgtatcattgaccagagccctgaataaacagaagtcacaacagaggcgatgtgcgtatacccaaggatccttttagtgatcrttgtgtcagctgagaaatgcttcccatagagtcagcccctctgctgtattttgccccttcaaaattcaccatacttgcctaattctcactacttttactaactggtttgaaaggcaataaggccttttgtactctttttccaaaaataacagaaacagaggcagcgtggagtaattaaggcacttacattgacagatgaatttattgtcctattttctacctagttgcatgtgctttctgtagatgtaaagtgtaagtttttggaatagccatattggcatcatgcatgactgtcacaaaaaactgaatggcaagcaatgatttaccaaataaactgctattcaagaatgtatccatcatgagaatggaaacaatgattgcagaggtatagatctgggagtaaggatgggtatgtaaaatggaccatagcctaatatttgcctaattgttacacagcgtact

SEQ ID NO: 152909 - DNA, 563 bp, Homo sapiens
gctgttggcatggggaaactgtcaaaagaataaatagaagcagggcatcatatgtggttggttaggggaaacatgtttgggtttgtctagctggctctacattggaaacagcaaacaaaaaattggaggttatcagttattgattaagttttggccatttggggctgattgctacagaggctgtggtttgacttcctggatggyttgctgcagaggttatggtttggctttccaaactggttgtggcagcttgtgggtcagagttttatttttatgtatggtctgcccattgtctaaatattgagtctcttatgaggcaccctgtggagtggcccacataagtgagcctggaagcaaatatctgaggcctgccaataatcacatgattgagcttggaagcagatcctcacccagtgaagcttggagatgactgcattcccggcagattccctgaacataaccttgtagaagatcctcagctgagactcttcctgtaagttactgtctgatttctgacaaatagaatctatgcaataataaatatttgttgtcatcaaccacta

SEQ ID NO: 152910 - DNA, 563 bp, Homo sapiens
gctgttggcatggggaaactgtcaaaagaataaatagaagcagggcatcatatgtggttggttaggggaaacatgtttgggtttgtctagctggctctacattggaaacagcaaacaaaaaattggaggttatcagttattgattaagttttggccatttggggctgattgctacagaggctgtggtttgacttcctggatggtttgctgcagaggttatggtttggctttccaaactggttgtggcagcttgtgggtcagagttttatttttatgtatggtctgcccattgtctaaatattgagtctcttatgaggcaccctgtggagtggcccacataagtgagcctggaagcaaatatctgaggcctgccaataatcacatgattgagcttggaagcagatcctcacccagtgaagcttggagatgactgcatycccggcagattccctgaacataaccttgtagaagatcctcagctgagactcttcctgtaagttactgtctgatttctgacaaatagaatctatgcaataataaatatttgttgtcatcaaccacta

SEQ ID NO: 152911 - DNA, 563 bp, Homo sapiens
gctgttggcatggggaaactgtcaaaagaataaatagaagcagggcatcatatgtggttggttaggggaaacatgtttgggtttgtctagctggctctacattggaaacagcaaacaaaaaattggaggttatcagttattgattaagttttggccatttggggctgattgctacagaggctgtggtttgacttcctggatggtttgctgcagaggttatggtttggctttccaaactggttgtggcagcttgtgggtcagagttttatttttatgtatggtctgcccattgtctaaatattgagtctcttatgaggcaccctgtggagtggcccacataagtgagcctggaagcaaatatctgaggcctgccaataatcacatgattgagcttggaagcagatcctcacccagtgaagcttggagatgactgcattcccggcagattccctgawcataaccttgtagaagatcctcagctgagactcttcctgtaagttactgtctgatttctgacaaatagaatctatgcaataataaatatttgttgtcatcaaccacta

SEQ ID NO: 152912 - DNA, 473 bp, Homo sapiens
acagctctcaaattagcaatgtaattgtggatatacagtatagatatactacatgtatacacacatacacacacacacatacacacttttatttttttactgcagtgaatatatatatatatatatatatatmtatatatatccttctccctgcagttttccccaccttcaaaatgtttacttccaattattcctttaccatcttaccatctacacactaaccctaagtgtactaacttccttatccttatatcattcagttgtttcttggactatgtggaagttgctttatcactattaatatactaacagttgaagtttctatttatgaagcagttatttactatgggtcaaaagcaagtcagtcactatagatcaaattcaaaacaggcaacaatgttgactgtggatgttttgtggatggacagcccatagcaactatatgaactgtctgaaatgatcaatttcaaaaa

SEQ ID NO: 152913 - DNA, 623 bp, Homo sapiens
aaatgcagcattaaaacattatgatgtcggctcacttgtttgctttgtggattacatacagtgtgcccagttgaaaaaggataaggccaacatacagtgggtccctgcaagcattagcactcggaatacctcagctgtcacttactctgggaaataacaacaattctactttagtgctataattttgcaattttaccatataaaaccagttaaatgccctctgaaagttcttagactctgcagttacttattcyataaaaggtacaaaagccactactcatgttcacaatttcagaactatacatttatatttaataccctattagtgaagagagaatttatttaaagtcactaaaaacacacttagattccattattttcttacagccaatttcttaaaagtttagggcccatttactttattttaaactttgtatgtttttctaagaaaaaagatgggaggaggtttaatgtttacatatataaagttaatactatttgctcctcaccctatcaggtcaataaaagctacagtcattttaatttagaggtcgcacttacattgactatgggtatcagtttttaaaacagcttaacatgaaccattttacttctaaagtgag

SEQ ID NO: 152914 - DNA, 481 bp, Homo sapiens
gatacaataacagatacatctgaatatatgcaaaggagaggtaaacaaataggggagagcacagaattgaattattaaaaggaatcatcaacttaattcaacaatacatcaaaaacattatacaccatgaccaagtgggggttatctctaggattcaaggttggtttaacattccaaatcaatcaatatgatacaccacattaacagaatgacatttcaaaagcactgatcacctcaacaggtgcaagaatgacatttaacaaagttcaacattctttcatggtaaaaactctcaatgaaataggtgtagaaggaaatttccttgacataataaaggccatttataaaaggtctacagctaacatcataatcgatgaaggaaacmtaaaggcttttcctctaagatctggtacaaagcaaggatccccattctcaccataccacctctgttcaaaatagtacttgaagtattcacaagagc

SEQ ID NO: 152915 - DNA, 505 bp, Homo sapiens
agaattcaatgatttggcagtctacactttctaaatctgtcaatctcctgcttcaatctgtgtgttaagtcatagtataacagctcacagaaatcatatcgatttctaggtctcaagaagattctataacgaatacattttgattcttagtattataacagtagaaaattggcatcagtccacattttggaagaatgacatgactaaatatatgtggcatgtcagacagacatgaatacaaaattgtgctttaaaaaattctaagcctacaatttttaagagttttatctttggttaagcaacttttcttctgtggaacagttacattactgtaatgtatcctcagttacattgtkttctaacagcacctattttttttttgcattaccaatttataaactatgacctcatttatgaaaatacaaatttacatgacataccattttattcccagctaaaccaaaattataaactctggcaattccaaatgttggcaaagttggag

SEQ ID NO: 152916 - DNA, 427 bp, Homo sapiens
ggaaaacaggtatatgaaaatgtgctcaacatcatcaatcattagtgaaatgcaaatcaaaaccacaataagatatcatctcaccctagttaaaatggcttttatcyaaaagacaggtaataacaaatgctggagaggatgaagagaaaagggaacccctatacactgttggtgggaatgcaaattagtacaatcaccatggacaacagtttggaacaaaaaaactaaaaatcgagctaccataggatccagcaaccccactgctaggtttatacccagaaaaaaaggaaatcagtatatcaaagagatatctgcccttgcatgtttattgcagcactattcacaattgccaatatttagaagcaacctagtttcaatcaacagataagtagatgaagaaacagtggtacgtatacacagtggagta

SEQ ID NO: 152917 - DNA, 567 bp, Homo sapiens
caaaatatgcaacgcagtgtctggttcatagagggagttttacaaaccttacctcccttttctaacaagataactctccctgcctgtggcaggctgaagaatgaacccttcaaaatacatccacatcctaatccctggaacctgaaaaggttaatgtatttgctaaaagtgttcttraaaatatgattaagttagggacttcgagatgagattatcctgagttatttggtagatcctaagtctaatcgcaaatattcttacaagacagaatgttaaggactgaattttgtgatcctctgaatgtatatattgaaatcctaatccccaaggtgatggtattaggaggtggggcctttggaaggtaattacatcatggtgtggagccctcaccaacagaattagtgtcctcagaagaagaaacacaagagagattatttttctgtaagccacgtgaggatatattgagaggacagccatctccatacaaggaagagagctcttaccagataccaggtcggctagcaccttgatcttagacttctcaacactatcatagataactgttgt

SEQ ID NO: 152918 - DNA, 495 bp, Homo sapiens
gtaatcatttcaatggatgtcaggtagtatttcattatggttttgatttgtaatttcgttagtgatctgtgatgttaaatattgtttcatgtgcttactggccaataaaaatttctccagaattttggagatatttctattgtagtcatttgtccatttttwaaatttttttgttgttgtttttgaatgaaaattacttttaacagttctttaaataaataattttcattttttctgacaccaagggtggggtgcttttctgataaagtacaacattttcatgctccttcattatggtacttaacacaagctggctggtactatgattaattgtcttcacttgaataactggagggcaggaaaaagtcatcttatgggttcatacctgataaatctgaggtccttgggaagacaggcagggtgtcagagtccaagggaagaaattagaggtgtatgggtatttcagaaaagctctctggtattttaggtatcttt

SEQ ID NO: 152919 - DNA, 445 bp, Homo sapiens
ctgtaaacttcacctactgggttcaagcaattctcctgcctcagcctcccaagtagctgggattacaggcacctgccacaacgcctagctaatttttgtatttttagtagatatggggtttcatgatattggccaagctgctcttgaactcctgatctcaagtgatctgcctgcctcagcctcccaaagtgctgggattacagacatgagccactgcaccctacctaacccatctatttttaaagctgattatggacaactcaagaacaaaatttcttatattaatgtttgtcctctccaaatctcatgttgaaattcgatccygaatgttggagatgggcctaatggaagatgttgggatcatgcgggtgacccttcatgaatggcttcatgcctttctcatggtaatgagtgaattctcacccttagttcctgtaaggactga

SEQ ID NO: 152920 - DNA, 648 bp, Homo sapiens
ggtttaattgaacttacagtcatgtggctgaggaagcctcacaatcatgatgggaagcaaggaggagcaagtcacatcttatatggatgccagcaagaaaagagagcttgtgcaggaaaactcccccttataataaccatcagatctcatgagacttactcactatcactagaacagcacaggaaagacctgcccttatgattcaattacttcccacttggtccctctcacaacacgtgagaattcaagatgagatttgggtggggacacagccaaataatatcacctaggtaccaattttctgtattagtccgttctcacattgctctaaagaactacctgagactgggtaatttataaagaaaagargtttaattggctcatggatctgcaggctgtacaggaagcataactggggaggcctcaggaaacttgtaatcatggaagaaggcaaagaggaaggaggcacatcttacatggctggagcaggaggatggggtgggggcagtgccacacacttttaaacaaccagatctcacaatagctcattcacttttatgagagcagtaagaggaaaatctgacccctgatccagtcacctcctgccaggtttcaccttcaacactggggattccaatttgacatgag

SEQ ID NO: 152921 - DNA, 480 bp, Homo sapiens
gaaacgtggaccaaaagatggaccgtgatgagtgagccagaaatgacagacatgccttggattcatgtgcagaaagagatttagtgagttagggggattggactgttacagtgaatttgtcatttgttatttcagaagtactcatccacacagggagtccagaagattgtgaggaataaatttgtgaggagagtcctggcatcaatgaagagctctgtgatcactcattttcataggccaaacctcacagtrgtaatgtcagtcattcctgctgggaaaccaaaatgcaatgggaataattggatcccaggatgacaagggccaaggggtgatacttaactgctaaaggaaagattggcatagttaccataatggagagaaaaatcaaagcagtaaacattagaatgctggagcaaagtatgggatcttctgcagaaaactgctgtccttttgagtgacagctcttggcttgctactggg

SEQ ID NO: 152922 - DNA, 503 bp, Homo sapiens
tgataggctggcccctatggccccaggctccatcttaagcactgtcgcagcaggcttgagacacctttgagggcccagctggcttcatagccctgggcttcaagtatatccctacaaatccactttcttggcccaccccgttggaccctggcaccagactgagctttgtatacctaagattctgacccaccctagtggaccacgtttccaggcttgtctctgcagattcaggaaagacccaaatactacgcccacacggccactaagcaaggtatgagtccagctcgttcaaggactgcagcatcaagcccagcaattgtcttaaagaacctcagtgagccrcaagagtgcgcagacagacaacaaaacaatatcaggaaagtaatgcctgaaggatattataagttcaacaaaaatgtagaaaccacaataaagaaccaaacataatattttggagctgaggaacacaatgactgaactgaaaaattccttagggaacttca

SEQ ID NO: 152923 - DNA, 582 bp, Homo sapiens
aaaattcatttgtcaggggctccatttctgcacaaaaagtgagtcaatctaaaataaaatcattgattgtaaatgaaagtggtaatgacatatatgagcctcaaactgtttatcagaagtcttttataattcacaatttattaagcctatagcaagtatctgttgaaagccaactgtcagaaatggagttaaatgctatgaacatgaatgcaagcaacataaaatgaattccctcaaggactgtatcatggaaaaaatgatgtaaacaggcaaatgtgatttattatgagagaataaatctgatagtgtttatatcaactaagcaggttagaggatggaggatttcaaagatggcattgctacttctcatggcaaaaatagactattgtatgctctactagtatgttctaccaattttgataattgcatactatttgtcgtaggctgccatcattaaatatcacagactagaagacatacgaamaatagaaatttatttctcacaactctacagctgggatgtccaacagtaagatataagcagatacaatgtctcttgagggcctattttctggttcatag

SEQ ID NO: 152924 - DNA, 632 bp, Homo sapiens
tttctgaacagcctgtggagctgtgagtcaattaaaccttgtttcttcataaaatacccagtctcacatagttctttayagcagtgtgagaatgaactaacacaccatattatccagaaattctactactacgtatataatcaaaagaattgaaaacagggacgcaaacaggtacttgtatggcaacattctttgcaacattatccatggtagtcaacaggtaaaaacaaaacaaaacaaaacaaaaaaaacccaaccatctatcatcatattaatgactaatcaaaatgtgatttttatatgaaagggaatattctcaatcttaaaaactgatggtgttctgataaattctacatatggataaaccttgaaaactttaagcaaagtaaaataagccagacccaaaagaacttatattgcatgattccacttatgaataatatatagaataggcaaattcatagggggcgaaatagggtaggttagagattaccagagtctgaagggaggggggatgggaaattaatatttaatttttataaagtttctgtttgcagtgatgaaaatgttttaggaatagagttgatgatttcacaaagttgtgaaagtaattcatgctaccgaagtgtata

SEQ ID NO: 152925 - DNA, 632 bp, Homo sapiens
tttctgaacagcctgtggagctgtgagtcaattaaaccttgtttcttcataaaatacccagtctcacatagttctttatagcagtgtgagaatgaactaacacaccatattatcyagaaattctactactacgtatataatcaaaagaattgaaaacagggacgcaaacaggtacttgtatggcaacattctttgcaacattatccatggtagtcaacaggtaaaaacaaaacaaaacaaaacaaaaaaaacccaaccatctatcatcatattaatgactaatcaaaatgtgatttttatatgaaagggaatattctcaatcttaaaaactgatggtgttctgataaattctacatatggataaaccttgaaaactttaagcaaagtaaaataagccagacccaaaagaacttatattgcatgattccacttatgaataatatatagaataggcaaattcatagggggcgaaatagggtaggttagagattaccagagtctgaagggaggggggatgggaaattaatatttaatttttataaagtttctgtttgcagtgatgaaaatgttttaggaatagagttgatgatttcacaaagttgtgaaagtaattcatgctaccgaagtgtata

SEQ ID NO: 152926 - DNA, 632 bp, Homo sapiens
tttctgaacagcctgtggagctgtgagtcaattaaaccttgtttcttcataaaatacccagtctcacatagttctttatagcagtgtgagaatgaactaacacaccatattatccagaaattctactactacgtatataatcaaaagaattgaaaacagggacgcaracaggtacttgtatggcaacattctttgcaacattatccatggtagtcaacaggtaaaaacaaaacaaaacaaaacaaaaaaaacccaaccatctatcatcatattaatgactaatcaaaatgtgatttttatatgaaagggaatattctcaatcttaaaaactgatggtgttctgataaattctacatatggataaaccttgaaaactttaagcaaagtaaaataagccagacccaaaagaacttatattgcatgattccacttatgaataatatatagaataggcaaattcatagggggcgaaatagggtaggttagagattaccagagtctgaagggaggggggatgggaaattaatatttaatttttataaagtttctgtttgcagtgatgaaaatgttttaggaatagagttgatgatttcacaaagttgtgaaagtaattcatgctaccgaagtgtata

SEQ ID NO: 152927 - DNA, 632 bp, Homo sapiens
tttctgaacagcctgtggagctgtgagtcaattaaaccttgtttcttcataaaatacccagtctcacatagttctttatagcagtgtgagaatgaactaacacaccatattatccagaaattctactactacgtatataatcaaaagaattgaaaacagggacgcaaacaggtacttgtatggcaacattctttgcaacattatccatggtagtcaacaggtaaaaacaaaacaaaacaaaacaaaaaaaacccaaccatctatcatcatattaatgactaatcaaaatgtgatttttatatgaaagggaatattctcaatcttaaaaactgatggtgttctgataaattctacatatggataaaccttgaaaactttaagcaaagtaaaataagccagacccaaaagaacttatattgcatgatyccacttatgaataatatatagaataggcaaattcatagggggcgaaatagggtaggttagagattaccagagtctgaagggaggggggatgggaaattaatatttaatttttataaagtttctgtttgcagtgatgaaaatgttttaggaatagagttgatgatttcacaaagttgtgaaagtaattcatgctaccgaagtgtata

SEQ ID NO: 152928 - DNA, 539 bp, Homo sapiens
tctacccaaaaaccctcatcctcagaggatgatagaatgacatttaaaggaacaactgagacactaatttggagatgattttgtgtgaatatagagtgtcatacttctgtataaactaaaacaataaccattatatagtgatgtgtcccaaaaaggtagattacatgggtcctggcagtaggagttggartggccctgcttaccattacccctaggacacacttgggcaagctgtgcctcctgtctccacgactctccattctgtagatctagagattcaggttcccagagaaggtaagctttcatcaaaggacaccagctaccactttgatattttgtgcttattattgccaagaccaatatgggaggggtaattgatcctgatcatcatgatgaggtagagctgctgtcgtacagtggtgtaggaaatacaacctttggtaccaaggtggttactaagggatctctttgtccccgcttgattaattttgatggtgaatttacaaacgtattcgctatagtctgagaaggttctgatg

SEQ ID NO: 152929 - DNA, 585 bp, Homo sapiens
gagatttgaacctacttttggtctgaatttcatttgaagacatagtttaaacctcattcctttgatacacgtgtcaccatcaagcttgaatacccaaatttcttcagccttttacaattctgggcattgaaaaatcattggcagggttaatcttctaggtctctggaactgaaatgaggatgggaataccttggttttgaaatagggaccctctcttccaccatcacacattttggtcagcaagtataaatctttcttctataaacctcacaaagcctaactcaatatttttagtccacttcatatgctaaaaggaacttctgcatttatactttaaagttattattataattttattttctaatagytttaatttggggaaaagataaatacctgtagttttgaatacattttgtttgcatgccaatgttaaataatggatgacagagagataagaaaaccacatcacactcctttaagatttctgaggtgctattaactctgactctaagtgcaggacataagtctttgaatcagtagctgatacaaaatagaagtgaaaaattgaataagggaggtcaaata

SEQ ID NO: 152930 - DNA, 501 bp, Homo sapiens
actgtaaatagtacattaacatgtgatgcacacacacacacacacacacacacacaaacgcatcttagatttctgtttctatattgatataaaaataatttaacatcaatgaaggacaaatccaattttttaatttattttattacctaaatagtgtcctatttaggatattaaaagggatrtattttaccaaattatgatatacaaagattaattagaaaaacacttatgtattttttcagtcagttgaactacattttaatggagtatatttctaattactaatgcaatttggacatggttattctcaccaaaacaaaaaaaattaaatttaatagttgtaaattaatgcaatttatgtgacaggtttgtattttcagcattcatttcaaaataaataaatgtaacatttgttactacttaataaactctgattttcatggtaaaatgattaaatcttgtctgataacccagttttatttgaagtgtatgacataattt

SEQ ID NO: 152931 - DNA, 501 bp, Homo sapiens
actgtaaatagtacattaacatgtgatgcacacacacacacacacacacacacacaaacgcatcttagatttctgtttctatattgatataaaaataatttaacatcaatgaaggacaaatccaattttttaatttattttattacctaaatagtgtcctatttaggatattaaaagggatgtattttaccaaattatgatatayaaagattaattagaaaaacacttatgtattttttcagtcagttgaactacattttaatggagtatatttctaattactaatgcaatttggacatggttattctcaccaaaacaaaaaaaattaaatttaatagttgtaaattaatgcaatttatgtgacaggtttgtattttcagcattcatttcaaaataaataaatgtaacatttgttactacttaataaactctgattttcatggtaaaatgattaaatcttgtctgataacccagttttatttgaagtgtatgacataattt

SEQ ID NO: 152932 - DNA, 503 bp, Homo sapiens
gtgaataaaacatgaatatacagtgaagaaaacattatttcctgaaaaacaaactgtttaactatcatatttggtctagtgtatcagttaggaagacagaaatcacactgcttatgctagcgatgataatttattatggaggattgtttcaacagattttgaagttgaaagggaaaactcaggtaatatagccataataagagcagtaaggagcttatgtccacctatcacatttcttgctaatgtgatatttatgccaatcagaccattacattttayctgtatccttgaaataaagtaaccttgctgagacttggcttagtgttgctcatttgtttccacttttccaagtacatggtgtgcaatttcagtatggatagacaaaacttcttttagtttaggacttgtctttgaaaaatatcttaattttgttctattcaattatacaataatatgcttttcttcattgaaaatttcaaaaaataaagatgttgattcttctt

SEQ ID NO: 152933 - DNA, 357 bp, Homo sapiens
gagaacacacctaagcacagggaggaaaatggttcagggtatgagtctcagggaagacgttcaatgcaaattcctcactctaaggtaagggacctcctcattatcttcctaacaagattttagaatttttatagaccagtrctagctgtgaaactcgcattctttctcttctcatgctgaagtatttattgccattaccctgtccctgttccaccaatatactatgctgtagtggagagagcaggactctctagggagtgtgaggcaactaggaactggttgtcttcttagtatatggatgtctgtatcaggggaagacacatattacctgttatagatataaccactaattccaag

SEQ ID NO: 152934 - DNA, 553 bp, Homo sapiens
aatatattagtcaatcaccctttaacttgtgtataaaattaataatttaacaaacatttatgaccacacattgataaattggcactgcttgtttgatagaccatagtgatggtctatcactatagtgataagtagtgatgatgggtaaaaagcccaatatttctggactttcacattttagaaaggaacacacatagtaaaataagcacaaacaaaagttgcagctgttattataaatcttatctcaacaatagatttgcatgcaaatttttatttttatgatataaaaattattttcaaactttttacacacgaaaatgcacattgcakaatacatgcattttcatttgatgacacaaatatatgcatctcaaataattaaagatatgtgtctaggaaatgtaaagtaattaaaaatattaaacataacttagaaaattactgttacctttccacaaaaagccttctaaatgatttgagattttttttgtaagttaatgttaatagaaccacaaagaaatataaactcatgattcacaagaatagtgcctgc

SEQ ID NO: 152935 - DNA, 466 bp, Homo sapiens
tacacaatatgagaggacagaggaaaatgcaataaggaaatctttccttgatatatagtgtttggaggcttcctaagcattcccttagaacactgyttatgactatggtcagtttgttcatctgccctgccctggtatattcttggagccttctgatactgtatcatataatatcctttttcttctgcctgatgtcttcttctgtgctttagtttcagagacaatataagcacagccaatgctggcgtatcaattatgtgccttagttattggaatgacaccctcaccctctttcctctatcccaagttacctaagcactatctaattcaatacctagggaagtgttatttcattcttacattgagggtgctcaaaagaaatataatctgaaccacaaatataagctttattttaaattatatttaaaatataattttaaattttgtagtatttacattaaaaatg

SEQ ID NO: 152936 - DNA, 452 bp, Homo sapiens
tttggctgactagaaccaagaatttctactcccctggcttcattaaagcttctagccatgttttttccatttcttcagctgcatttcaagagcagtaggattcagagatttgaaaggcttaaaaatgtattttatctgatcccatgcctataaaattcgtgcttctatttacctttgagttcttgcctattcttactaacttaattgttccttttgtgtctataaaccacatttggttgtgttktttgtttgtttgttgttttttattttctctttcttctagtttgtttagtttctacgatggaagaaatttcatctaaggtcctaatgacagttccagaactaatctgtcatttgtttccaagatgttggaagaggtgtctcactccattctcacccttcaagctggcctctcagaatgtcagtggggatttccagaagcttcacctatt

SEQ ID NO: 152937 - DNA, 586 bp, Homo sapiens
gtttgaatggaagaaaaaaccccacatttatccctctgctcccattttccctccccagaggcaactggtgttattaggccctgggaggagtgtactatttcaacagaccaccatgctctccaccaaactttgactttggtactgcaggtgagtctctgagtatcccacaatttgggggattctacttgccaggaggtgtagggtgctgtccaccagctgtaatgttggctgcaattggctctggtcctctgagtctcataaggacctgggtaccctttttgactgtggtgcaaaggaggaatcagggactggcyaaactctggagactgcattcaggctttggtggggacttggcatttaggaaaatacaagcctgctgccacgtatcgtgaggccctctccttcagctcatcgcctaagcttgataggcagggaacctggcaggagatagtctctgtatgtgaatgtgtaaaacctgagctgcatggagccctcagtgccacaaatgtcaggagcctttgcttttggagtggacttgatgtatggcccttgagcaggaccctgacgaaagaccaaattgcagggt

SEQ ID NO: 152938 - DNA, 503 bp, Homo sapiens
acttgctttatgaatctgggtgctcctgtattaggtgcatctatatttaggataattagctcttcttgttgaatccccttaccattatgttatggccttctttatctcttttaatctttgttggtgtaaagtctgttttatcagagactaggaccgcaacccctgctttttttccttctaaccctcaggtccctcagctgcaggtctgttggagttgctggasgtctactccagaccctgtttgcctgggtgtcatcagcagaggctgcagaacagcaaatattgctgcctgatccttcctctggaagctttgttccagaggggcctgtatgaggtgtctgttggcccctactgagaggtatctcttagtcaggctacacgggggtcagggacctacttgaagaggcagtctgtctgctctcagagctcaaatgctgtgctgggataaccactgctctcttcagagctgtcacacagggacgtttaagtctgcagaagttgtc

SEQ ID NO: 152939 - DNA, 583 bp, Homo sapiens
tttccatctttgaactggaaatttaatccatgtatacttattgtaattactgatatatctgtttttattgctttggttattatttcactttgttccaatttttgtgttttttaaaatatgctttttacttaagaaaatagacatctatatcttcccctaatcaaggtaagaattctacatactcttagaatcataaaactctcttcctgctttcctccatcccaattctaccaygtcaatattatctagaaatttaattataacttatttggataaaagacatagtgacagattcttaatgctcaggtttttggttttgcttttgtttttgtttttaatctggatagcaatagtcacaataataccgtattttgtttaatgctgaattcatttaacttttgtatctaacaaacatttaaaaacatatacaataatttaaagaatattttgtaacatacttaaacctactaacgtatcagcaacagggatttaattagtttttgttgttgttgctgttatcctgttatttcttccttcttggttttatagcttctgcaaacaagcttctcttactctatgtctc

SEQ ID NO: 152940 - DNA, 498 bp, Homo sapiens
tgggcagctctctgcctagcggttatttgagcaccaaacactgaggtcaacctagacatctatgttgctctctagtattcttttatcggtatgtgaaggtttgtttattgctatatggaaagaggtaagataaggaccatcccaaagttttaagttcatattcaaatgaagaccaacagtcttcatttacactgctgtctttaaaaaataaaatttaactttaacttgcctatgcctttggaatcttttattttacacatttaaaaacattattctgacaaggcatttcataarcttcacccaagcaccaaagggtcccatgacacaaagggttgaaaaagcctctactctatacacttattatcacctagctcttcttagagacatgttctttatacaaagcagcctgctacagctgtgttatgggctgtggagccagagtattcagtgggcaggaacgtggcctgactccttactggacacacagtgtgagacata

SEQ ID NO: 152941 - DNA, 498 bp, Homo sapiens
tgggcagctctctgcctagcggttatttgagcaccaaacactgaggtcaacctagacatctatgttgctctctagtattcttttatcggtatgtgaaggtttgtttattgctatatggaaagaggtaagataaggaccatcccaaagttttaagttcatattcaaatgaagaccaacagtcttcatttacactgctgtctttaaaaaataaaatttaactttaacttgcctatgcctttggaatcttttattttacacatttaaaaacattattctgacaaggcatttcataagcttcacccaagcaccaaagggtcccatgacacaaagggttgaaaaagcctctactctatacacttattatcacctagctcttcttagagacatgttctttatacaaascagcctgctacagctgtgttatgggctgtggagccagagtattcagtgggcaggaacgtggcctgactccttactggacacacagtgtgagacata

SEQ ID NO: 152942 - DNA, 505 bp, Homo sapiens
aaacttttttttttaaaagaaagtattcagttccctgattttaaaaagattaggaaaaaaagcagctaggcacaatggctcatgtctgtaatcctaccactttgggaggctgaggtgggtggatcatgaagtcaagatattgagaccatcctggccaacatggtgaaaccccatctctrctaaaaatacaaaaaaaaattagctgggcgtggtggcgggcacctgtagtcccagctactcaggagtctgaggcaggagaatggcttgaacacgggaggcggagattgcagtgagccaagatcacaccactgcactccagtctggcgacagagatgatgtcttttgctttgcagaagctttttagtttcagtaggtcccatttatccattttggtttttgttgcctttgtttttgggttctttttcatgaattttttgcctaagccaatgtccagaagagtttgtaacgttatcttctagaatttttatggtttcaggtcctagat

SEQ ID NO: 152943 - DNA, 574 bp, Homo sapiens
atataataatactgattttataaatgaaggtactgaggctcagagaatttatgatatagaggtgacagtgagacagaatgagataattaaatgtccagataagtgatttttgaaccaatattgattttcatgggggcactttggagtcttgatatttataattgtgaagagcagagagggtccaaaagattactatgaactggcctgagttattttaaatcacagatataggggagggacttactaccaaagtgaccttcatattgctacgatactttcttggaaacaccattctagtattatagacaagatggtttgctctggatgtgagacctttgggaaggaagagtgtcagtccccttgatctatctgagagtatctctgttaygttgataactcatctattaaatacttggcttagtttaggatactctataccctcaacttcaacccattgtagggtggagcaaagatgccccttgaaaagggagggacaatttggagttttacatcttgtgaagtggtacattggatttaatccagagtcatttatatcagtctactctaaatggga

SEQ ID NO: 152944 - DNA, 620 bp, Homo sapiens
actgcaacctctgtctcccgggttcaagtgattctcatgccttagcctcccaagtagctgggattacaggggcccaccaccacacctggctaatttttgtatttttagtagagacagggtttcactatgttggccaggctggtctcgaactcttgatctcaagtgatccacccccttgacctcccaaagtgctggggttacaggygtgagccaccgggcccaggcctatagtgtggttttaaaaaaatgttcctagcacaagagaaggagtagatttaggagaaattatgacatcattctgtagatgtgtgatatttgaaattccagacaaatgtgcctttggcgattataaacacagcactgaagtttgaacaatggtaagaagcctgcagctggatatttacagcactctccataggaataattctgtgtatccccatagactaaactccttccactgctaaatccaacacccatgcagcttcatactccaggaatgctaaactttgaatttcccaaatattttatgctgtccactacccccattcacttttcccactatttctcttcacttaggctgcctgatttatgctagactttctagtaagtacctacgaaac

SEQ ID NO: 152945 - DNA, 631 bp, Homo sapiens
cttaatagacacatacagactatttcatccagtagcagcagaatacacttttttctcaagcacaaatgaaatattctccaggatagatcatgttagaacacaaaatgaggattaayaaattttagaagtttaaaatcatatccaatatcctttccaatcataatgatatgcaactagaaatcattaacaggaaaaattttgaaaatgtataaacaacatacttctaaacaaaaaagtgggtcaaataagaaatctaaatggaaatttgaaaacatgttgagataaaagaaaacggaaatacaaaacaccaaaatttatgggatgcagcaaaaacagttctaagggggacgtttatagcaataaatgcctacattaaaataaaagaattatctctaacaatcaaatattattcaactagaaaaacaaaatcagactaagttcaaagttagtaaaagaaagtaaataataaaaatcacagcagaattcaatcaaatagatactagaaaaaaagatcaacacaaccaaaatatgttttctttaaaaaataaataaaacggacaaatatttagtctaaaaaaagagaagagtcaactaaataaaatcatgaatgcaagagatgttgcaactgata

SEQ ID NO: 152946 - DNA, 527 bp, Homo sapiens
taatcttacctgaaaaaagtatgtgaagtgatggatgtgttaattagcttgacttaatcatttcacaatgtattcatatgtcaaaagttcacattgtactccataaatgtataccatttttatttttcaattcaaaaataaatccagagggtaagaratgagatgcttaattactgatgtgtataagaggagaagtggtcgaattcctaaggcaaattgtgcataacttgagtatggaccaaagaggggccacatgtaagagagatggcagtagacccatcttgcatcttatctctgaggacaacctggaagagtagacagaactttagcagaagctgaaaatattactagattcctaagaactgaggaaggaatatgaattagtgtatagatgcatttgcacatatcaaataactccagaatgatggaaggttgcttaaggacccatgaaagtgctatgtcatctttcaacctctgcaatatccaataagcacacagcccacaacagtaccaatcaagtaaggtct

SEQ ID NO: 152947 - DNA, 527 bp, Homo sapiens
taatcttacctgaaaaaagtatgtgaagtgatggatgtgttaattagcttgacttaatcatttcacaatgtattcatatgtcaaaagttcacattgtactccataaatgtataccatttttatttttcaattcaaaaataaatccagagggtaagagatgagatgcttaattactgatgtgtataagaggagaagtggtcgaattcctaaggcaaattgtgcataacttgagtatggaccaaagaggggccacatgtaagagagatggcagtagacycatcttgcatcttatctctgaggacaacctggaagagtagacagaactttagcagaagctgaaaatattactagattcctaagaactgaggaaggaatatgaattagtgtatagatgcatttgcacatatcaaataactccagaatgatggaaggttgcttaaggacccatgaaagtgctatgtcatctttcaacctctgcaatatccaataagcacacagcccacaacagtaccaatcaagtaaggtct

SEQ ID NO: 152948 - DNA, 600 bp, Homo sapiens
ttgggcaatttatgttaacttctgccaaggatattactagaccaggcaatatgttactcatcacatattacatgagacatgcttatactaaaaattatttgttgtttatctaaaaaccaagtttaactgaatgtcctgtatttttatttactaaatatggcgaacctaggtcactcaagttctaactgcaagtaccagaactcaagccaggattgcctaagcaaaggtaacattgtgaagcattgtgcgctattgatagaaatatatcgtggcactatattcagtattttcttttcttgtctatggaaaatgcttgtgtaccggtgtgcatttatttgtatgatagttaaaaggccagtgtttgaaattcctaacaccgaggttggaattaatgctcttccacccgtcacttatgcaatgttactcrtatttctctcagaacctcaatgttcttacttgttaaagggggattattttgcctccactgatatgtaggtaaatacaagttgaccaattggcttctgcctgacactgcatgaaaagttaaacttgaatcatttcattatatcttcacatgaaaactctgagggtagacacttg

SEQ ID NO: 152949 - DNA, 523 bp, Homo sapiens
atgcctttttttctttgtagatttatattcagggaccacacgtatttcagctttgttttcttcagaatatttagaattgtgctttgcattctgctggatctcaatttgtttatttgtctccattatttttgctgtacaacaaatacgccaagattcagtagcttaaaccaactcatttattatgmtcacagaatctgaggccaggaatccaggcagagcacaggataagcccatctgtgtttcacaatgtttgggtcttcatctgggaaggctaaagggctgtgggtttcatttaatcacatgtggattctggctggtgtgactcaaagacaaagactgccagcgaaagcatctccatgtgacttgactttttcacagcatggtggcttcggggaagtcagacttcttattgtagttctggtctctaaggggaagtgttcagcaaacatagagaaagtcccagtgtcctttatggcccttctcagaaaccactgagcatcacttctacttcactctatgagta

SEQ ID NO: 152950 - DNA, 523 bp, Homo sapiens
atgcctttttttctttgtagatttatattcagggaccacacgtatttcagctttgttttcttcagaatatttagaattgtgctttgcattctgctggatctcaatttgtttatttgtctccattatttttgctgtacaacaaatacgccaagattcagtagcttaaaccaactcatttattatgatcacagaatctgaggccaggaayccaggcagagcacaggataagcccatctgtgtttcacaatgtttgggtcttcatctgggaaggctaaagggctgtgggtttcatttaatcacatgtggattctggctggtgtgactcaaagacaaagactgccagcgaaagcatctccatgtgacttgactttttcacagcatggtggcttcggggaagtcagacttcttattgtagttctggtctctaaggggaagtgttcagcaaacatagagaaagtcccagtgtcctttatggcccttctcagaaaccactgagcatcacttctacttcactctatgagta

SEQ ID NO: 152951 - DNA, 453 bp, Homo sapiens
gtgattcaacacacaccacatacaaatacacacacatctgcctgttagcataatgtaaaycttccacttataattttacaaaaatcagttgaggacatgcattaatctatagtaaatctggcaggagttcttcaatacaagattttatatgaagatggaaatatttatttagtttgaaataaaccaaaccaatctgtacagaagaaacaacatagaattttactattccatacaattgaacattattatgttcaaatactatagaggataaaaagtgaattccagtatttttccaattcttttccttctaaatagttgatgtacattcttaacctattttagctattaaattgtttttctctattattccaggtttctcttcatctcttttgatccacagtctgtacatctgagtcttttgtcccataatttttaacatgaagtgtatacatt

SEQ ID NO: 152952 - DNA, 577 bp, Homo sapiens
ctatgatgattgccaatcccatttttaaatttacattataattctctgaaaatattcctttaaacaaaacactttgatcctaccaagcagtgtcaggaagactggctcccagagccccatccacagctgggtcctgcagaaaagtttctccagactgggtagccactgcctctaaaatactcaagagtaaatttagtaaatttccrtgctatatttgcccatgaaaatataaaaccaggtaaataaagtggtaacaagatttcataatgatttcctctttaggcagatagatgcatacatacacttgtatatatgtgactttcagtgtaaaaatattttttttccagtaaaggaaaatattgcccctcatctatttctgaactgcttagtcttgagagtaaaacacttctaaatccatatacaatgtgaatttaacaagcaaactcctccattcctctcccttcaccccacctgatgagatatttggcacactttgggatgacataggaatggcacagtatcattatgtggagagagcaaatcagtgtagaaaacaaaattggtcaattaaagctgc

SEQ ID NO: 152953 - DNA, 505 bp, Homo sapiens
gggtgacttgaaagtagaagagaccgtctcgtagactagagaattttaaggctatttcaaatctctcccctacaaataaggacttgccacaacaacccaaattcataaaatgttaatactgggccacatcttcaattagtgaatccaagcttactactttacagaggggagactgaggctccaagagggggaaggttagttgctgatgggcccaggagaaacccccagaatacttgacagctggaacctggccctgtccttgcccctggccgtcttcycatttgatttgcaactgcagatgagtccaccatgtccatgacctgtaacaccacaggcccgactcatgtcattggttttgcgttccaaagtactatggtattaatttccattctttcagtctaaacagcatcaaacacctaatcattttgttcttgatggctacagataggttaaggaattttccatttcctttgagataggagcctcacttctctagcagaactac

SEQ ID NO: 152954 - DNA, 606 bp, Homo sapiens
ataattatggctcagaaacagcatgtgcctggggacactgccagccaagtcctaccctacaaaacaaaacaaaaaaaggtatgctgtggggtgttttttttcctctctgccattttgggaaataacccattaaaagaataaagcaccataatgattatttaggaacagacatgatttggaaactggtagaaaaataggtctttagttctggaattttaaggttaatggcccaaggatctctcagactctgaagctttataggacattttatttgaaatctgtgctcaagggaatatacttcaaatttccawgtctcaaaagctgtacaatggaaggaagctgttattttactcttggagtggtggttgggggatgcattaatgaaagacccaaatcataacctactaaccacagctaagtatgcagaaaataagaacatgccctagaaggcacccaaccttcatcaaacccagggcaagctttcatgagcagaatgacccagcaatctaatctcagcagccattttatcattaattgaaaatgctggttccaagctgactttgtgttgacagttttcatatcacactctttcttaagaatacacag

SEQ ID NO: 152955 - DNA, 484 bp, Homo sapiens
ctttccagtccccaaagacaatctgaagaactgattcaacatgccgaattaagcccygagaatttatccatatctaataaggattagcaaatgttacaacactgaacatggcttggacataatttatattccaacttctaagccattgggtttagtatggtctcattccagccgtgacataggaggatacagagagcagtcatgctgtgtcctctgagaatccctgcatgacaagcaggagggctctttatgtgaaaaaaggtttctttacacaggaccagtacccacagaaccagaatgtgataactaagtctaaagaaccactgaggggagatgtgcagcttccctcaagcctaagaacattgttctagaagcagaaaacctagtgatagaacccactctgcctcttgccaaagctgggtgtccacctgcaacttggaaaatgttggaaacaattctaaattacatattgggagtgaggaag

SEQ ID NO: 152956 - DNA, 543 bp, Homo sapiens
ttcactatgttgcccaagctggtttctaactcctgagctcaagccacccggctgcctctgcctcccaaagtgctgagatttcaggcatgagccactgcgcctggccacagaaagcaacttagcaacataatttccctcccctgattttagcaggaaaaaagaaaagaaaaactgcacaaaatatgcaataggagcagtagatcagcatctgtctgtctatctatggtgtttggtttatgctgaagacattcttccctctcttgcccattttwtagatataggaaatgagactcaaggaatcctgattcagtctgagtctcaatatgaatgtttggccgaaactgaattagtgctaggcaggtgttacttccctaaggaaggtgagagttctgtcacgctaagtgatgagaactctcaagaagtatccatggaaaagagcctaggagtcacaggcgtgttagtcctgtgcaaaaattaagtgcaggcttgttaattattcaactatgattagggttttagctgagattcttgcaaaaacagacc

SEQ ID NO: 152957 - DNA, 543 bp, Homo sapiens
ttcactatgttgcccaagctggtttctaactcctgagctcaagccacccggctgcctctgcctcccaaagtgctgagatttcaggcatgagccactgcgcctggccacagaaagcaacttagcaacataatttccctcccctgattttagcaggaaaaaagaaaagaaaaactgcacaaaatatgcaataggagcagtagatcagcatctgtctgtctatctatggtgtttggtttatgctgaagacattcttccctctcttgcccattttatagatataggaaatgagactcaaggaatcctgattcagtctgagtctcaatatgaatgtttggccgaaactgaattagtgctaggcaggtgttacttccctaaggaaggtgagagttctgtcacgctaagtgatgagaactctcaagaagtatccatggaaaagagcctaggagtcacaggygtgttagtcctgtgcaaaaattaagtgcaggcttgttaattattcaactatgattagggttttagctgagattcttgcaaaaacagacc

SEQ ID NO: 152958 - DNA, 563 bp, Homo sapiens
tggtgtggaacaagagaatataggagggaccctgacattctctgcaacaattaaaaataaaataaaataaaataaaagtgcttaatgagtaggtataaaaacaccagccaaaccttcatgatgatctactaaatttctgtctgtaaatagggaccgagagagagagccacctttaacaaagttgggagggagagtccgaccagtgttctgttctgctatagaggaggggcaggaaggatggatcagctgaatgaatttggggagatcagacyagtgctcagggaaggactgatgctatagcagtggattgtgtagatatctgtaaacacacagatgccaagagcctggcccattttcccagagatgttacagtgtgacatgggtgagtatatggctgtggctctgtcttaaattccttccaaatgccacaggttgatgttattttgaaaaataaggtggtgaattttcatctcacatacatttcctgctctttccacatccagtaaaggaatgaaggaagcccgcacgcatacacacacttgcatatctcacatttggtgttc

SEQ ID NO: 152959 - DNA, 563 bp, Homo sapiens
tggtgtggaacaagagaatataggagggaccctgacattctctgcaacaattaaaaataaaataaaataaaataaaagtgcttaatgagtaggtataaaaacaccagccaaaccttcatgatgatctactaaatttctgtctgtaaatagggaccgagagagagagccacctttaacaaagttgggagggagagtccgaccagtgttctgttctgctatagaggaggggcaggaaggatggatcagctgaatgaatttggggagatcagactagtgctcagggaaggactgatgctatagcagtggattgtgtagatatctgtaaacacacagatgccaagagcctggcccattttcccagagatgttacagtgtgacatgggtgagtatatggctgtggctctgtcttaaattccttccaaatgccacaggttgatgttattttgaaaaataaggtggtgaattttcatctcacatacatttcctgctctttccacatccagtaaaggaatgaaggaagcccgcacrcatacacacacttgcatatctcacatttggtgttc

SEQ ID NO: 152960 - DNA, 591 bp, Homo sapiens
agaacattaacacagctaacacttcttcaagaaatggtatactaggcacagtgttgtgcctttgttttattatagtccccacaaaaacttgaagaggcagtaccatcattatgcccactttgcagatggggaaaccaagtcacagagctgataagtggttgggccaggacacacactcagctaatctgcacgtaaaggcagcactctgcccatttgctttcccatcaagatacaattgccattttccccatcaggaaatattgggggattctagatttcaaaggcaacagtgaagaaggaaagctccaaagattgctcattgactcacctccactcactagttgtatgatgctgagcaggtcaacttaccttcctataaaaygggtacattgtttcctacctaactcacagagaagcattatcttgaagcatcttctctggggcaaggtctttaaaacccctaaggattaaagaaatgtacaagatgctgatcttagttgtgaggtggaaagatggggctatcttattcttccccacagggtagcactgtgcttcaaggaatggtggtcccataccatctctggtgacaat

SEQ ID NO: 152961 - DNA, 595 bp, Homo sapiens
cagcaacagaaatagagttctcaagaatgtactatcctttatgagatggtcatttgatagctttccrtaggacagtgattcattttaattggaataaatatatattttgggcttggggttttatttcattcttataggaacttaaccagcagagttttctgataatttacagagggtttagtttacgagtggattacacataaaattgcattggactaagagatccactttgtaactacattgattatctattgctgcataaggatgccccaaaacttggtgactttaaacaataaacatttattttcttacatagttaatctaatagggagtaaggtgaaggaagcatgttgtatggcctactagtacttgaagtcacatactatcatttccataatattgcattggttatatagattagccccattcagtgttagaggaaactgtacaaatgcatgaataaatgagaataataatgaatggacatgatcttggaggctgacttttataaaagccaagatagtgaggcagtgggtaggtagccatgggattcaccagtcttatcacttacagtacttcacagaagcataggcat

SEQ ID NO: 152962 - DNA, 603 bp, Homo sapiens
actgttcttaataccaattaactgtgtaaggctagtaggcctgttgccttgccagtgcaccgagcttgcttgtatataccctaaccttacattaatgatatggttggattgcagtcagtagttgcttcaaaagtaaactttctagagaaatttggcagacatatttgcaattattccttcatggtttgcacccaaaatctaatatctgggctgtagagagcgtgcttagccagttccatttttgctatttttttctttttatttagcttgtcagaaaaagtattctatgaatatcaaataattcaagttttttgttctaagtactttttttttcactcatccttcttctatctcatagtgctagctgataagaatatgttacaaagaagtgagcccaatggggcaaaatatgagcttgattacaggtacattggatcagagaacatgagaaaagtttgtacctccctcctccaatccagatcttggagggtataactttattgattcactcaatrcattgcaaggagggattctgaaagaggtagagtatagattggtctgggtttatagagacaggccacgtataacatgtctggagactag

SEQ ID NO: 152963 - DNA, 534 bp, Homo sapiens
atgctcccatcctagaggttagttatactatttttaataacattttgtaaaaattgggaaaccgggctgggtgcagtggctcatgcctataatcctagcactttgagaggccaaggcgggtggatcacttgaggtcgggagytcgagaccagcctggccagcatagtgaaaccccaactctactaaaaaatacaaaattagccgggcctggtggtgcgtgcctgtaactcagctacttgggaggctgagggaggagaattgcttgaacccgggaggtggaggttgcggtgagccgagatagcgccactgcactcccgcctgggcaaaaaaagcgaaactctgtctcaaaacaaaacaaaacaaaacaaacaaacaaaaaacataatactaaagatcagaaagttgatatagtcaataatgagtagagctgggattttaaaacagggagactccctctgggtaagttctggtcagtagaaatttctgtgatgatagaaaatttatatcagcactgttcaataaagtaaacattac

SEQ ID NO: 152964 - DNA, 447 bp, Homo sapiens
caacttcgctaccgtcttgatattaccccagtgaggctggtattattttgatctacaraacgttaaaagaagaaaatgtgtattcttttaagctgctatatttttgataatttgttgtggcagcagtagaaaggtagataatagaaaatgcatttaaaatctgacaaggcaaaagccctcaactttttaatatgctattgctatgttatcatgacagaaaaatataggtcttatcaattaagatcctagttagaatttaacttgataaaaatattgagctgaatataagaccatattcacattctgagggaaagttcataatgtatttttgatgatgtataaattgataaaaaagaatgctgattaatgttccctctgatgacaaaagcagtgtcattcttgacaagatcaaataataataaacaaggtcaaataatgttttaatgt

SEQ ID NO: 152965 - DNA, 555 bp, Homo sapiens
gaaaggactcttttcaagcgctacacaatgaggtcattgcaatgcaactttctcagcaaagagcagtctgtctctgaatactggactttgtagctgaggtggagaggcactttagtgtaattgttaagatgataggctttggagtcagaacaactggctagcaaatattggctgtcagcgaatttttcagtaatcttgagcatgttatttcacttctctaagccttggtttccttctcagcaactgcagatatatcatttcttatctcatagaattgttattgagattaaacaagataagaagagtaaagcacttatcacagtgtttgggacatactgggtaattattaagtggtatctattttatctcaacattgttgttagtctctttttttggaytcattaatggaaggtatatattttcataaaatatgtgcccaggagaaaaaggatcaaaggcactctttattattcgtcatgagttaatgtcaaacccttattacttcctgcatagatttctaaattatagcttcataaaaactacagcctaagtagt

SEQ ID NO: 152966 - DNA, 603 bp, Homo sapiens
tagtatcaacctcaagaaaaagatgtaattctatcgaagacacttgcatacatatgtttattgcaggacaattcacaattgtaaagctatgaaaccaacctaagtgtccatcaactgatgagtggataaagaaattgtgatatatatatatcactgttacattgtttgaggttaatcacaagatacygaggctctgttccaatatttccttttttggttctttctttacaacattttttctggtgtgctactcaatcataaaaaatactactcagtcataaaaaagaacaaaataatatcttttgcagcaacttggatggagctggaggccattattctaagtgaggtaactcaggaatagaaaaacaaatacagtatgtactcacatatgagtgggagctaagctatgggtatgcaaaggcattcagagtggtataatgaactttggagtctcaaaacaaaggatggtgggaggaggatgagggatggaaaactacatattggatacaatgtacactacttgggtgacaggtgcactaaaatttcagacttctccgctgtacatttcacccatgtaacagaaaaccacttgtacctcaaaag

SEQ ID NO: 152967 - DNA, 486 bp, Homo sapiens
cactgtactacccctcagcaagactatccgaaagaatcttgttttagagggacttgttctatatggaatgcctttgagaaaaccttgtcaggattcttaatctgtgataggacacagcagtctcattacattatggtcgggttgcatataagaatatatcagaatttttttttcattaaatctctggcatgattgcattgctatttaaattgcaatctgaaaatgaaacagtacttttatttttagtcattaaaatcatgccaaaaactgatgtggaaaggattactattcaatgagtgacaagagggggttgatttagtaattacataatttgtgttttcacatctaaaccctctctctcaggcttcctagaatatactagatgtgaagctgttmatcaattatatctttaaaaaaattacaacactcattctacttttctacaaataattcatagtcatggtacaattggcatcccatagcgat

SEQ ID NO: 152968 - DNA, 551 bp, Homo sapiens
tgtgacacacattacttctgttcatatttcattggctaaaacatgttattttcccatacctgagtgaaacagagcagggatgagtaatagttctctagggtagggtactacagacatgaatattgaataaagcccttttcagttctctacaatctcttgactctctcaaattcagtcactggcctttgaaggcagaaaacaagtacactacagtttagctgtcccccaccctgaactcaatacttggtttctaataagtaaaaaacaagcctccatgactgatttattagtgggttcacagtttaatttggacttattgtgtgtatttatgtccacaatatgtactatatttgcaaactatatgtttaccatagatacatataaaattttcatttgactataattcatttagcaaattaaaaaatgtgactgctttaactttattgatactttggaattgtttaaaaggtagttatttactcctccattatgaccattgttatacaacaraaagcattaagatatgagttcagctgaaatcagaacatggt

SEQ ID NO: 152969 - DNA, 588 bp, Homo sapiens
aagaccattttataaactattctaatacttattaagtactgaagcataaaacgcctgaatttttctatagctactgtaatattgaggaacactacaggcaaagcacaaaaactaagaaacagaaatctaamtttgtaatctagaaatgtttatatactattaataagttcagctagtgtgtgcaaatggagatgtctatgtatttatgtcttaagagttttattcccaggttttgtacatgaaaagctcttattgaaatcagggttagaatgagcgatttcttatatttttctcctgcaaaattaagtgattgacatagccaaagaaattgttagacacctagaaatacacatacattgacgaatacaatcatgtactaccaactgtcatttggtagcatgtgatacaatgacacagtaaaacaggaaaaagaaaccattcatgcaaaagtttacaaagcattattattataaattattattcctattataaataagaatgaaacacagtttatcaacactttcctggcaggtgataataagagtgaaaattaataagggaaaagcaacatactgttctataggtatt

SEQ ID NO: 152970 - DNA, 379 bp, Homo sapiens
gataatcagtataagaaggcttaaggagaagtcaggggcttggtcaattttttttttaaacagctatkgcttttttccagcttaacaggtttattttctcttctgatgggaagcaaaggtataatactcagttataggaaaaaaacttgctctcttatcctcttctgttatgtaaccctcatcccaatataaccaaatgatttttttttttgttttgcacaatctgttgttcattgcttgtctgtctctctcctagccatctatgttccctgcacatagtctggttacacttagttggtcatgtgggggccatggctattgaacccctaaaggctcactgaaaaattactggcatcaggtagattaaaaagagagaagg

SEQ ID NO: 152971 - DNA, 560 bp, Homo sapiens
ttgtaaacattttggctgcaaatttaatttcatcaaaagagagaaacattcagataatctattggttcttgagtgacctttagtagtttgtattttttttcaaggaatttgtggaacatatgaacatgatgttgtcagaaatttttgcttacattactgcctagaacatttatagttgtatttctgtgttcgttcctcatatgggaaatttttatcttttttcctgtttattcttactagaggtttatcaattttaacaatctttgcaaagaatcagagtttggtttcactgaaattcactattctttttctttttaaaaatttattgatttttttctcttttgcttaaaatatccttactcataccttgtttggtcttaatttgctcatttatattttttagattcttgacatgaaagctaagatcattgaccrgagatatttcttgtttcataagcatttaatgctacaattttcccttgaatttctgattaagctgtgtctaacaactttggaaatgttgtatttttaatttcattaaaatcaaaatattttataat

SEQ ID NO: 152972 - DNA, 632 bp, Homo sapiens
ttgcaaaagctctaaacccagaggacattgatgatattttgctttaaatgctcaactatcttttaaawtgattacatttgagaacttttttcttaacatttactttcattttaatcattttcagtgatcttagtttctttttgatatattcaagttactatctagatactagatactaactttcaaacgttgtgcttaccacatatttcctggtaatttcatttttgaaagatgtttttactggatgtagaaatctgggttggcgatttctctattttagtattttaaagatgttgcctcattgatagttatattgcatatcttctgatgagaagtctactataattcttatctttgttcctatatatatatataatttgtctttttctctagctgccttcaagaattttctgtttttctccttacaagtttgtaaatgttatatatagcttcattttggggaagtttttctgtttggtatttttctttcctttgtgttctctgagctttatctatctgggatttaagaaaatgtcattatattggggaaaccttaatgcattttctcttcaagaatttttcttctcctttgtttctttcttcttctgaaattccaattatatgtatgtaag

SEQ ID NO: 152973 - DNA, 418 bp, Homo sapiens
ttcatatatgcctattgtctcagtttggggttttcttgcttgctctccaaacaaatctaccaaggctaacctagagtaaatatatacatatatacacatatgacatgctkgcatatgtgtctctgtatgtgtatatgtgtgcatatgttaaagttagcttcctaacactgaataaatttgtccaagcttatagaatcgttggtggagggaaatctaaagatctaagtctagaatctagggctatttttctgtggcctaacactgcgttgttatgtgcaacacaccatgttgcatgcattactcacataatttttggtccatggaacttataataataaattttgaattaatgatagcttaatctgcatatatgttataataatagaatttgatataggggtgggatttaaaagttatt

SEQ ID NO: 152974 - DNA, 512 bp, Homo sapiens
ccaaacacaatctgttacaatacttatgtttatcattattatgcctgtcaattctttttgttattattacatatttacctcaaaattttgatgcatcacagagagaacattcctattgagtcagattcagtttaaaagtataaaaagagaataaaaaatatatatgttttgttaaagattttaaatcaaacaagagaatgtgatatgggcatctattcttaaaaagttccaaatatttcttataaaatgtgcttactattacacattttattactaatacmattactattggaattgtgaaacttcaggattcattaaatcaatgccatagaggttaggataactcctacatttaaagatcacgtaagttttcccattaggatatagtatattcattataatataccctttcttcagcatatctaaggctttgaacttcaaatagctgcaataaagaggtgagaagaaagggtttagggaaaaagttgccatcttgcccataccatggtagg

SEQ ID NO: 152975 - DNA, 561 bp, Homo sapiens
atacaagcattctatattcgtactaattttctgagttatttccttatgaattattgacagagggcattacaaatctctgactgtaattgtagctctatttatttctccctgcacttctttcagtttttgctttttgtatttggtagaatttttcttatatgtttaaatatttaaggttattrtagccactaaaataaataatctatttatcattatgaaaagattctctacattcttgataatattttttgttctaaaattattatttattttttttcttgagacagtgttgctgtgtcgcccaggctggagtgcaatggcacaatcttggctcgctccaacctccgccttccggattcaagagattctcttgcctcagcctcctgagtagctgggattacaaggtgtgtggcatcacacctggctaatttttgtatttttagtagagatggggtttcaccatgttggtcagcctggtctcgaactcctgaccttgtgaggaatctcactctgttgaccaggctggagtgcagtggtgttatctcggctcattgcaacctc

SEQ ID NO: 152976 - DNA, 556 bp, Homo sapiens
cttttctggttctccttattatttccctttgcatgatcctctccaaaattaaatatattcatgccattctttcacgtatacttatttaattttttaaaaatctatgcttcaaaaatctattcaaaaatagaatagcttcaaagtattattcaaccacaataactattttctaggcattgactaaaggaaaaaaaccacaatctctgcattccagtagataaatctatgtatatgaaacagtatatggctattcracatctcactttaatcaacattactttcaccatgactgctcctcatagtgcaacatactatgtgtgttaggccattcttgcattgctgtaaagaaataactgagacagggtaatttttaaagaaaggaggtttaattggcttacggttctgcaggctgtacaagaaacatggcaccagcatctgctcagtatctggaggggcctcagggagattttactcatggcagaaggcggagcatgcatctcacacggggagaatggaagcaagagggagtgggaggaggtatttcataccttaaaca

SEQ ID NO: 152977 - DNA, 628 bp, Homo sapiens
gagttctcataagatctggttgtttaaaaatgtatgacacttctccctttgctstctcactcccctgctccactataggaagatttacctgcttccatttcacctgctgccatgattgtacatttcctgagacctccccagctatgcctcctgtacagcctgaagaactgtgagtcaattaaacctcttttctctataaattacccagtcttaggaatgtctttatagcagtatgggaacagactgatacagtagatgcgtatgtgtgtgtgtgtgtgtgtgtgtgtatgtgtgtgtaataattttcattacacaaatggtggttttcccagggagagcattcactgagctcctcacaccaccatttaagaagtccaggaaaatttttattgatccttggagatttcaaagctctctaattagtcatgttcacataacattagacaatgggtgtagaaatggctgtaacttgtgcttacaagtataagtaagggcagtgtttcataactcttgtggcacattattctcaaagggggagcttttagaatatattggtaaataggccatctctcaaaatatttttattcatttttttctgaatagaaactatgtatttgtaattttaaat

SEQ ID NO: 152978 - DNA, 628 bp, Homo sapiens
gagttctcataagatctggttgtttaaaaatgtatgacacttctccctttgctgtctcactcccctgctccactataggaagatttacctgcttccatttcacctgctgccatgattgtacatttcctgagacctccccagctatgcctcctgtacagcctgaagaactgtgagtcaattaaacctcttttctctataaattacccagtcttaggaatgtctttatagcagtatgggaacagactratacagtagatgcgtatgtgtgtgtgtgtgtgtgtgtgtgtatgtgtgtgtaataattttcattacacaaatggtggttttcccagggagagcattcactgagctcctcacaccaccatttaagaagtccaggaaaatttttattgatccttggagatttcaaagctctctaattagtcatgttcacataacattagacaatgggtgtagaaatggctgtaacttgtgcttacaagtataagtaagggcagtgtttcataactcttgtggcacattattctcaaagggggagcttttagaatatattggtaaataggccatctctcaaaatatttttattcatttttttctgaatagaaactatgtatttgtaattttaaat

SEQ ID NO: 152979 - DNA, 684 bp, Homo sapiens
cattcattattagtattactcttacagtttttaactagattatgcctaggtttttatctaggttttatctagattatgcaattaaatacttataaacaaactgaaaaaaataytaattaccgtctagacttttctgatgaagaaacataagtataaagagataaattaaattttccaaagttatactaaaaatagctggtcatgagggtaggattcagatctaggtagactaactccaaaacccataatttaaagaaacagctatactttctcttcaaatatattcactcaaagtcatgacatcagtgttgaactttattatcactctccatagaaccactttatataataaaccttaaggtcatcaggtaaagagataattcttattgatttctgtaacctggatacctagcatattgcctaaaataagagcagacattcaatatgcttaaaagattgaaagactaaatgaatgagctactgatggttgagttgctgatatacatggtggtgtcctgggaagcatccactttttaagacatacttgttggttgtatcctcacgaatatgtgcggatttgctagattaagacaaaattgcaagagccctcagaaatgcacatatataaatgtatacaactacacatatattcataaatacacataatacatatatgtacacaga

SEQ ID NO: 152980 - DNA, 600 bp, Homo sapiens
gaatgggcctcaggatcacctgtgacttggaggttcacaagaaataaagtcagattgaagtagcattcctaaaagaaattacaagagtatttctgaaacaaagacacaaggctatattcagaggaaaaatgtgttaataatcagaagagttatgtactgaggtctgctgagaaggcaaatatcagaataagtagagaagtcagtgaattggaaatctaagaaacataggaacaagagcaaagtacaaattcaattgagcagtatgagttattsatccaactgtgatatcttataagacatcctttcattcagtgttcacacactggatttaggtgtgtgtgtgttgggggggtcagcacagctgcttaaacactgagttggagggagcttaaattcactaagactctcctttacaaactcttctaaatgtgctccatgaaaggctgtagcacatttaaaaaatcctttaagagtaaaatgtgagctctccctgaccctaaaattgaactgacatctgtggtatcatgaaacttgaaccactcctatggaacacttcagttctttttttaaagcctttaatcttgattgtcaaggcagaat

SEQ ID NO: 152981 - DNA, 651 bp, Homo sapiens
tatatgactgagactgtaaaataccacaaattggatcagagtgaagcattctcctcattaacgtttatgtagcttagttacatggctgaatttggctttgtggtataaaactagaaatactgatctcaattttgccattgttggcgttctttcttctggccctgattatctaagcctgcctgggtgatgctgtgactgtctgaagcatggggaaatactcttttgcttagagcattgcttttccatcaggccatatatactacaggtatttcaactactgacattttccagtaatcaaaaaatcatttaaaattataccataccatttttataaataaccattatatataaggattgagtgtggagataattaaaggattcaattttttttcacttgtttgtgtatttttgcataaagtcagcttgggattaacttattaaacaatttctatattccttatgctttgataactttctgccaattaaattgtgaatttaaaaatatatattatttaaatacatttcactgtcattgaatcattgaatttactactaatatctcacttatttcatttcattctccagtttacaygtttagaaataagagtcctgaagactggtgcctgattactagccctcagtacttctcct

SEQ ID NO: 152982 - DNA, 419 bp, Homo sapiens
gaattccaaattctctagagatgactaaattggtattatgtctatattatgggataaaatttactttaatctttttctatatttcaatatttaaggtgattcattttctcttgcattttaataataaagctatagtggtatatattaataaactgtaacatattatgaaagtaactttatttttgtctctgactttccttttaggtttcagtaaattgttctttcatgcccaaggtccatgactcaataatcactcttaaataataaaggytgcattttatttctatttaaaaaacaaatgttcagttcaaaaattaaaatgtctactcacatgtattaatcagaagttctttcttgatttaaggagacctctctcaacacccaatatgggatctttataggtcctgagactctagatg

SEQ ID NO: 152983 - DNA, 412 bp, Homo sapiens
gggatggctcacgcctgtaattccagcactttgggagactgaggctgatgcaccacttgaggtcagaagttcgagaccagcctggccaacatgatgaaaccccgtctctgctaaaaatgcaaaaattagctgggtgttgtgatgggtgcctgtaatcccagctaccggggaggctgaggcagaaaaaatagcttgtatccgggaggcagaggcggttgcagtgagccaagattgcaccactgcactctagcttgggcaacagagagagaytccatcttgatatacatatacatacacatacatatatatatataatttattctacaatatcctgcctcctcttccttagttttattcatcttaacttagtttattgcatgagatgaccaatgaggcatcttaacataatctt

SEQ ID NO: 152984 - DNA, 429 bp, Homo sapiens
atgtgcttccaagaaataattttgcccttctatggtttttataattcatggtccagttacgtttttaatacatgcaaaatagatcatattctacttgatttaaattaatttaaaatttaatacatgcagtttattggctacaggaaattaactcattcaggaaacatttcaattttttttcctttatcataattaaatgttaaatctatgagggaaacaggatgattaaaagggatcaactgcagctgagtgccaattagtgatggggatatgttctgagaaatgcaacgwtaggcagttttgtcattgtgaaaacaccacagggtgtacttacacaaacctagatgatatagcctactccacccttaggctatgtggtatagcctactgtccctagcctacagatctgtatagcacgttactgtcctg

SEQ ID NO: 152985 - DNA, 598 bp, Homo sapiens
acatatatgagaaccagagagaaatgtaacttacttgcaccaagtctcaaaagcaagattagcagaattagccccctaccaaactaatggccctagtcatacccatcacataacttcttttttcctggcagattcagtggaaataggggcctgatctcgctaagggggatgagagtatatgatttttttttttctaaaaaagaagcagagctttaaaatacamgaaaagtcacatatcatctcccggggagtctatcacctgcatatcactgcctttggcatataccttaccttcacagtcagttaatgtgcacaggacaaccataaactgcgtattcttatttctctggatagagaatgtgctctctctccccaagtctggggcaatggattgagagctagtaggctccactacacatcagtgttcctttacaatactagctctttccagcctatctgccacctaacactatgttaaacatactaatacttttaccaggaaagggagaaaaaaataaagtaaaaaggaaactgagaggaagagtggtgggaggagggaagtaaatatgatcatctctgcaaatgtgcagtggcaaat

SEQ ID NO: 152986 - DNA, 598 bp, Homo sapiens
acatatatgagaaccagagagaaatgtaacttacttgcaccaagtctcaaaagcaagattagcagaattagccccctaccaaactaatggccctagtcatacccatcacataacttcttttttcctggcagattcagtggaaataggggcctgatctcgctaagggggatgagagtatatgatttttttttttctaaaaaagaagcagagctttaaaatacacgaaaagtcacatatcatctcccggggagtctatcacctgcatatcactgcctttggcatataccttaccttcacagtcagttaatgtscacaggacaaccataaactgcgtattcttatttctctggatagagaatgtgctctctctccccaagtctggggcaatggattgagagctagtaggctccactacacatcagtgttcctttacaatactagctctttccagcctatctgccacctaacactatgttaaacatactaatacttttaccaggaaagggagaaaaaaataaagtaaaaaggaaactgagaggaagagtggtgggaggagggaagtaaatatgatcatctctgcaaatgtgcagtggcaaat

SEQ ID NO: 152987 - DNA, 598 bp, Homo sapiens
acatatatgagaaccagagagaaatgtaacttacttgcaccaagtctcaaaagcaagattagcagaattagccccctaccaaactaatggccctagtcatacccatcacataacttcttttttcctggcagattcagtggaaataggggcctgatctcgctaagggggatgagagtatatgatttttttttttctaaaaaagaagcagagctttaaaatacacgaaaagtcacatatcatctcccggggagtctatcacctgcatatcactgcctttggcatataccttaccttcacagtcagttaatgtgcacaggacaaccataaactgcrtattcttatttctctggatagagaatgtgctctctctccccaagtctggggcaatggattgagagctagtaggctccactacacatcagtgttcctttacaatactagctctttccagcctatctgccacctaacactatgttaaacatactaatacttttaccaggaaagggagaaaaaaataaagtaaaaaggaaactgagaggaagagtggtgggaggagggaagtaaatatgatcatctctgcaaatgtgcagtggcaaat

SEQ ID NO: 152988 - DNA, 598 bp, Homo sapiens
acatatatgagaaccagagagaaatgtaacttacttgcaccaagtctcaaaagcaagattagcagaattagccccctaccaaactaatggccctagtcatacccatcacataacttcttttttcctggcagattcagtggaaataggggcctgatctcgctaagggggatgagagtatatgatttttttttttctaaaaaagaagcagagctttaaaatacacgaaaagtcacatatcatctcccggggagtctatcacctgcatatcactgcctttggcatataccttaccttcacagtcagttaatgtgcacaggacaaccataaactgcgtattcttatttctctggatagagaatgtgctctctctccccaagtctggggcaatggattgagagctagtaggctccactacacatcagtgttcctttacaatactagctcttyccagcctatctgccacctaacactatgttaaacatactaatacttttaccaggaaagggagaaaaaaataaagtaaaaaggaaactgagaggaagagtggtgggaggagggaagtaaatatgatcatctctgcaaatgtgcagtggcaaat

SEQ ID NO: 152989 - DNA, 412 bp, Homo sapiens
gaattcatctttgttaattaataaggttctagtaaattgggtttttttttgtataatgccctacaaaaaagcaggaagacctaatgattacaagttcactagttctaaccttattctttcctatacatatagkggtagtgaccaaggtagaatcttatatttttcttcatcttcaaatgttatcatttaaacccttgacattattgacttgagaataaatgtgaaaatcatggactgagcactctatactgtctgagtagtttatattttaagagtttcttaaagagtaacttgggaaatcagtccattaactactattgcagtgactgtggcacaagggtatattggttttatttgctgggttgtgccaagagcaatacctagcaaaaaaatttttttcacttgggagatt

SEQ ID NO: 152990 - DNA, 367 bp, Homo sapiens
agcgtgaaatgctgctcaagttcaggtagactacagctcaagaatgtgagactacaggttggtagtctgcctccctctctaaggcaaagagatatttcaatgttacctgggacctgagaaagggggagggtctatggtttgcccagataactaaagtctgtaggttagaaagataggatttgtttggaagctataaagatgtatcctcatatgtcatggacatcatgtgatatggtttggctgtgttcccacccaaatctcatcttagctcccataattcccacatgttgtgggagggaccccaygggagataactgaatcatggggaaggtttcccccatactgttctcatgctgatgagtaagtc

SEQ ID NO: 152991 - DNA, 479 bp, Homo sapiens
aagtcaagtgtgtgttgatgaccttccctgaaccctggctttcttctctatagaaagtgctcagtgggccaagcacggtggctcacgcatgtaattccagcactttgggaggacaaggcaggtggatcacttgaggtcaggagtttgagaccagcatggccagcacggccgacatggcaaaaccccgtytctactaaaaatacaaaaaattagtcgtgtgtggtgctgggcatctgtaatctcagctacttgggaggctgatgcaggagaattactcgaacccgggaggcagaggttgcagtgagctgagatcatgccactgcactccagcctgggagacagagtaagactctgtctcaaaaaaaaaaaaaaaagtgctcagtggtaatgcctatcccataggacgactgtgagattttgaacaataacatatgtcacgcctgtgcttgaagtctggcatgcatggccctcaggaaatg

SEQ ID NO: 152992 - DNA, 479 bp, Homo sapiens
aagtcaagtgtgtgttgatgaccttccctgaaccctggctttcttctctatagaaagtgctcagtgggccaagcacggtggctcacgcatgtaattccagcactttgggaggacaaggcaggtggatcacttgaggtcaggagtttgagaccagcatggccagcacggccgacatggcaaaaccccgtctctactaaaaatacaaaaaattagtcgtgtgtggtgctgggcatctgtaatctcagctacttgggaggctgatgcaggagaattactcgaacccgggaggcagaggttgcagtgagctgagatcatgccactgcactccagcctgggagacagagtaagactctgtctcaaaaaaaaaaaaaaaagtgctcagtggtaatgcctatcccataggacgactgtgagattttgaacaataacatatgtcaygcctgtgcttgaagtctggcatgcatggccctcaggaaatg

SEQ ID NO: 152993 - DNA, 557 bp, Homo sapiens
ttgtaacagtaaatgtcttatataattatgaaacaaaattaaatcaaaaattaattaaaatccctaaaatcaaaagcaaaatgaaataagtgaaccagtaaaacgggcaggtgccttaaccacagagagcggtttaaactgactgtaacatatcaccatttaattgtatatctcaagtggtttatttcctgaaggataatcaagagacatgggagctctggtggcctctgctcactggggccagcaagggaaaataaagaagagagacagagagacttaagagacctaacaacccaatgcaaaaagagagaaacaggcacacagaaatttgaacatgaggtatttgatgataaaccaaattattggtatctattagttgtgatcayggcattgtgactatatcattttaaaaataaaaaataagggccaccttctcttttagaggtaggcatgtatgtattttgacacaaaataatgtgatgtctcaggcttgctttcttcatccaagggagaagtggtggggtactgatgaggcaagcaatgtccaggagtggctg

SEQ ID NO: 152994 - DNA, 489 bp, Homo sapiens
tttgcactactatcagttttatacaactatcagttgataaactatcagttttatcagttttatgcagagttttgaaatagcataaagacattgaaaggcagaaataaccctgaagtgtgcattagacagaatatccagtgaattttttttttttttgctctttaacaagttttaatgccagtctccccrcctcttgatcagattaatcttaaaggttattctccatcacaaaaagggtctttcttcattagatttggcctaattatttacataggtgcagaaagagtgctaattaagcatacagacttccttgagttcattttgcaaaatttaaaattattttaaagcctggaaaatgaacagaaagagtcaagtatatatcctgcttttcatatatgaactatacctcagggtaacaaaacagttgatgaggaaaagtctgtgtctctatatgtattcttattcataaagaaaaaatgacagagtgag

SEQ ID NO: 152995 - DNA, 530 bp, Homo sapiens
catttgcactactatcagttttatacaactatcagttgataaactatcagttttatcagttttatgcagagttttgaaatagcataaagacattgaaaggcagaaataaccctgaagtgtgcattagacagaatatccagtgaattttttttttttttgctctttaacaagttttaatgccagtctccccacctcttgatcagattaatcttaaaggttattctccatcacaaaaagggtctttcttcattaratttggcctaattatttacataggtgcagaaagagtgctaattaagcatacagacttccttgagttcattttgcaaaatttaaaattattttaaagcctggaaaatgaacagaaagagtcaagtatatatcctgcttttcatatatgaactatacctcagggtaacaaaacagttgatgaggaaaagtctgtgtctctatatgtattcttattcataaagaaaaaatgacagagtgagactagcactattttggaaaccctaataaattaatgagtc

SEQ ID NO: 152996 - DNA, 581 bp, Homo sapiens
catgtttatgcaccatttatattttattttcttctctgttttgtctgtatgtgttctgtactcagttatagatttaaatatttatcaatgatttataagagctctttatatattatagttttgaatcctttgacttatattgggcaaatatattccctggattgttatttgccttttaatttttgtcagaaaagtagaaaactttttaatttttatatattcaaatttaccaatgtttctctttgtaatcttaccttagaatcatgcttaaaaagattgtctcctttccaagattatgctaccccaawaacttcctggttatggtgtgcttttttttatatagttaactctttagtattttacaatctactcgatgaattgaactttttctctctaaacagtttagtagtttacctgaaaccattttctgaatactctagtatttccctgctgatttgaaatgtcacccagatcattaaaaatcatttgcagcaagttacaattactaagaaagccacaggccatttattgtgaggatagtggggcctattgaatcatcaaggaggctagagatcaggctt

SEQ ID NO: 152997 - DNA, 581 bp, Homo sapiens
catgtttatgcaccatttatattttattttcttctctgttttgtctgtatgtgttctgtactcagttatagatttaaatatttatcaatgatttataagagctctttatatattatagttttgaatcctttgacttatattgggcaaatatattccctggattgttatttgccttttaatttttgtcagaaaagtagaaaactttttaatttttatatattcaaatttaccaatgtttctctttgtaatcttaccttagaatcatgcttaaaaagattgtctcctttccaagattatgctaccccaaaaacttcctggttatggtgtgcttttttttatatagttaactctttagtattttacartctactcgatgaattgaactttttctctctaaacagtttagtagtttacctgaaaccattttctgaatactctagtatttccctgctgatttgaaatgtcacccagatcattaaaaatcatttgcagcaagttacaattactaagaaagccacaggccatttattgtgaggatagtggggcctattgaatcatcaaggaggctagagatcaggctt

SEQ ID NO: 152998 - DNA, 552 bp, Homo sapiens
tcccccaaaaaagaacaaggcaaggatatcctctctcactacttctgttcaacatcatattagaagtcctagctagtgcaataagacaagaaaaggaaataaaagatacatagattgaaaagtcagaaataaaactgtctttgttcataaatgatatgattgttcatgtacaaaatcccaaagaactgtcaagaaactctcaaactaataagctagcataggtcacaggatacaatattaatatacaaaagtcaattgctttcccakgttccagcaatgaaaaattggaatttgaaatttaaaatgtaccattaaacactgcaccaagaaaacgaaatacttagatataaatctgacaaaatatgtataagaactatatgtagaaaactagaaaactcaaatgaaagagttcaaagattacctaaataaatatagagatattccatgttcatggacagaaagacaatattgttaatatgtcaattcttctcaactagatctataaatccaatgcaaccctaatcaaaatccaaaaactattttgtagataaa

SEQ ID NO: 152999 - DNA, 552 bp, Homo sapiens
tcccccaaaaaagaacaaggcaaggatatcctctctcactacttctgttcaacatcatattagaagtcctagctagtgcaataagacaagaaaaggaaataaaagatacatagattgaaaagtcagaaataaaactgtctttgttcataaatgatatgattgttcatgtacaaaatcccaaagaactgtcaagaaactctcaaactaataagctagcataggtcacaggatacaatattaatatacaaaagtcaattgctttcccagrttccagcaatgaaaaattggaatttgaaatttaaaatgtaccattaaacactgcaccaagaaaacgaaatacttagatataaatctgacaaaatatgtataagaactatatgtagaaaactagaaaactcaaatgaaagagttcaaagattacctaaataaatatagagatattccatgttcatggacagaaagacaatattgttaatatgtcaattcttctcaactagatctataaatccaatgcaaccctaatcaaaatccaaaaactattttgtagataaa

SEQ ID NO: 153000 - DNA, 552 bp, Homo sapiens
tcccccaaaaaagaacaaggcaaggatatcctctctcactacttctgttcaacatcatattagaagtcctagctagtgcaataagacaagaaaaggaaataaaagatacatagattgaaaagtcagaaataaaactgtctttgttcataaatgatatgattgttcatgtacaaaatcccaaagaactgtcaagaaactctcaaactaataagctagcataggtcacaggatacaatattaatatacaaaagtcaattgctttcccaggttccagcaatgaaaaattggaatttgaaatttaaaatgtaccattaaacactgcaccaagaaaacgaaatacttagrtataaatctgacaaaatatgtataagaactatatgtagaaaactagaaaactcaaatgaaagagttcaaagattacctaaataaatatagagatattccatgttcatggacagaaagacaatattgttaatatgtcaattcttctcaactagatctataaatccaatgcaaccctaatcaaaatccaaaaactattttgtagataaa

SEQ ID NO: 153001 - DNA, 558 bp, Homo sapiens
tttcccattgcagcccttagcatattcatcacagtggttttaaataccccatttagtccttccaaattctctgctgtgtctcagtctggttctgttgcttgctctgtctcctcagacttttttccttgccttttaccatgccttctaattttttgctgaaaaccaaatatagtgtatcagataataagaattaaaggaaacaggccttacctgtgaggttttatattaatatggctgttattaggctcttaatatttgctgtagctgtaggtgccagagggttcaaattcacctattyctcttgtttttgtccttttcttgtctttggatttccctaagaatgctttcttgtgtctagcagctccttcaactgtaatttgtggtagttatactgcagccctgttgctgtggtgggaaggcgtgtgtgtggtgtgttttactctgatgatgaaatttcagtcttttagtgggcctgtatctctgggctatcaccttaacaagcgtttctagccttttattcctgccttaggtgagacaggaaggctgcacgggcatggg

SEQ ID NO: 153002 - DNA, 482 bp, Homo sapiens
cagtgggataactggaatggggtctgtgcttctccctttcctctgtgagtcatgttgttgggagtcactgaaaaagtatgaggtggcaagtagcaagaggcccagcaggttttgcttttatggtcacgatgcatcagagggcacactgtctacatgccttttgaagtactatgaagggcctcttggagcccaggcctcacagggggcaaactgctggctctcccaaccttgaagcctggcagcagttagcctgcctctcccaaagaacaacagcctgggacagggtcttggaggactattctcagaaaggggacagctgtggactctctcagaagggagacaggggcttatgcyagcacagaccccacaagtaccacacagtccttgcttttcccaggacttccttgggaaggggcaagccctcttctccgcatgcaacttcattgctaagctctcacttgtgtctcagggagggaggaacc

SEQ ID NO: 153003 - DNA, 536 bp, Homo sapiens
tttttttgttggtaatttttaaattgtcatttcaatcttactgctggttactgttctgttcagggtatctaattcttcctgccttacgctaggagggttgtatttttccaggaatttatccrtctcttctaggttttctagtttatgtgtgtaaagttattcacagtagccttgaatgatcttttgtgtttcagtggtgtcagttgtaatacctcccccgtttcatttcttattgagcttatttgggttttctctcttgttttcttggttaatcttgctaatggtctatcaattttacttatcttttcaaagaaccggctttttgtttcatttatcttttgtatttttttgtttcaatttcatttagttctgctctcatcttggttatttcctttctttttctgggtttgttatttcctttcttttgctggttcttgtttctctagttccttgagatgtgaccctagagtgtcagtttgtgctctttcagtctttttgatgcaggcgtttagggctatgaacttgcctcttagcac

SEQ ID NO: 153004 - DNA, 543 bp, Homo sapiens
agatctgcccatcagaaaagaaggaagargattaatgatcattcttcagacaccaggactccctccggggaagctctctatagagctaaaggcttgtattggattattgtcaccgatcactgttttaggcttgcattcctagtaaaattgaagctgagcctgtatcccttacagtagaaattcccaaatgccatattcaacataatgagttttcagaaagctaaatatatccaatgggaaagactggccattacatccttcctgcatttcgttgttattgctattaaagtgtactttaaaaaataaaaataaaaggatagtaatagaagacagcagggtttattttcatgtctttcttggcagtttaaaaagttggcaatcctatatcaatttctaatttttttctaaaactctactggtcattaaaattagaaaactggtagcctcatgcctaaagtggctagttcagatcaagttacatgtaaactgaagaaaggaagagcctctgattcaaactctttaaggtcatcatttttttctttt

SEQ ID NO: 153005 - DNA, 548 bp, Homo sapiens
ctcaaaaagactgccgtagcacactgagtcggccccatgcctcttcctgcattacttcttttttttcccaagcaggatgatttttccagcacaattatttaaayaaaaataatacaggctgggtgcagtggctcacgcctgtaatcccagcactttgggaggccaaggtgggtggatcatgaggtcaggagtacgagaccagcctggccaagatgatgaaaccctgtctttactaaaaatacaaaaattagccagttgtggtagcgggcgcctgtaatcctagctacttgggaggctgaggcaggagaatcgctcaaacccaggaggcagaggttgcagtgaggcgagatcgcaccactgcactctagcctgggtgacacagcgagactccatctcaataataataataataagactagatggagatgagggaggggagatgtgaacccttagagattccagaaactgacaagtttcttgtgccaagaaggcactagcaagagccttagtttaatttacttaatgaaaacttatggattgatgaattc

SEQ ID NO: 153006 - DNA, 596 bp, Homo sapiens
ggtttaaacatataaaatactagtagcttttctgaaaattgtgcttacttgtttgcaaaaaaatctctgcttcakattatgttaccctctgcatctttaaaagacaaatggaaaaggataaatattaaagaaatttaaaacaactgtttcagttatctattggtatgcttgctgcaaaccactccaaaatgcagtggtcaaatgatgatttataatttctcacgattctgtgggttggatggttctgttgccgcactcactacttgggattccttatgcggctgcactcatctgatagctcatctgagggtggaagccccaagatggtctctacttctcctaggcctctgcccacatggcctctcattcagtaatctatcctaagcttttcacatggctgctggatcccaagcattgcaagagtcaagcctcaatgtgcaagtgtttatgtcatgcttgctaatgttcatttggccaaagcaggttttgtagccaagttcagtatcaatgtgggagggcctgaatatctggaagcatgtttcatcagggaccaccaatgtaacagtctgctgccacaacttccattcaactggatt

SEQ ID NO: 153007 - DNA, 227 bp, Homo sapiens
gaattcatggccgggtggctcatgcctgtaatcccagcacttcgggaggccraagcaagcagcttgcttgaagcccaggagtttgagaccaacctgaccaacatgatgaaaccccgactctacaaaaaaaataccaaaaaaaaaaaaaaagattagccaagtgttctactactgcagtttcgctactcaggaggctgaggtggaaggatcacctgagcctcaggagg

SEQ ID NO: 153008 - DNA, 553 bp, Homo sapiens
aaataattcctcaagctcaataggaaaaaaaccaactaattacaaatgccaaaagatttgaatagatgctccaaaaaatagatatattcatggccaattggcacatgaaaagatgctcaatatcattagttatcaggcaaatgcaaattgaaaccacagtgagatamtactacacacctactggaatggctaaccctaaaagactgacaataccatgtgttggcaaggatgtggagtaactggaactttcatatattcctgatggaaaaacaaaattgtgcaaccattttggaaaacagtttagcagtctcttataaggttaaacacatatactgtatgacccagcaaacccactcttagatatttattcaagacaaatgaaaatgaatgttcatagctgcttgtaatactacttaataaaaaaaggaatgttgccagcacttaggaatgaaaaaaaaaagggtggggggaataactattgatacatgcaacaacctggatgggtctcaaaagaattgagctaagtgaagaagccaagtgtgaaaactatatg

SEQ ID NO: 153009 - DNA, 633 bp, Homo sapiens
acccaaacaagaagccatactccctcattctgttctcaggctgaagtctatttccagacccagcaacaatggactgaagaaatggctgtgttcctgagtggaagaaacctctagtaacgtggcaatatccagatagttcatattattatacatagagtctaagataacattaatacctagagccccaaagcatcatcctgggcctattggtagagtcagagctgataagggygaggtaataaatgaaatccttacaatatgaacctggctcatattcaacccaatgggtctgagaaaccactcactggttatttcttcagtatccaaatgtttaattggaattgatttagttgacaatttgcttaaaccccacgttagtttattggcctctgggataagagttatctccctagggaataccaaatagaaatggcttccttcccccagtcaaaatgataacccacatataatatttagtggatatgaataatgatagagacaagtatcacgacttgtgatagtttgttagagctaccataacaaaataccacaggctggcttgcttaaacaacagaagtttattttctcacagtcacgaagctaaaactccaacatcaatgtattagctggttt

SEQ ID NO: 153010 - DNA, 551 bp, Homo sapiens
ttttatagattgctaatatattattattttgtacactatttcaaaagttttaattcatcagaaatattttataaatatgaaacttgctttatatcttcatatctaatcttttgtctcaagaagtagagatatgtaattataataatattgtcagtgcatattttacattcccctatctccgtatttctgggtaagtggaaagagaagggtatggcactgggaatcaagagggaagaagggaattttttaaagtttagtggttcctagaatgagagaggtgaaaaaatggagaaaggaaaataaaaaatataaggccctttttagatcaaaatgcctgctattggggttaagagaacagaaatgactagagatatacgattgataaatagatagatagatagatagatagatagatagatagatagatagatacatacatacatacatacatacatacatacatacatacatasatacatagatacatagagacagacagatgttatgggctaaattgtgtttcttccaaactcacatgttgaagccctaac

SEQ ID NO: 153011 - DNA, 477 bp, Homo sapiens
tccagtaccagcttttgcctgccctctgtcttgggaggtgacttaaggcacatcccacctgattactgtggctctggatgggtgctgagtcttgctctgggcaccagccctacctgttgagccagaggcccacctccccatcacggaatctactcactcaatggtccatcttctacttttttgttgctattttttgttttttgagactaagtcttgctctgtcactcaggctggagtgcaatagcacgatcttggttcactgcaacaatcgcctcctgggtccaagtgattctcatgcctcagscttccaagtagctgggattggaggcatgcaccaccacgcccagctaatttttgtatttttagtagagacggagtttcaccatgttggccaggctggtctcgaactcctggccacaagtgatccaccggccttggtctcccaaagttctgggatgacaggcgtgagccactgcg

SEQ ID NO: 153012 - DNA, 432 bp, Homo sapiens
gaattccctggaggtagaggttacggtgagccaagatggcgccaccacactccagcctgagtgacaaagcgagactctgtctcaaaaaawaaaaaataaagaaaattttaaatgaagtgccagggactttatgcgcatgtcatgtggagctagagggtcccggggaagctgtcttgcacaaaggagccataaacctctaagggcacctgccggctgatgtctcctggctctcgcctcctccctcttttctcgacctgctcctgaccctgtgatgttgttggggcagttgaactgggttatttgcgttgctcactgccatgtcatcctttgttttgtagatgccgtggaaagcagatactctgtaagtacacatttcatatacattatatttaaaagtactccactgaacagtgaaatatttccagactcacc

SEQ ID NO: 153013 - DNA, 588 bp, Homo sapiens
gttaaagtctggtttgtctaatttgagaacagtgacccttgctctttttatgtttttcatttgcatttctccaacactttattttgagcctactggtagcaatacacatgagataaatcacttgaagatagcggataggtgggtcttgtttatttatttatttatttttatccaactcaccattctgtgccttttaactagaaaatttagactgttcagattcagttttaatatttattatatgaggctttgattgtatcattaaattgttagttggttggcctgtagtttttatcatgtagctgttttatagagtctgtgggctgtatactcaagtgggttttgttctggcatgtatcagtcttttgtttccatgattagagctcccttaaggatctcttgtaaggctggtctagtggtaatgaattgtcttagcaatttcttatttgcaaaattttatttctcctccacttatgaatcttagtttggtgggatataaaattcttagctggaatttcttttatttaaaaatgatgaaaataggcctccaatctcttckgcctagtaagctttctgctgaaagtctac

SEQ ID NO: 153014 - DNA, 588 bp, Homo sapiens
gttaaagtctggtttgtctaatttgagaacagtgacccttgctctttttatgtttttcatttgcatttctccaacactttattttgagcctactggtagcaatacacatgagataaatcacttgaagatagcggataggtgggtcttgtttatttatttatttatttttatccaactcaccattctgtgccttttaactagaaaatttagactgttcagattcagttttaatatttattatatgaggctttgattgtatcattaaattgttagttggttggcctgtagtttttatcatgtagctgttttatagagtctgtgggctgtatactcaagtgggttttgttctggcatgtatcagtcttttgtttccatgattagagctcccttaaggatctcttgtaaggctggtctagtggtaatgaattgtcttagcaatttcttatttgcaaaattttatttctcctccacttatgaatcttagtttggtgggatataaaattcttagctggaatttcttttatttaaaaatgatgaaaataggcctccaatctcttcggcctwgtaagctttctgctgaaagtctac

SEQ ID NO: 153015 - DNA, 299 bp, Homo sapiens
gttaagactgaatcaatgaagggagatatttaaaatcttacatgaaaagataatatatatattgaacagtcatgtaatttaccataaaggggctgcttgcaatagatacatgttctttgttaattctttctgtaaatgaattatatgtaactgatatgatttggctgtgtccccacccaaaatagcctcttaaattgtaatccctataatacccataacccccaatgtcaagaaaaagaccatgtgaaagtaattgaatgatggrggcggttccccccttgctgttctcatgatagtga

SEQ ID NO: 153016 - DNA, 633 bp, Homo sapiens
ctttggctttttttcttcttctgtcattttgtctcctttcttctcattgtgtagagctcctagtaccaaatgaaacttgcactctcatctgtcacctccttttgacattgagctttctctcatgctggcctgtatacatggtaaagttggggtctggacccaaccaatcatttagatcaacaaggcactgggtcaggcattatctgtcatatggctgctgtacaatagagatttttattctggctgttcgtaactgttacaaaaacatttactttaaaatgataattttaaacacagtgctcaattaagtgagatgagaataatctgttttcactgctgtgcataaaattgttgaaatctayaaaattcaagataatcgtgtttttctaactaagaaggatcaaccatcatgctgctccaacccccaccttgcctccatgtgtcagtggtaatggaaacaccacttggaaaaatatatatgtataaagagttcttttaaaaaaccaaacattttgtttctagcatgttccaatgaatttgtttttatgggctaaaatcctgaagaaattgactctgcacacctcattataattttaaatcactatagccctttgaaaccttaaattctagaga

SEQ ID NO: 153017 - DNA, 607 bp, Homo sapiens
acaaggagctcaaataaatcagcaagaaaaagtcaaataatcccatcaaaaagtggacaaagaacatgaatagacaactctcaaaagaagatataaaaatggccaacaaacctaygaaaaaatgctcaacatcactaatgatcaggggatgtgaatcaaaaccacaatgtgataaccactttactcctggaagtatggccttaattaaaaaattaaaaactaatagatgttagcatgatgtggtgtaaaggcaacacttttacactgttggtagaaatataaactagtacaaccactatggaaaacagtatggagatacattacagaactaaaagtagaactaccatttgatatagcattcccactatggtatctacccagagggcaataagtcattttatgaaaaagacacttgcacacacatgtttatagcagcacaatttgcagttgcataaatatgtaaccccccagcctaaatgcccatcaaccaaagagtggataaagataatgtgagagagagagatatatatgcatacatatatatcacatatcagtattccatgagtgtgtgtgtgtgtgtgtgtgtatgcatatgtgtacatatata

SEQ ID NO: 153018 - DNA, 607 bp, Homo sapiens
acaaggagctcaaataaatcagcaagaaaaagtcaaataatcccatcaaaaagtggacaaagaacatgaatagacaactctcaaaagaagatataaaaatggccaacaaacctatgaaaaaatgctcaacatcactaatgatcaggggatgtgaatcaaaaccacaatgtgataaccactttactcctggaagtatggccttaattaaaaaattaaaaactaatagatgttagcatgatgtggtgtaaaggcaacacttttacactgttggtagaaatataaactagtacaaccactatggaaaacagtatggagatacattacagaactaaaagtagaactaccatttgatatagcattcccactatggtatctacccagagggcaataagtcattttatgaaaaagacacttgcacacacatgtttatagcagcacaatttgcagttgcataaatatgwaaccccccagcctaaatgcccatcaaccaaagagtggataaagataatgtgagagagagagatatatatgcatacatatatatcacatatcagtattccatgagtgtgtgtgtgtgtgtgtgtgtatgcatatgtgtacatatata

SEQ ID NO: 153019 - DNA, 607 bp, Homo sapiens
acaaggagctcaaataaatcagcaagaaaaagtcaaataatcccatcaaaaagtggacaaagaacatgaatagacaactctcaaaagaagatataaaaatggccaacaaacctatgaaaaaatgctcaacatcactaatgatcaggggatgtgaatcaaaaccacaatgtgataaccactttactcctggaagtatggccttaattaaaaaattaaaaactaatagatgttagcatgatgtggtgtaaaggcaacacttttacactgttggtagaaatataaactagtacaaccactatggaaaacagtatggagatacattacagaactaaaagtagaactaccatttgatatagcattcccactatggtatctacccagagggcaataagtcattttatgaaaaagacacttgcacacacatgtttatagcagcacaatttgcagttgcataaatatgtaaccccccagcctaaatgcccatcaaccaaagagtggataaagawaatgtgagagagagagatatatatgcatacatatatatcacatatcagtattccatgagtgtgtgtgtgtgtgtgtgtgtatgcatatgtgtacatatata

SEQ ID NO: 153020 - DNA, 564 bp, Homo sapiens
accttttcttgacacagtaatttatcaaaactaattttgataagactagtaaagctaatatggkaatctccctttataagtatttttatttccacagtttcagttatcctcaatcaaccagggtctgaaaatattaaatggaaattcccagaaatatgtaattcataggttttaaattgcacactgttctgagtagcgcaatgaaactgcatacccatccttatctgtcctgcctgggacataactcatccctttgtccggggtatccagactgcatactctatttgtcattgacatcatctgctcctggcatccaatcatcaacattatggcttgctgttccaggattacccaaagcagatgattcctccttcttatgtattttctgtagtatgtcacaatgcctgtgtcgttcaccttacctcatctcatcatgttgacattttatcaatttgtatcatcacaagaatggtgaatacagtacaataagatattttgagagagaccatactcacataacatttataaattaaatcaataataaaataacatttattattggca

SEQ ID NO: 153021 - DNA, 564 bp, Homo sapiens
accttttcttgacacagtaatttatcaaaactaattttgataagactagtaaagctaatatgggaatctccctttataagtatttttatttccacagtttcagttatcctcaatcaaccagggtctgaaaatattaaatggaaattcccagaaatawgtaattcataggttttaaattgcacactgttctgagtagcgcaatgaaactgcatacccatccttatctgtcctgcctgggacataactcatccctttgtccggggtatccagactgcatactctatttgtcattgacatcatctgctcctggcatccaatcatcaacattatggcttgctgttccaggattacccaaagcagatgattcctccttcttatgtattttctgtagtatgtcacaatgcctgtgtcgttcaccttacctcatctcatcatgttgacattttatcaatttgtatcatcacaagaatggtgaatacagtacaataagatattttgagagagaccatactcacataacatttataaattaaatcaataataaaataacatttattattggca

SEQ ID NO: 153022 - DNA, 564 bp, Homo sapiens
accttttcttgacacagtaatttatcaaaactaattttgataagactagtaaagctaatatgggaatctccctttataagtatttttatttccacagtttcagttatcctcaatcaaccagggtctgaaaatattaaatggaaattcccagaaatatgtaattcataggttttaaattgcacactgttctgagtagcrcaatgaaactgcatacccatccttatctgtcctgcctgggacataactcatccctttgtccggggtatccagactgcatactctatttgtcattgacatcatctgctcctggcatccaatcatcaacattatggcttgctgttccaggattacccaaagcagatgattcctccttcttatgtattttctgtagtatgtcacaatgcctgtgtcgttcaccttacctcatctcatcatgttgacattttatcaatttgtatcatcacaagaatggtgaatacagtacaataagatattttgagagagaccatactcacataacatttataaattaaatcaataataaaataacatttattattggca

SEQ ID NO: 153023 - DNA, 579 bp, Homo sapiens
gtataatgcatgatgcttaggtttgggatacaaatgatcttgtcatccagatagtgagcatagcactcaacagtaagttttttaacgcttgccctcctctctccctcttctctttattagtccccaggtctattgttgccatcttgcrtcacatattcttgccttctctcttctgaaaaattaaataccttagggttactatgaaaattctctatatatttatgtctatattagcccttatttatatgctgtactttttgttatctgtctttattaccaaatacaatcttggttctataaagccatgaacattttaattttatcccaaaatgacaaaaatatctgaaaggtaagtactcaataaataattctatcatgggacaaatatgagtcgaaaggatggataataggatgaagtgtaaactctttttatgctttctaataatctgtctcatgctagggaacaaatctccacgagcatgtcatattgctgtatagatttgctgagcaaagggcactgaccactttttaaaggaaattagcataataaacattcttggacacaagaaatagtgtctc

SEQ ID NO: 153024 - DNA, 572 bp, Homo sapiens
tactatgaaaattctctatatatttatgtctatattagcccttatttatatgctgtactttttgttatctgtctttattaccaaatacaatcttggttctataaagccatgaacattttaattttatcccaaaatgacaaaaatatctgaaaggtaagtactcaataaataattctatcatgggacaaatatgagtcgaaaggatggataataggatgaagtgtaaactctttttatgctttctaataatctgtctmatgctagggaacaaatctccacgagcatgtcatattgctgtatagatttgctgagcaaagggcactgaccactttttaaaggaaattagcataataaacattcttggacacaagaaatagtgtctcccttctagtttgtgggtaggcttattttctgaacagtatcataatgaaagtattttcccgtctccaaagtcatttcaggataataaatttaccctcctcttctcaaagaggattgaagactaaagataaattcccattttttccccctagaaggaagaatggaccagacaccagaagcccttatgtgac

SEQ ID NO: 153025 - DNA, 621 bp, Homo sapiens
agcataggcaaccaaatctgaaatggacaaatgggatcacatcaagttaaaaagctactgcacattaaaagatacagtcaacaatgtgaagaaaaaactcacggactaggacaaaatatttgcaaactacccatctgacaagggattaataacaagactatataaggagctcagacaactttatagaaaraaaacgtaataatttgatccaaaataggcaaattatttcaatagacatttctcaaaagaagtcatacaaagggcaaacaagcatatgaaaaggtcctcaacatcattgatcatcagagaaatgtaaatcaaaactacaatgagatatcatcttaatccagttaaaatggattatatccaaaagacaggcaataacaaatgctgacaaggatatggagaaaaagaaacacttgtacaatgttggtggaaatataaataagtacaaccattatgtaaaacaacttggcagttcctcaaaaaactaaaaatttatacttcgggaggccaaggcaaatggagcaccttaagtcaggagtttgagaccagcctcgccaacatggcgacaccctgtgtctactaaaaagacaaaaattgattcactgcagtaccccc

SEQ ID NO: 153026 - DNA, 541 bp, Homo sapiens
tgctgtgtttatcatcttcaagttttggccttcacaaatctgcaggactcttctttctggtctctccctgcatctttcccaagtaagcctgtgcttgtatctcctctctccttctaggagctctctccccttagatctgtgtccagttggttgccttgtgacctcagttacccagagggttcaagaaaatcctttcgctatttggaagtaaggtttgggttgttgggttgtttttctttacgtttatctgtgtctatgaatggartcttttccacagattaagctgggagaaaaggatatccttctgcagtcgatgaactttgatccataggtcaaaacatctgtaaaaattaactcaaaatgaatcacggacttaaatgcaaagcttaaaactagaagctgatgcttgtaatacaagtactttggagggccaagatggaaggattatttgaggccagtaatttgagacaagcctgggcaacatagtgggactgtacaaaaaattagctgggtgcagtcgcacatgcatgcagtcctagtt

SEQ ID NO: 153027 - DNA, 325 bp, Homo sapiens
atttggagactgcagtgatcaacgattatgctactgcactcctgagtggacaacagagtgaaagcctgtctgtaaaagacaaaaaaaaatgtaagaaaaactgtaaaatttctagaattaaacataggataaatacgtatgaccttggcttaggaaagatttcttctgtaagtagtaggatataaaaaatacaactctcccaaattaaacattgatatattaatttttgtcaaattcaaacttttgctctttacctctttaatktaccttcttaaataaatgaaaaaagtaatcaacagactggaaaaaatattttaaaacatag

SEQ ID NO: 153028 - DNA, 289 bp, Homo sapiens
ccctgcctagttcccaccccaggtttgtgagactttcacttactattagttaagatgtatatgcaggccagtgatcaacaggaattctgcctaatggcagcattgctccttactgccaccccaggaaggtcatatagtgcttaaatctgtacctgttacgcctgtgtatctccttgccatttctatgttctgatttgtattttggtgccagatttctctgaggactttcttattttccctyttatcagcatgtacctagctatattctgaggggttaactgcagaatga

SEQ ID NO: 153029 - DNA, 590 bp, Homo sapiens
taatcaacgtgccattatggctcaccaaagacagttttcttattgttgttgttttctataacagakaccaaaagagaagcacataatatctgtttggaaaagccagattatacataaaacacaaaaacataatagtaaacctagacagttaaacatagataaactccaaatacccagaataacaacaattggatgttttcatatacatacatcacttcttgaacaaatctggcaaaagttttctgttggaaaatatgactgttgttagcagtgtaaggtcagacataacgaagtccacagatgtttgtgtcttctcatgaggtcaaacttttattgatgcttattcaatcataagagccaccagcctcatggagtacagagggaggaaattctccttagtacttaactactcagttggtaatcagagccatgggaacacaggctcaagctagtacccaagtcagtcaatcctgcaagccatagatagtagtatacttaatcagtatctaaatattattgattaaatttttcccataaaacaaagcaacatatgacatcaaaagaaaaaaggaaaaaaagagatgaatgaa

SEQ ID NO: 153030 - DNA, 586 bp, Homo sapiens
aaagctttcactctaccactgatgactaatcaatgaaagaggtgcatgtatgatctaatgaatgcaaggaattcatctcttgaagcaggaactgtcaaggaaatggattttcctcctctagtgcctcagagggagttcaactgccctaagatcttgactttagcccagggaaactgatttcagaattctggccttcagaaatttaagagaagcattttgcgttttaggtcactaagtttgtggtaatttcgttacagcagccatagggaacaagtgcaatatacatatattaatacayttatttagccttagtagcagaattatgctaaatttggataatttagaatgcttctcattgctttttgtacttttgaaatggtttgttttttaataatttagggattttctatagcttgaagtttgcactatacctttagaattttattgaataaaggatgttaaatttgtaattttttctaccaatatgaactctctgagtatactataatgaatgtcacaatcatgcacctctacatgtctgactctgattttcctttgttatatatcaatctcttgttaaacgtca

SEQ ID NO: 153031 - DNA, 523 bp, Homo sapiens
tgatctacagaacctgagtggtgtccgaatagaaataacaacttattgaatttaaaattcactgttaatggatattgaaaatggaatggattgatctacatttctttcagaagcccatccaaatgctctttccttcatggcatcttctgggatttagctctaaatacttttaatgctgcttccatgactctttgtaccgattttataccaattattgcaagatgtcttatataatggtaatttatgttcatgtcatataacctctatgagagtgtaaacttatagggaatatagtacatgtttcartaaaataaatcatgacctcataaacacttattgataaatgcaaataatatataggtcagttttttgtcctggatatagggagttatgattgattctttctagctccttgaatgaatatgaagaaggactacaatcaatttaggataaattggtgagtataataatgtccaaaaaacttataaagcttttgtaataaattagtcaagaagtcaaaaaa

SEQ ID NO: 153032 - DNA, 597 bp, Homo sapiens
cccacagaggggcccagtctacctactcagagaagacaaagtttgttcctgtagaggaagacctgatttctttgctgaaagaaatgatgaatgaattccttggaactagctgacacttgtttctatttgaaatagtggccttgaggtattcttgctgtgttttcggtgtctctgagaagactttcaatttctcagtgagtagatataccttccattgaccttgtagaaatgcatacacatattagcttagttagaaacagagtgagatttgagtgttaacattctagagcttctaacacgttttacaaatcctttctttcaaagcattgaaatcgtaataaatgaactgccaacatttcaatcatttcrgcattatgtgagaactgcacaaggtgaatttttgagtataaaaacggaattgggttgaaggctgacaatgggaataaaccttatatgatgtgcaaaatccttgcaaaaatgtaataaatgagagtcatcctcaaggattcttttaaaagggaaaagagagcttccataggaaatactgaggctctcttaaagccttcatgtttgactctacaatgttaaagacaagca

SEQ ID NO: 153033 - DNA, 451 bp, Homo sapiens
taaaagaacatcatgcaagaaaatgagaaagaaacctttttccatagtgaaaaatacttttcagctaaaagaaaattcttagaatttttgaagtccattttaattattgtatttcttctaagttagataatggcaatgtggccttgttaatcaaaagtcattgaacagctagatattagctgtttcctattaagaaaaaaattaagatgttagttcagaggctgctcrtacatagccatcagggaattaaattgttttcatgtataattaaaaagtgtgttcttccatcaagaagaaagctacagcttgcatgccagtaagtacttaattggaaagaaaatggaccaaatagaacaattctactatgagaaagaaaagttgtgagaactacatctgcaataaataaatatattaattactctcctattactttgagtgtctgtatattaag

SEQ ID NO: 153034 - DNA, 520 bp, Homo sapiens
caacaaaaaactgtaggtcaatatcactggtgaacatagatgcaaaaattctcaacagaatactagcaaactaaattcaacatcacattaaatagattatttaatacgatccagtgggattcattctagggatgcaagaatgttttaacatatttaaattcataaatatgacacattacrttaacagatccaagaaaaatatcttatgatcagttcaatagatgctgaaaaagtattcaatagcatttaacatccctttatgataagaaccctcaacaaactgggtataaaacaaacatatttcaaaataatgaaaggcatatgtgaccaaccagcagataacattgtactgaattaggaaaagtagaaagcctttcttttctaaaatctggaaaacaacaagaatctccactttcaccatttttatttaatataatactggaagtcatggccataacaggcaacagaaataaataaagggcatctaaataagtaaagggcatccaaatagataaagtag

SEQ ID NO: 153035 - DNA, 520 bp, Homo sapiens
caacaaaaaactgtaggtcaatatcactggtgaacatagatgcaaaaattctcaacagaatactagcaaactaaattcaacatcacattaaatagattatttaatacgatccagtgggattcattctagggatgcaagaatgttttaacatatttaaattcataaatatgacacattacaytaacagatccaagaaaaatatcttatgatcagttcaatagatgctgaaaaagtattcaatagcatttaacatccctttatgataagaaccctcaacaaactgggtataaaacaaacatatttcaaaataatgaaaggcatatgtgaccaaccagcagataacattgtactgaattaggaaaagtagaaagcctttcttttctaaaatctggaaaacaacaagaatctccactttcaccatttttatttaatataatactggaagtcatggccataacaggcaacagaaataaataaagggcatctaaataagtaaagggcatccaaatagataaagtag

SEQ ID NO: 153036 - DNA, 568 bp, Homo sapiens
taacagactaataacaagtagcgagattgaaacagtaataaaaaaattgccaactaaaatatccaggatgtattcacagctgaattctatcaggcatccaaagaaggactggtaccaatcttatggaaactattacaaaagataaagagggaatcgtccataaatcattcyatgaagccagtatcaccttaatacccaaaccatgaaaggacatagcaaaaagagaaaactacagactaatatccctcatgaatatagatgcaaaaatcctcaacaaaatactagcgaaccgaatcaaacagcatagcaaaaagataataacaccatggtcaagtgggtttcataccacgtatgcaggaatggtttaatatatgcaagtcaataaatgtgatacctcacataaacagaattaaaaacaaaaaatcagagatctcaatagatgcagaaaaagcatctgacaaactctgccatccctttataaatagaacactcatcaaaatcagcacagaagggacatacctcaaggtaataaaagccctctatgacaaacccacagccaacattatac

SEQ ID NO: 153037 - DNA, 578 bp, Homo sapiens
aagcttaggtgaacataatacaatggaaaggattaaaggaggttaaaggatacttttaaaaaaatatcatcatggcagaaagaccaagggaagatggtttagtcaaagtatgttccaggaactgctgcccagaattggtttttgtggatggattattctctgcatcttttgagcaaagacgagagactgggagtggatttggtctcacgtctacagcatggacatcgcttttggctcagatttgcacgagacccttggagaaggggggactgcagccgaggtgtggccgggctcctccagggcctcctcagcccgagttccctttgggtgcagagatccaggtccctgagcctgcaggccctcctgggtgccacggcactctcrtggctctccccttccctggcttcagtgcctttgcccagcatggtgccatggagaccccagcacagaccatgctcagggccccccgagtggaccgagcccgcgtgctccttggctggtagggaggcctgtctgcatcaggtggagtcgggaggtgcgggcagaggccccagagctgtgacactggagacgccgtg

SEQ ID NO: 153038 - DNA, 647 bp, Homo sapiens
atgaatcagactttggagatttttatacagacagctaggtggtcaatagtttcctttgataagagagaggctgggaaataatcagatttggaagggggaaaaaaggaatttcagtttggatatgttaactttgagatgtgagtttttataaagactctcttgaccaaactttagacaggctcctatgagtccactttctactaggcctcatccttgatctttatacttagcctgcatagtccagctttgaaaagaatcctgttatgtaaatgtattaataataagaatccctccacccttcacatatgatttgccttgacatctgttcaagtttctcattccctggctttaaaatccgattcaccatgatctgcctttagcagtaatcctgttgaatcagtttaacaagaatctccctacccttgatgtcgcctcttaataattttccattgacttatccccctcctctggtctttggctctaaatccctacatgttctggctgtatttgaaattgaactcagttttaatactcccattgcaatagtactgaataaaaatggctttactgcctttcactgtggcctgacattatttctatttaacagwttgttttattagattatctaataatcaaacatgaatgca

SEQ ID NO: 153039 - DNA, 545 bp, Homo sapiens
tggtagattaaaaataagtaataacttaagagacggctagaattgccttttacaatcaatatttgttttacacatttatcttttaagaatttcttaacttacagcaaatgtccttccatttatagtatatttgtgaatattaatttagatgacaccttctgtatgaaatttacttagaacaaatctaaggcattttcaggagtattaagaattttggaaattatttggcattttcagttaaaacaccatggtgttcttttcaagctaaagaatataccctattggaattaatttaaaaaatctcaaagactttcttgaattagtcatatttactgagaccacaaaaattcaaataataaatgtgtttgatatttgtaataaataaaaaatctttcaaagattcttaaatttrcttttaagcaatatgtttctgtgatgattggttatgtaactgataaacgtctttttctgatgttatgtgttttcattgatacagcccttcagtttagatcatctagttttaatataaggactgactcttctac

SEQ ID NO: 153040 - DNA, 447 bp, Homo sapiens
tggattttaggacaattgtctaattgggtccctgactctaagaacacaaatattaatgtcttactttttctttttaaataatatcaaaatactttattttgtaaagtggcatcttacttagactctgccaaacaagttaggatcactttaaaataaataacattaaaaaaaagatgtcattccctcagttcaaataaaattaagtttcagcctgagtaagctctgaaatagaaacatcaactgaatgaacttcctgtccttagagagtytgccatctcaattcttggtccagcagggaaagtaaatgtggaaacagatcattaaaacacagtgtaataaagaccaagatagaagaaaaaagatcagactttcaatttccaagacacaggacaaatacaagaataaatatgacagaacgaacaaaaatatgttcatttttgcccattg

SEQ ID NO: 153041 - DNA, 529 bp, Homo sapiens
aaaacttacatttagtgacaaatcagaatgattgcctctaaggacagggatattgactgggaaggagcaaaaggaagccttctaaggtactggaaatattttgtatcttgaactggtttgtggatccatgkatctgtgcataaataaaaattcaacaagctgtacatttaagattcatgcactctcctatatatatgttatacctcgatataaaagaaaagttcatttggggggacatactgtcatctacttcataccccttcgccttactctaggcctcatatcaccattgcctttgatttccagtactcctagtaaggcctgtttattcttgttcaaactgagagcaggttcccaattgttcagccccatgatttttctagtgtcacattatacctcttcacacacctcccgccagaagccatcttttgcttaatcatctcataagtatataccatgccagacactctagccttccatcagcaataagtaaaatgcacgctctcaggaaaagtgcacaaactatttt

SEQ ID NO: 153042 - DNA, 471 bp, Homo sapiens
atttctttctctacaaaaatgcatctaaggagagtatgaaaagtttgtctcaacacagttgacatgtaatcactgtgacttcaaaccaaacgtgttaatctggaaaaagcactactggcagatttcttttttcttcattaagcaatgacctatcacacaacactgcattgcttatggcaatctttgaaatcacaagtaaactttaaaaacactgtctacaatggaaatgcacgtgccctatatcagggttcacacaaacacatccagtaagcatatggaccatgctytccattctttactgcgtaatttattaaaaaatctatatagagaaatctattattctactgcatccaatgtgttatgtgtgtgttaatttatattagctagggcaaaaaggctatgtgtcatatttaacacacatatttcttatttgccatttagcacatacacaaagactcatgcgtacacaca

SEQ ID NO: 153043 - DNA, 503 bp, Homo sapiens
tggtatttcctttatgactggtagcagggacattaaaaaaaaaaatccttaatggtaaaaagtctttgtcctaccaaatgtggggggaaatttagccataatctaggaactattggaaagagacagagacagagacagtgacaggaatggatagatagatgatagatagatagatagatagatagatrattgatagatagatagatagatagatagatagatagatagatagatgatagacagacagagattatgtctatcactattagacctggctctaaagtagtaaggtagatgtgtgcacatgtatgcatgcacgtggggcaaaggggaggcaggtgtatgtgtgagggagtgagaaagagacagagaatatcctaggcattccaatttgttggtggagtgtgattttatttctcaccaaacaaaggaagcaaatctaacaggctgtgcatgctacaacttccactcttgtcaggaaaatttctcagtttcagtcttga

SEQ ID NO: 153044 - DNA, 578 bp, Homo sapiens
tctataatgcttttcattatatatatacatatatayatattttttgagatggcatcttgctcttgttgcccagcctggagtgcagtggcacgatctcggctcactgcaacctctacctactgggttcaagtgactctcctgactcagcctcccgaggagctgggactacaggcacgcaccaccatgcccagctaattttgtatttttggtagagacagggtttctccatgttggtcaggctggtctcaaactcctgacctcaggtgatccgccttcctcggcctcccaaagtgttgtgattacaggtgtgagccactgcacccggcctttgttatatttttataacaaaatctagctccctcttccagaataaatgcccctggaaaagtctcagttatagcctcatacttataagtatgtgactagcatgggcaaaagcattagaatgtttcactcagagaattcactagaagacgaatcacatatactcctttttcctcctttgaacagctagtggtcaaaagttctagagtgcagcttagggccattcctggcttgatttgctcagtgaccacaag

SEQ ID NO: 153045 - DNA, 578 bp, Homo sapiens
tctataatgcttttcattatatatatacatatatatatattttttgagatggcatcttgctcttgttgcccagcctggagtgcagtggcacgatctcggctcactgcaacctctacctactgggttcaagygactctcctgactcagcctcccgaggagctgggactacaggcacgcaccaccatgcccagctaattttgtatttttggtagagacagggtttctccatgttggtcaggctggtctcaaactcctgacctcaggtgatccgccttcctcggcctcccaaagtgttgtgattacaggtgtgagccactgcacccggcctttgttatatttttataacaaaatctagctccctcttccagaataaatgcccctggaaaagtctcagttatagcctcatacttataagtatgtgactagcatgggcaaaagcattagaatgtttcactcagagaattcactagaagacgaatcacatatactcctttttcctcctttgaacagctagtggtcaaaagttctagagtgcagcttagggccattcctggcttgatttgctcagtgaccacaag

SEQ ID NO: 153046 - DNA, 578 bp, Homo sapiens
tctataatgcttttcattatatatatacatatatatatattttttgagatggcatcttgctcttgttgcccagcctggagtgcagtggcacgatctcggctcactgcaacctctacctactgggttcaagtgactctcctgactcagcctcccgaggagctgggactacaggcacgcaccaccatgcccagctaattttgtatttttggtagagacagggtttctccatgttggtcaggctggtctcaaactcctgacctcaggtgatccgccttcctcggcctcccaaagtgttgtgattacaggtgtgagccactgcacccggcctttgttatatttttataacaaaatctagctccctcttccagaataaatgcccctggaaaagtctcagwtatagcctcatacttataagtatgtgactagcatgggcaaaagcattagaatgtttcactcagagaattcactagaagacgaatcacatatactcctttttcctcctttgaacagctagtggtcaaaagttctagagtgcagcttagggccattcctggcttgatttgctcagtgaccacaag

SEQ ID NO: 153047 - DNA, 496 bp, Homo sapiens
ctatattgggaatcgtttggacatctagaatttgatggggcaaaaatgtcaagtttcctgtgggtttaagggagcataggtaggctacaacggtctttgtaaaataggaagaggctatgtagagtgtaccatcaaagctggatgggtgcggtaaatggtccgctggagagcactttgtttgaatgggtgtgtggtagtggcgaggaggcgagttgcagaggtggcccmctaacacaacctatttctcatcctccctcgctatcaacaccctggcattagtaggtgaaaaagatgatcacagttgggaaaatagagaacaaatcatgctttatgccccagtgcttgtctggtctaagctggggaggtgagaagctctaaatttaaatcaggttagacttaataatagtctaaagtttaccacaggtgaaacaaatgtctaaagatgggtaaagaaacatggctgaatgctttaaaacagatctccactgcaagcatt

SEQ ID NO: 153048 - DNA, 496 bp, Homo sapiens
ctatattgggaatcgtttggacatctagaatttgatggggcaaaaatgtcaagtttcctgtgggtttaagggagcataggtaggctacaacggtctttgtaaaataggaagaggctatgtagagtgtaccatcaaagctggatgggtgcggtaaatggtccgctggagagcactttgtttgaatgggtgtgtggtagtggcgaggaggcgagttgcagaggtggccccctaacacaacctatttctcatcctccctcgctatcaacaccctggcattagtaggtgaaaaagatgatcacagttgggaaaatagagaacaaatcatgctttatgccccagtgctygtctggtctaagctggggaggtgagaagctctaaatttaaatcaggttagacttaataatagtctaaagtttaccacaggtgaaacaaatgtctaaagatgggtaaagaaacatggctgaatgctttaaaacagatctccactgcaagcatt

SEQ ID NO: 153049 - DNA, 496 bp, Homo sapiens
ggaaaattaggcagttgctcactcagttttgccgtatattgacagttgaataacagatatgcatctgctgccataaaagtctttgtctcccaggatagaactttccttattgactggaattgcagtcttttccacaggcttcgctaagacctgagttttgtcagatgcttccctgtaagcacaatttgtctggtttagaataataatttttggaccaggtgctttccaggggctgagagaagctagggtggctggaagagactaagtgaggaaaaggatgacatcckttgggactagggacatatacagactcagatcatactgggctctgggaatcatggttagaaatttggttttgattctaaatatggtgggaaacaaatgcaatattttacagaagggacttagtgttctgattttatatcttaaaaatagccttttggttgctatgtgaagaatgggtgaagggaacatgagttgaaatgggaagttgagt

SEQ ID NO: 153050 - DNA, 348 bp, Homo sapiens
ttcattgattcctacctcacaccattcataaagcttaatttgaaatggatcataaggctaaacatgaatgcattttcttcttgtgttatagtatttttttttttcaaggaatttgtctgtttgtcaaattggcataaagttattcataataggccttcatcacccttttaagcctacagaacctggagtaatgtccctactaatctctctcttttcttgatcagtattgctatgggtttctcgattttattactcttttaaacttttgactttgttgattgttttctcgtttttctrttttctatttcattgatttctgttatctatcatttaattccttctatttac

SEQ ID NO: 153051 - DNA, 413 bp, Homo sapiens
tgggactttaatatacagtgagaggaatataaatcagcatgactttttgctggtgttatgtaataaaatgtaaaacgtacataccatttcatgcagaaaatttatatccaagaatctatcccaatgaggtagttacataaatatgcaagtatacacaagatgttcatcacaattagaaacaaccaaaatgtccaccaacatgagactagttcaaaaagatacgaggtattcatacaagagactttatgcatccactgaaaagaatcatgtaattcatattggttgactcaaatagaagctccatcacatattttcaagacaaaaggaattacaaagcagtatggttgayataatcccatttatgtgcaaatcaaataaattccagatttcactgtggttcaattcagcccagt

SEQ ID NO: 153052 - DNA, 436 bp, Homo sapiens
tcccttcaggtctcccttctatgctgctgccataataccttcctaacatacacattgaaccacatacctcacttgctcaaaacttcagagtttttccaacaagatcctaaaggagagtctgaagaaatgaagtggaggacaccctaagacacacagctttgcctcaagtatattgtacccaccattcccactgttatatgaaaaagctggagacaargcccacttcctagacatgcagcctgtactgtcacccagggcctcttgcttggaagagcccatgcttggtttaacgcccttctgtctccgtcttgaaattcatgataattttgaacaaggagtcctgcatatttattttatcctgggctctgcaaattatgtagcctggccaggaatatctacaggcctaaaaaaacacaagctgaatgctattctgaaa

SEQ ID NO: 153053 - DNA, 628 bp, Homo sapiens
tccaattttactatttgtgcttcttggaaattgcaactccacaacccattctttttctcattagacaaataatgcaaagagcttaactatcacaccagcatgctacgagrggctccctggtgtgcttcaatattggaccaaacacagacagatgtattcctggtgcctgtgtaacattacaactcattgatcacatgcagcaacatcaacatctcaaggagtccatttgttcaaaacacagtaaatgactccacattttccctttgagtcaacaaaagactctgcttgtcaccttgcctggagcggggtggtttttcactatgtgagtatctatctttttatttctgtcccttatgttggtgggcacatgtctgtattgctgtccctgttacaactcatcccagtgaatgttagctgtgatgccagtagttaccatctcttgactatttacccaacagataacaatgcttacaatgccttaaaaatattaccatttggcttaaacagtgatgaaagaaatatatttttctcttcattttatatgaggaaactagacaacaagagggtcagtaacttcctgaaagtcacacagatagtaagaggcagaactgggctatgcacttgggcc

SEQ ID NO: 153054 - DNA, 510 bp, Homo sapiens
tacgttatattgaacacacccatatgaagcatgctgaatattaatgcaatgctgtagattattattttttgcagatggacatttgcacagttggctcaactgaattaaattcaataggttttctgcttctgttatagccagacctatgctagacactgagaatacagacataaataatttattttctgcctatgactagctacaaaaacagtagagaaaaagacttgcgaataaaaattataacaaaatgtaattgtaaaaataagtrcacactttaattgcagaggaagtacagaggagggagtgattaatttttttttccaggggagctaggaaagttcccaaggcagaaatataagtgcaacatatttcaagctgagttttaaaaaacgtacttggatgatttagggaatggtgagcttattgtggttacggtatgggatgcaggcaggcagtatcactaaggtggggaaacagacggggaagaggaaggaagagagagatttggct

SEQ ID NO: 153055 - DNA, 605 bp, Homo sapiens
ctaatcttgatctcattagggataaagaggaaamgcgacttcatacctctttacagacaacttggcaggaatgtgttagaatgtgggctccctgaaagcggaagaaggcctatttactgttgtatcctgtgtgtacagcaggaacctggtaaacagtggggctcaataaatatctcctaacagagggaatgaccaaaacatggacctcacacccaaagaaaatcatccttatttcaacaacatagatttggctggttatgagggtcttgaagtattcacaaatatttcagaaagtctaagggaaatcatgtatttaccttaagataagatggcacagggcaactaaaagtcaagtttgcttgacttctgcaaacatatcaagtcattgtaacaaggctgattgtttcaggaacatcagaagtttggatattatacaatgacatggggagggaaaggctcccttactcctctaagcccctcttgcggggttgggggggggatacattaatctaactgggacagatttactaattttagaaggtcaaactcacatagggctgtggctctctcaggctgtgttagatggggtatcactatgttgccca

SEQ ID NO: 153056 - DNA, 464 bp, Homo sapiens
tgatacactattgtacattcttttaaaattgctgtatatgctttgaaatcagcttattgtttctcttaggccacttcaatagacttcatagacatccattccctggccccacattgctggaaaggctgcctctgaatgggaaaaaaaaaaaaaaaaaaaaaaaaaaaagacctggccttggctttcaaaccattaaatgaaggctaatgtcaaaaaagaggtttcacccaagctgggctttgagggatgaraaggatctgttcaggcagggagagcagcattgtctaggcaagtgcaggccactgaagaccaccctcattaaatcagaggacacttagtgggaataaaatcaaattaactcatcaggaatcaagaaaagatctcatgatgtgggcacatgacacactacatgcatgacatgggctcagaagtcaaaaagtatcttgtgatgccaagcaagtggg

SEQ ID NO: 153057 - DNA, 536 bp, Homo sapiens
tttaagatgtcttttgagcagagtttatgaagttgccactcacagagcacgtggaaggcacatcatctccatagtcctgatcacatggtgtataattttgtccttctgcttagaaggcttgggtatatatgtgttcatggagataacagcraatggtcttccaggaatttagaaagcattgcaaagaggatgggagggtttatattaggtcctgtgtgaatttccaataagactgccagtgatagaacaaattaaggtcctaattaccgtcaataatgtgcatctacaagaccccatttcatttggccaactttttcactcttaaatttacttggccttatgtttagatccaacttggatcttacatttacttgtagatgcatccccaaatcctctctacctgctgtggttttggaaaggagacatttcaaaaacctcaaaattggacctaagtattctgggcacaaatttaaatttaataaatatataacctatcaaacctatgtgtattgacattctgtatgtggctcattgtg

SEQ ID NO: 153058 - DNA, 536 bp, Homo sapiens
tttaagatgtcttttgagcagagtttatgaagttgccactcacagagcacgtggaaggcacatcatctccatagtcctgatcacatggtgtataattttgtccttctgcttagaaggcttgggtatatatgtgttcatggagataacagcaaatggtcttccaggaatttagaaagcattgcaaagaggatgggagggtttrtattaggtcctgtgtgaatttccaataagactgccagtgatagaacaaattaaggtcctaattaccgtcaataatgtgcatctacaagaccccatttcatttggccaactttttcactcttaaatttacttggccttatgtttagatccaacttggatcttacatttacttgtagatgcatccccaaatcctctctacctgctgtggttttggaaaggagacatttcaaaaacctcaaaattggacctaagtattctgggcacaaatttaaatttaataaatatataacctatcaaacctatgtgtattgacattctgtatgtggctcattgtg

SEQ ID NO: 153059 - DNA, 536 bp, Homo sapiens
tttaagatgtcttttgagcagagtttatgaagttgccactcacagagcacgtggaaggcacatcatctccatagtcctgatcacatggtgtataattttgtccttctgcttagaaggcttgggtatatatgtgttcatggagataacagcaaatggtcttccaggaatttagaaagcattgcaaagaggatgggagggtttatattaggtcctgtgtgaatttccaataagactgccagtgatagaacaaattaaggtcctaattaccgtcaataatgtgcatctacaagaccccatttcatttggccaactttttcactcttaaatttacttggccttaygtttagatccaacttggatcttacatttacttgtagatgcatccccaaatcctctctacctgctgtggttttggaaaggagacatttcaaaaacctcaaaattggacctaagtattctgggcacaaatttaaatttaataaatatataacctatcaaacctatgtgtattgacattctgtatgtggctcattgtg

SEQ ID NO: 153060 - DNA, 460 bp, Homo sapiens
gcccacctcagcctcccaaagtgctgggataacaggcatgagctaccaagcccggcctcaagtcctagcattttaaaaatagaggtaacactttcctcaatgagtttgttttgtgatgagtaaataaggtctggtatgtcaatagtctgctaaaatgcttgacatatagaagtcacttctctgagtaacctatgaagtccttctcagttttaagaatgccaaaatctgagaaaggtacagggagtgtatgatattttttactaggtgtatttttacatgytgattctcttttattatacatgctatggtcctgccatgtattccattggcttgaaataccctacattcaaagccatggccagaggttctgaaatgattgtgaagatcactcagggcacatttggtgttttcaatatggaattatgaatgagctcagttaagatgcttcattttgctttgt

SEQ ID NO: 153061 - DNA, 620 bp, Homo sapiens
attcaaccaggctgacattctcttaaataactggcattcagtgactaagagctaggcttttctaagggaaaagctttcaagtagagcaaaaatattaaggttaactaaccaatggggggacagtttgagatattttgtattacagatcattttagccatgatgggttcactcaccctttaaagaatactttctgatctccacgctcatttgaacagggtccagttggcatcagaagtagggcaccttgcacaaatcatcccatgacttgtaagtgggggtgggggattctggaaacttggtttttgagggtaccagtgacacatatccaaggccatgctttgcaagaaagccgggcacacagcctgccctcctccagctccattgcaagcctggaagcaagtctgcacacgcttttgtgaatttgaacctacgtcaagttgagccaactcaatcagtggggaaatacaaatgcccacttcattttcattcagctgatcagaagcttgcagtgaagagctgcctargacagcttgccagaaaagctccaagaagtagggcttccttaaagaaagcacatcctgccgttagccttgtggcatttcagagggcccgcgaattc

SEQ ID NO: 153062 - DNA, 512 bp, Homo sapiens
tatgacatggaatcactgaagactgggatattatggaaaggttcatggagcaagtggtttttaaatatctttgagcagaatctgaggaccattattttttaatgacagaacttccactgaatacactagaaaatacagaatatttttgcagaaattatgtttgaattatttaatgtaccaggattctacattgcagttcaggaggtactagccttggaagtatcttgracatctcaacaagtgggtgaatatatgttaatgagtatagtcattgacaaaggagatggagtcacccttattctcccagttgtagaaggttatgtaattgggagctgcatcaatcacatcctgattgtaggtgatactgtgtatttcattcaacaactgctaagggagagggaggtaggaatccctcttgagcagtcactggagaccacaaaagccattaaggagaaatactgttacatttgccctgatatagtcaaggaatttgctaagtatgatgtggatcc

SEQ ID NO: 153063 - DNA, 512 bp, Homo sapiens
tatgacatggaatcactgaagactgggatattatggaaaggttcatggagcaagtggtttttaaatatctttgagcagaatctgaggaccattattttttaatgacagaacttccactgaatacactagaaaatacagaatatttttgcagaaattatgtttgaattatttaatgtaccaggattctacattgcagttcaggaggtactagccttggaagtatcttgaacatctcaacaagtgggtgaatatatgttaatgagtatagtcattgacaaaggagatggagtcacccttattctcccagttgtagaaggttatgtaattgggagctgcatcaatcacatcctgattgtaggtgatactgtgtatttcattcaacaactgctaagggagagggaggtaggaatccctcttgagcagtcactggagaccacaaaagycattaaggagaaatactgttacatttgccctgatatagtcaaggaatttgctaagtatgatgtggatcc

SEQ ID NO: 153064 - DNA, 391 bp, Homo sapiens
gtctgctgcctgtttttgtgtrgctcatgagttataagtacgtgtatcatttataagtctaaaatgtaaaatatagggaaatttttcagcagggaaagttccataaatttgcctcttggcaacacaaagcctgcattatttactgtctggctctttgtcaaaaatgttgctgactcctgatctagatgaaaccctgtggggagagactgttgatagaaaagagagaagcatcatagtggaaattaaaattatgtcaactgaagtgtatagggtagagaatttaagcctgagtataacagtaagagattaaaataacaataaattcattatcagcatgatcaataaaacctttgggggcaaaaaggaactatcttcatcagactttcactca

SEQ ID NO: 153065 - DNA, 401 bp, Homo sapiens
ctgctgcctgtttttgtgtagctcatgagttataagtacgtgtatcatttataagtctaaaatgtaaaatatagggaaatttttcagcagggaaagttccataaatttgcctcttgrcaacacaaagcctgcattatttactgtctggctctttgtcaaaaatgttgctgactcctgatctagatgaaaccctgtggggagagactgttgatagaaaagagagaagcatcatagtggaaattaaaattatgtcaactgaagtgtatagggtagagaatttaagcctgagtataacagtaagagattaaaataacaataaattcattatcagcatgatcaataaaacctttgggggcaaaaaggaactatcttcatcagactttcactcactcatacaaaca

SEQ ID NO: 153066 - DNA, 424 bp, Homo sapiens
ttttgtgtagctcatgagttataagtacgtgtatcatttataagtctaaaatgtaaaatatagggaaatttttcagcagggaaagttccataaatttgcctcttggcaacacaaagcctgcaytatttactgtctggctctttgtcaaaaatgttgctgactcctgatctagatgaaaccctgtggggagagactgttgatagaaaagagagaagcatcatagtggaaattaaaattatgtcaactgaagtgtatagggtagagaatttaagcctgagtataacagtaagagattaaaataacaataaattcattatcagcatgatcaataaaacctttgggggcaaaaaggaactatcttcatcagactttcactcactcatacaaacatcttaggcaggaaataaaacttgtttgaagatct

SEQ ID NO: 153067 - DNA, 424 bp, Homo sapiens
ttttgtgtagctcatgagttataagtacgtgtatcatttataagtctaaaatgtaaaatatagggaaatttttcagcagggaaagttccataaatttgcctcttggcaacacaaagcctgcattatttactgtctggctctttgtcaaaaatgttgctgactcctgatctagatgaaaccctgtggggagagastgttgatagaaaagagagaagcatcatagtggaaattaaaattatgtcaactgaagtgtatagggtagagaatttaagcctgagtataacagtaagagattaaaataacaataaattcattatcagcatgatcaataaaacctttgggggcaaaaaggaactatcttcatcagactttcactcactcatacaaacatcttaggcaggaaataaaacttgtttgaagatct

SEQ ID NO: 153068 - DNA, 391 bp, Homo sapiens
gtctgctgcctgtttttgtgtagctcatgagttataagtacgtgtatcatttataagtctaaaatgtaaaatatagggaaatttttcagcagggaaagttccataaatttgcctcttggcaacacaaagcctgcattatttactgtctggctctttgtcaaaaatgttgctgactcctgatctagatgaaaccctgtggggagagactgttgatagaaaagagagaagcatcakagtggaaattaaaattatgtcaactgaagtgtatagggtagagaatttaagcctgagtataacagtaagagattaaaataacaataaattcattatcagcatgatcaataaaacctttgggggcaaaaaggaactatcttcatcagactttcactca

SEQ ID NO: 153069 - DNA, 402 bp, Homo sapiens
acgtgtatcatttataagtctaaaatgtaaaatatagggaaatttttcagcagggaaagttccataaatttgcctcttggcaacacaaagcctgcattatttactgtctggctctttgtcaaaaatgttgctgactcctgatctagatgaaaccctgtggggagagactgttgatagaaaagagagaagcatcatagtggaaattaaaattatgtcaactgaagtgtatagggtagagaatttaagcctgagtataacagtaagagattaaaataacaataaattcattatcagcatgatcaataaaacctttgggggcaaaaaggaactatcttcatcagactttcactcactcatacaaacatcttaggcaggaaatawaacttgtttgaagatctgaga

SEQ ID NO: 153070 - DNA, 523 bp, Homo sapiens
gaattccacaacagtgtacacaattgcctgcttgacatctccctttggatgtgcaataagcttctcaagctcaaatgcaattctgamgttccaacgaccctttaaatctcctctcttctctatttcctatctttgtaaatggtaattccattctttcattcattcaagtcaaacatcttagaatcatggtggtagttttcctttgagtactttgttgttttttattaattacactcattttcaatagactctgtaggggtctctgtgatctcatgacataattttctatctgttttctccacttccattaatgcccaactgcaaatcttttatcaacaaagtcattttttaaaaatatgttcaatcatgccacttccctgcttctcactatatctgggccatgcctctccagcctatctgtgaccttctctatgctcaagtcacaacagcttcttctatcattctctagacacagagacttgacacagatttccagagcaacaataactgctcttccctgcac

SEQ ID NO: 153071 - DNA, 531 bp, Homo sapiens
tgtacacaattgcctgcttgacatctccctttggatgtgcaataagcttctcaagctcaaatgcaattctgacgttccaacgaccctttaaatctcctctyttctctatttcctatctttgtaaatggtaattccattctttcattcattcaagtcaaacatcttagaatcatggtggtagttttcctttgagtactttgttgttttttattaattacactcattttcaatagactctgtaggggtctctgtgatctcatgacataattttctatctgttttctccacttccattaatgcccaactgcaaatcttttatcaacaaagtcattttttaaaaatatgttcaatcatgccacttccctgcttctcactatatctgggccatgcctctccagcctatctgtgaccttctctatgctcaagtcacaacagcttcttctatcattctctagacacagagacttgacacagatttccagagcaacaataactgctcttccctgcaccaccacttgattctaggaattc

SEQ ID NO: 153072 - DNA, 523 bp, Homo sapiens
gaattccacaacagtgtacacaattgcctgcttgacatctccctttggatgtgcaataagcttctcaagctcaaatgcaattctgacgttccaacgaccctttaaatctcctctcttctctatttcctatctttgtaaatggtaattccattctttcattcattcaagtcaaacatcttagaatcatggtggtagttttcctttgagtactttgttgttttttattaattacactcattttcaatagactctgtaggggtctctgtgatctcatgacataattttctatctgttttctccacttccattaatgcccaactgcaaatcttttatcaacaaagtcattttttaaaaatatgttcaatcatgccacttccctgcttctcactatatctgggccatgcctctccagcctatctgtgaccttctctatgctcaagtmacaacagcttcttctatcattctctagacacagagacttgacacagatttccagagcaacaataactgctcttccctgcac

SEQ ID NO: 153073 - DNA, 523 bp, Homo sapiens
gaattccacaacagtgtacacaattgcctgcttgacatctccctttggatgtgcaataagcttctcaagctcaaatgcaattctgacgttccaacgaccctttaaatctcctctcttctctatttcctatctttgtaaatggtaattccattctttcattcattcaagtcaaacatcttagaatcatggtggtagttttcctttgagtactttgttgttttttattaattacactcattttcaatagactctgtaggggtctctgtgatctcatgacataattttctatctgttttctccacttccattaatgcccaactgcaaatcttttatcaacaaagtcattttttaaaaatatgttcaatcatgccacttccctgcttctcactatatctgggccatgcctctccagcctatctgtgaccttctctatgctcaagtcacaacagctwcttctatcattctctagacacagagacttgacacagatttccagagcaacaataactgctcttccctgcac

SEQ ID NO: 153074 - DNA, 531 bp, Homo sapiens
tgtacacaattgcctgcttgacatctccctttggatgtgcaataagcttctcaagctcaaatgcaattctgacgttccaacgaccctttaaatctcctctcttctctatttcctatctttgtaaatggtaattccattctttcattcattcaagtcaaacatcttagaatcatggtggtagttttcctttgagtactttgttgttttttattaattacactcattttcaatagactctgtaggggtctctgtgatctcatgacataattttctatctgttttctccacttccattaatgcccaactgcaaatcttttatcaacaaagtcattttttaaaaatatgttcaatcatgccacttccctgcttctcactatatctgggccatgcctctccagcctatctgtgaccttctctatgctcaagtcacaacagcttcttctatcattctctrgacacagagacttgacacagatttccagagcaacaataactgctcttccctgcaccaccacttgattctaggaattc

SEQ ID NO: 153075 - DNA, 586 bp, Homo sapiens
tctggccaggaccagagattcaaatgtaggaatcttgatgtgaagtagtgctgtaagagacaataaggtgattggctaagcttgtctgcttagggtgttgaagagggcaccctcttcaacaagtggtgctgggaaaactggatagctgtatgcagaataataaatgtagatctctatctctcatcagatacaraaattgacttaaaatagatttaggacttaaatgtaagaccaaacttataaaactactcaaagaaaacattggggaaatgctttaggacattggtctgggcaaaaatttgattgggtaaaactccaaatgcacaggcaaccaatataaaaatagacaaacagtattatatcaaggaaaaaaccttctgtacagcaaaggaaaaaatcaaaagtaaaaaggtaacctgttgaaagagagaaaatatttgcagactatccattcaaaagatgattaataatcagaatagataagaaactcaaacaactcaacagcaaaaaaactaataatcccattaaaaagtgagcaaagaatctaaatagacattcctcaaaagaagacatataaatggcaaac

SEQ ID NO: 153076 - DNA, 420 bp, Homo sapiens
tttaagtcaatctattattaagatgcatcgtatagtttgtagttatatctcattcattttaaattctggtaatctttcagcttgccaatttataacagtttacttgtattttttaagataagttttagagttgtttccagatttttgttcttgaamaccatgaagatacatataaagatgtttcagtctacatgtgtggtagacaaaattttggcttttgtaatttgctccttggcgatactttcataaatatattacatggctaaagggctttgcagttgtaattaaggttaccaatcaaatgaccttaaattagaaagattatgctatgtggatgggctatgtggactatgtggatgggtttaacataatcagaagcaccatcagaagcagggatttttctcattctgatagcagaag

SEQ ID NO: 153077 - DNA, 598 bp, Homo sapiens
aacaaaacaaacaaacaaacaaaaaaaacactytcataagaaccaatattcaggtgagcactcatagtacctggtttcaacttcacatccttgaaagaggtactaaagagatagaaaaaacagtctagaatctccaatgcactcccagcaacagtgatgtggtgttgaaagcatctctgggccctgggggaaggagaacacagcagttgggaggcactgaactcagtactggcctgtgagagcagaaaggaaagctggagcaaactcagctgatgcctgcccacagatggagcatttaagccagtcatagcagaggggaatcactgatccagtggtccaaacttgagggtctgcaaacctcaccacagagggctaaagttctctgtgtttctgagtaaacttgaaagattgtccaggtcagaatgactgcaactcttaggtgagtcctagtgctgaactaggtcaagagacagtggacttgtgggacatatgacatactgaaacaccagctggggcagctaagggagtgctggcaacatccctcctctaaccccaggtggtccaaatgagaccccttccttctgctttggaagatgag

SEQ ID NO: 153078 - DNA, 598 bp, Homo sapiens
aacaaaacaaacaaacaaacaaaaaaaacactttcataagaaccaatattcaggtgagcactcatagtacctggtttcaacttcacatccytgaaagaggtactaaagagatagaaaaaacagtctagaatctccaatgcactcccagcaacagtgatgtggtgttgaaagcatctctgggccctgggggaaggagaacacagcagttgggaggcactgaactcagtactggcctgtgagagcagaaaggaaagctggagcaaactcagctgatgcctgcccacagatggagcatttaagccagtcatagcagaggggaatcactgatccagtggtccaaacttgagggtctgcaaacctcaccacagagggctaaagttctctgtgtttctgagtaaacttgaaagattgtccaggtcagaatgactgcaactcttaggtgagtcctagtgctgaactaggtcaagagacagtggacttgtgggacatatgacatactgaaacaccagctggggcagctaagggagtgctggcaacatccctcctctaaccccaggtggtccaaatgagaccccttccttctgctttggaagatgag

SEQ ID NO: 153079 - DNA, 664 bp, Homo sapiens
tttcacttatttgtgggatctaaaaattaacacaattgaattcatgaacatagagagcagaaggatgtgaccagaggctgggaagaatagtggtaggatggaggggaggtggggatgattaatgggtcaaaaaaatagaagaatgaataagacctactatttgatagcacaacagggtgactatagtcaataataacttgattgtatattttaaaataaagagtgtgactggattgttgataactgaargaataaatgcttgaagggatacatagcccattttccatgatgtgcttattgcgcattacatgcctatatcaaagtatctcatgtaccctgtaagtatacacacctaatatgcacccacaaaaattaaaaattaaaattaaaaaaagcaatatgactaggggaaaagatatactgttatccacaggatggctcatcttgtttaccagatttttgatactttgcaccaaagtggactttctcctagtgggaatttaggtaggatataaatatcttcacactctatccattctaaaatgtatgtctgtattcctatttccaagaaatccttggagaatattcttctctttttttccaatataatcagaaacttagatagcagccaattcattagctgcccctaatcaatcactgtaga

SEQ ID NO: 153080 - DNA, 664 bp, Homo sapiens
tttcacttatttgtgggatctaaaaattaacacaattgaattcatgaacatagagagcagaaggatgtgaccagaggctgggaagaatagtggtaggatggaggggaggtggggatgattaatgggtcaaaaaaatagaagaatgaataagacctactatttgatagcacaacagggtgactatagtcaataataacttgattgtatattttaaaataaagagtgtgactggattgttgataactgaaagaataaatgcttgaagggatacatagcccattttccatgatgtgcttattgcgcattrcatgcctatatcaaagtatctcatgtaccctgtaagtatacacacctaatatgcacccacaaaaattaaaaattaaaattaaaaaaagcaatatgactaggggaaaagatatactgttatccacaggatggctcatcttgtttaccagatttttgatactttgcaccaaagtggactttctcctagtgggaatttaggtaggatataaatatcttcacactctatccattctaaaatgtatgtctgtattcctatttccaagaaatccttggagaatattcttctctttttttccaatataatcagaaacttagatagcagccaattcattagctgcccctaatcaatcactgtaga

SEQ ID NO: 153081 - DNA, 483 bp, Homo sapiens
agactgtttttggtggggacagaagggttgaaatttttattaacaataattcatagactgtatggagatttactataagtcataccagacctgctatggctcctttgaggcaacaacaatggcaatagcagtctctaattcacctttatatcattcagtactttgttcatgaatagtttggaatgattctaagcttgactaaatccctgaaagtctgtggttctaaactacttggcacatttacattttacatcacaggctgtccttttttccttttttttttttttttttgktagtttttgagaactgagaatcctataatgtttattattataatgaccaagttacagaatacagatgaagaaacttagctccatctcatacctttactaaacgcagatttccctttcagctaagaatgtggacttccaagacagttggcttaggtgcaaatcactcctccacattagtggccattaatat

SEQ ID NO: 153082 - DNA, 565 bp, Homo sapiens
agaatctcaaacacaaaatagtacgtcctatataatttcatggtaaatgtcaaaatcaattgaaatgaatcgagttgatagaagtcataatagcgactacctttaaggtatatgatgactgaggaagaggcacaggagaggcttttgtggtatagattattttctatgccatgctcttggcactgttacctggtgtgctcgcgttattaaaaaaattaccaatttgtaaacttaatatttataacattattagaaatattttgtacttmgacagacagcttatctatgatcacttctattaaatggataaaactacttcttagactagacgattgatgcaacattcaacttgctaattagtgtccacatatctggttatactaactaaaattgttactgtattttaaagtcattacagttcataaatcagataatttggacatcttgccatcttaattttgtctcttgggttataatattgcaagatttatacttcaagttactcaattccctttcaattttttgtaaagaaatcaagttttaatggaggtttaattaacgtgct

SEQ ID NO: 153083 - DNA, 594 bp, Homo sapiens
tatgatcacttctattaaatggataaaactacttcttagactagacgattgatgcaacattcaacttgctaattagtgtccacatatctggttatactaactaaaattgttactgtattttaaagtcattacagttcataaatcagataatttggacatcttrccatcttaattttgtctcttgggttataatattgcaagatttatacttcaagttactcaattccctttcaattttttgtaaagaaatcaagttttaatggaggtttaattaacgtgctcttgatttagatatttatgagttatttggatttgtaatataaagaaaagttctattaattaccaaaccattcttttgcacttacttatataagtttatattttaaactgatatgccttttcatacctttaataacaataatacatttattggttatttacgatgggccatgcaccataagttaaatattttatccagttaactcatttaaaacccatgggattctatgaggtggcattattattttgctttatatacaataaggaaactatgatgtaaagaaaaaccatgcccaagattataacatttgccag

SEQ ID NO: 153084 - DNA, 597 bp, Homo sapiens
catattgttttacatatcagcagtttataattgagttcatcagcagaaatttgatacatgccacaaaagtaaactttattaagaatggcgaatattacattaaaaagttttacatggaattaataaatacttggtaattctaaatcagggaatgcaccaaatttaaataattgtgtgattctgaataaatattaaatttgtatctatcaaaacagtgccttttattgcagtaatttaagtaattggaattgcctcgagagtattttaatcaacctctggtatacattattgccatgtcrgaaagatgtgtttaaagtagctacaaacaaagtttatactcatggtctggctgcctagcactagtgtagtcaaataagggtaaacaaaatgtacgtgtgttcctgggaagagacctctttaaatgcttctctaatgaaagaggttctaactataaggcttgagaagaaatgagctgcatatctaaaagtcatttacttttgccttttgtatacctcattcaaatgatctcttgttttatagacataatcatagatagtttgtcaattggtatatcctcactgcagtctagttaccaac

SEQ ID NO: 153085 - DNA, 545 bp, Homo sapiens
tctccgggccacaaagcttcagccatgctcattttatttcagtacattctttccatctatgtacaggacatatttttacccaatttggggttttagaagacaaatcttttccataaaatatttttctatccaaccaccacaatttagatctcagcaaaaatgtttcctcatgarggaagcatcacagggtgtgtataaagtcccctctcaggattttctatatatcattagtctattttattatttttctaataatatgcctgacagtagtgctcaatatacatttgttcagtcaagaaacagcacttagagctatctgatattttcctaatgcttatttctttactcagtttttgtctgtccttctcttcaaccccctgaaattataagccacataaaagcaaggtctgttttagatttttcactcataaatctagcacctagaacagctcttgtacatagaacattaccaacacacatctgttggatgaaatattaaaacataaaagaatgcaagttcattttacaataattttgttaaattt

SEQ ID NO: 153086 - DNA, 541 bp, Homo sapiens
ggacgacaatatgtgcagtaggtatatcaggagaggggcaaaacaggatattggagttatcctgaggctcagccatgtgtggagtcataactatggtgaggacattttaatttatccaaatgttattttttttctgatttgttgcttgtgttattacttgggttacagttcagagtgtaggtttaatttgagagggtcaaaacttgaaaaagttttggagacaatataaaaaatatacytgagaaatagtgattgtgtaaacaggagaggtggcagcagggacagaatagtgcaaattcaggatctagttaaggcttaatatcaatagaattttgtaataggaagtggttaggtcatgagggctccacccttatgaatgaaattcagatggacgtaataaaggagagggaagattcaaggataacacctgaatttatataggataggcaagtttgaaattttcttagccaggcaatatgcagttgattcttaaacaatacaaaggttaggggtgcaaacctccccttacagttgaaaattc

SEQ ID NO: 153087 - DNA, 520 bp, Homo sapiens
actcaaacagtagtttagaaaactctgcatgtgcttaaataatagtttacaagtgtttgatttaaatcagtracagaatccaaacgaagccttcatttgaaactgagaggtgagatctgaggcctaaaatatttatttataaaatacatcttaaaaatcatctgatgaaaggagctgaagaacatcgtgaactaagcctacagttggatatatgacatcacagaaacatagtaggaacttataaaaagtaacttagtcatgtggtaggtgtagttttaaaggatccctattaattctactagataataatgggaaacatctatttatttcagctacaaatctatataatcaggaaacagttgtggctacattttgttttagcctggcagagcacctctaccaagtatcccacaccataggaatatttttcctgtcatttactgagggattaaattgctaatcagctcaaatatgatctccattcaccacccaaaatgttactaaaatcattattgtaagc

SEQ ID NO: 153088 - DNA, 476 bp, Homo sapiens
ggatcctgaacacacttaaggcactgggaccacagaaacaactcattaacatgtatcctaccagttatttgcagatgtggatttttttttttgctgaggtctatctcacttcactagatattaccatctccaaacctttttaaatgaacagccataattatgttaggctctgttgtaagaaaatggtagtatgaggaaaaagtaaaaaacagaaacaatgaaatttattttattattatttacatatataataaatgtgctctaatatacagattttcaaatacagaccaaaatagcttttcatctccttataacttggttaagaatttttgcaaaacaatggaaaaaatacccacgatatgcaaacacttyttttgcacagtcataactgtacagcgaaatgatgaattttaaactacaggtctccaactaagctcagcctattcttgcatgatagaagagtaacaagtttatga

SEQ ID NO: 153089 - DNA, 556 bp, Homo sapiens
tcagggagcaaagcattgctgttttgaaggaagaaaaaaaatttggttgcagagccagggaccaagtcttcagaacttcacattcactttccagcctttcagaaaatagtctagaaatcatgccttgtgtagttgaaagtgaacgctcctttgaaagaaatacaagctgtgcactgtcatctagtgcccatccagatcttacctgcatgaggtgaggctcatgatattgcccaagcaactgcaaatgtcgccctaaaataaccaacacatcagctggtgcttcttcttctttcagataatggcctcttctaacttgagttgcattcccagaaaaatcacaratcagtccaacaatcccccttgtaactgtagacaaccatctgagatttcctggggaaatatacaaattattacccatataaattgttgccaattgttaccaatatcctcaacttcaactaagttctaaaaaccacataggtttttaagaataattctataataatttgtgttgctattttccacaatttacaatttcaaacctttatgtctccca

SEQ ID NO: 153090 - DNA, 599 bp, Homo sapiens
ttgcacttaaatatttatttggctatatattatatatgtataatatatgaatatatttattcaattatctgtgactggctaggtcagtctacatagcccattacttctattaatataaccttgctgtaggtcatcattaacattgctctttctcctgaccacgggctttactcttaacccagattttcccattagttgcaaaaataatataatacagtgtctctatcctcaactatattctgattcatgtgaagattcattccctccaccctccagccaacttggtagtagtgttatgttcatatgccaatatctcattttttttactaataaaactatcgattctgtttacaaagctttgctccaaagacttcagcacaggatgtgaaattttgttatcatctgccagtcaatttacatcattagtaattaatrtactatggtctttagccaaaatcaaactgatggacaaacataaaaaatttagcttctttaacatagctagaaaatgatggaattagtggattcagctgatattgctattctaacagcatttgaactttacaacctgtaaccattcctttttcatagattaggaa

SEQ ID NO: 153091 - DNA, 420 bp, Homo sapiens
aatctacaatatttactctaaacatttagagaaagattgtcaactactgccttaatgtattcctagcatgtttcttcctttacttttttgtttctttcttcctcactccctcsctgcctaccttcttgcctccttccctcactcgcctccttccttcctccatttctcttttttttctctcattcctctgttccattcttctttttttccttcctttcctcctccttccctccctcccttcctttcttcctcccttctttcccccttctggaaaaatgtattgtctactatgtaagccaagctctaagctaaactctgagaatatcacagtaagatccaatggctataacatagtggtggacgtagacaagtaaaagacaactaaaatacggcaagtgctatgaaaagacaattaataga

SEQ ID NO: 153092 - DNA, 415 bp, Homo sapiens
tacaatatttactctaaacatttagagaaagattgtcaactactgccttaatgtattcctagcatgtttcttcctttacttttttgtttctttcttcctcactccctcgctgcctaccttcttgcctccttccctcactcgcctccttccttcctccatttctcttttttttctctcattcctctgttccattcttctttttttccttcctttcctcctccttccctccctcccttcctttcttcctcccttctttcccccttctggaaaaatgtattgtctactatgtaagccaagctctaagctaaactctgagaatatcacagtaagatccaatggctataacatagtggtggacgtagacaagtaaaagacaactaaaatayggcaagtgctatgaaaagacaattaatag

SEQ ID NO: 153093 - DNA, 420 bp, Homo sapiens
aatctacaatatttactctaaacatttagagaaagattgtcaactactgccttaatgtattcctagcatgtttcttcctttacttttttgtttctttcttcctcactccctcgctgcctaccttcttgcctccttccctcactcgcctccttccttcctccatttctcttttttttctctcattcctctgttccattcttctttttttccttcctttcctcctccttccctccctcccttcctttcttcctcccttctttcccccttctggaaaaatgtattgtctactatgtaagccaagctctaagctaaactctgagaatatcacagtaagatccaatggctataacatagtggtggacgtagacaagtaaaagacaactaaaatacggcaartgctatgaaaagacaattaataga

SEQ ID NO: 153094 - DNA, 576 bp, Homo sapiens
ctgagtttcctccagtggagtgtgagttgaaatcatgtgtaacttttctagcccaaggctggtaattagatttgatgctatatatctttcttgttgtgctatctggttcagattataacttctcagaagatgaacaatcctcaaaaaaatgaaagaaagatctgagtccctgaagcagctggtagatgaaatcctcacatactaggaaaatccctcctttgacttttatgttattgagaaataaacttttatatgatttcagtcattatctgtttttagtttatttgttacaaacattagtgttatacctactaatataaaaattgaattttgaacttagttattgccataacacaaatataatgtttgtggcattggtttagtggtccagtggaagacaatgagaaaacagatatagctgattgggacactgaatatctcttttattttttagmaaaacatttggaacataaattggaattgcttcaaagacaaagtgcctcaaagcttcaggaaaaaagccaaaatgttagcatatattgattgttatttcctgtgtatagcaagattttgaag

SEQ ID NO: 153095 - DNA, 526 bp, Homo sapiens
tctcttacttattttcttttcacttttaggagtaacatgatgtgatttcatttgttaatgaatctcattcttactaatacatggagagtggattggaggccagagtggaagtagagaccagttgaaaaggtattgcaataataaagattagacaggatgaccatttggaataaggggaaacagaaggaagtaaattcattgatttgatatatattaagggagtgtatgctacagtgtaaggcctataggcaaactgaaaatgggaaaaatagaaagggtgaagggattattgccaagattcacagaaactactggatgattgatggtcccattttctgagaaggaaagatagggcggtgcaaagtattgaggaagaaaattcagagttcagttttagtttccatgggtcatgtgaagctgggaacaggtttagatgactgggactgtaaactagtctctgttgaaatatattcattctgaatataaataatggttgrgatttagtatattttgtgaggtgggaaga

SEQ ID NO: 153096 - DNA, 498 bp, Homo sapiens
taagcactattctatgcttaatgatattttatgatacatggtaaattcacttctgaatatgttctatccccaggttgggtgaaaaaaacatctcttaactttatttgcttatttatttatttatatacatatagactcaacctgctcttctgtctttatattcctagggacatgatttaaccctttgtaacaatatataatagtgcttcctctaaatttaattttccatctctattgacagtctgtactttgaggcaatgcaggagagcttgtctattactttgaatggtggttgccttagtattacattgcatgctattctgtcattcaaakaagacattgtgtaaatatcttagaatcagtaaggatttggagccctcaccaaaaccagaatagtaaggtaaatttcagaaatgaactagggaattgtccaaacttggaaggaaatgaaaacaaaattataaattttcatagaattttatttgggtcatggaaaca

SEQ ID NO: 153097 - DNA, 569 bp, Homo sapiens
ctcaagggtcagcagctgtcacacagcagaaacaaagatttaaatttattaaagtcatccccagagaggtaagaaggtagcgtctgaaacctatagtaccttacttatgtcttttctgtggtgtgcatcatgttttgccatttaaataaataattattcatttatatgggtttctcactgcctcctagattgcaatacaatttatagagtgagatcgtgtcttactttttgtctatgctttgcagcatatagcagagtggctcattcacagtaactgctcaacaaatatttgttgactattcgattttcttgtttaaaaagttagtgtttgtgaatctaaaaaggttcccctaacccatctagtttggaatcatcaatcattttctatttccttatcttaataaatttggttttccaaatctctgaagggctagtgactttcttgttttttctttccaacaaaaaggatarctaaaatgccactgtgtatcattattcataatttttatatctacaacttaagattattcataggtctctaccagtcccaaactttttaagtaaaggtt

SEQ ID NO: 153098 - DNA, 604 bp, Homo sapiens
taaattttcattgctctttggttgggattgctgggtcatttagaaaacatatgtttaactttataggcaattgcctaaatattttccaaagtgactttaacatattgccttmtcaccaggaacatatgagaattatagttgttctgacccgtgaaataacttcatgtcatcaatctttttcaattttagccattccataggtatacacttgtatctcatcacagtttcatgtacatttgtcccagtgactaactatactgagcatctttccatgcgctcatttatcatctgcatattgtctttggtgaattgtccaaatatttgcccatttaaaaaatgatgttacttattttcttattattgcattttaaaagctctttatatattctaggtacacattctttgtcagatatagatagatagatagatacacacacatatatacatatatgtatatatatacatatatatatatatataaacatgttctcaattctgtggcttgtttttcattcctttatttcaagtgtcttttgcagataagtttttaattttgataaaattaaatttcttatttcaaaacaatatcgtgattttggttttt

SEQ ID NO: 153099 - DNA, 519 bp, Homo sapiens
ttccttaccacgtacttcatataatcattttacatgaaatattcaccattatgataaagagcttaatatattattttcattattatattcctttgaattcaatgaattttattggctaaccatcttttctatgctaactttcccctaaatcaatttttcctgaatctccaatattaccctcgattccagtaagaaattcctcctcattatttcccaataaatttgctagctttttatgcgctgtgccttttctctttttctgcctaaatcacatcaatactttaaaattcagttcatatctactctataagattgcacttgattwaatcatgctttactaatcttttttctctcatagtataatgcatctattcaattgctctcaaacagtttgatatagttagttagatattaatctacttgaggagagaatacttgaattcaattattttatattctccccagaacatgaaacaaagctccataaacattaaattctaaaacagttctattggtagg

SEQ ID NO: 153100 - DNA, 546 bp, Homo sapiens
  misc_feature (1)...(546): n = A,T,C or G
cttgctagaaaagtaccgtctagttctctaattctacttcccacttttttcattagatgcctggtgggccagatcctttatccatccatacttgagacagcctgtagctggtgtgtgaccaactgataatgagatccttatcatratgaagtgattatcactggtgggagctgaaggcatggagatgatcacagcaacagagatgtacttttcaaggtaaactgactagtcattcctgctatagatggtggttttcttcctgctttctgcttcgtagctctcaggagctttcataatctcagcagtccccaagactgccctcccagactttgtttgattctgcnagttccccaatttacctcccatttcttatgaaaatcctcatttgccttaagttacctggaattaatacttgtcactaagagcactaactgttgatactaccttcctactaaaaatatataccctggaaattgaattcatcctacgtatttcttattttataattttttaaaattattaatatcaatctactttatgagacct

SEQ ID NO: 153101 - DNA, 249 bp, Homo sapiens
agataaccaaacatgtggaagtgactctggaactgcataataggcagagattggaacagtttggagrgctcaaaagaagataggaagatatgggaaactttagagtttcccagagacttaatgaatggttttgactaaaaagtccaggctgagttcatctcacatggagatgagaaacttattaggaactggagcaaaggcaattcttgctatgctttggaaaagagaatggcagcattgtgcccctgc

SEQ ID NO: 153102 - DNA, 385 bp, Homo sapiens
aataaaattatttttctgaaagatgaagccaattaaaactcgcagtagtattgtacaataatgtccacaaaggaaatctcataaagtttgacttttatccttttaaaagaattactaatttgttatgaaataggcatgttgcttttgcataagttatttttagttatacaacaaagaagaaaggttatatgtataggccagtactaatgtagatcaaagagaaagctgaagtgtttggctctatcttaaaccttgtctatcaaatagaattgagaacaatggaatggtaaaaacatcatttaagacaaaatcaaaagccaagaattrgatgaaataatcttaatggcacacattgttttctaaatgaattcacattctatatcaa

SEQ ID NO: 153103 - DNA, 561 bp, Homo sapiens
tgcatatattatacatatacatttataatatgattttagaaaaatcaaagatgtaaaaccaatgaaaattgtttaaaatgaggagtaatgttattactaaatagtaaatttggaaatgagcttcctagttgtcagagaaaagaaagtaacattttgacttaacagacttcccattaagaaagcaggagacgtgcatgtttttggggaggaaaaaagggatcactttgtattgatgttaaatttttggaacaaaaagtgatgaattccctttcaaacttgcctaggtaagactgtatacatagttaaagattaagtaattaaccaaggataacctaatttcaaataaggagggaataaagggttatggaaactaacaaattgctcatgagatttaccatagaaggtgcaatgtagatgatcaagaactgaaaggaataacrttatacatttgactctaaccttctctttccaagagcttcctagttccaagaagtactgaggaagcagccaatgtctgaacagatgggattctcctgagtgtgcttgctagttcacctgggc

SEQ ID NO: 153104 - DNA, 594 bp, Homo sapiens
agtgattggtgttttggtgtgggataaatttggctacagaggttagccagcaaagttttctgagaaggtgacatttaacctgagtcttaaaagttcagaaaactctagttaggcaaataactgtattggaggagtccaataaaagggaatggcaggtacaagggcatagacgaaagaagaccagagtggaccccagaatggtgaacaagacaaagaagcaggcaagagtcagttcatgcagggccatggtaaagagttggaattttattctaaagcaatgaaaagtcattggagggttctaggtacaaaagaaacagtctctgatttataaattcagaagggtacccccggctcaaatatgttaagtagatggagaaaggtaaaaagcagaagcaggaaattaattatgaaattattaaagtagtgccaattgggaatgcaaattagcacaactttyagtctgagaactaaaaatagtactaccctttgatccagcaatcccactactgggtatctatacacaggaaaataaatcattatcaaggtacctgcacttgtatgtttatcacagagctattcacaacagcaacatca

SEQ ID NO: 153105 - DNA, 410 bp, Homo sapiens
aagcaagactatcagaaaggggtaaataagtgaagaacgacaaataggagaacttcagaagataaacagcagaatttctgtccaagctcaaattcagtcaaaaaagagcatcagttttgcacaaatgtagcagttcaaagcacttttaaaagagcagcttatgcaaataaataacacaagaaaacctcacaaagatcagtttctaatgtaagaaaataaattccagaagagttagtgttacaaatataaaattaaaaattataaaaatgctagaaaaaatgtagaataatatttytatagttgtaaggctaggaatgccttttttatgctaacacaacaccctgaagccataaagaaaatgagtcacaagtttgactaaacaaaaattttaaatgtttgtgtggccaaag
